United States Patent Application Publication US 2006/0134663 A1 - sequence listing, part 75

SEQ ID NO: 198558 - DNA, 1000 bp, Homo Sapiens
aagaccagcctgaccaacacggtgaaaccccgtctctactaaaaaagcaaaagattagctgggcgtggtggcgcgtgcctgtagtcccagctactcaggaggccagggcaggagaatcacttgaacccagaagacggaggttgcagtgagccaagatcgcgccactgcactccagcctgggcgacagagcgaggctccaccttaaaaagaaaaaaaaaaagttctttatatatttattaagtgaatatgatggagaaagtaatgtatttgcactggtttgcacatatataaaaactgtatacctggaaggatagacaaaaaactagtagcagtgatgatctcttgaagaatggaaactgaaaagataggaaactagggtaagaaagacttttcagtctacctttttatattttgacattggaataatataaacatcttatctgttcaaaaaaattaatagcgcaccctttttaaaaagaccccagctgggcacagtggctcatgcctgtaatcccactgaggcgggtggatcatttgaggtcaggagttcgagattagcccggccaacatggtgaaactccatcactactaaaaatacaaaaattagccaggtgtggtggcacatgcctgtagtcccagctactcaggagctgaggcaggagaattgcttgaacccaggaggtggaggctaaaatgagcccatatggtgccactgcactccagcctgggtgacagagagagattctatttcaaaaaagtaaaaataaataagacccttacccagtaaattaaatcaaagctgaaagccttcatttgaatctaaataatataattctaactcagaaacccaatcaacaggttcatgaaatgtgtcaagaagataaatgctaacctactacacctgcagataatgatggaaaacaagaaaatgagaggttgcaaataaaaacattcttctcatctttaaagggttttaattataagaaagtcaccaggaatt

SEQ ID NO: 198559 - DNA, 1000 bp, Homo Sapiens
ttcagaaacttagtaatttccttcactgtcacagttttataatttacaaagctgatttcatgtacaatttatagcctatcacacctcggatattgataattattttccctgtgattaagaggctatgatagtgggctatcaagttgagacagtctttttatgttaaaagagacaagaagggcatgtggaaagagagctatgagcctcaaccttacatttctcagtttgggcataaggtgttccctgatggctgagaacaacacagttcagaaagggcagtcacccagacacatcccctgaccattctcatcagaattactgggatgagaggccccaaaatgtgagcatagggtacaagggagaaagaaatggcccagatctcttcctccagcagcaaagcctgcctaaagcttgcttgatatcatgcaaagaacacaggcctttgactcaatagtttgaattgtgctgtttacctcaggcaaatcattttacttttctagacaatcctcctgtttctctaatgtaaaaagtagcaaagtaatattaacttgcctcacagatttagttttttaggggccaatttaagtgatctatgtgatgaattttagtaaactgttagatactatataaagttagctatcattacactagaagcataaggaatttaacatctctaaataatcttaattaatattctccaaactgaggcctactgttcagctaatttacatggaaagagtataaaaaccagtagcttatctggaaaaaccccatagcatttggaacaaattacagtttaaaaaatggagaaaccaacgaattacaatgaatcctaagcttacgtctttaaacaaagaatgctatttaagagtaaagattggccagattatacagggtagaggggacatttagtagtcacaaggtgaggatcaaaggacttccaatatcacaaaactttatagaaagaatttttgctttccttcatactggcattgaattc

SEQ ID NO: 198560 - DNA, 1000 bp, Homo Sapiens
tacacattgaagatcaggtgttctcaaagacaatgatcaattaaccccaggagtttgcagatatcagcacatatttactgagtgttgaatagttaagatagggggctaattaataagggtgccttattctcacatatttgcaattgtatatctcatcttcatttagaatctctttgggaaaaaaaattcaccatgtccatatgtagaatgttgaaagctttgggtcatatttttacttagcgaaaagaatatagaacattcttatccagtcacctgtcataggattaagaaaacatgctccaccctgctgtggctcaatttcagcagtattgattttattactcatactttataaatgagaatgctattcttaaagaatgcaaacatttgctttgttgtgctattgtctcagccctgcataaacctctcactcttaatatatgcccatcgattattattcttgtcattatttcacaacaggaggcattttaatgatgatttacagggttacatattgttggaccataaacttctgtttgcaattaaaaaaaagttaaatgcaaacttcaacttgaaaataactcttaggtttagcatgatgataaaatgcaaagggtgctgcctgcccttccagaggccatcggagacctgcacgtcttcctggcagacggggattgttgtctctgctccccagggctgaccctgactttggagggctttgccttatctgttgtctggacggtgccatcctcagcgctcacaggtgatcctttctgaacaagctgcctggtgcagctcgctggcgcctctggtggctgcacctgggaggccagtcctggtaagccgtggggacatggtttttcccaattcagctaacagaggctcttcatgttatggtcttgtctcctctgatggcgctgcacgagtccttgcactcagaatgacacaagaaaacccacagggaaatgagctatggctccagaccaacctgcttgaattc

SEQ ID NO: 198561 - DNA, 1000 bp, Homo Sapiens
ttaaattgtttatcttcctctctctgtcttttttttttttcaagcagtgctaaaggggccattcttcaaagtaagtctttatgtagttccttaactatttcattataaactattgataaaagttgaatgatgagtcaaagaaattgtgtcatctaggtatatgtggccatcatttatggaggaccccctaggtgccaggcactttcatgagttatttcatttaagcttttaggattcacagtagtcttagacatttgggagttttaggtcacatagcttctgaatgccggaattggaactgaaataagatcttttatattattgtgaagaaagttccatttcagcaacttttcacaggtgcttcaggaattgcagaaggagttgacttatacaacctttaaaaatattgttttgaatgatttaaacatgaataaaacaatcagcgtaaactctgataatggataggagcacagtgaaggcaagctttattattattattaagatgccaggctaagttgattttgagagagcctcaatataaagcatttcatttcctcctcccccatgcatatatttacacttcttataaaatatgtcattgactgggaagattgcttttatcttaaatcaggcatgaatccacccactcaagaaaaatcatctcagcaagttcgctgctgctgcacctgtgtccttggctcatggaaggtcagggatagttcaggcgtattggcttgagagcatgtcaggtgtctaatgaaagagaaaacctaattttcctcttttctgtaagttttgagtacttttccccgatttccagtatttattataagaaaggagttgagattagatgttatttatacaaatttacatgatgaaataaatatccaagtatctggaaagattcctgagatttcaaggtaaacttttaaaagcaatttccagctaatgctctgtgttgacagataatgccttgtgtatgatatggtaagtggaattc

SEQ ID NO: 198562 - DNA, 1000 bp, Homo Sapiens
gcccatgcaccaccccagccctggaggccatgcctttcttcagccccagcacctcttcctgtctgtactacatgcacctgccccatccacactgcccagtggggcttgtaaccgtgcccagcccagctcccgcgttgagctgtgtgtaccaggagggcagacccattggcattgggtgccatgcctcctgcagcaagcccagccctttgctgttagtgtttaacaagaatcttgatgggggccgagcgcggtggctcacacctgtaacgccagcactttgggaggccgaggtgggcagatcacttgaggccaggagttcgagaccagcctggccaacatggtgaaaccccatctctactaaaaatacaaaaattagccaggcttggtgacaggcacctgtaatcccagctacttgggaggctgaggcaggagaattgcttgaacccaggaggtagaggttgcagtgaaccaagatcgtgccagcacactccagcctgggaaacagagcaacactctgtctcaaaaagaaaaaaaaagaacagctgagttcatccctaacagcctcttcccctgcaggaatgttggatgcctcttaaaaaaaaaaaatgaatattggtggacttaatgcagccatcttctttctgctggaaagctggtctttgtggaaacctctcacatgtggttttgatggtactttgtgcacacttactctgtgctccaaaaggtgcccgggctccagctgcctgacctggaggagctgccttgtggagccatctgtacgccctaggccctgacaccagggcagcccctcccttttggaggtcagagccaggcaggccttcctatgacctcagggggcccatgggctacccatgcacgagggtcccttccactgcgggaactgagactcttgggggggtgacaagactttcggagatgcttgaggtcagaggttacgcagagtgtggaagtcagaatgcatcacccaggtctggaattc

SEQ ID NO: 198563 - DNA, 1000 bp, Homo Sapiens
aaatgacttgtgcaaaatacgtgctgataaacgcagcagggcgggggttcacgcctaggtgtgtcaggcttcaaagtccgcgctctgggccactgtgaacattcccgtttctgacgggctgtattctgggtggggtatcctctgtcaacagagacatctgtcagaccattcctgcccttttacttccatcagtccacattctggcatcttccgtgtcatttttcctcttcacttcttgtgctcctcggcagatctatgaccatcccagcctctttcttttcttcctgatctttgggcaattcgcctccctcctgcttgcttcaaacattcactcttgtgcagcagttcttttcttatttatttattttttgagatagagtctcactctgtcgcccagcctggagtgcagtggcgctatatcggctcactgccacctccgcttcccaggttcaagcgattctcttgcctcagccttctgagtagctgggattataggcacctgccaccacacccggctaatttttgtatttttagtagagatggggtttcgccatgttggccaggctggtcttgaactcctgacctcaagccatctgcccgccttggcctcccaaagtgctgggattacaggtgtgagccaccgtgcatggcccatgcagcagttcttaaactggcacccacaagaggtctggattgaatccgagaggtctgtgaacatggacatggaaaatattacattctatcgtgaatatagagaacagaagtggggcctgtaactttgtcacaaatagaaagtcacagctcttgctatatcccattactgttactaggaatatctcacgatgtcatctatgtgcatcactactttgaaattaccagagttattaaacctgtcactagacctgttatttagtcgttaataaaaagcctatatattatcatattacaaatttggtttttaaaaatattgtgatagcagtctttcaaaactaaagaattc

SEQ ID NO: 198564 - DNA, 1000 bp, Homo Sapiens
ttcaactgttttctgcactccaattatgtctctcctcctgggattttagaagagacgaggatgctgacacctgcgcgtcccccacacccctcagagctcttaagagggtgttccgtgcttcctccctcgctgtctgcggtcacctgtgtctcactcgtgctgtggccggtcccctcagccacccaacaagtcctctgcacctgacaattttccttgccctttgtctttggtggaggcatcttcaggatcccctcacttcctggcctctcgctgtgtctctatggtgcccgtagctcctggggagcgtggcatgggctgtgcacctcttcgccccagctgccagttcgttttcttcctgtggattctgccgcagccaggacgccttgctcggtccgttttctttccgtggattccgccggggccaggacgccttgctcggtctgttttcttccatggcagctctccgaagtctggcttccctgcggtccaggttcttctggggtcctgagcccccctggccggcagcccacaggggaggacaggctcaagtgcaggccttagttgctcctgcagcaggtttggggaggtgggtggtgccctttgtcctaacccatagcctacctggcacctcctgtgcctcctgccatcccgacgcctcaggacaccagcttagccgctagggagtataggccccgccctgaccgagaggcgccgtcagggtcggggtgagccccacggagcagcctgagagccaagcgcaggctgtggtgcaggaggaggggagaggcaggtcagggcccagcagtgttggagaatctccttgtcctggtccggggaccctgggtgcacgctgggctgcggaggccaggggctggtggcctcgtccctgtcatctctgtgggacgttggtgagacgcagcgccatggccttgtcttgctggcggcggggcggaccctcttcgacgggcactccgggacggcatcttggtccttggaattc

SEQ ID NO: 198565 - DNA, 1000 bp, Homo Sapiens
atgtaatgtgccatcatctttcactcactggaacacggaaacatggccaacttacctgtaagggagactagaaaatgtagttttttaaattgtagtaaaatacaactaagataaaatttaaaatcaactatttttcagtgtacagttcagtggcagtaagtagattcacattgttgtgcaagaatcaccaccattaatctccagaactttttgtcttccttaactgaaactctgaacccattaacaataactctttatatcccctttttccttaacctctggcaaccaccattctcctttttgcctctgtgaatttgatagtataggtaccttatataaatggaatcatacagtatttgtcttcttgtgcctggcttactccacttagcataatattctcaaggttcatccatgttgtagcatgttcagaatttccctatttttcaaagctgaatcatattccatttgatgtatataccacattttgtttatccagtcatctgttgaaggacaattcagttgcttgcttcttttggctcttatgaataacgtggcaatgaatatgagtatacacatatctcaagtcactgctttcctttcttttgggcatatgcccagaagtgaaactggtagatcaaatagtaagtctacttttaatttttttgagaaaccaccatactgttttccacagaagctgtatcatttaaatttgcaccaacagtgcacaaatgttccagttgctccacattcttgctaacatttgttattttctagtttttgttttgttttgtttttgacagtaatcatcctaatggatgtgaggtggtattttcattacggttttaattcacattttcctaatgattggtgatgttgagcatcgtttcatgtgctaattggctaactggcatatcttctttgaagaaatgtccattcaaattggctgcctactttaaaaattcagttatttgtagttgttgttgttgagttgtaggaattc

SEQ ID NO: 198566 - DNA, 1000 bp, Homo Sapiens
ggtctatgttctgcagtgcacgtattgtcttgataaacatcttaacagaaagcagggtttgagagcagagaactggtctgacctcaaatttaccagggcggggtttttccccaccctgctaagcctgagggtactgcaggagaccagggcggatttcagtccttatctctatggcataagacagacactcccagagcagccgtttatagacctcccccaaggaatgcatttctttcccagagtattaatccttgctaggaaaagaatttagcgatatcttccctatttgcacatccatttataggctctctgcaagaagaaaaatatggctctattttgcccaaccctgcaggcagtcagaccttatggttgtcttccctagttccctgaaaattgctgttattctgttctttttcaaggtgcaccgatttcatattgttcaaacacacgtgctttacagtcaatttgtacagttaacacaatagtgggcctgaggtgacgtacatcctcagcttatgaagataacaggattaagagattaaagtaaagacaggcataagaaattacagaactgttaatttggggaactgataaatgtccatattaaaatgaaatcttcacaatttatgttcagagattgaagtaaagacaggcttaagaaattataagagtattatttgggaactgataaatgtccatattaaaatgaaatcttcacaatttatgttcctctgccgtggctccagctggtccctgtgttcagggtccctgacttcccgcaacagttgttactttgctttaaacaatttcttcaagaggaattttttaatgagggggaaatatcatacatttaaccacatatttaccatttttggtgctctctattcctttgtgtagatcagaatgcccatttcagaagtctttctttaatcctgaactacttttttgtggtgaagatctgctggtgacaaacttggttagcttttgtttgcctaaaaat

SEQ ID NO: 198567 - DNA, 1000 bp, Homo Sapiens
tttgtctaaaaaacaaacaaacaaacaaaacaaacaaaccaaaaacgagttacccaaatgagacaatgagaacctgaactaggtggtgacaaaatagagtgaacaaacaggaaagacaaggtggaattatgagctttaagacttgaaaactggctgaatataggaggtaagagaagaaaatgacagggcaggcacaagtctggataataagaatgctggtggcaagcaggcaaggtaggagaaaatgcttgtgggcggctgggcaggtgacacatgaatgaatctggttctgcacatgttgagttttgaagtattgatggatagttggtggaggtgtcacttaagtagttggggattttcaaaatgtggtagctaaacgagcagtattgacatcacctggaagtggtttataaagccacttgactttctcctcccaatccctggcctgctgaaattctgtgatggggcccagagatgcgtggttttacaagcactacaggtgatcctgatgtcactagatttcgagaaccactagcctagagtagtggtcctcaagctttaccatgcatcagaatcacctggagagcttgttaaaggcagttttctgagtttaacccccagagttcctgatttaccaggttggggtgggggcacatgaattgtatttctcaaaagccaactcataaagaacaagtttagataaagaataaataacaaggtggtgccagtgcaccactgtccagggacaatatattgagaaccattggtctagcaatcaaaggcaaaagagatctggtctggaaacatagatttgggggtcatctatatgagtttctcgcccagacacctatcgtagcctcctaccaggtccttcggcttccataattccccaatctattttgcatgcagaaatcagagaaatcttttaggtttataaatcctgttggttcactagctgcacacaatcctccaatggcttcccattgctcttatttgaatt

SEQ ID NO: 198568 - DNA, 1000 bp, Homo Sapiens
gaacccatcagccgccccagcccttcccctatggacggtgcaggctaagtgagctggctaggagttcgggtgcctggcttctctccctggcactcagacctgcacccatcccccacatctcactcccagctggagcctgatggggtaacagcagcacccacttcccaattttccacattctttcctgcccactcagcctgacagccttgaccagggtcagaattccacagcaaacatctcagtcccttcccacaggaacactgaggtccctggcacaccccacgccctgccctccaagcactggactcaggaacagcaacgggaggaagttggatgaagaaagcctttgcccccacctctacacccccgccccagccctgtcctgggtgtgagcagacacgatgatgctgggggcacagcccttcccggcaccaaatcactctacaccctcacaccacaggaacttgagcccaaaggccaaacggaaggtcatcagccttcggccctgatccctcggctctgaccgcttggatttttttccacggatgtttattccagctgaccctctaagcccatcccccctcaggttcaggccaggaaagctgagcccagctggctgaggagctgctgccggcatctggaagactgctccccacagcaagaaggtaggcagggccccggggaagcaggatgggaagggggcagtggcacaggggtttgggggtccatccctgattcgcaaatgtatgaagagaggccgcgttttgcaccagcatctcaaagagtgatgagaaagcagggaagggaagaggacagagtgagaggggcccccaagtgccagaagggggcctgaacttggaatcagggcccagggtctgcttccagctctgtcattcatgtgagcatgtcacttactgttctcccgcgtgtaaaagaaaggggttcccagtgatctggagaccctctctcccagctgggaaaggagaggagagtatggggc

SEQ ID NO: 198569 - DNA, 1000 bp, Homo Sapiens
gtggagccctgcagaacgataacctgatggtttatctgcagaataaataaaggaagaatccaagttcatcagatacttggaatggcttcagccaattcattttcagatacctctccagggcctttccctttccccccgtcctagctctgactgctccgggctcctcctctccagccctgctgtccttgctcctcctgtttcatttgttcctatctcttcatctctgcatcagtctgtaccctgaatgtgtgtcccatccctcccagacagggaactcttctctaaatcttttcccagcccccagcacaggggtgtaagaactaggagctgacacgagataaagcagacggtaaagcagaagtgtctgatagcttgtcagggcaaccctggccttcagcagtctcagcttctggaggagttgtgtgatctcagctaagactgactccactgcctagaaccatcccagccctgtcatgctcacttcttcttgtagccctccagcgcctcctgcgtgcagttgagctctaaggccagcctgccactgtcggcctccacgcactcagcctcccgccgcagagtcgccatgtagccctgcaacaggggctccaggttgctctcgcagcactcgcggttctggtagaactgcagcttggtctccagcagtttgttctgctgctccaggaagcgcacctgccattcaggaaggaggaaagagactgaggggaaagcctgagagcaggttttgcctggtcccccagagctctttctgccattgaggatggcccccgccctgcagcagcctgtgaccttccccaggaggccaaattattggcaaagtctgaaagtgcaggtcacaagtagtccccaagtaacttctctccacccaccccccttcccagaaagagcacactatttataaacgttcgtttattctacacagaatgaaattaacatcctgcagaaatatttcatactatgcatactaggcaaataatgatcc

SEQ ID NO: 198570 - DNA, 1000 bp, Homo Sapiens
gattcatgcatgcaaggaaatttgacatagaacagaaatggcattgcagatgaatggagaaagatactaataaaattgattttccatagaaaaattcaaaatcaattccaacttcacacacaccatgcacaaaattagcttggtttaaatgtgaaagcaaattttaaaaacttttagaagaaaagccaggagaatatctttatggcctcagggtagggaaggatttctataaagaaaatcacaaaagaaggttggataaatttgaattcattaaaattaataatttcatttttcaaagataccataaaagcagtgaaatgacaacttacaaattgtgaggagatatctgaaacacaaccaacaaaggattagtatttaacacatacacacgacaactcacatacatcaataataaaacaatgaagaatctaacagaaaaatgggctaaagacatgaataggcatttcacagaatgggaaatatgagtggccaacaaatattttaaaaattctcagccttacaattagtaatcaggaaaatgcaaactaaaaccaaaagatttcacataatttcacatccattaggatggcaacaatttaaaagtttgacaataccatgtattgatgaagatatgaagcaagggaactcttatacattgcttcagaacataaattggtacaacctttttggaagacagttgggattacctaggaaaactgagtaagtatacaccctctgacccagcatcacctcctggatgtgtgtatataataaagaaatttgaaaatgtatagtagggcacatgtacaagaatattcagaacagcattattcagaacagcaaaaaatctagaaaggctctaaatattcattaatggtaggatgactaaataatgaaataatattctaaagtgaaaacgaataaactaaatctacatgcaatattagggattactattagaaatgcaattttgaatcaaaaaaggaattgtaaatgaatt

SEQ ID NO: 198571 - DNA, 1000 bp, Homo Sapiens
gtgggggcaagggcaagagggcaaaggtgggaattgccatgtttgggtggacctggtttctaatggcttgcatttgcatatcaaagtttgccggcctggctctaagagctggggctttccttttctggagctgctttaaaagagacaaaaactttccaaggaccccttttcctctctatctgcctaaaataatttcttaataactcctataacattattacaggtttcctaaaatgccaacatgaaattagacatgcaagggatttattagtggaaaacagcggtgaggggaagtgaggaggctgggaggggaggttgggagaactatcaggccacagtgcaggtctgaccttttgtgaaggaaagcaggctaaagaagaggtttagactgctatgaaagtcaaagaaagttcaacaggccagtgaggagtcaccctgtcagaagtgatctgcgtcttccccgaaatgacctaccatagcatttctgccactcccagtcactgcttggcagcacccatgagaagcatagactcaatgtgtatgcagagctggatgcaaggagcacagcagctgaagccatcagttttcaccccacagctgaagatctgtcagtgaatatgctcaaggttgccactataattttgggtcacagggtagtgcttatactgatgcaaacaagatccaaagggatgcctggttcaaaaggtgggaggctttctgcaagtgaaagatgaggaaaaactttaaaaagtttattttaggctcttgatcctcattgttatgatgcatccttgtaaatttgtcccaagagaactttattaaaattcatttatttaatgagattaaccacaggaaaaaaaggaaatgaatattaaagtgacaattacagaagtaaaagacctaattatttaccaggggcaaattccatacagtatttatattacataatatatttgtatcaagtttaattcacttaattcatcattaaaattgtttacca

SEQ ID NO: 198572 - DNA, 1000 bp, Homo Sapiens
caacttaattctctatcaaagtaagtaactttatctctatcagagaaaagttaaactgaagttcagaaaggttatctaaattaatgtaagttgtgattgcaaagtaaggatttaagcttatgtcctccaaacttgaagtcctgtttttcaattctatagctgtggtgtgctggtaaaccagctcgtaaaattaaaaaaaaaaaaaaaattagtgctttgccacatctgctgacttttgtgatgtaagtactcccactgtggctaaatttaagctacgaatgatttaaaaagcggctacaaaattgtcaaatatttcattattgcctgtcctgagtcagtctgagtgactgcagcaccccagtgccactctgcttttctaatatacagaaaaattgtgagtgaaggggagtaggtggaagaacattgtagaattatggagagtcacccttttctgctcctgaattttattacatagtattttcaacgagggagatctatctgaacattcatccaactatgattattgaaggtaataaaaatacatatctataattattttctattggaactttgttgcatggtacaacagattctaaaagaaaaaatctagtgtactatcattttcaatgaaaattcaatttgattctcttttgtgctctctcaacaagctgatgccaggctggcgtccaaccacaggtaaagaataatgctgaatgatcaagtaaaacataggaacaaccacatgcatatcttgatattacatgtctccaatgatgagactttgtcctcagaacagaggagataactttcgactcaactgaccatgctatctaataactatcataaagaacagcataccattatacaatgttaaaactattggttttgtttttacagatgttctccaaattataattgcaaataatcattattaaaaattgcacttaacaggccaatttgttcaattacatgcatgcatattttggtgttaactgaattc

SEQ ID NO: 198573 - DNA, 1000 bp, Homo Sapiens
tcatgttaatctatgaacaaatatataaggctctccaagtcaaggatcaaagttcctggggaacctctgaacaaagtgaaggacagaagaaccctgagtatgtaaaggaggaattgggtaggatggcttctggcatgagtggagaggcaacgtagaaaagtcagcttccattctggaaacagatatacaccttcatgtcattgcactaggaggatatcaagggcatttatgagtcgcctttattctccatacttaactctcttatgcccacccatttccattccttctcacagctggcatgctaatgtaagcccccatcaactgtcccctggactatcactggggccttgagctcatctccctgtgtccccttttgctccttctgacccatcttcttcacatcacaggaacaatctctcaaaaccaacaatgggccttacctctttttcctgcttgaaatcctctgatggtttcatatgtttcttgcaattaaaaaaaatgaaataagtgggtgggcgtggtggttcatgcctgtgatcctagcactttgggaggccgaggcaggcagatcacaaggtcaggagatcgagaccatcttggctaacatggtgaaaccctgtctctactaaaaaaatacaaaaaattagtcgggcgtggtggcgggtacctgtggtcccagctacttgggaggctgaggcaggagaatggtgtgaacccgagaggcggagcttgcagtgagcctagatagagccactgcactccagcctgggccacagagggagactctgtctcaaaaaaaaagaaaaaaaaaagaaaaagagaaatctatgacatcacttgccaggctcccatgttcttacctctgcctgccttgccagctctcctcctgctgtgccttctctcagcccatctctgcacttcttcccagtccttcaacacctgtgcttctctctgcccccaggccttccagccagggggtcccaggcaccagaagtgaatt

SEQ ID NO: 198574 - DNA, 1000 bp, Homo Sapiens
ggaaattaaacaacaaaatcataaataacaaatgaattaaaaaagaagtcatgagagaaattagaaaataccttgagatgaatgaaaatgaaaacacaacatatcaaaagttatgagatgcagcaaaagccatgcttagagggaaatttatagctgcaaatgcctaccttaaaaaaagaagaaaggcatcaaatcagtaaactaaactttcacattaaggaactagaaaaagaagcacaacctaaactgaagcaagcaaaaggaaggaaataattaagattagaaataaatgaaatagaggaatttttttgtttgtttgctgttttttgttttttttttggagatggagtctcactttgtcaaccaggctggagtgcagtggtgcaatctcagatcactgcaacctccacctcccaggttcaagcaattctcctgcttcagcctcctgaatagctgcaactacaggcgcatgctgccacgcccagctaatttttttgtattttagtagagatagggtttcaccgttttgcccaggctggtctcgaactcctcagctcaggcaatctgcctgcctcggcctcccaaagtgccaggattacaggcttgagctacctcgcctggccgaaatagaagattttttaaaaagaaaactcgatagaaccaaaattgtttttttgaaaagatcattaaaattgacaatcttttagcttaactgaccaagaaagagattcaaattactaaaatcaagaataaaaggggggacatcaatactgacctcacagaaataaatggaattataaaggaatattatgaacaatgatatgccaaaaaactagataatttagatgacatggacaggtttctaggaagacacaaactattgaaactaactcaagcaaaaataaacaatatacatggactcataacaagagattgagctagtactttaaaacgtcccacaaagaaaagccgaggcttagatggcttcacaggtgaattc

SEQ ID NO: 198575 - DNA, 1000 bp, Homo Sapiens
attaatgaaacacacagatggagcctcaacattacacgttctccatctttactaaggacaaaagttttccccaatagaaatcttgagtagccgcatctttccatgttcaacagccacaaagggaacatttttaatattgcagatcataacttattgctgagaatcctgcatggcatataagaagctatgacacagagaatgcagagaaagctctgggatatagaagaaaaattattttttcagagacccttgactatcgtaagaattttaagtagttaaaccaaacccagggagaaaaaacacaagtagagaagtaaaggtttgtgagtgctacatgcatggcagtccaggaggcagagtgaacacagctcttcatctgagacatgtttacctgaagagaagccttttttttttttttcacctcctcctctggaattccttgtcagatgagattctctggccaaattacccctgcatcttgagactatgcctttaaatgtgtcagcaccacatgtttacctgctagcatgacatcaactggcagaaaaagacagaaaaagtccacccatttctgttttttacaacaaaaagattcaagaacaatgagatgctccatgaagataaaaatataagtttctcctttcatgtcctctggtgccctttctgccacagacaccagcaatttctgctacagtaatggaaatatgtgccacactgacctgcccctaccaaaaccaaacagaacaggtcctgtgcgcaccacttagtgcaaaggtggaacttcttaactctcatgaaagtattttgagaccctcatacctgattctggcctccccttagagtcacgtgaagcccttcattaaaacaacatggatacttccacccagaacaataaacagaaccggtggggaaggcacaagagatttctgcaaattggccatgtgatcctaatgagaagcctgggctgataaccactaagctaagcattgcctctcaagct

SEQ ID NO: 198576 - DNA, 1000 bp, Homo Sapiens
gtagattacagtgtgaccctggatgtaatgggttgaatagtgtcaaaattcatgtccaacctgactgttaggattcgaccttacttagaaacagggtctctgtagatataattagttacagatctcaaggtgaaatcattctggatttagcttgtaatcttagtgctttgggagaccactgaggaaggaggatcacttgaggccaggagttcaaggctgatctatcatcgcaccactgcactccagcttggatacagcactgcactccagcttggatgacagagcaagaccctgtctcaaaaaaaaaaaaaaaaaaagagaaaaaaaaaaaaaaaacaggggaggacacagagacacacatcttcccatgtgaagactaaggcagagattgaagtgatgcagccacaagccaaggaatgctgggaggcaggaaaagatccttccctagagcctctggagggaatgcagccctttcagataccctgattttggacctccagctccagaacttcaagagaataaatttgttgtaagccaccttgtttgtattgctttgttacagcagccactgaaaatgaatacactggccgagtgagaaagttttgatgtttgtcccctccacatttcatgttgaaatgtgatccccaatattagatatgggggctgggcattgtggctcacacctgtaatcccaacaatttgggaggccaagacaggtggattgcttgagttcaggagttcgagaccagcctggacaacatagtgggaccccatctctaaaaaaaagatccaaaagtagccacatgtggtggcacatgtctgtagtcccagctacttggaaggctgaggtaagatgattgcttgagcccaggaggttgaggttgcagtgaactgtggtcgcaccattgcactctagcctgggagacagagcaagaccctgtctccaaaaaaaaaaaaaaaaaaatatatatatatatatatatatatatgtgtgtgtgtg

SEQ ID NO: 198577 - DNA, 1000 bp, Homo Sapiens
cacatgcacacacaccatgctagaactataaactcattattttgaagcttgattctgaacaccagttttaagtgctatgtattttggtattaaatagtgtcgctaatgtcttttaagcagttaagcagtgaaataagacagattagacactgtcaccacgttttctgtgtctgtttttcttcaaaagaacactgcacttcactttgctgcaagggaaggccacgccaaagccgttgcgcttcttctgagccacaatgctgacatagtcctgaacaagcagcaggcctcctttttgcaccttgcacttcacaataagaggaaggaggttgttcttacgatcatcaggagcaaaaggtacactgtcttcctgtccactgtcatttagtgttctctggtgttgggatgatttgaagtctgagacaaaataagagaaaagaaatgattttcagccattaatcaaaatttaaaatatcagttgtttacatcaattttttaaaggttttttattttttatttttatttatttatttttagaaaaggtctagctctgtcgcacaggctggagtgcagtggtgtgatctctgttcactgcaacctccgcctcccgggcttcagcaattctcatgcctcagcctcctgagtagctgggactataggcatgagccagcatgcccagctaatttttgtatttttcattgagacgtggtttcaccttgttagccaagctggtctcaaactcctgggctcaagtgattcgcccacctcggcctcccaaagtattggcattacagacatgagccactgtgcctggccatttttatttttaatttgtgtgggtaaatagtaggtgtgtatatgtatcaggtacatgagatgctttgatacagccatgcaatgcatgataatcacatcatggagcatttatcatttgtgttacaaacaatccaattatactccttcagttatttctaaatgtctacctaaatttataaatgaattc

SEQ ID NO: 198578 - DNA, 1000 bp, Homo Sapiens
agtctgtgctgatcaaactggctttaaactatggtaccatttatgggatccacctttaaggaggacatgaacaacctatagcccgtcgtgaggaaaatggcctgaaggaagagtgcatgctcgaactgaagaagagaacatctaaagggacagtacagtgtccttaagtgtttgaaggatttccatgtggaagaaagcaactgggcttgctctgtgatatgacaggggatagggcaaggatcagtgaaggtgcagggccacaggtttcagcctgacctcggtcagcactttgtaagcaccagtaaactgaatgtggaatgaactgcctgtgcaggtggtatgcttcatcttcctaaatttgcttaaaccatgcacgtttgtaccttggcacctgtggtaaagagagaaatcaaggccgggcacggtggctcatgcctgtaatcccagctctttgggaggccaaagcggacagatcactaggtcaggagatcgagaccatcctggctaacacggcgaaaccccgtctttagtaaaaatacaaaaaaaattagccaggcgtggtggcaggtgcctgtagtcccagctactccaaggcaggagaatggcgtgaacccagaagatggagcttgcagtgagccgagatcgcgccaatgcagtccagcctgggcaacagagcaagattctgtctcaaaaaaaaaaaaaaagagagagagagagaaatcaagaattggctaagatactgaattatgtattatccatgggcccttccaaccctgtgacactgggatttcctttccctttcctaactcaaagttagcaaaatgttcattctttctcaaaaaaggtggaaagcagttcagtttgagggcagacaataaaaattaacccagaaaaataaagagcttgtcagcccagtgtgtttgtttgttggttttgctttaaaaaagccattagctgagtttcattcttaactttaatcagattctctgattaagaattc

SEQ ID NO: 198579 - DNA, 1000 bp, Homo Sapiens
ctagaaacatctttagtcatcttgctttttttcctggataaggatacagactacttaaaatttgcctttattcactctgtaatctagaaatctatgagagtgaattcaacatgtaaagaaacttcagttagaaaatgggacgtattgtcctgaaatcttttgaccatcttgaacacatctgcaactttattcccattaaagagaagtaaaagtgtcaagaaaatctgaaatcaaaaggaccttattaaatttgagagtttcattagatgttaattctgcatccatatgaagatgatttgcatttattttgaaattctttggactcaatcaacaagcaagagaggatggtatgaaataaacatctttggttgtgatttaattacagggaatcttgctgttgaggcaaagaaatttgaaggttgactcttcccaatttatttaattttgctcagagcatatgctgaacttaccgaaatacattttttattaatcagatgtgtatttatatctttcagaaaatggatgtgaattaaatatagcagcaaaagtcaatacttctagaattcctgtttttaactgaacttacatgtattagcttaaagctgcaaaatattgcagctatttacattggatattattaaatttaatttgatgttttactttgtttttgggaaatggaaagtatttttccatttctatttccattttccaaaatattttttctattttcttgtcaaccacatttgctttaggattttagagtatttgttatttgtcaaatgctggatatcagaaaatgctactttacatttaagacatagggattattttgctgcttgctattttacagatattgattagcaatgtaacttaatatttcttttttcacagtcccaatgaattttttaacattaatttttcaataagttattgtggtccaggtgatatttggttacattagtaaatgtacttgaacacgcatgtttatagcagcagaatt

SEQ ID NO: 198580 - DNA, 1000 bp, Homo Sapiens
gctttgtggaacagacacatatacagtcacgtgggatacaggtatgttttgagaaatgcacagttaggcaatttcatcattgttgtgtgaacttcatagagtgtatttgcacaaacctaggtgttgtagcctgctacatacctaagctatagggtatagcctattgctccaaggctacaaacctttagagaatattattgtactgaatattgtaagcagtggaaacacaaaggtaagtaagtatttgtgtatctaaagatagaaaaggtacatttaaaacacatcattataatcttacaggaccaccatagaacatgtggttcatccttgaccaaaacattcttgtatttccacttcctccctaactatgaatattttcatgctgttcaatatggtacaatggcaaaataagtttatatagtatagatggctattcaagatatagttatttaaataaaaagtgggtttttttcctaaaaacaaaacaaaagaaaatctccttttgcttttctaactaccctttatgtccattttgttgttgtcccttgcagaatttacagtattagacaaaacacacagtggaagatcagaatttaattagatttgtttgttgttgaaacagctttcaaattctttcatcttatagggagtgaatccctagattactcacagacacatgaaaataaaaaactacagaagaatgttcacattgcatttcagttcttcatcatgtaaagcacttgggcctttctaaaagatgcaaatcactctttattattttgatgagctaacaagatgaattcatctctagaacactataaaaactaaattgtgaaaaatggcgccaaccatataacctgtccttgatcatacctattatttggtaactctgtggggaaactagaatcttttagaagtattatttgtgtcctaactatttaagtggatgatttaccctcctctaggaaacttaatattgagagtaggctgagaggtgatc

SEQ ID NO: 198581 - DNA, 1000 bp, Homo Sapiens
caaaacaaatttgaaaaagaataagcttgatatattaatagtagataaagatctgttataaatctataatgataaagacaatgtaagagtaatgtgaatacaaacaagtaggctgatggaacagaatagaatcaagaagcaaatgaggtatttgtaggcactgtcatgacaaaagtgttgctgcacagcagtgagaaaaggacggccatttaaataaatcgaaattgatcaaatggatatacataaggaaaaaaataaaactcagcgccttacttcatgtcatacatacaaatctattccaggtagattatagttgtaagtatgaaaggtaaaatgaacaataaaatttctagaaaatgaaatacaggaaaaacacctatgtcttaaataagacttgaaaagcagtaatcaaaaagaaaactattgataagaaggcacatctttttatcagaagtcaccactgtgatggtaaaaggaaaatttaagtcagaagttggagaagattgtttataatacatataagtcagtaaaggacttggatccaaaataaagtatgaaaaactcctacaaattaacaagaaagagaaaataaaatttgcaaaagacttgaataagcatgttataaaagaggaccttccaatggccaaaaaattattaaaaggtgatcaacctcattcaacctcattaacaactttgacatgaaaattaaatgataatgagatatcactacatgacaatcagaatggctagaatttaaaatactgaaaatatcatgttctggtgaagacatggaaactctagaacaatcacacactgcaagtgagtgtgtaaattggtgaataaccttggaaaactgtttgacatactctgtaatgtaaccattataccttagttatatatgctcaacagcactatatgtgtatggacaccaaaaagacatgtattattaatgctgcaactgcataagagtcaaaaaattagaaacaatcaaaaaagaatt

SEQ ID NO: 198582 - DNA, 1000 bp, Homo Sapiens
aagtgtttggggtctttatttagaaatttgtttttgtgtgaccagaaatatgccaccaaaacttagctattgtttatatcaattagcctacggtaaaataattttcactctacatcgttttgcttaaagtcgcaatttccaggaacatatcaatgatattaagtgaggacttactgtatatagagaggagagtggagagcatgaagctttggagtaaaggtagggaaattgggctttatcataatggatatttatattgatgcaggatggaatttaggttagagaacaggagagggacaaaggagctagtaagaggtaacagccatggaccagggaggtgaggctggatggaaaagcaaatgaaggctggaggaagctcataatttgaaacgatggttcagaagatactgggaacatgccttgccagacttcccattactccatgtatcacatcctggtccatggtggaagcaaacctgtggaattactaatgagacattgttcaaaggattattatatttatctctccatccattcttaatcaagggcttatgaataagaacagtttctaaatgctatttattcagaatcttctccactaatttgtctcaagaattagtctttgctagaaactgtagaactgagccaaagtgaattcctgccagtgtgaatgaggtcagaatacctgagtcacataaggtccagagggcaggtagccagccagggcaccgctgtgctagccagggtgtcttaacaacagcctaatgaagaataattttttgttctgaggcacatggcttttagttgaagaggacaactcctagacaactagctagaactttgcagtaaggagagcaatgttgcttgaccataaatgaaggagaattatttggtgctgccatattctctagggggcaagtgcagcttcacaaaagggtgtctttttgccagcaaaaactaaaccagacaaaaaccttccaactcttagctaaggggaatt

SEQ ID NO: 198583 - DNA, 1000 bp, Homo Sapiens
tgtgggtctgttatctgttatttcttttagtggtcatttgcagtgccctgttttcttgtgtgcctggttatttttggctgtgtgctgggcatcatatttagaaaaatatattagatatacagactttagtttgaattctctctttgatgcctacaaatcaattttcctctacagtacgttattttgtttcaaccatgagcctgggaacaagaacaatatgggaccaccataatacaccttcaaggcttgaagtttcatgaactacccagatgatgctagctgtatatccatgtgaaggctgggttactcccacatcatccttactctgatctaaaagtaagagagagtttatcagagtctttgcctttggtaggctccaggattttactttcatcctgtcaaactttgaagcccactcaaagcatagtttagtttcaaaacttgtttctaatggatcaacaaatgccctcagggcaaagcagctttgaatgctagccttacctctctagggtcttgtcttcaacttgattttggcccaataatactaccctattttgttagcttcttgatgctttttaagatgatacttccactcttttaatttgcatcagtggaaagattggtttaagtgacttagttctgccacgtttggaagattgctgatgctctaggggtaagtaatgggattctaaaaatgggtatgaacatgtgctcaattcagaaaatggtacctataaaataaaaacaaaactaaataaaaatgaggagtaatatgaatgtcacatagaagggaaaataaagcctaaatatttttctgtatatagcttctaagtagtgtgaaatttgggaggcctttcttcaaatagaatttggaagcacgcttgaaaaatctgtaagtttattagttacttttgctgtgtgataaccaactgcaatacatacagtaagcatgtagttttttctcatatgtcaatgggttggctaggatgcaaatggaatt

SEQ ID NO: 198584 - DNA, 1000 bp, Homo Sapiens
aatctagtcttccattctcacatgtattgctaaagttgtataccatatcttttatttaataagtaccacaattgctatgatagtccctttcttacattactaatagatatttatttttttcttctttttctttcttcgacttgctagatgtttttatactttattgatcttttcaaagcataactcctatggaaggaataaagaatattgtcaaagagttacctccacaaaaaacatcaggcttagatagtttcatagttgggttctaccaaagtttaagaaacatgtgacttcagtgatatataaattgttctaaaacatgataaaagaagaggaaacaatgtgtagaattatcaaataggatacagaagcatattttaaatgtatatcctacattcatgttgaaaatgcaggaataattcagtattggaaatatattaatatgtcattatattagtagatcagagtataattatatgatcacttccatagatgctgaaaatacttttgataaagttcaatatttattcctaataaaatttagtactaaaccagaaatagaaggctaccaaatcagctcaaaagtcagcatcatgcttaatgggtaaaatttagaagttctacaaagtctggagcaagatacaaatgctggctgtcatcactattacttattgtgccagaggtactaactaatgcagtataaaaggtataaaaatggaagaggaagtaaaatttattgctgtttttaggacaatattattatatcccaaaatatctaggagaatcaactgaaaaggtactattaataataagagaatccaggccgggcgctgtggctcacgcctgtaatcccagcactttgggaggccgaggcagggggatcaccaggtcaggagatcgagatcatcctggttagcacggtgaaaccctgtctctactaaaaaaaaaaaaaaaaaattagccaggcatggtggcaggtgcctgtagtcccagctactca

SEQ ID NO: 198585 - DNA, 1000 bp, Homo Sapiens
catctgaggagtgaattcccataaagcaaattatactttggacacctcaggcatatgcttttcacacaacatacaaggtcatttgtctctttataacctgtgctatggccattcataagttatgacattgtgaaacaagaagtaaaaaagcataggattctactaaaataaaatgttgctccatcctgatggcaatatctgttttagccagcccaggagaccaccagcctggaccaagataagaccagaggcatctagatttaacctccaagcaatagggagccaagataagtatttgagcaaaagagtcgcaattgcagatttgctttctaagaagctaagactgcaaatctgtaaaagagggttgacaatagaaagagatttgtgcaagggacagctctcaaaccaagtagagagatgatgctggccttagctgaggcagtggcaagaaaaggggacgagagaactagtcttgagaaagtttcagaactcagtaattgaacaagtagatatgggaatggaggtatcagaatttctagtaaaaagacagaaaggcagtgatgatgttaatcatcccaagagagaggagaagcacatattgggcaggtggaaggaggaagggatggtagttttctaaggcaactcacctctgatgataggtttactgtctttaggagaaccaggtgaagatgtccagtgatcagtttgcaatatggatatggaagtgtagagagatattatggctgaagacattaatggtaggtgacatcagcatggcctggcagtccagtcatggggatgaattcattcactcacagaaaacatgcatggggagccatggagggaaaaaggacagacacccaggagccactgacatttaaggggtggattctatctgaggatacaatgaaggagaccaagcaggagcaatcagaggccaggcaagagaaccaggagaaagtaggtcctcagggcttaaaatggagagcatattcacaaa

SEQ ID NO: 198586 - DNA, 1000 bp, Homo Sapiens
gaggcgcccctccccccacgcccccctctcattcattgaggcgtccctcccccagaacctctcagaggcgcccctcccccaacgcccccactcatttattgaggcgccttccctgcatgccccctcactcagaggcgcccctccccgcaaccccctcactgaggcgccgcccctcccccccgaacccctcacagaggcgcctctccccccgacccctcagggtggcgcctctccccacccagaccccctcacggaggcgcccctctcacaacgcccccaactaattcattgaggcgcccctcccccggcgccccccactcacccagacgccccgggagctgccggccgcgggggacggacgaaggggcggcaggcaggacgcgtggcggcagcagcagcagtagcagcagcagcagcgggagcggcggccccatccccgcggcctggccggcggcgctcagtccatggccgcgcgggaggcggcgggaggcggccgagtccgggcccagggaggcgcgcgccgccggctcctcccgccgcgcctctcgcgctcttgcggcgacgccgggccgagcttcagcaccggacagcgcccggccccgccccggccccgcccccggcggcagggccccgcccccggacgcgcgtccgccctcaggccacgcccccggccagccccgctcgccccggccacgccccccgcccgcccggctcccttccctccccactcgcaggcgccgcggcccggagccccacgcccggccctggactccccggccccggctcgcgcccctccccgctcggaacgccccgtccgccccccgccccgcgcgtcccctcccacctgcattcctgccccccgcctggccctccgatcccctccccgcctgccgccgctccccgcccggcccggtgctgggggtcgcactgtccctggggacggcgggggcctaagccgcgcccttggcccggacgggaaggcccgaacctactctgctgg

SEQ ID NO: 198587 - DNA, 1000 bp, Homo Sapiens
ttatggttttgagtttgtattattttttgctttttcaggtggtaccaaaaataagggttttctgctaatgtccaagaggtttttgtcttgcagataacaattatggctgtgttcctctgcttgaagacagtgaaacaagaaagaataatttgactcttgatcagccacaagataaagtgatttcaggaatagcaagagaaaaactaccaaaggtagacattgcttctgcagaaagcagcatttaaatgctgatgcgtgacatagcttcctcattttatttttctgaagtgatctgctggaattccaaacagaagttccatatatacaaatatgtggcttaaatatttctaaatagaagaactattttcaagtaaaataaaggctgaggttttgtatttcctactgaccgtttttctacatcacaagcatttcaacaaagaaaacatttaacaaagaaatagggctggacacagtgactcactcctgtaattcaaacactttgggaggccaaggagggaggatcacttgagctcagcagtttgagaccagcctgggcaacatagggggatccctatctctataaaaaatgaaaaaattagccacgcagaatggcacacgcctgcagtcccagttactcagtaggaggattgtttgggcctaagaagtcaaggctgctgcagtgacccatgatcatgacactgcattccagtttgggtaacagagtgagaccctatctctaaataaataaataaatgaattaatgaatgaatgccacatacatatgtacatatatgtgtgtgtgtggtgtgtgtgtgtatatatataaacaatgaaataaaagattaaaatcaggtaaataataagacacagattagataatagctttctagctttttcttcaatagtctgtgcttagtttaaaagaaaaatacacccaactagcttaagcaagactctattgaagtaatacagaaagaaatagtacatatctgcaaggaga

SEQ ID NO: 198588 - DNA, 1000 bp, Homo Sapiens
gaaacctgaatggacttcattaaagagacagcatgattttaagaagcaaaaattttggacactctcaggttttaattaagacctaactgtttttcttactatctctggagtcttaaaagtttacttagactctcagggcttcaaattcctcatctaaaatgagaataatcataacaactaccttagagtatggaaactaatgagataacatatataccaaaaacattgcagagactggcatgtctgcttctcaagcaaggaaggttcaatattagaaaactgcccctgtgcccaccgatagcctcagataattcactaagaagtcggaaaaatccgaacagaatgatctcaccataaccaccactaagttgagcaacccagttgcagccctggtctctggcttctctcctattatcataggtgaagcattcctacccctatctctcaccttcccacttgattctgaaccacattgcccaatcaaggattttgcttctgcatgtgacccttttgtcttgtgattgttacatctatgctctatgggattacttcaatcagcaaaagcctgctgaaacatcacccatttccacagaagtcttcctaagactcttagtgcttctttcccaccatattatttgcctgccatttttattggaaaagttcttgaaacgtatgtatgtgattatttccccattcccccacctccaaatttttcatatgtacacgttatagatgcttttgttcttttcacttcaagtctgtaaagatcatctactgcctccattctactcatttcaggaatcaactctcagtcccgcatctcctgtgacccctcagcagtttaacaccactgatcctacccttcttttgggaacactctatcaatctttccaggagcctccccctctctcctagggtttctcctatctctgcctcttccctcctacagctacaaagttcttcctcttccagctctttttggtcttggtaaaagaattcc

SEQ ID NO: 198589 - DNA, 1000 bp, Homo Sapiens
gtgacaaaacatgactgaaaaaaattttaaaaagatataaagaaatggggagatatagcttgtttttgtattagaaaaccaattttagaaattttagataaagtgttaattcttcccacataaatctacatattcaatgtaatagaaaataaaaaataaacctacacatataggaaaacctaattatgaagaaatgtctacagacagttcagttgagaactcataatcttagtaaatgatcttggtaaaagtggatatgcatgtgccaataaataaataaatacataaacaaacttcaattcacacattatacctaaggaaaatagtgtataatgtattgcattagtcattattgtgtaatgagttatgttccaaatacataacaaagagacgatcaattttattgaggcaaataacattaaaatgggcaactatttttgcatagacacttcactaacaaaaatacattggttaaaactcagaacatataaagatgatgaacagcattaattattaggggaatgcaaattgaaaccacaatgaaatagcattgcatatccattagagtagctctctaaaaagaaatagataaacctaaataaaagtatgactactaaagaaaacttcaggcccaagtggtttcattggtaaaggataatacatatttaagggagtaataatgccaattctatataatatgttccagaaaatagaagcgggaacattctcaaattcattctctgatgatagcattacactaatagcctaaaatgaagtgtcgctataagcctaagcattaaaatactcaataaaatatttataaatataatccagcaataaattttttaaaaatgatatgttaaaccaagtgaggttaatcttaggaatgcaaggttagttcaacatttgaaaatcaatcacttcactacattaacaggctaaacaagaaatgcttcattatctcaatagatacagaaaaagcattttacagaattcaaag

SEQ ID NO: 198590 - DNA, 1000 bp, Homo Sapiens
gtcttttatgactgatttgtcttagcataatgttcttgaagcttatctattattatagcatgtatcagtatttcatttctttttattgccagataatattccatgatgtggatataccacattgtatttatccattcattagttgatggacatttgggttgtttctactttttgcctattataaataatgctgctataaacatcctttactagtttttgtgcagatatatattttcatttctctaggggtagaattgtcaggttatagctaactctatgtttaacattttgaggaactgccagactgtcttccaaagcggctctgccattttatattcccatagtatatgagaggtccagtttctctgtatttgccaatacttattattatctctctctttgattatagtcattctagtaggtgtgaaataccatttaagaaatggtatttcattgtgattttcatttgaatttctctaatgactaatgatactgagcatctttgtgtgtgcttattggccatttgtgtattatctatggagaaatgtctactgaaatcccttgcccatttgttcactggggtatttgactttttatttttgagttgtaagaattctttatacattctagatacaagtctcatatcagatatatgattcctagtttctcccattcgatggcttgtctttttactttcttgctggtgtcatttgaaacagaaattttttttattttgataaaagctaacttatctatttttttccttgtatcgcttgtccttttggtatctaaggaatatagatagtgatatctaagaaatcactgcctgatctaggatcatgaagatttatgcctgttttctcctgggaattttatagtgttagctcctacatttagatatttgactcattttgttactttttatatatggggtgagttaggggcccaactttttattcttttgttgatggatatagagttgccctagcaccatttgtta

SEQ ID NO: 198591 - DNA, 1000 bp, Homo Sapiens
gaaattttaaaatgacctatgcttcctttcgaatatcacgtcctgagacagtgttttttgagttacgtgcaatatgttccacgatgaaacatttaatgtgttcagaggcatgctagtaatcatgtagaaagaattttatgcctgaagtcacatgttctataaccaggatcacttaataagaaaacaagtacagctgtggacaagatgcctttttatcagggaaaggccaatttgttttctttgcaaatctaagtaaatggagagaaaaacacagcccttaaatgttttctatttgtcctgaagttctcatgaatgagttagaaggcgagaaggattaaataaatccttgaacgtagagagagctaacatttattttagcaaactaaaacctattcgctttgcaaagttctgttctgtactttgtaacaacagttttctttaaaacaagagccaccaattcaaatgcctttacagaatgattgaatgctttcatgccccacctaaaggcattcaaatcattaatcaaacaaagttctaacgccaaaacatgtctgggaccagatttaaaatgtagccctcagtttcagagggcaaaaacttaacatatttatattttcctcactttaggtaacactgtattgaatctctgcttgaaattgaggagcacgtgattttttctttttggcccagggcagcatttcttggaagagaaagaaaaacaacccaagatacccttacaaaacatgtagtacttaaagctctttatgatgaattaattttggtatacacattaatagcagtgataataacaaatctatatatatatatataattgatatgaataagataaatacatcaaaaggaaatttcattacaatttgatattaggtaaatgtcccattaaaataaattgctactgtacataattttccttcagttcattggcaggatgtttgctttggaaaataaacagtctatttctagttttagaaggaattcc

SEQ ID NO: 198592 - DNA, 1000 bp, Homo Sapiens
gtttcaggtgtgtctaagttggtactttctaaaaataatgatcttaaatacatgtctcaatcacttgagctggcctctggatccatcactggagggaggctactgaaccatgggcaggtagccacaagggcaatcctagacaagtcaccaaatttgcaactacccaatgggttcaccttgcctgctgcctagacagctgatttatcaagataggggaattgcaataaagaaagagtaatttacacagagctggctgtgtgggagactggagttttattattactcaaatcggtctccaaacatggtttttatttttatttttttgagacagagtctcgctctgtggcccaccctggagtgcaggagggcagccacagctcactgcagtatcgaactcctggactcaagtgaccctcccacctcagcatcctgagtagcagtgactacagccatgtgccaccatggctggctaacgttttttattttttgtagagacaggatcttgctatattgcccaggctggtcttgaactcctgagctcaaatgatcctcctgtctcggcctcccaaagtgctgggcttacaggcataagccactgcactcagctcctgctaacatggtttttaatatatcttgtgagctgacttacaagtctatatctcaaccctgacctttcctgtatttatacttatttaactaactagatacaaattcctgagtattggcaatgttttggcatttcatactatgaaaataaaaattcacttttgttgaccaaactttaaattttgtaaccatataaattggtattaggtagaattttttcatgtcattacagagatatcttccttataatctttattgaatttgttcaatttaattagatatgcagatttaaaagggaagaaaattagatacatgtgtgagaaattaaataaatatataactacagctggatatatcagatttaaatcaattccccaatatgaaggaaacaata

SEQ ID NO: 198593 - DNA, 1000 bp, Homo Sapiens
acacctctgtctattatagtctgtatttgcaatgtttactacagtaattagatggagcttaaaattcagttctcatttccagggctcagaagccacatgttgctcctggctgctctgatggacagcacggtcacaggacatttcctccactgcagaaaatactgctggatagccctgatgtatatcaacaatgctgatcattatttgagaaaacgttctgggctccctcaatacctctgcctactttattattttaaaacaattttttgtaggtgcataccatcatacccagctatttctatttttttgtttgtttttttagagacagggtgtgctgtgttgcccaggctggccttgaactcctgggctcaggtgacccttccgcctcagcttcccaaagtgctgggattataggcgtgagacaccatgcttggtgactctgcttactttaatatcttagaagttttggtactgaaagtgaagaacattggacagacatcaaacgtaaatacaaaactgtcccaggtggctcttctcatacatttcactagggttgagcaggacatgctccccacctggaagaccctcctagggctttgtaggtttagctctgtgtgacagttctctttgtattcatcacagggcggtctccactttgtatacctaaaagacttctgagaacagtatttttccctattagtcatactttaaaatctagtttaggagcatctaacttcacatgctgaaattttcttttgaaatttcctttgaaacccccacactgcttgctctgtagctcatggaaatcacttacttcataccatgcttcattgcaaacctgctttggtttgcttataagtccctccatgaattcagtggaaatgtctctcccagagaatgtttttctcttaaggtctggtccatggtactttatttgatgtccttattagaagacatctagaggagtcaagacctagactcagttcagtttgagctaggc

SEQ ID NO: 198594 - DNA, 1000 bp, Homo Sapiens
taaggaaagtatggaccttgcctggttttttgaaggtggtcagttgcaatcactccccctcctttttttcctcctttcctcattgatccaaaaaagattcattttatgcagatgtatgaatcaatcactttagggtccgatttgtgaaggttgatgtcctgcccagatatcagagtagtgctccgaatctaaccattagagatgaactatggggttcagacattactgtctttctgaagtcctctttggcaatatcaatataccctcacctccaggagtgttacataaggtatcattgacattttatggtcagtgttctataaaactaagtttggctcacaggagaacctaggtggttggtaatcagaagaggaaaaggatgcagaaagggaaacaggcttttctttcttcacagttttgtctagggctgcacctaattaggggaaccatgaatggggtgcatgtggtcccacaagtccagggaaatgaaatattaatgctagagattgtttttactgttgagatacttcacatgtggtaacagaatttttctttttgtttatgggcaaatgctaatttttatgcttttctaacttctgaacagtataaggaaaaaattttaaacaaaagtgtcccaaattggctgagtttaaattctagtttcccattcagctttttatgttttgaggctgagcttcaagtccactgccaaaggaacatctcagaggcttccgttctttaggagactacctgagtcatctcagtgaggcttgagttagaatcttccctcaaattcagacacaacacaaattctaaaagtcattatattcatttaagttatattcattgtcttaatttatacttaagccattcagtaacatgataaatactttctgctatgagtaacacaatacacctactagaattctgataaaatctatattttctgataagagaaagtactagagacatatactccttgtgttaaaagctgtgaatt

SEQ ID NO: 198595 - DNA, 1000 bp, Homo Sapiens
tcaaaacccaattcaaatgccactttccataaaaacaattttcttgaatccttccattttaaaacccaaaacacactatgctcccagttagtctttagtcccattctgccctgtagccatcggtgttcttatgtcctatcgtaaagtataagctctttcagtgccaggatgatagctcctcactttatacacacacacccacacacccacctgaaggcacttgattgtttttaagttgacatgaatttgccacaaaaaacacacacaaataatggtggcctataatgaatatgagaatcagaaattgacaggtcctttaaggtattttctcctaggagttgcttaggtctgtctatgttctaacatctgacttccaaaggaaagtgaaaaagcaacaaatacataaaagccaaggtcctccctcccctaaaatatgcactattaatatggttaccgaagattaccagcattcttttaaccggaaaatccgtaactaccagcacatctccttatctaaatacaccactgaatgcaagaatatatgagtaaaacaaaacatgaaccgtgctaaaaaaaatttaaaatcacaaattttattaattactttaaagaactacaaaatgtttactatacaatattatatacttatatgttagtgtaattagcttatttccccctcactcccaatcacacaaattgataaaacagccaccatttaaatatgaataatttctgaccaagttttattatatttactagaaagggtttttagtaaattaatgtagttatctgtattacgagtaacggaaataaacaggcacacttacctgctcaacatatcagccataatatccaaggcttctagctgaacagagacatcttcctgttttgctattgcacttgtaagacgtccagtaatctttttacatacattagcagctaatgcagagcctgcatgaataagaagccaataataatttcaaggcaagcatgttgaatt

SEQ ID NO: 198596 - DNA, 1000 bp, Homo Sapiens
catattgagattattataacctcatattgcatattgtgaattataacctcatattgcaaattgagaattataaacttcaactaaatgttggggcaaaagaatttattcatttatttatttatttatttatttgagattgagtctcactgtgtcactgaggctggagtgcagtggcgtgatctcggctcactgcaacctgtgcctcctgggttcaagctattctcctgcctcagcctcccaagtagctgggactacaggtgcccaccaccacgcccagttaatttttgtatttttttagtaaagacggagtttcaccatgttagcaaggctggcctcgaactcctgacctcaagtgatccacccgcctcaacctcctaaaatgctgggattacaagagtgaggcacagtgcctggccgcaaaaatgttttttttaaatattcaaaaatagccatggcttgcagttgctataaagctatatagtaactccttcactgggcacaacagaagaaataggaaagagagaaagtgctgctccagaggttcaaaggtgaagatagagcagtgtagtggtggggatttatgtttcctaatctcccttgtcagcccagcatgtcttcagtataaatacacacgtggcagtggcctatgcactcattcacacttcagggaagcccatggtttccttttctcctccattttagcagtgggcagcctgcaaccttttgatcaagctgactttgtatgttacatgactgaactcagctatgccagacatccttaaggaagttgacatttgtgtactttgaaagaaaaaaaaagaaaagtgaatcccaactgcttcctcctgcccttttgattaaaagaacggtaagtcagcaggagaggtgctgcttttaacaagcaggggtgtgcagcaactgattggtatctttctttgaaaaaaagtagaaaagattgatgttaaacaacactaatcagagttgattacagggactgaat

SEQ ID NO: 198597 - DNA, 1000 bp, Homo Sapiens
cacagtccacaggctgcagtgcctttcgcaaggagagtcgtttttgaactgtttgtcaagcaggattgttgaaaatcacttttgttgctcttgatagaggccatggggaagattttagagcagtggaaatagagatagcagcggggagatcccaattaagtactgtattcttcctttctgccaacttgctttatgtggcatgaaatcttctctcccccaggtgtttgtggcttgatcgtcccccaggaagacatgccattttgtgattctggcatctgtccggacatcatcatgaacccacacggcttcccatcacgaatgacggtcagtgacctgtaggtttttcagaggcattgcctttaaggaagaagcaggcagttagtttagttagagtgagtggaggtgacgaggactctgaagctgttttttcaggtagagctcttctgccccttgccagataaacaggcttccagcccctaacgattctgggccactcccctctacataaagaatgaggagcacatctatacctccctttgagagtggagtcttctgagtgatgaatttacccctcagcaaaagagaatcccttgtcttgaacctaaatggatctccctttcagtgattatttttagtgatcctggctccacctcttaccagctgtgtggccttggacaagttgcttatccttcccatacttcagtttcttcatctgtaaaatgaagaaatataggacctatctcataggggtattgagaggcgtaaaattagatcacacatgtcaagcttaaatactgcttctattaatttattactgttattaatagtggtcgtggggaaatgagctggagataaataagcagagagagtgcttgtgccacagggaggtgctcacttaatttgttcacatcctgcaggtggggaagctcattgagctgctggctggcaaggccggtgtgctggacggcagattccactacggcactgcgtttggaggcag

SEQ ID NO: 198598 - DNA, 1000 bp, Homo Sapiens
ggtggtgcaggagttagggagtagccatggggtggaaggctggaatgaggtggcggtccctgttatccaggaggacacagaattgagatgttgggaggttgacttctaggaaatgttagagtgagctctttcccttagtttcttcatgagttatttgtttttttcgtgaacacggaaaaaatacagatattcctaaaatggaatgagttcttttcagatctctttccttctggttttgcttataagccgagtttagaaaatcagaacagtaacagcaaaagaaacctatttcattttttgtacaagtaaaaattaaccaagaccttttaaaaatgtgaaggaagcacttattgaagactgttgaaatgggagtcagaacgttgcaacagggagagccgttggcctcaactttcctgaagccaaagcgggaaggttaaggcctgggtgagctagcggaaatgcactggaggttggtagtgggagtcttgcagtgtgattgggccatctgcgtttgctagtttgtgcttattggagttaggctcctgcctgcctacagagacagggctgctgtccccttgagtagttacatttaaagggatgaggcatctaacttattccttatttccttgtcctgccgcatgaatggctcatttccggtagaaaagttcttgcatgtcatcactaatcctagagtgtatgtgcatcccagtaaacagtgttgtgcctcatttgaggctgagtaagttgccctggttgtttggagaccctcacacctctccctgaattctccgtccctagagtttgcagcagtcatcgcccaccctagactgcagtagcagaagccacatgtggtgctcccagtgtgcctttatccacacagaggagcagggaggctccgttctcatctggccctttcccttggattgatggatgcttctcagcacatcagcctgaattctactccgtccttctctctggcaacatccattcctctgaattc

SEQ ID NO: 198599 - DNA, 1000 bp, Homo Sapiens
acttttcatggtttagtccccagtattccttgatcttgtttctttcctctcttctctttgccctcaccctttggccacactgtccttcttgttgtttgtgaagtgcctcaagcagactcgtgccccagggcctttgtacttactattcctgggcctggaatccttttttcctcatatggcttgctgtcttacttttttgagggctttgctcaatcgtcaacttaccagacacatcttccccaaccacgttgtgtaaaatggcaaccttttttcctatcagcaccattatctttcttatctctctttttctttgtagcacttatcacctcctgcctgacacacacacacacgtatatgtgtattatatattattacatattgtgtattattttattttctctctttccctacaagaagataaactctatgaggcagggatttagtacactgttgtataggtgtctttagtaatagtgcctggcatatggcaggtgtttgataaatatttgaatgaatgaattggttaatgaatttgaatttaaaatttttatgtttgggtcatgttttctgacttcataggaaaagatttgaaaccgtttttacagatttttttcttttcttttctttttttttttttttttgagacagcatcttgctctgtcgcccaggttggagtgcagtcgcatgatctcggctcactgcaagctccgcctcccatgttcacgccattctcctgcctcagcctcccgagtagttgggaccacaggtgcccgccaccacgcccggctaattttttgtattttttttagtagagatggggtttcaccgtgttggccaggatggtctcgatctcctgacctcgtgatctgcccacctcagcctcccaaagtgctgagattacaggcgtgggccaccgcacccggcctgtttttatggatttattatacttagaaaatttactttattcttcctgctgtaaagcatggaaggggaagaattc

SEQ ID NO: 198600 - DNA, 1000 bp, Homo Sapiens
gtgtatctctgtacatatatgtcagtgtattcatgtatgcatctgtatgagtgtctgtatctgtgtgtgcacaaatgcatgtgtacatatctctgtgtatgtatctctgagtgcctacgtggcagggtaggaggctaactttaataaatgccaattaacaaacacagacaattaagcatatcggctaccctcccctccaaagtcctccagtgcttcctgctagctcaccccagtgctgacaaactctcccccttgttttaagagtttatttctatgtctctcccctattttaatagtctctttccccaattgcaataagcttgaatatagtcttctttgctgttcattgcaattttttttgacaagctgagggaatcaagatgccatgagattcctgtaaataattgaagatggatgtgccatactactggagaaacaataaaaaaaaaaaaaaaaaccactgcccactggctttgcacacatgtaagatgcaagtagttaagctcattcactcaaatatgctgtccttcattaagtcattttttataataaacaacttctaaagccatcattataaacatcaatgcaattggggaacagacaagttcattttaaatctccatctagtttatcttcaagccataatgtatgccaaataacttaagtcattttgttcataaatctacacatcaccagaggggaaaacaactggcacagatacatcagtagcagagaggaagaaaaaaaaaggaagtatatgaagtgtaagtagagaaaagtatcaatagaagacgacaacatgatatcagaaatccagcgggaaataatcaaatgaagggaagaggtaaagataaggggatatagtaaagcgtaaaaaaaaaaacaaatagatctcccttcccacatccccccaaaaaaattactgttttacagacaaaaaagaaaatcccagagaaagaatgcgttgctgggtcttttacggagataaataagagaattc

SEQ ID NO: 198601 - DNA, 1000 bp, Homo Sapiens
ggcccaccagtgaactggagaagccaactgctctggtgcaggcccaccagtgaactgacgaagccaactgctgcggtgcatgcccaccagtgaactggagaagccaactgctgcggtgcaggcccaccagtgaactgacgaagccaactgctgcggtgcaggcccaccagtgaactggagaagccaactgctgcggtgcaggcccaccagtgaactgacgaagccaactgctgcggtgcaggcccaccagtgaactggagaagtcaactgctgcggtgcaggcccaccagtgaactggagaagccaactgctgcggtgcaggcccaccagtgaactggagaagccaactgctgcggtgcaggcccaccagtgaactggagaagccaactgctgcggtgcaggcccaccagtgaactggcgaagccaactgctgcggtgcaggcccaccagtgaactgacgaagccaactgctgcggtgcaggcccaccagtgaactggagaagccaactgctgtggtgcaggcccaccagtgaactggagaagccaacatgatgctgggtatcaactcgctaactgcatcattcccgccagtctatagtcagcacaaaaaatgcatcaaaatcgtacgacaccagcattcttcaccatttaaagcaccgtagggaaattactgtcttttaaacgctacttcaaaaatgttacaaatattaaatgagttaagttttagctcaagttcctcttaacattgtaaggaattttgcacatatgatgctagatgtatatttaaaaacctaccaagaccatctcttcataacctttaaaatgtgcatttatcctttaagaaatatcacctgaatctcttcaaactcatcagttccattctctctacattctctttctcctgaaaatataaaaagcacttttttctgagacaacttacatcgcttgttttccgttttgtatttgtgcacttttaaaacacacataaaactgagaattc

SEQ ID NO: 198602 - DNA, 1000 bp, Homo Sapiens
aagctgaaagatttactgaatgcctaacctggaagtggcctactaattgacaggatgaaaagaacagtgactgttaaaaaaaaaaaaaaaaaaaaaaaaaaaaaaagaaccagaatattaaaaattgtactcgagttatttaaatacttctgtcaaaaacatcccaaccagtggtttactcaagttcaaatcatgcaacaatgctgactcctcctttctttctccttacacctaattgccaaaaagaccctattcaatttcccagtactgcccatattctttcctatttccactgtaatctatctagcataagcctttactacctcttgctggagtactgtaaagtcttcttaattctagtattttactcttcccaagaaacaacattttttattttgtattatggttatttctataccttactttgccctgtacaacccttctctagagtattttattcatttggtaccttcagttaccatttgcaaagtaagacttgaaaaaaaagtttgattgcttcattatgagtagaatgatctgaaaaattatgatggtgaacaatcacttcatttaaagctgatttgtcaagaacaaaactctcaatcaaaagaaaactttctcaaatgaaaattagcctaaattttctgaaaaattataagaaaaaagagccagaaaagagactacagaacgtgtggtacttggcagggaaggaaatagaatcaaggagatactctatcagtatgttgtgaagaaaaatgatatttaccatttgggactgtcagttttaggatatacatgaataaaagttgagaataaatttcataaactgccctagtaaccacagccatcacctttccaaatattgttagtgtcattgttttataaatatttgccaacttgaataacttcaatgctaactggaggtaaaatttaaaggttgttttttttttcccaataaaaaatagaaactgggtcttttagtgattacagaatagaattc

SEQ ID NO: 198603 - DNA, 1000 bp, Homo Sapiens
ggcccacagtaggagacttgctcagggtcacagccctgggaagcagcagaatcaatactagaactaagcattctgtgtctgcaagttcatgactgtggggggcaacctggaaactcctgggtaaggaagaggagtaagtttttaagtgaaaggttgtctgacgtaggaagccatcaacactcttcagggattgagggggcaagagagagccaggccactgagagaattcagctgcttttctgttccacactccttggttccttatcagaaagagcattcatccctttgcagacaaacaccagaggtcctcagtgtcacatgccagccaagctcagagcatctcaacaatgccagggagtcttggcatggggctgggccatgggcttggttctgactcagagaagtcggaaccacctactgagtcatttgcaggagctgtggtttcctgggaggtttcccaaccagttacccaccccgccaaatcgctggtagcttgcaagatctgaaggagccgcaattcacagtgccagggcttcaggcaaactcaagctgcatatctcgagctgttgcacagaaattatttccttgcactacatggagaaacttggcccttggtagtaacacgtaaacaaatgaaactttttaacatacctgttacttatttgatcttagggagatctcagtttccttacctatgaatgagctactatgagtaagcagctgtgatatctgaaggaattaatggtttttaatggtttctctttaggacggtccagaatgacccagctctaatcgtggctgagtttacaagacactgccttggaatctggtccaaggcagctgctcatggcatctccatttcttctttgagaagctttactgcttctcaagcaaccccaccttctcaggtccctcagattttcccctcattagtaatcttggacatttcaaataccatgaattctttctactccaaaggattggttttcaaggtgaattc

SEQ ID NO: 198604 - DNA, 1000 bp, Homo Sapiens
ggtgcctgtattcctagctattcgggaggttcaggcaggagaagcttgaacccgggaggctgaggttgcagtgagccgagatcacgccactgcactccagcctgggtgacaagagcgagactccgtctcacacacacacacacaaaaattggctttgtacaagaataaatatacagtaacaaaactgcagaatatcacagttctgctgcactgagtaggaaaattggaaataagaagatgtggctctgtattggggagtgtgagggtagaaggctctcttaaaataagcctgatggaggaggtggttgggggaacagtaacagaaatttcagtgaactctgtaattctgagagatccatctaagaccccagacaaatgaaatgttagacattaatgaagtcttggggaaaaaaacccaaatacttaaaatgtattcaaacttattgagacaaccaagttctaggctttctatcagtgaaagaattcagagataaatacaatgcatacttcgaaaggagctcccagtataggaagagtagatccactcttgtgaagtcatggagatacgtataaatgttagcacatgctaactccgtctagatgggcaaggaaggtctcatggagaatgcagtatttgggctaggtaccaatgcatgaataggacctcacccagatggagcatggtggggagactggacaataagccggcacactgatttataacctggaagaaactgtgggccatgctacagcagagagtactggtaaaatactgcagttcttcctttaccagattccaaaatacagttttctgagctgcttccaagactatataaatagtcaagatacagtctgttctacaatacaaaattttctacaaatagcctacacacaattggtaagtaaggtagtgacagtagtacaaaatattacgttgctttggttatgtgatcattcctaatgtgctaatattttataccaccaagtagcagctgaattc

SEQ ID NO: 198605 - DNA, 1000 bp, Homo Sapiens
ctatcttttagggggataaaattcaacccataacagtggactagagtagttcatcccctcaccttgtccctgagtgccaggcagagaggaaaaccctggtttagaattctgagacctgcatttgtatctgagtcttactagctgcatgacctcggacaagttacccaaacagtgagccccagattccacatctataacagagatcgtaatgcctacaacaccttctccccaccgttgatgtgaagattccatgagacggtgttagtggatcactttgtaaacgctaaaactccaggcaaacatctattgtcatttcttcaaacgaagggcccggcttcaaccacgtgtgtctacaaaaaaagggggcaagtttccatcaatactctaattacaaccaattgcatgcatttcccgtctgcccacatgggaagttaaacccctcaaagcacctttctattatttctgggggttcccctgggctgtgtcacacgtgttctggaataggttcccacgtacctgagcgtctgctcttcttccccgctcctgagcgaccaggactgccttcccagctgttggcactcccaagatgaccactgttctggtgccactgagtcccctgacttaggccttgcagaaggagcacgcgctccccaccttctcctctgctccacctcattcctctccgcacccagcttaagctgggctataacctttaaccaggcattgtttgaagtgtcagcagaagggacgctcaaaacagggggacttggggctgctactgctgccgctcagtcaggccccccgagcttgcctccctggagcagggcctgccccaccagggtgctgtgagcacacctgcccccgaccatgcagggcagccctccagagactcggtgagagaaggagctcctccacccatgggaggcaaactctgcctccctgttcctcagttcctgtcctaggacaggccactttccagaaggaccggcagtgggaattc

SEQ ID NO: 198606 - DNA, 1000 bp, Homo Sapiens
gtgaggaactcattggtctaaatcagtgaagtctcatcatctttgccatgcacttggtttagggacggcagggatctaaaatggcccaatcacagggaaacccagggcttctcttttatgaatagataaaaacgtggtaagtccccgggcaaaggcagccctggcaggtgctggcagccatcctaggactgcgaggggagccatcctcgggagagggggcagttccaggaagggagaaagtcagtcttgatgacactgctgagtggctgaagcactatttctggaatgttcaccacattaactaaagagtttcctttttaaagtgagtttgattcaattatttcgttatttatgaccaagactgtcttaactgatacagctataaaaatattcatcatcttctctgcggtaagataaaaggaaatacaaagaaatcagtaatggatccaaaataggctttctcctcacacataatgttaaattgaaagagtcaatcctatgatatattgagaataaaattgtcagaattttttcaacggtaattattttattatactcttcttgaaaataatttaatgttaaagaaattaaaattatagtaacccatggttttgccaaagtagaattttttttattaatagattataaaaaatgtttaaagttgcaatcataactgtgagattattttttatgctttaatgattttatcataaccaatttcccatgtttctcgtactctttacaatcattttcattttttgaaaaaattaccatcttgtttatatactataattagaccacccccgtaatgtgatacatacttagtttcaacttagttttttgtatttgtaattagtgctgcaattaacagatttacgaagcataaagctctttccttctgttgaatttgaattattaagtgaatgacctaacatttctaggagtatataactcctacactaagcaaggccttgggtatcaaactacttgggaagaattc

SEQ ID NO: 198607 - DNA, 1000 bp, Homo Sapiens
acacccttttctgaatgctctgatggcattgctgagaatccccagacagccccagggatcctgttcagggcgcccatggtggagcaagctcagtgaatgcccagtcacagctgggcctggacagggtgggattcctggctcctttatttaaaagggcccccaacttagaggtaaagaaagaagtcgatgaagtcccttttgcattttgcaggccacgtgcgagcgagggtttgcagcaatggaagaaacgcaccagaagaagattgaagatctccagaggcagcaccagcgggagctagagaaacttcgagaagagaaagaccgcctcctagccgaggagacagcggccaccatctcaggttggggggtggggtaaccctgagggcagggtgggtggccagctttttttgagctagacacacaactcagaggaatggcagcctttaaattgccttttggctgagatgtaaacttcattgttgaagggttctttgactattcactctgaggcaaaggccaattttaggtcccttttgagagcttgtaaactgagagcgcacacttcgacccctgacagccccgtcgtggccggctgcacacaaggagctgtcccaacctgtgactttccagttccaacaagtagactgaccagtgtcagtccagccagtgactttccccctgacagacacctgtcaacgtgggaccacctctggccagaatgcccctgccgtcagcgtgaagatatgtagcttcaccggcaggtggccctaaacaagcacgtcccctccgccttgtgctgccttccctttatgtaatcgccacctcagtggtttgttaatttagttccaaggaagaaaatacaccagcacaaaagcttgcttgttttataaactcatgttggaatttaacaatgacatttatttaatcagtttggttttcttctaacaccaaaaaaaaagccaaacgtgcattccttccagggggagttcatgaagaattc

SEQ ID NO: 198608 - DNA, 1000 bp, Homo Sapiens
tgtaagattcaaattctaatattttccattgctttgggccactgtaaaccatctgaaattttaatagaagggttatttaaataaattgcttgatatatttcataggaaataaaatttcagaaatttattgtagctcttttaaaattttagtgataataatactaataatgatacatttctaaattgtagtttcacaactacacaaagatttttctttcatatttctaatacataaatttttagtaaactgcacccatatttgatttgtactatacatgtttttaagttaatatgttctcctgacaagtcagctgatagacaacagaaggcttaaaaaactctagttttgacagtccagtagtaggcatttcataaatcattagatgaatcacttgatattaatacaaaagatacagctatattttaattttcttatttaacaaaattgtatttgtgatgtgtgatacatcattatatgagaatgatatactaaaagacaattcaaatctcaaaaatgtatatttaaattcacattttttagaagtatatcaatgtgcctattttaactgaaacacagttcagtttctgtcttcctccaaacttgtatcctgcactttacccgtcaatgtgttgggcttgacgtaatttaaatgtattttccaaattcgtattggtctgtagaagtaaagcctgtctacagacggcttatgtcacttatcttttacataagaccaagcgggtactggtgagctaaaataaattaattgaagtgtgtatgtgtgcgcatgtgtgtgttacatgatcttcaaatcagtgaaatttaaagttacagttatttaagaaacatgtaaacatctaaattaaaccagaatatcctacaaaagaaaattctaaatgaatatgttgtgataaaatattctaattaatcaataaacaactcttgatcattaatatgtgctcttaattttgaagtgaatttgatataattttgcatattcca

SEQ ID NO: 198609 - DNA, 1000 bp, Homo Sapiens
acatagggtgaacaggggcaagcggagcctgatgggatacctacaatgccaccctctccattgttggatccctttctgctctttaaaaagcattaaaatccagggcataaaaggaatcatcatctctaggtgaacatatgtatctgctattaccattattcaaatactaatttcttccaaagtttattaagcatttacttcatgtcaagcagtatgttggagcatacaatttctgattttaaataacttacttcctgatagcagaactgcttacaatataacaggttaagcaatataattggtataaaacaaaagcactgtggaagcacaaaggaataaaaggctatatattcaaagtttcttatgtataattatgtataatattacatattattatattattaggtataatattatgtataatgtcaaacagaggtaaaagaaagatgctactctaacaaattcccatatactcataattctgctttgatcaccatcaactcttgaccaatcttatttatcttctaaactcactcattgttctaaggacattatattatttcctccatatatatttcagcatggactctttctttaaacatataaatctgcatcttgaaaaatgagtaagttttaagaattgaagtctaattaacataacaaaatgtgcagattttaaggtgttcaattgagttctgacacatatataccctgtgtaaccactatctaaaacaacacacagaacatttccacggcctagaaagtccccgtatacccatttctagtcaacttcccacccctgaataaccacgttctgatttctatctccacagataatgttgcctgttcttggacttctataaatagattcatagagtatatatgaggtttctaggttttggtctaggtttccaggccaaaaaagggggaaagcattccaggtcgaaagaactacatgtaaaaatattaagttgtataaggatatgttcacaggattttg

SEQ ID NO: 198610 - DNA, 1000 bp, Homo Sapiens
acagtctctaatcacttgttctacgtgttgcctgtatttagcactgcagtctgctcctgaaacatttacatttgctttcagcagacccaatccctcccaaagtgtatcaccatttctatcagcactctgtggtattggagacagaaaccaggttttgtaaagacactcaaaagccagaagtaaggatatgtgtatcagtatttttcttctctttaaaggaagaagccaggagttgatacttcactcctaatggcacagtgctatattggggaggaggaagagctgttggtgggtaaatgtaacaaacattccttcctgttctatgtggctcttggcattttgcttacctgaggcattgcatacaattaactcatttatagatttcacagaaaggtgtctttgttagtatatgtttgctacatgtatatgtctgtgaagaagttatggcctgtgggattttgttatgccatcttactaatgtattttgaataatttcataagatttgtaaagtatatttatatgaatctactaagtgggataatttgtaatttttatttctttcagctatgtgttctcatttcacccaagaccattggccagtgcagggcatagaagattcattccacaaacttatactgagaagatatgagaaatgtggacatgataatttacaattaagaaaaggctgtaaaagtttgaatgagtgtaagttgcagaaaggaggttataatgaatttaatgaatgcttgtcaactacccagagcaaaatacttcagtgtaaagcaagtgtcaaagttgttagtaaattttcaaattcaaacaaacgtaagacaagacatactggagagaaacactttaaagaatgtggcaaatcatttcagaagttttcacacctaactcaacataaggtaattcatgctggagagaaaccctacacttgtgaagaatgtggcaaagcctttaaatggtctttaatatttaatgaacataagagaattc

SEQ ID NO: 198611 - DNA, 1000 bp, Homo Sapiens
atgattcttcctatccacgaggatagaatgtttttccatttgtttgtgttctctattatatccttgagcagtggtttgtagttctccttgaagaggtccttcacatcccttgatagctgtatacctatgtattttattctctttgtagcgattgtgaatgggagttcattcatgatttgcctctctgcttgcctattgttggtgtaaatgaatgcttgtgatttttatacattgattttgtatcctgagaccttgctgaagttccttatcagttcaagaagttttggggctgagatgatggggcttcctaaatataaaatcaagtcgtctgcaaacagagataacttgatttcttctcttcctatttgaataccctttatttctttctcttgtttgattgccttggccagaacttccaatactatgttgaatacaagtggtgagagagggcatccttgtcttgtaccagttttcaaagggaatgcttccagcttttgcccattcaatatgatattggctgtggatctctcataaatagcttttattattttgagatctgttccatcaataactagtttattgagagtttttaacatgaagggatgttgaattttatcaaaggccttttctgcatctgttgagataatcatgtggtttttgtctttggttctgtttatgtgatggattatatttattgatttgtgtatgttgaaccagccttgcatcccagagatgaagccgacttgatcatggtggataagttttttgatgtgctgctggtttcagtttgccagtattttactgaggatttttcacatcaatgttcatctatggtattggcctgaagtttttttgttgttgttgtgtttcttcccagtttgggtaccaggatgatgctggcttcataaaatgagttaaggaggagtccctccttctaaattgtttagaatagtttcagaaggaatggtaccagctcctctttgtatttctggtagaattc

SEQ ID NO: 198612 - DNA, 1000 bp, Homo Sapiens
tgcttgctaatgtttctacaatgcctcatattttttctgcttccttagctgttgctgaatcactgccattttattgatccaggagtgtgacctatcttttcccaggactattaataaggaaaactccttcacctaactatgtgacaagatactctatagagatgttaaagtgtgagccctctctatttcctgcccgcctcctgccattctcaggaggttgctgggtcttttttgactcaaagattttgcagaggagaaaccaggtgttgcttgaggtgggagtgctctgtatgtccagtgtcaaagtgtgagctccaagagaagacaatctgaattgctccaaattgtaggaagagaggagtgttgagtgtgtcaagaggaccctgaaggtcaccccacgatgaggaatggacaggtaaaagatcagagaaccccagtgtaggggaacaggggacccctccgtggccaccagtgtgactcatggcatcaagagccacccctatgtgctgatgctgggtaaagccattggaccctggcacagtcctggagatgatagtgtcccagttatgactaaataggatcttttatttctatggggggggtgaaggttgagtcaatggtggtgggaaggaagtgagtatctcagagacagagttcaataatcattttttttttttttgagacgagcctcgccctgttgcccaggctggagtgcaacagtgcaatcttggctcactgcaacctccacttcccgggttcaagcgattctcctgcctcagcctcccgagtagccaagattacaggcacacgccaccacgcccagctaattttttgtatctttagtagagacagagtttcaccatgttggccaagctggtctcaaactcctgacctcatgatctgcccacctcggcctcccaaagtgctgggattacaggcatgagccaccgcgcccggcccagagttcaataatcttaaagaaacttgcaatgcagaattc

SEQ ID NO: 198613 - DNA, 1000 bp, Homo Sapiens
ctctgctagcactctgcgcatgcgccagcagagcctttgggacttgttcaaaagctttcattaaacttaaatctttagagaccctcagttcagaacagaaacagcagtatgaagaccttgctttagaaatcttcaccaaacatacttcaaaagataacagaaaacctgaattggacagccttatggaagggtaggctaattttaattagtggatgccattctatcttattagaagcttggatttctagatgtacaatgtttaatgtaggaattaaagcactgaattttgaagcaattcacattaacattataccctattttatttatttttacaagtgtattcatgctttattttgtcattgtaagaaaggttttttcttgaaataacttttttaaatgaaagtatttgatgttcatctcagaagttttattctttaggttttttttaagtgtattaaataaagttagactaatgagaagttttaaagtataatgaattgtttctccccgttttacagtggagaagggaaactgccaacatgcgttgccacaggaagcccaatcactgagtatcaattctggatgtgcagtgtatgcaaacacggtgtccttgctcaggaaataagccactacagcttctgccccttatgccatagtccagtgggataaaggaatgataaactgtatataactgtaaaatatatgtagcatatatacatggctatatgctgtatatgtaataaggtttatttctgtgagttttgtatgaaaatcagcctcattatttatagttgaatttttgcacaaaatatatgttaataaaataatttttatggcaatacaactgtgaaataataaggccgattttcatataaatgtatgaaaatcaaccatgttttctctcaccctctctcttttgtttatcttgtttttggttacatgataccatggaaatattccaaataaatttttttctcacagtgtcaaggtaactgaattc

SEQ ID NO: 198614 - DNA, 1000 bp, Homo Sapiens
aaaaactatctgtccatatgatatttccttttgtgccctttttgtcatttaatggtatcttaaattatgtaattgtccattctggaaactttcttcccttgctgtgctagctgtgtttaacctgtaagcagatactaagaatctttcgttctagaaatattcctctcctgcttttttcctttatttctctgtattttaaaaatatggattattaaggtaatttcttaactggttttcgtgtttctagaccctttctactgtaatctgtctcaataccaaagttacttttctaagctctatatatctccctctcctttacttaaaaatcattcaagttctcatcaatctacaggataacatctgtttttcctatagagacatttaaaattctccacaagttgccctcaacttgtctctcataattcgttatctttttttttaatttttaaatttttttttattttttgagatggagtctcactcactgtcacccaggctggagtgcgaactcagctcactgcaacctctgcctcctgggttcaagcgattcttctgcctccacctcccaagtagctgggattacaagtgtgcaccaccatgcctggctcatttttgtatttttagtaaagacaaggtttcaccatgttgcacatacttgtctcaaactcctgacctcaggtgatctgcccacctcagcctataattcatcttcttataccccctctccctccatgcctttattggattgattattattccccaacatgcagtgtcctttcttgattcctgtgcttttgttcaagctggtctctttctttggcatatggtctttcattctcttttgttggctcagagtttttcttgcatgagagttatcttggaagcttaaaaaatatgtatgcataagccccagtgtcagaggttttgattcatttgatatgcagtgggacctgtgtagtgattctaaccaaaatgaagaacaattaatgttaactctttg

SEQ ID NO: 198615 - DNA, 1000 bp, Homo Sapiens
agttattaaatctgctgcacctagtattctgaaggctcagccttaggatatcacctcaggcagaagcaaaattagaagagaaggcaatgtcgttgtgcatgtggacaggacaaactcagagttcttaggcccaatttacccgacagacccctagagaactattttgaggctgggtgcagtggcttctgcctgtaatcgtgcactctaagaggccaagacaggaggatcacttgagcgcaggaattcgagatcagcctggacaacatagtaagaccttgtctctgcaaaagtaaaataaaaactagctgagcatggtgattcatgcctgtagtcccagctactcgggaggctgaggcaggaagaacgcttgagcctggggtgttgaggctgcagtgagccatgataccaccgcaacactctagcctgggcaagagtgcgaccctgtctcaaaataaatgaataaataaaaagaaagaaaactactttgctaaaatagaaataatcataaatttaatacttaacagttattctgatcagtttaaaacagctccattaaaaataaccacaaactattgcttctcggccttttggctcagatcaagtgaaggataaccacaaactgtaataacccaagaagaatggatatagatgtttaatattgaaattgattctttctcatcttcaggcattagtatgtacctgttattccctttgcttataacactcttccctcatcctcttccttggctaatcacctacttttccttccagtctcagtttagatggcaatagcactgagaaaacttgccttgtcctctcttccctctatctgctcgtctcaatccagcatacatgtgccagagcagcaacttgcctgatgacttggcaagacttatgaaagaagaaccatttctatcttatgggtattgtggaataagtggttaaattaagtatttaggaaatgtagaaaaaatattctttcattaaaaagagattggct

SEQ ID NO: 198616 - DNA, 1000 bp, Homo Sapiens
gtgtcattttaggcatgtcacttgctgtctctggctcttaatattctcagatataagataaggtcacttgagtagataattcctaggtttctttgaaatgctacatttattaggatcctttaattttagaaggtcaggcagtggttagagcatctgggcaaataaatacaaaattctgctatgaaaagaactaaagctcataataagtttttataaatgcttcataatggtgtattgagactttgtgatgctgctgagtagcgaagataacaataggaaaaatcacaatggaaaggagcatcaaaaggatgcagctcatctgccaactcccccacggactattttttaacccttacaaaggatggttgggcactcagaaaagtgtaataattaataacttgtaccctaaggtgagcacccagatactcgagtggaaatcctggctgtccccttcaccagctgagtgacttatctttcagtacctccattttctaatttgtaaaaggaagataataagagtgtatactttgtattattgatgtgagtaataaatgagacactacatataaagtttaagaagcgtgcagaaaacacagtgctcaataaatagcaggcatatgtattatttttaagccacctaaaaccaggtatatgtatgtttctttaaatatacatgtgcatatatatgtatgtatatgtatatattatatgctatatgtataggtgtgtgtatatatatagcatatgtgtgtgtatatatatatatgtgttatatatgctataacaatcaagtgggatagagataagaaaatagggacctgtatagattgtttcatttataacaatgcaataacactctccctggcttctgtagacatttgcattgtcatcctctacttcagaaaattctaagggctttttcagtctcaccaaatggtcactgtgttctggacgtaaagccactacagactggtcagtcatcttggtggttctctgagca

SEQ ID NO: 198617 - DNA, 1000 bp, Homo Sapiens
ggccggcagccgggacgcggggcgccgcgggcgcgggacagccttccccgcccccccttcccccccgttcccacacccgctcccgctcccgtggcgccggaagtgacgcgttttgggctgaaagatggcggcattggcgctcgaccagggggaaggtaaacacccgccaggccacgggctggccccctcggggcgccagcaggggccgaggggggggcctcccgggccagctccccgcccccaacggcttcccaccctccgccctctctcccagcgtggcggccttccgcgtcaagacgacagcgcactgggccccctgccggccagccccgcctccctgggcgggccccgggcggctcccgcggcccgcagggggcgcgcggcccggagcggcccccggctcgtggccccgcacgccccgccccttccccgcccctttcccgccttcctccacccccggcgtgggtgatcccgaggctcggcgcgcttcggggcagaagcccagagacgccgtcctcgacgcttcctcggctggtgcttctgtctctgcctgctgccccccagcccttttccccgcccgcggccccagtcggccctcccgccgagccccgtcgggtgctgcgaggcccccggcgttggcaaggtcggtccgggccccgacgccgcgccgcctcgtgcggagcccgactgtctggtttctcgactcagcgctgtcttctttcccaggacttatccagagggggctgcaggcgagcactctcgtgccccgccggagcgacccggctcgtgccgggagcggctgctcgtagacgtccgaggagcctgccgagtgccgtcccggcgcccgaccgcccacccatcggcccgctggcccggttcttcctgatgcagactgccgtccactagaggctggacaggaccccccgaggtacgtagccgcccctggccgccggcctgcggagcccgggcttcgcccgcggccccgagctaggcacgaatt

SEQ ID NO: 198618 - DNA, 1000 bp, Homo Sapiens
cagagtccactgagaatgaggccagcatagaagaaaacagaaccaagagtcggcaaaacacaggttcctgaggacatagtttgaacacccaggtcacttgtgctagaggccatgtgtgtctccacagagcccctgaacaccactgtgtcccctttcctgcgcacaaggcgacatgcagccgtggagagaatgggcacagcagcgccgcttacgaagaaagaaaagtggaaacaccgagaaagtagctacaagatcagtaaatccactatcacttgttcatacaatagacctcaaaacgacaacaaaaaggaagaaatcctaatctcatatatcgtggggatgaatctcacaactaaaatgctgagtgaaaaaataagctgcagacaaaatacacagtgtgacacttcagaaattccttaattcttaaaactaagacattttaccgtgtaaaataatactatacattgtagtgaaagtaccaagaaatgactaggagaccgaatatccaaattcagatcatttgatttcttaggctgagtggaggctacctaagtattcatgatatcactcataatacattttttctcctttcaatattttattatgaaaattcaaacagcaaagttgaaagaattgtccagcggacactcatatatctactacttagatactataatgaacactttgctatgtttgtgtatcacatatatatccatctccccatttttaaaatttttttgaacagtgtcttgctctgttcagaaaaataaaaaaatatggggagatggtatatatatatgtgatatatatacgtccaggctgcagtgcggtggccgatcttggctcactgtagcctctacctccccagctcaagtgattctcccaccgcagcctcccaagtagtagccgggactaacaggcgtgcaccaccacacccggctaatttttgtgtttttgtagagacaagttcttgccttgttgctcactctgtccttgaatt

SEQ ID NO: 198619 - DNA, 1000 bp, Homo Sapiens
aatttgatatgtagttaggatgatcaaacattctgaaattttatctaactccacagcttagaaaaaaattaaaggaagtccccttacccagatatgtgagagcttttcgtcttttgaggttccaggtccgtcttctgctgctgtattagctctcttgactgtcctctgtccctggcttctaacaacttccctatttcatgctattaagtttctcttagatcctttagaactgaattcccggctgggtgtggtagcttacgcctctactcccaacactttgggaggctgaggcaggtggatcacctgaggtcaagagttcaagaccagcctggccagcatggcgaaaccccatctctactaaaaataccaaaaattagctgggtgtggtggtgggcgcctgtaatcccagccacttgggaggctgatgcaggagaattgcttgaacccgggaggtggaggtgcagtgagccaagatcgtgccattgcactccagcctgggtgatagatcaagactctgtctcaccaaaaaaaaaaaaaaaaaagaactgaattccctaggtctcagttattttgctctctcttaggggacctaaaggggttcattgacccactaataatgagtcagcaccatttaacctagaactggaattttagcacttccttacataaacaaagccgcagcttgaggtcttaacataggcagcctgcccttcactatatcctcctctagacctctctgccacaaggatattttgtttcctctaccaggcagacagaggccaaacattagtcatcgttatattctctcttcccttcctctctccctactccccaatgtatcctagagacttaggggcagtcaataaatatttatttaatcagtgtcttttctaccatttgctgcttttccatgtctgagccctacctctctccacctacttttcaatatgtcctgcttgacagcctcttttcactctcaaagggaccaagctgtgaattc

SEQ ID NO: 198620 - DNA, 1000 bp, Homo Sapiens
caggtatggtggcgggtgcctgtaattccagctactcaggaggctgaggcaggagaatggcttggacccgggaggcggaggtttgcggtgagccgagatcatgccactgcactccggcctgggcgacagagaaaaacttcatctaaaaaaaaaaaaaaaaaaaagcttcccaaatattattcttccagtagcttgtgccgtcttcatcagaagagggactagctgtttggttcatgtgcttccacccagttattagaccaagtttgttttcaataaaagaaatcactggtcaatgccttctgtaattgatgggtgtcaagaaggtaaattttgcacgccgccttgggaggcacttctactttgaaaatagatctttgtgaaccatcattttggcctatccaatgacctataaaatacttgaatttatcatgaaaacagaatactgtgaaatcaggatgaaggttgataacaggtcatcaacgtaattgagtagattgaaaatacaagagtcagtgaagtgtaggatgaatgcttgttgtcagtaagagagctctttgtgacccgttccacgtgcaagagatgagggttgttgttttgggaatactcaccctcctcatcgcctgtccctgctaaaatcagagctttgtgagggcagagatggattctgtgcacaggtatcttctgagtctctgattcagtgcctgaaacacagtggctcccgagacaatctacctcagtgcctgttttacaggctcacctgtgacacatgactgggacatatgttattcatgatgacatgcaagagtctctgtgtaggtgtctactggtcttcatcatcaaacagagcgagaactccaagtcaggaggcagacatatcttggggcaagaagacacctagaatttttcttcaacctgtagactttcggattgggtagaaggattgttaaggaggttgcgaaacttggaaaaaggatgatgtgagtgttgatggcatggaatt

SEQ ID NO: 198621 - DNA, 1000 bp, Homo Sapiens
aaatcttttcttaactcatcatacaataaatgtatacactaggttaggagtaagggaattatggcctgcaggtcaaatccaacccactgcctatttttgtaaataaagttttattggtacaaagccactcacattcatttatgtatcttctacagttgtcttaccttgcaatggcagagttgagaagatgcaacagagattgtatagcccacaaagcctaagatatttactatctggtcctttacagaaaaagtttgccaatacctgcactaggctcctgggaatatactgtaaaaaattaccacaatgtctgtgggatcacaagcaagcgtatttatgttcaaagttaatacttttgtttgttttgtttttgtttttttgagacagagtctcactccgtcgcccaggcttgagcacgatctcagctcattgctggaacctctgcctcccaggctcagaagattctcccacctcagcctcccgagtagctgggattacaggcatgcgccaccacgcccagctaatttttgtatttttagtagagacggggtttcaccatgttggccaggctggccttgaactcctaacctcaggcgatctgcctgcctgggcctcccaaagtgctgggattacaggcctgagccaccatgcctggccaatattaatagttttttaaagttttttccaagtatttttgttttgttttccaaacttactctagttgggtaaagccttttcccctagaaattagtctgtctttccgcaagagaaaaaataaagtgagtgtttccatcagggtgtgaaattttctacaaaacaattttctaagaactggaagcttataaagatgcacacgatatttcattttttaacatatacattaaacatgattgcaattattctgaattttaaacactccagacaagtctttggttcctaaaatctttcaaatgacattaaaaaataaatgctgccattaaacttaaacagaatagaattc

SEQ ID NO: 198622 - DNA, 1000 bp, Homo Sapiens
ctctgtcgcccaggctggagtgcagtggcacaatcttggctcactgcaagctctgcctcccgggtgcatgccattctcctgcctcagcctcccgagtagctgggaccacaggcgcccgccaccatgcccggctaattttttgtagttttagtagagacggggtttcaccgtgtcagccaggatggtctcgatctcctaaccttgtgatccacccgcctcggcctcccaaagtgctgggattacaggcgtgagccaccgcgcccggccttgtttagttagttctaaggcaaatgatagtctttccagacaaagggtggagaaatacactgatttatagttagaagaaagattattctaataaaaacaattaaatcacagctgaattagattgcaaggtaatctatatgtccaagaagtcaaactcctcttccttactacataacaatttgatttaatagttactcactataattagattacacagacaaaatttactataataacaagttacaatattttcttttaacattaaattatccagcttgtaaaatttttaaaccaaatggggtaaaatatggctatcatgagatctctgttcctaaagtctcagtccatagttttctccaaaatattacctcaaagagtgccaaatttttatcaaaatattcatctccttcttcataattggaattattgagataagcatttcgagctttcttatgtccgtcgtctggaaaaaaaaaagtagaccaagttagtttctcactggtttctgacgaagaaacatcagcaccagataagtgcaggttgcttcggtattaatataacccattttcatattcaaatttaatcttagaactcaatcagcactgcttggagaatatggaacaaaataaaactctccagcaggaacaaaaagaaaactctgagaagtaaacatgggtcattcctttccttaacaataatcaagacccctagagacgctattcttttggaattc

SEQ ID NO: 198623 - DNA, 1000 bp, Homo Sapiens
agcctaatgtttccaaggttcttctgtgttgtagcatgtatcaatactttatttttcttgctggataatattctattataaaaatatatcacattttctttatccatttatcagttgataacatttgggttatttccactttttgacttatgaatactgctgccatgaacattcatatacaagtttttgtgtggacatatgttaaatttctcttgggtgtatatgtaggagtggaatttctaggtcatatgagaactttatgtttagcttttgaagaactgctaaacgttccagagcactgccccattttacattcccaccagcggtgcataagatcccagtttctccatatcctcaccaacatttatctgtctttttcactatagtcatcctagtggttgtacagtggtatctcatcgtgtttttaacacagcctttttaaaaacatatgtgctaggccaggcacgatggctcacgcctgtaatcccagcactttgggaggccgaggcagatggatcacctgaggtcacgagttcgagacagcctggccaacatggtgaaaccctgtctctactgaaaatacaaaaattagctgggcgtggtggcacacgcctgtaatcccagctactcggcaggctgagacaggagaatcgcttgaaccaaagaggcggaggttgcagtgagccaagatcgcaccactgcactgcagcttgggcaacagagtaagactccatctcaaaaaacaaagcaaaacatatgtgctgagaaaccttcagcagttacacactgcatttgtaaggtcttaactctttagtttggtacgctagtccttgtaagatttccacagtcttcacatcttttctgccagccgcctctttgggaacccagcacacaagacaaccagatctcctgactgccttccctccccagtttcacaagactagaatcccttctgcctgcctagctgttcttgaaatttcatttggatagcaaagaattc

SEQ ID NO: 198624 - DNA, 1000 bp, Homo Sapiens
cactttttacagttttcgacttaagtatattttatatggatacctctgatcacttttggtttccatttgcatggagtatctttttccatcctttcattttcagtctgttgtccttaatagtgaggggatctctagtaggcaaactatagtttggtctttttttttttttgtccattcattccctctgtatcttttcattggagaacttaatttcatttacattcaaggattttattgataggtaaggacttactcctatcattttgttaattgtactttaattattttaatatccttcattcttttcttcctctcttgtttacctctgtggtttggtgctaagctttgtttcttttccctttctcatgtgtttatcagctgtaatttctatctttgtggttgccatggggctaacataatgagtcttgtaattataatactctattttaagctgataacaacttaactttggtcacgttaaaatactttagacttttttgctccctcccacaatttatatgtttgttaccttaatttactttcttatctactgtgtgtttcttagtcactaattatggcttttcttgttttcgaccattttaagtttaaaccttcatactagagattgaaagatttatgtagcaccattataattctgtgtttgattatgaatttacctctactggtgagttttatactttcatgtattttcatgataataaatatcatccttttgtttacagttgtagctcttaagcattttttataagactgatctagcaataatgaattccctcagcttttgcttgtctggaaagatctttattatagctttgctggatgtggtattggctaacagttggtttttgtttccacactttgaatatattatcccattctctcctgactggcaagatttctgctgagaaatctgttaatttcctaatggagattctcttatatgtgacttgatgcttttctcttgcagcttatagaattc

SEQ ID NO: 198625 - DNA, 1000 bp, Homo Sapiens
ggcccccaaaagatgtccatgttccggatccctggaacccatgaatctgttactttacaaagcaaaaggtactttcaaatgtagtagggagcttactctggattacttggctggccccaatctaatcacatgatctcttaaagcagaaagatgtagcagaagggaagtaaaagattcccttgaatggctctcaagctgctcttgctggacagggtcacatggaaaacacgaagggatgtgagcagcctcatgggcaaagaccagcccctggccaagagctggcagaagatggaggcttccatccgacaatcaaagaaactgaactcaggcaattctagtaagtttggaagaagactcatcctcagagattccagaaaggaacatagacagccctaccagcaccttgattttggccttgtgagagggcagaggcttagtgcagccataccttacctagacttatgacctacaaaactgggaaatgataaatgagtgttgttttaaactggtcaatttgtggtaatttattatggcaaaaacaggaaactaatccactcacaaatatggctgtgcaaggtctaataaaaaggtaggcaggacaaaatgcaatctcagacatgctatgccagcagcagctggttctttaaatgctggtaaaagggttcaagtatcgacataccctcttgaacagggattaaagaaaaggggcagacttaatgtttcagtttttatttaaggagaagattgcagagattaccatagccaaactgaattcttaaggaagcaggtcagatacattagaattctactatattttaagactatttgcttcaactgcttttgatataagtaagagatttatattaaaacttccaaacatcctgttatgatctcaaaggttttctttaacaggattcagggtgtagtctgcaccaccaaacacagcagagttcgacagctgtgtacagagagcttttacacacagcctgttatcattagc

SEQ ID NO: 198626 - DNA, 1000 bp, Homo Sapiens
agccccgtcagcaattatcaagaattgctacatttcagttacctcaagcaacagacaactttactatgacacattccatgctccctataaaatgcagtctagtcgtacattccatattgtatatttttacctataaaatttttcaaaccttttcagtcagtattttacctcataattttcaaggatggcttttttgccagcccagaataataaagcaccttaaatttgtgttttttcctcagagaaatgcatattgttagccgaggatggttgctcatgcctgtaatctcagtgctttgggaggccaaggtgacaggatcgcttaaggccaggagttcaagagcagcctgatcaacatggtgataacccgtctgcaaaaataaaaaataaaattgcgaccaggcatggtggctcacgtctgtaatcccagcactttgggaggccgaggtgggcggattgcctgagatcaggagttcgtgaccggcctaggcaacacggtgaaaccccatctctactaaaatacaaaaaattagccaggcgtggcggtgtgcacctgtagtcccagctactggggaggctgacgcaggaaaactgcttgaacccagaggcggaggttgcagtgggccgagactgcaacaccacactctatcctgggtgacagagcgagactccatctcagaaaaatgaaaaataaaaataaaaaataaaataaaattagctcagcgtgatggcatggacctgtagtcccagctacttgggaggctgaggcaggagaattgcttgagcccaagagctcaagactgaagcgagctgtgatagctctactgcactccagcctggggaacagagcgagaccctttcgctaagaaataaaataaaataaaataaaaggaaaaaaaatcaaaaccaaatgcatagtgcctcctttctttcatgtctccctctagaaataataactagcttccattatttgacaaaattaaaattattataagaattc

SEQ ID NO: 198627 - DNA, 1000 bp, Homo Sapiens
aatcaagagggttcatgaagcactggggcctcagtcacaagacattatgaatcttcaatcttgggttttgccacagaggtgatttaattattgtccatgtatctgcttttcttctgagtaactatcaactctttatgaatttggtcttctctatatattattctcttctgtttccttcctattttctccacttgctatgacactcctctcttctcaacatcaattttatctcaggatcctaaatttaatatctggtgtttcttaattgcaccccattcactttgcttatattgctaactgcttcattttttcacaatagggactaagcatagtacctgactagataaatggtatttttagacactgtgggaagtaaaaatggtcacacaaaaatgatgtatcaggcagcttttatggccattggtctagagataggaagtccaaagtggtaaatccagtgatgaagagagaaaaagttgcctagtggaaaagtccctgtggcaagggagaaactttagaataatgattacactgtatggtatttagttttctactggtgagtatgctgtgctataatgttgcattcttcctcagtatcacctatcccattttctccagaaaatctacaatacataatagtcttgattaagtggctgttttaggggatgaatgaagtgggatggggagagggtggcaactagaggagcccagaacaatggtgagaagacggacaatactgggaagcaatcctcagcacatcttcacttaggagcagacgtgatgtgagggagaaacatttccccccatatatgagatgagagtggcccttgaaaaagttacacttaagactcagtgctccctgtgtttattatctctgatggtgacacagttgtagtcacccctatgtcctattttgcttccactttcccaattccttctcattcctgatgttctcactggggaaaataaaaataaaattttctgccagtccgctgaattc

SEQ ID NO: 198628 - DNA, 1000 bp, Homo Sapiens
tctggttgttttgtaggtactttctttttcttctctgcctttttttgtagttaaatgatttcctctatgtgtatgttttgattcttctataccatttattgtgtatgcctattacttgcttttgctctgtaattactacaaggtttataaaaaattcttgtagttataacatgttatttggacctgataatgacaacttttatcacaaagaaaagtaaaaaatatatatttttaaaataatgcccttctcttaaccaattattttaagtattgtctttaatagttttgtctttggtcttcatacttaagatgtaatgtatataccacaattatagtattagcgtatattcgtctttattatgtttaccagtgagttttatgccttcagatgttttcttgctacatgttagcattcttttctttcatattgtaaaactccctttaccatttctaagataggactggtgttgatgaactccttcagcttttgtttgtccaagagcctttatctgtttttcatgctggaaagatttgctgggtacattattcttggagggcagtttatttgcagtttgccttcagcgttttagatatatcatcccactcccctctctctcctggccttatgtagtttctgtggagaagtctgctaaaagccatatttgggctccgttgaacgtggtatgtttattttctcttgctgctataaatattttttattgtctttgatttttggtgacctatgagctttctgtacttagctgctgatgtcttcctccaggtttgggaatttttcagccatttattttcttaaatatgctttctaagcctttttctcatctcctttgggaactcctgttatgtagaggttggtatcccataattcttataggtcttctttactctttttttctctctgctctgctgattgggttatttcatatgttctgtctttgttctgattctttcttctgcttgatcaaatatactgttgaagctt

SEQ ID NO: 198629 - DNA, 1000 bp, Homo Sapiens
attattttcataaagtctgcattttatttgctgttagtttatttagaaaaatttgtatctatcatcattcttgagattcatctatagattttataagttggtatgtttcttgaccataattttgggctatgtttttattatcatattaaatcatactagctgctttaaaaaaacagttcaagaatattgaggacttagtcttgctaaacaaagtcaatatgcaggtggtcctgtttcaaaaactctactgagcagctcctccaaactcatgggctcaaactgcttctactttgcaatgtttttctctttaaaatttggccttcatgtttgacccacaagagaatagcacagcatgggtcattgtgcaaggaagctttggcaagcatgaaccgatggacagcaattctgttcaaatatccttggccaaatcaggaacatgaccccagtgttgcaggagtggcagaatgtaggttttctctgaataaggaagcatctaagtaattttgagatttttgatttactttgtttaatatattaatagagttgagaaattacttatagtggaagagtttaaatatgataattatctgtttcttgagggtgccaaatatttcagttttgtttaaatattaacctatatcagatctctgacattactgacactttttttctatctattcagtttttctcctgcaccatgaggcaattatgaaagttcctgtctttctttaaattcttacttctagcacaactaaacatttttcacatagagatatatttattaaattttaaagattaacttttatattgtcacttctcctttttattctaacattttggtttagattgttgattgttccacttatttcttaatattttatattttcactaaaataagatttaaatataattattctatctttcaattttaaaattatttgatttttctattttctattagttttaattatttatgtaattaatttgaataaatgaattc

SEQ ID NO: 198630 - DNA, 1000 bp, Homo Sapiens
taatatcccattctttataatctactaacaataaaattaaaaatcaaaagaatgagaagattctagatcaaacgaaaatagctgcaatctcaaagaaaaataagtgcattctcttataagaaaatatcctaaaataattttaaaatctaacaactttttcttttttttttaaattatactttaagttttagggtacatgtgcacaacgtgcaggttagtgccatgttggtgtgctgcacctgttaactcgtcatttaacattaggtatatctcctaatgctatccctccctccctccccccaccccacaacaggccctcgtgtgtgatgttccccttcctgtgtccatgtgttctcattgttcagttcccacctatgagtgacaacatgcagtgtttgttttttgtccttgtgatagtttgctgagaatgatggtttccagcttcatccatgtccctgcaaaggacatgaactcatcattttttatggctgcatagtattccatggtgtatatgtgacacattttcttaatccagtctatcattgttgtatatttgggttggttccaagtctttgctattgtgaatagtgctgcaataaacatacgtgtgcatgtgtctttaatagcagcatgatttataaatctcttgggtatatacccagtaatgggattgctgggtcaaatgtctaaaacatcaaaagcagtggcaacaaaagccaaaattgacaaatgggatctaattaaactaaacagcttctgcacagcaaaagaaactaccatcagagcgaacaggcaacctacagaacgggagaaaatttttgcaacctactcatctgacaaagggctaatatccagaatctacaatgaactgaaacaaatttacaagaaaaaaacaaccccatcaaaaagtgggtagaggatatgaacagacacttctcaaaagaagacatttatgcagccaaaagacacatgaaaaaatgctcatcatcactggccatca

SEQ ID NO: 198631 - DNA, 1000 bp, Homo Sapiens
gagatggggtttcaccatgttagccaggatggtctcgatctcctgacctcgtgatcagcccgcctcagcctcccaaagtgctgggattacaggcgtgagccaccgcgcccggcaccattttttaataagaaaacacataactgtcttccaaagtggctgtaccattttgcattcccacgagcaatgaatgaaagttcctgttgctccacatccttgtcagcacttgatattgtcagtgttctgaattttgaccatcctaataggtgtgtacagagtttctttttggggtgacaaaaatgttctggaattagatagtagtgatgattacacaactttgtaaatatactaaaactcactgaattgtacacttttcgagagtaaaatttgtggtatgtgaattatacctcaattttgaaaatatttttaggaatggggtctcactctgtcacccaggctggagtgcaatggcacaatcatagctcactgtgacctcgaactcctgggctcaagggatcttcccgcctcggcctccaaaatagctaggactacaagtgcatgccactatacccagtttgtttgtttttgtagagatgagatctggctttgttgcccaggctggtcttgaactcctggcctcaagcaatcctcccagctcagcctcccagaacattgggattacaggcatgagccactgtgcctggcctcaatttttttaatgtaaaaaaatttctaaagccagtatataaatgtgaaacatcattttaactcagggtttctcagtcccaggattgttgatatttggggctagataattctttgttgtcgaggctctgccctgtgcattgtagtatccctggcctccgcccactagcacacacaccccagccatggcaaccgaagatgtctgtaaacattgtcaaatatctcttggaggacaaaatcaccctggattgaaaagcacctgctataactgtatgatgtgaacattctcaatgaattc

SEQ ID NO: 198632 - DNA, 1000 bp, Homo Sapiens
cagcctcccaaagtgtggggattacaggcgtgagccactgtgcacggccagcaccatcatatattttaagaactaacaaaagaggaagcaacaaagtttaacttaactagcagaaaattcccaatttcaaacctttcaggacatctcctgaggtcagctaaagtttagccgcatttccagttgtttctaaatctatcatatgatgcattcatcattgataaattctgacaatactgcccatgtgtcctagtttagtcctttcaaacttctgaatctcaattttctcattcattaaaccaaagtacccttggcctgccttactcactggatagttgggagggaggggagagactgtatctaaaagaagttcactctatctaaagtatcaagatatattgggcaaaatacagtattatgttaagaatgattcttaggtattacaagagcttcaggtttagaaaagcaaattaatttagcccaccacaataataagaacagaaaattagactaaaattttataaaggttttcatcgatgttgaaataaaaagatgtgctgattaaaatagatttgtaagttcctgccaatatttcatttacagagaatattactctcagattttgtaagaccatcatcactccactaaaaaatgaatgctaaaagctactaagaacttgagtttatacttcgaattccaggcttttatgcaggccagagaagagatgagttctgggtagaaaggctttttgggacttttcacacaatattagatgaatggtcccctcctctgccggtatgtactgaattcctcttctcaggtgtcagaaagagcagccacagcctgagttccttcacctttccacagtctatcattgcattcaaaatgtaaaagaactcattgacccagcaattcctcctgtaagaacttctgtggaaatacttgcactagcatgcactggtatatcatatgtgtactatgcagcgttgcttgcaatactgat

SEQ ID NO: 198633 - DNA, 1000 bp, Homo Sapiens
tggattggaaaaatcatactgaatttggaaaacagagaatgaaaagctgaattttgcaatagaacaagtggattccctatccccatttcatgtcagtggatgcccacctgaccttgactaacagtttgaatttgattagctactgattttgtgaggccaagtgaatcccataaaatgttcaattagaaaattatccatgctacttttattacctacagtgcagagactgatatttgcataacctcgttttaaagttgctagtactctctttcaggtttaatttccaacattactgattttcagaggaaatctttatattgtgtgatttccccccccacttccaatttgaagcatacttaaacctatataaggttatttttaccaacccttgactttttatgttaatcatttctcttgatttttcttcacactggaaatggtccttaccactcattgattacacttgagtgaaaggcttgagtaggatttctgaggaaactgccccagctctagctctgcaggtgtaggagattttgctgtttagctaaaaattgtctgaaaatgaaattttcatgcacacacacaagttttacaatatgatcttacgtttccatgatctgaaactctctacccttgtggctcactgaatgttaagaggatgatgatgttgttgaaagctagcagttatcggccaggtattaagctaagtccttgagtggaatatatcattaaatcccagagcagtcctatgggggaaggaatattattgtcatgcccattttgcagatgaggaaaccaaggcccggtgcttactcacagtcacagaggtggtctgttctgtaggtccccagggagctggtaggagctgaacctcttactctccaccccggcaacttttctctcattctttcctcatcagtgcctccaggacccttaacttctccacattttccccaccagaaatttcccttgtgctgaaattcatgatctctttgaattc

SEQ ID NO: 198634 - DNA, 1000 bp, Homo Sapiens
agtgatcctcctgcctcagcctcccgagtaactgggactacgtgtgcgccactatgcctagctaattttttgtattttttgtagagagggggttttgccatgttgcccaggatggttttcaactcctgggctcaagcaatctgcccgcttcagcctcccaaagtgctagcattacaggcgtgagccactgcacccagccctgagcttttgtgtggtaaaaatatgaagtatagtgcaacatgatggttccagaaagactaacaatgtcctggtgcataattaggcagcagactgccatgattccagaggaattaataaccatctgtaaaactgcaattatttttcttttggatgggctataacaccaaaagagaggaaatagaggaaagcagaagtattggcacagaaagttcataattaagtatttatccaccaacccataatagctcgggtgctagctattccaatcagcttatgtaacatgtgaaaccttggtactgtttctttccttcctcccctgcacagacaagttaaattaacaaggattttctccatgatattccttgctgatatgaatatcagtgcacttaccaaataagtacttgcctccattaacattatagtctaagacagactgatgaagacagagtgaaatagaaaggacaatgagaaaattacacattgaacaaagcaccttataaaattaggattaatctgacttctctagtatctgttactcacagatgggtaaaaggatgtgtcaactcaattgcctcacacaatagtggggatagtaggatacagaataggattctctgaatatatcagttctcctctcttcaccaatacacataagtgatgtaaggtttttgagaacgggagatgagtctttagtgtttttatatctccctggcatgtttaggacaaagtgctggaacaacatatgtaggatggctagcacttttcggtagattaatcccaggagatccctggagaattc

SEQ ID NO: 198635 - DNA, 1000 bp, Homo Sapiens
tgcagggtttggggaaggggaaaagacttaaaactgggaagttgtgatgtcctcacatagatggctagtccctgcagcttgtctttatgccgtaagtgtgacattagccattcccaatgaaagtggctgcttcagaaggtgcaggttgcagtggtctccatttatgtggggagctttacaaaacccatgaccaggctacatccaaaccaattaaatcagaatcctgggttggggtgagactcaggcatcagtgtgttttaaatgtttggcaggtgaagccattagcctaggacaatggttctcaaactttaacatgtatcagaattacttgaagggctcattaaaacacagatgggccaggcatggtagctcacattggtaatcccagcactttgggaggctgaggcaggaggattgcttgaggacaggagttggagatcagcctgggcaacatagcaagaccctgtctctacaaaaaataaaaaaaaatcagccaagtgtggtcgcacatgcctgtagtcccaactacttgggaggccagggtggtaggatctcttgaggccaggagttcaaggccctccttcaaaaaacaaaactgaaaccaaacataaaaccacatggatggctggtcccatccccagagtttgtgattcagcaggtctggagtagggtctgagaatctgcatttctaacaacttcctatcggatgatgatgctgctggcctgggcaccacattttgagaagcactggtctaggagacccttggctaccttaaaaactgaatggagtggggatggaacagagtaggggaggcctatttcagcctttgattaccactggaggatctgttttggttgcactcttggctcagatctacttgatagtaatctgcaaaatgtagatataataaaactactttatacatagttgtgagggttaagtgaaatgaggcacggaagtggccacaatgttaacctgcaggagtcttcatcgtcgtac

SEQ ID NO: 198636 - DNA, 1000 bp, Homo Sapiens
tgtttcatgcaactctagctgtgaacagtttactcaacatggtgttacaggtaaaatatgtttgactcctaaggaatctttcttgtgaaaatttttttttgaggaggagggagcattcatttgtacttgggaaaactactgttttgtttgtttgtttgtttgtttgtttttttgagacggagtcttgctctgtcatccaggctggagtgcagtggtgtgatcttggctcattgtaacctctgcctcccgggttcaagcagttctcctgcctcagcctcctgagtagctgggattacaggcacccaccaccacactcagctaatttttgtatttttagtagagatgggatttcaccatgttgtcagggctggtctggaactcttgacttcaagtgatccatccaccttggcctcccaaagtgctgggattacaggcgtgagccactgcgcctggctgagaaaattacttttattctgttcttccattgatagaagtgtaattttattaagttactaatagaatagaaagcctatttgttgctgtcaaatcttacacctttcatttttaaaccccgttaagtttattcctagagaattcagtctaagggtgcatgagagtacctttgaaaagttaggaaatggctgtgagcattgataccatcactcaagtaagtgatggcttggaagaataatagcatttgatttaaattacagtttttggtaaattcaacagtctctttacttgctgtagtgttgagcgcctctgaaaataggaagctgaacgctccttaacggcacgtatctggttgtgcacagccccatgtggtcccatccattctggggtgtgctgtctgctgtgtttggtttgtgctcaacttccctgtttgagattcttttttaagttttatttttaaagtctttaatttttaaaaatacttcaatagcttttggcgggggggtaagtggtttttggtgacgtagatgcattatatagtgaattc

SEQ ID NO: 198637 - DNA, 1000 bp, Homo Sapiens
gatctctcttcctctttccaaagttctcttatttctctttttgcccttacttctccttctgaaaaccatctgcctactaccatctctctggaacgtctccttgtccccagatgtgactattgttcttaatagagaagggagcctcctccctgcaactggagaaggtgggaatcagcactgtttcctttgacatgttaaggaatggaaaggagctggatttctacctccccaagccactgggtggcgctcttaacccaaaatcagctcagtaggcgacaggctgcaaagaagaaccccccagaacaaggggaaacaaagtttgcaaatgcaaatgccagttggggccaggcaggaaaggtaaatggatgtgccacatgggccaggcagagactttgaggaggtggtgagagaatacccctctaaagggaacagccaccgcttagctccacctgattgctgccctactaaatccttatattttatgtaaaaatctgtttcaaaattttgacaaagaattttccataggtgccagagaaggtgattcagcccctcttcccctgtcagccgtttcagcgtaaattcaaaggaaaaaaaaagtttgactgggtttggcccactgacagttagcttgtgatgtctattagatacagacccagagcaagtgcctgggagaggcgggttggtcaagccctcctctacccacattggctgtagcccagctcctttaagtttgcccagaggtcaggaggaaatatttggagactgatgacctgtgctcacaggtacctctttgcccaggaggtttgagagtatatttcaaaggagtctaattaagtagtgacttttttcttgccaggttgagcctgtcttacctgacagagggtaagggtgaggggaatacagctgttggaaaagagcagtggttgagggaggggagtgcatgctattgcatttgacggtatagcaaaataccctccaggttagaggcaaagtggaattc

SEQ ID NO: 198638 - DNA, 1000 bp, Homo Sapiens
ttaacgtggtggggtagatcaaagtatctgcagggggcaggatctggaaggggtgtgggcattgagccagcctggaagggacgtggagcccagggtagattctttaagattctttacaggcctggccggggtgttgacacttcataaccacacagaggctccgcgtgggcatgcttgtctcagcagcccacacggaggtaggtgcttctgacatctcgcaggagcctccaaccagcaccacctctcaagccttccctcctttgtcagtagggaagtcagagaaagtattaccaagtccaccaacccagagctcgtggggtccttgcagcttctagactctaaagtgcatctcacttaaagaacaaatgccccacagaccaaatctagctaaacagaggttcttcggtccactgttggcctccaagagcaactgtatgttttgagcgccacctagtggtacccagggcccccagcgtttttgacttctcaaacctgcccttaaggacggagctcctacctcccgcctcggaggtctctccaggtaggctaaggtgacttagaggaccgccagccccttctggttccagagctcttcagagaggtccaaggccaactggttcctcgaaactgtgggtttacatcgggactgccccatcctgggctctgcctgtcaagaatgctgtcctggattagggcacaggagaatgcgttttgtcattgatctggagggagggaaggcatgtggaggaatcagcatctcatttcaatgtgagagaaactaatggagggaagagaattttttaaagctagtgagaacacacattcatttgacaacttagttaaaaaggaccgattccttgaaaaatacaaatgactacaactcacccaatgtgaactagataatttgagtatgcctacaactgttaaggaaatcgaatttgcaattttaaaactcccaaaaaagaagtctccagatccagatggtttcactgaagaattc

SEQ ID NO: 198639 - DNA, 1000 bp, Homo Sapiens
gtgaattttgtggaatattaattacatctcagtttttaaaaaatgacttaggttattaaaaatacatgtgttggccgggcacagtggctcatgcctgtaatcctagcactttgggaggccgaggcgggcagattgcttgagcctgggagttccagactatcctgggcaatatggcgaaaccccatctctacaaaaaaattagccaggtgtgatggtgcatacctgtagtcccagctactcaggaggctgaggtgggaggattgcttgagctggggagttcaaggctgcagtgagcccttactacgccactgcactccagcctgggcaacagagcaagaccctgtctcaaaaaaaatatatatatatatgtctatgtctccaatccacaccagtaaatcagaatcttgggggtttgggcagagatatgtgtgttttgttgaaattccttagaggttctaatatatccctttagctgtcaataactgagccagcactggatggactgcatagctttcaggcagtcttgtagaagtggtgttattcccagctagacttttggtggacattggactgtaatctgttcagcatgccactctctcacaggtatctagaatgcagctaatttttatgtttccataggtgaccagctgcatgcattaactgtcatctgagttggatgattggggttaatatttaagagctgaggagcctaacagtcacttatttacgtactgatttaagccctgctaaatttagtccacagaataaaataatttggaaacttaactgcctttctcagttttcagctgaaggaatatatgaagagaactgtaggtgacctgacttgtccaaggtcacaaaaagtagtaacaggtagaactggaccctacactatcaaatttctagtagaatggaaaaacatttgtggtatactataactgcatctgattttttttcccttcctttctctgatacattttgtagactataattggaattc

SEQ ID NO: 198640 - DNA, 1000 bp, Homo Sapiens
ggacaggtttgtcagaagcagggactgtgttaccctagagaaatctcctttttatcttgtcttttgattttgtttttgttttttgttttgtttcgttttgttttgagacaggctcttgctctgttgcccaggctggagtgcagtggtgccatcataactcactgcaacctggacctcctgggcttaagtgattcccccacctcagcctcctgagtagctgggactacaggtgcatgccaccatgcctagataaatttttgtattttttgtagaaacagggtttctccatgttgcccaggctagtcttgaactcctgatctcaagtgatcctcctgccttggcctcccaaagtgctgggattacaggcatcagccacagtgcctggcctagtttgtcttttactatgggtcgttctttgggctcaggcctatcggcactggtgcatgccatacttaatctcagagactcagcttgctggaggcagactgaaagcaagtatctcgaagatgtagttttgagttatgacccaagcaagggagagacttttcccaggggtagagaaggacatgatttactggaatagtcccaagaatatgccaggaaatcatttgtctgcagctaaatggtttccatactgcaatgagtaggaggagtaaacaggcaaggatgggaattccagaagtgatttttctcccattctccccaacccccaagtttattggtaaatgtgtgattgtcattttgccccctgcacctcatatccccacatgtactctctcgccaaacttacggttttgtagctgatcaacttcaagcaaagtacacttgggctgggttgccagcctaagaattttcaagtagagaaagctggtgaaatctgatccaatgtgattcccctggttctatggaattctagattttcccggatttgccagagagattttgttggtctcaccaatatgagccttgagtgtcgcagcagggtaatgcctaagaattc

SEQ ID NO: 198641 - DNA, 1000 bp, Homo Sapiens
ttagcctggaatggcccctctgaatgtttcagaaccttccctgtggactaaatgggatgatctgtgcattcacgccctacatgtgggaaatatgccctaaatgcctgggcatctggcaggctcgggggtgagggttccagaggtggcacggaggacaagaaggtcagctttggagtatctgagtagaccccaggcctagaggggccctgagcccctggaagggtcctgctaggccattcatttgcaccatctctctagaccctgctctcctctcagcagatgagcccacctcccccaagaggccgaagagcatctctgagccacagcacagtgatgcggaaggggacgctgcctctcccctgccctccgagtggacctcagtgaggatcagccctggggaggaagcagctggacaggatgtgctggctgtgcgtgtcctggtcaccagcgaagacagcaggtatgctcaggctgctgccagatggggacagaagcggggttggaggaagggaatcacatttgggattgggtcttctctctacttgcttgcagtgtggcctctctgtgcctccatttcctcatctgtaaaatggcgacaatcatagtacccatctcagagggagtggtaagattcacagaattcatatgtgttaagtgtatagaacagtgcccacacgtcataagcactgtaagtgttagcaattgttattttcttgggaagagaaagggcctggccccatgctcttctcaggaggcagtgtcatgctgactgtagtgaggggtgcagaatgggtgtcacctgtcccgagggccgcccactgcaagatggtgatgcatggggctgggcaggctaggattcagagtggggaacatgaggagcgaagccctggtgccttaggtgactgtttctcagagcgctgtcctcatcacctgcatcagaagcacctggagtggttattagacatgcagactccaggactcgcccagatgcactgaattc

SEQ ID NO: 198642 - DNA, 1000 bp, Homo Sapiens
tctttcaatatgagtctcagagttagtaaactctctcagaccttgattgtcaaaaattatttttatatcctattctcagttccaactttccatttatgtgggcctgaggccctaattcctgttccccatgggcatgacatgcccagtccctagatgtcagaacccacactctgttctgatgtcccccccatgcccttccttagcattaacgggtctgctttccactctggtttcagtttgcctgtttatttctagcctcggaggatttccctttctttgttttgagctcagcttctttacatagttatatttcatcctgtgtttgtcatgggaagtggtggagggtccccattaatctttttccttactattactggaagtccacatctatttataacaaatttccctcttactaatgtttattactcttcttttaaataaatatgatataaatatgatatgacaaaacagacatgacagggagagctggatgcctcttattgtgtttcagcaaaacttacaaagttcctaaaattcttcctgattttcatatataaggaacattctccaggtaataacttgagagaatgcaattgtatgccaagaaatggaattttccataggtttctattttctggcatcttcctcacttctctttgccctgcagaggtgatccccgaggagaaacttgctcagtatttgatttacaccctccacgctaagaatgccaaagcagcatgttgagaaacctgtctctgtaaaaaagccatgctcaggacagacccagagctcagctgcccctgcaaatcaacagctggctggacactgaactggttccaaagcctgggaattcacagctactaatagatgaatgggatcaatctcatttgcatttcatcatgactcaggaattccctggtactgcatctctgggcaaattaaaacatcagtttaatcagctcatgcccttcactgtcaggacacgggtctgggagaattc

SEQ ID NO: 198643 - DNA, 1000 bp, Homo Sapiens
tgtcaatgtgtcagttgtttcaaaataggaacacttgctttcaaaacagaagttcacaaactgtttacttccctatttcatttagttaagattaaaaatatctttcactttaaagacaaatctttgtctactaagtttttgtttttcttttaggtgaaggtatttttctgaatattacaactgatgaataaatataatttgcaattttaatacatctaaaataactcatgaaaaaaacaaatgctgtaaataactagtagaaaaatttatgccatattgtggggggtggtatcaggcattaggaacctaggttgtcattgcatatctttaccttctagccttcacaatctcctcacccacaaaaggagaaggctggactagtcaaatcagcgatttttaaactttcttctacaaaaactaggaacagaagaaagggccacacaggcaggcctcaggagggtccccaaagctgtgttacagagtcaccttgcctagcatgctgttgttatggctggcatcttctcctccttcaagtctcagccttgaccccactcacagtgtggccctccttggcttctcagagcagcccagttatcctctattatattccctatcttaattcttatcacaatctgtaaaagttcctggtttgcttgtcaataatctgtgcctagaagcaagtctgaaaaacataagataagaaattctggttaggataatgacattgtgcttgagcccagggggcagaggttgcagtgggctgagatagtgccaatgcactccagcttgggtgacagaacaagaccctgtcttaaaaaaaaaaaaaaaaaagacactgctattttagaattcaacattgttaaatacatcaatatctcttttacagttacacttgctcaatattttgtttcaacaaagggctcaatagcaattttaaaacatcctggactaggtccacatgggtcccttcgagcttaaagacattttatgatcaaagctt

SEQ ID NO: 198644 - DNA, 1000 bp, Homo Sapiens
tacagcatactgtcagaccaagtagggttcccgtaacatgtaaattagcagcctctgaaccattgtagagtaaggtgactgggtctgtctccaagaatttgaatctatttctgactgaggggtcttgcaaaaaaaattttttttgagatgagttcttgctctgtcgcctaggctggggagcatggtgtgatcatggctcactgcaacctcgaactcctggcctcaagcaatccttccacctcagcctcctgagttgttgagactacaggcgcacgccactgcacccagctaatttttttttgtagagacgaggtcttgctttgttgcccaggctgttctcaaattcctggcctcaagagatctgcctgcctccggctcccaaagtgctgagattacaggggttagccagcatgcctgggaattctgaaatttttcaaacactacctccagaactcactgatgtgctattgcccctgtatataaaatgtgaagtgcagcacacaaacattttctaatataaggtgttcttttttcatgtcaagatgtgtaaaaagtggtctcggacttgttcccagttgttaccccaaaattatagaagactaaaccaaaatagaataccttgtgtttaaataggggatagttctcaaaaattcagttaattcctgatattctggaatggctctatataaatatcaatgatagtaaagacttaaactcatcacatattttgcactctcttagtactcaaaatcctagacactgaattttttctagcagggtcatagctttgtacctttactaccacttgctattagtgtttagttgaagctagagacctgacatagataatgaatttctctttttagcctcatagacagtttcttttctacattaatgaacttcaagtcacaatgtcctagtctcctctcaaagtttttcccatttacagtgaaccagttctgcatctgaaccataacaactaatttccactcttctggac

SEQ ID NO: 198645 - DNA, 1000 bp, Homo Sapiens
tctatgaaccaggaagcacttacagctacctgattttcaacaaatgcaccaagaacatacattggggaaaggacagtctcttcaatgaatggtgctgggaaaactggacatccacatgcagaaggataaaactagacctctacctctcaccatatacaaaaatcatttcaaaataaagtctcaggtgtaagactcaaaatgataaaactactagaagaaaacaggggaaatacttcaggacactggtctgggcaaggagtttttggataagacctcaaaaacacaggcaacaaaagcaaaaataggcaaatgggattacatcaagcatattttcaaactacacatctgacaaggggttaatatccagaatatataagaaacttaaacaactcaacagcaaaaaacaagtaatccaatttaaaaatgggcaaaagacctgaagagacatttgtcaaaagaagacatacaaatggacaacaggcatatgaaaaaatgttcaacatcactaatcatcagagaaatgcaaatcaaaaccacaataagatttcacctcaccctagttaggatggctattatcaaacagacaaaaaataacaaatgctggtatggatgtggagaaagagaactcatatactattgataggaatgtaaaattagtacagccattacagaaaacagtatggaagttccttaaaaaattaaaaatagaaccaccatatgattcaaaaatcctactactgggtatatatccaaaggaaatgaaatcagtatattgaatagatacttaaaaaattaaaaatagaactaccatatgatccagcaatcccactactggtatatacccaaaggaaatgaaatcagtatgttgaagagacatctgtactcccatgtttactgcagcactattcacaacagccaaaatatggaatcaacctaactgtccatcagcagatgaacagataaagaaagtatggttgtatatatacacacagtggaattc

SEQ ID NO: 198646 - DNA, 1000 bp, Homo Sapiens
aggccagatttatgtttctctccgcccagacatctcagtggagtaaagaataacaaagcaacattgctgccaacatgtctcgcctcctgccacatggcggtttttcttctatctcagaattgaacaaatgtacaattgggttttatactgagacattcagttcacaggggcaggcaggagacagtggccttcctctacctcaactgcaagaggccttcctcttttactaatcctcctcagcacagacccttcacgggtgtcaggctgggggacgatcaggtctttctcatcccacgaggccatatttcagactatcacatggggaaaaaccttggacaatacccggctttccaggacagaggtccctgcggctttccacagtgcattgtgcccctggtttatcgagactagagaatggctatgagttttaccaagcatattgcttgtaaacattttgttaacaaggcacttcttgcacagccctagatcccttaaaccttgattccatacaacacatgttcctgagctcaaggctggggcaaagttatagattaacagcatctcagggcaaagcaattgttcagggtacaggtcaaaatggaatttcttatgtcttccctttctacatagacacagtaacagtctgatttctcttttttttccctacagcctggagcttacacacaacaagcgctcagtaattgtttttgtttgttttcagttggggtcttgttctgttacccaggctggagtgtagtggtacgattagtgcttactgcagcctcaacctgtcaggctcaagtgatcctcccacctcagcctcctgagtagctaggactgcaggcgtgcaccaccatgcccagccaatttttaaattttgttttagagacagggttttgttatgttgcccagtctaatcttgaactcctgggctcaaacagtcctcctgcctccgtcttccaaattattgggattacaggcatgagttactgccactgtg

SEQ ID NO: 198647 - DNA, 1000 bp, Homo Sapiens
aggacacagcaagaggctccatttatgaagccgagagtcactgaatctattggcaccttgatcttgaacttcccagcttccagaactgtgataaataaatttatattatttataaattagtctaagctattttgttatagcagccataacaaactaagacacaagccgtgtgtaaataagtaaataacctgtcaatttctttaaaaatagagataatctcagctactacctaaatttgttaggaagattgcatgaaataattgtacaataaacttagctctctgcctagttcacaatacttgctctataaatacctactactgctgttataaaatcttttagaatcaacactcacagccacttaaaaagttttcccctaaatgttctcaataaagttgaaagatcatatatcaccagcttgttttctctttcacactcttttttccctgcactaccagatatctctctgtgtaaggaaaatgccaggccatgtgaggacagattagaaggcagctatctacaaactaaggagagtggcttcaccagaaaccaaccttactgacactttgatcttggactttcagcctttaggaccatgagaaagtaaatttctcttgtctaatccagccagtctgtgctgttttgttatggcggcccaaacagactaatacaccataggatgcaatgctagtctgcataattttttagacttttcagttacttagcatattctggaattggttctggaagtgaccttttttgtttcaatagttattactgagtagtagaaagtgtatgtaaatttggaatgtctttaacatggccttcaaagtgggaaccacagtcagatataacgtgacataaagtaacagaagaaaatcatgttgatgaggaatagtttgaccatggataggacaagttgagaaacgaatataggggaggaaacatggtatcagatacgttctctctctactgcttggtgacaaatgttacagaattc

SEQ ID NO: 198648 - DNA, 1000 bp, Homo Sapiens
actcataggtgggaactgaacaatgagaatgcttggacacagggtggggaacatcacacaccggggcctgtcatggggtcgaggagaggggagggatagcattaggagatatacctaatgtaaatgatgagctaatgggcgcagcacaccaacatggcacatgtaatacatatgcaacaaacctgcacgttgtgcacatgtaccctagaacttaatgtataataaaaaataaataaataattaattaaataaaaaatcattctgactactatgtggagagcagactggtaggggcacacacggaatagacagagtggttaggaagttttgaagtagtctagagagagaagtgaggaggttctggctaaaaatatgcagaaagggatggagaacctctggcagaggtgagagaaatttagaaactaaaatcaacaagaaccagagattagttggatatggggggaaagaaggagttggataaagaagaggataatttcgaagataaatagctgacttccaggtttctggtttctataaatggatggaagtcagggccattccttgagattgggaatggtggaagaggaccaaagaggggtctctgcgtttcattttaaagatactgtctgagctatctttgagctgcttaaggggagacattaagtagtcagctggatttataaccttggagcacaggggagaggtttgagctctaggaggaaccatggaagctgtggttataaatttgataatctagaagttcagaatggagagcagatggttcagaattgggccttgaggaattccaacattcaaagacgggggaaaggaacacggacctgaaaaagaaatagagagaacactgaaagaaccaaaaaaaaaaaaaaatttcaagaacaaggggtactcagtaatgttaactgctactgtgtatttaagatgataagattttttttacatctactagattcagtgatatggaggttttctacaaccttag

SEQ ID NO: 198649 - DNA, 1000 bp, Homo Sapiens
tcagtactttaacaaagtactaagactcttacttctcccttgcaagagaaaatctccaattactggccgggagcagtggctcatgcctgtaatcccagcactttgggaggccgaggtgggtggatcatgaggtcaggagttcaagaccagcctggccaacatggtgaaaccccatctctactaaaaatacaaaaattagcagggtgtggtggcaggggcctataatcccagctacccaggaggcagaggcagaaaattgcttgaacccaagagacagaggttgcagtgagccaagatcatgccactacactccagcctgggcagcagagcaagactgcatctcaaaaaaaaaaaaaagaaagaaagaaaatctccaattactttatttggtcaagttacaaacccaaaatcagagtcagctctgaactcctgattaaagcatcatatggaggtgactatgtaaatggtaacgtgcaaggacaaattctaggacataccatggcaaagagatttctcattgaataagtggtttcatttcattttgggaataggatttaaggctttacacgtaaagaaaagaatttttacttcctgcagacattcattcattaaatttttaagaattaattagattctatttcatgagtagcacaacataacatcctatacagacacaaatatgtgtaaagtagactcaattctctagcagatgtcacttctgctaaggagactagacagaaaaatactgtgcagttaaataacactataaacagacatggtgtttctaacatctcacccacccacgcatacccctctcccaatcaggtaattttcgtctctcttgtctccctgaccacactggattacagctgtaactataatcaaccatgctttttttcttttttgagacagggtcttgcttagtagcccaggctggagtgtaatggtgagatcatagcaggcgtgaaccatacactcggccaattatgctcttgaattc

SEQ ID NO: 198650 - DNA, 1000 bp, Homo Sapiens
tggtacatgcctgtaatcccagctacttaggaggctgaggcaggagaatcgcttgaacctgggaggcagaggttgcagtgagccgagatcatgccactgcactgcactgcactaaagcctgggtgacagagtgagacttctcgtctcaaaaaaacaaaaacaaaaacaaaaacataaaccagacaacctagacttggcaaaaactagtataaacaaaattgggactccagtgacaaactgggaaaaaacagttgccatgcagcatgttcaaagggctaatttcctttaaaaagcaggatcacttgctgatagaaaagaccaacaactcagtagacaagtgggcacattcagagacagtttaaaggaatgacaggtggctcctaaatgtatgaaatggttctctttcagtcggtataagagaaaagcaaattgaaactatactgaaagcatttaaaaaatatccaattaaccaagatgaagaagtttgattagctgttggctaaggtgtaggaaaatagctacttccctatattaatggtaagattctaaactctatggagagcaattggataatatccattaaaatttaataatgcacatattttgtgtagtatagataagtttagataagatgtgatgtatttacacaatgggatattatagagcaataggaatgaatgaattccaattcacctaatatgaatgactcacaaacataatgttgggtgaaagagccatgcacaaaaatataagtataaaaacagacaaaattgtgatgttagaagtcagggtagtattactcttggggagctcacactggattgagacaaggggcttttggaggcttataatcttgtgtgtttttttttttttaaatctgtgtgttaggtaggattatattgggaaaattcatcaagctatgaactttagaattatgtactgttctgaatgtatgctatacgtcaatacacatttttatgtaaataaaaatagtgtacat

SEQ ID NO: 198651 - DNA, 1000 bp, Homo Sapiens
cctataatcccagcactttgggaggccgcggtgggtggatcgtttgaatccaggagtttgagaccagcctgggcaacatggcaaaaccctgtctctacaaaaattacaaaaatgagctggacatggtggtgcatgcctgtagtcccagctatttgggagacaagacaggaggagtgcttgaacctgggatgggaaggttgcagtgcagcagaaatcctgctgctgcactccaacctaggcaacagtgtgagaccctgtgtaaaaaaaaaaaaaaaagtttgtccatttatttacatctatcaagttcttcctaccagaatggaagccctttcagggtgaggatatgtcttactccatattcctatttctatggctgtgcctaacacacaaggcatgctcaataattgtttatttcctgctcaaatgagacaaaaggaaatggatggaggagaggtggaaaataaatgagtgattgatttctctctaactatttaggcatgatttagcatcttggaaatcatattactgagatttgcagtgcctgtaatgtgaaagatgaggctattctgtaatacaaaacgtaatgccagctaaaatataacaaaaatatctgttgaaacgtatggctgcaaattcccatatttcagaagcaaataaagagctgaaagccattaagaaaaaaaagggtggttgttactttaactggtttaaaaacaattgatacatcttgaagtattaagtgtgcatcttgaggtcttaatttcaatgcagttttgctacagatttcttttgcttccacgatacagattagccagctagtgctgacattagttcatgtggtttgtgcccatcacaattattaggcagaaccagcagcaccaggatacaacctaaggagatcaacgtccctcctagaaaactgccacggccttcgcaggaggggtctgaatttttttttttttttttttttttttttttgaggtggagtctcgcactgtca

SEQ ID NO: 198652 - DNA, 1000 bp, Homo Sapiens
acaataacagtggaaaacttcagtattccactgacagcagtagacaggtcatcaagacagaaagccaataaagaaacaatggatttaaaatataccttggaatgaatggacttaagagatatatacagaacattccatccaataaccagagaataaacatgctattcaacagctcatggaactttctccaagatagaccttatgataggccagaaaaaaaactcattgaatttaagaaaactgaaattatttcaagcactctctctgaccacagaggaataaaactgaaaaccaacttcaaaggcacctgcaaaaccatgaaaatacatggaaattaaataacctgttcctcaaaaatgaaatcaagatgaaaatttaaaaattcttcaaactgaatgacaatagtgacacaacctatcaaaacctctgggttacagcaaaggcagtgctaagaggaaacttgatagccctaaacacctacatcaaaagactgaaaaagcacaaactgacattctaaggtcacacctcaaggaactagagaaacaaaacaaaacaaatccaaacccaccagaagaaaggaaataaccaagatcagagcagaactaaatgaaattgaaacaaaaaaatatacaaaatataaataaaacaaaaacctgtgtctttgaaaagatagataaaattggtagaccattagcaagattaaccaagaaagaagagagaaaatccaaataacctcaataagaaacaaatgggagatattacaactgacaccacagaaatataaaggatcattcaaggctactgtgacacctttctgcacataaacttgaaacgtagaagagatagataaatttctggaaaaatacaaccttcctagcttaaatcagaaagaattagatactctaaacagaccaataacaagcagtgagattgaaaatggtaatttaaaaattaccaaaaaaaaaatagtccaggaccagatggattaatagcagaattc

SEQ ID NO: 198653 - DNA, 1000 bp, Homo Sapiens
ctatgtggagcactctgtgtgatatctgtatttcttactgatctcagcaattttttctgaggcaaggataaaaatatattctttatatgttcaaaacatctagcacagagatttgcacactgcaggcccttagtaaatgtgtactgagtgagtaaagggcagagttgactttctaagtttctccagcttagtagtagtagaagtagtaacagcagttgcagtagcagcagtagcagtggcagtagtagtagtagtaatagtagtagtagtatatttaagatctgggaaaggaagtggggagggagagaaatcagcctacctacatcacccagagtcctatataataaaatgcagaaaattagacctctaatgagagcttttgttcagggataatgttataaatgatagatacagatatgtcaactatctgtatgatagatatgttcgactatttgtcgatgttcacaaaaaagttttttatgtgaatgtgaacccttgtaaatttgagggattcctaagtctgcaaaatctatcctgaagttttatttttagtaaataatgatgtgcaataaaacagaagatatctatacacatgccagctgtgatttttttattgtgcttggtttggtacatattataataaagaacagtatatgtgtgtgaagataaagtgatatatgtaactggataaattagaacaagggaaatactttaaagacaagggcgggaaatgatggtggtttcgtaagtatgtaaacatagaagtcaagtcttatgcaaatattttaaagtgtattggatcattagtcatggtgagccaataacatatgacataacagatgtgcttccagtagatgctagaaaaaaatctgtaactttgtagaaccacatcctccatagttattggttaattatatccatgcctattgatggaaatcacagactcccacccagagtttcaattatggtaattggttcaatttatagacaaggtgaattc

SEQ ID NO: 198654 - DNA, 1000 bp, Homo Sapiens
tttccatgattgagtgaatggctgctcagtttttccatgtcattggggaggttacgggtatatgtcaaattcctggtggtggcatttgggaattgagccgtaaatgaaggctggagggcagagtggtcaagggcatatcacagagtcacaggagacctaacttcacattcggaaccccctggctatttagctgtgtgtccttgggcaggttaggaatgggtcaggtctcagctctgtcacctgtgcaatggggctgaagaccctgctcctgggtttgctgtgaggactctgcgagataagagatggaacatgtggatacaccattggcatatgatgagcactcaacgtaaggcgactatttggcaacaccccttacttcattgttttatctagtacctctctccaaagctcgtggagtgcaacagacagcatttgagttagacctttgcagatcgctgctgctttgttctcacttgcaatcagctcacagctggtagcgtcccctcatgggagctctcagaaaatttgtctcttgctccccatccccggccccaacttgagtcatgccccaggaatttgggagagggcaccttcagccagtggtgtggcgatttttcctttctttctctttctctcttttctttcttccttccttctcttttgttctttttctctctttccttcccttccttcctccctccctctttctttccttcttccttttctttctctctttctttcttttctttttctttctttctccttccatccttctctctcctttctccctttcttttccttccttctttccctcccttcctctctttctttccctccctccctcagtccctcccctctatcccttccctctttccctccctccctccctctcttccttccttccttccttctctctttttcttttcttcttttctcccttcctttctttcaccttctttttgtaattgtgccgagttgctgagtgaatcattaagggagc

SEQ ID NO: 198655 - DNA, 1000 bp, Homo Sapiens
ggctcacgcctgtaattccagcactttgggaagccatggcaggaagattgcttgagcccaggagtttgagaccagcttggggagcatagtgagaccttgtctctactaaaaattaaaaaattagcaaggggcatggtggcgtgtgcgtgtggtcccagctactcaggaggctgaggtgggaggatcatttgagcccgggaagtcaaggctgcagtgagccatgatcatgccactgcactctggcctgggcaagagactctatctcaaaaacaattttttttaatgaataaagagggcaaaaggaaaatcttttggagattttaagattcgtttacatagactttacagccttgaaaaaagatatgtaagccccaaatataaagaagatacatttgaccagcaagatttattaacagctatggatctacgtgtgccatatcatgttcttcagtgtaatttcatgtttttgtccagcgattcacagaggactagattttagattgcctttcctctcccacaactgacaaggctttaatcagggcattaaggagttctaaataggtcttgcttttgaatctgcatatcaggagggggctgggagcatgagcgggaggatgtcatgtctcagtgattaatgatctctaggaagctgaaaaggggagtgtaatatacacagtatttctaccccctggagtaggaatgcaaacactattgtgcagatctgtgcatagtcactgacttcctggtagctggagaatttcatacactcttctaccacaaataaaactgtcagagaagtgacagagctcaaaaagctggccttccttacttaaaaagaatagctcaaacacagtgagccagaaaaattaattttgtagttgtttggaaaccaagttgttaaataagaaataagaaaatgggaacttttcttgaaaagcctaaaacctccaaatatttgttgaatcaaactctacatttggtttcttaaatttactgaatt

SEQ ID NO: 198656 - DNA, 1000 bp, Homo Sapiens
tcatgtatgcaatgatttgtttagatgtacatatacaatatttacatacatgcaaaatatatatttgtgacatctttaatacaacattaaaattttaagcctataaagagataaaacattcagaagtcatcatttcccttgcttttttcctctccctgccttccattgtagcatgataacttgttctagccctaatgttagactacctggggttcactgttggctgtgccactttttaagtattggtctatgggcaagatactcaaccactctgaacttccatttcttcacctggaagtgaagattataatcacagctgctttgctgggttcctgggaggactgaaagagaaatattggggacagcccagaatagtgttcaactcacacatagtagctcctcattaaatgttgagtgtctttattccaaattatctcaaaccctatacagcaggccgggaaacttgtttgctggtcttggcatgaagtttgtttagatccttcaaatttctgctatcatcccttcctcccactggctgccttgtcttcttcatatttccacgtcccatttttttcatcaaaatacgacttaaaagcatttttgtgtgcttttaagaattcttttaagaattcttagttctttctgtgcttgtagaactaggtcactgagtaatattcaaggtattttttattcttaagctttaagaaattatgttgacattgggataaagagttgtatgtatatctcaaaaacctgataaagatggtaaattggtgtttacacagtctgaggaaaatagactattagagaacacgaagctagaccatctcctacaattgagctggttaatatacccataatgtcaggaaactgagcaactgtaagaggttttaaggtctctactttcctaacaaccctttctaatgggaattagataagagtctaataactggacaagggtctgattgcttccaggaatactcaagattccagagaattc

SEQ ID NO: 198657 - DNA, 1000 bp, Homo Sapiens
gggagtgaggataatcccattaagtcagcgatggtggaaaataatggttatgggtcagagcagccacagatgccactgaccttcccactgaaaacagtatcagccgcaggcgctctgtgttggtaagactccttcagacaaccgttgggcaaaaatcaccctgccaagcacgtgcagccacccctccctgattgggaagaaggttagcctcccccagggtgggcagcctgtaccctccacgcccctaaggtgcacacacaggggcgggcgccagattccctttaaggacaggccttgttctcactttcacaggcacgcgtcttcttgcatttgttgtgtgtttccaaccgaggtctgtggttttttcttatgcacaacctggtgggaactgaccgttgccacttagatacacgttcattatcccacccacgtgttgaccgctgtgtaaatgagtgaataaatcagtagcgtttctgcacatttgatggagcagctggcaccacccagtgttccattcagcaccggtgagtttgaaggaagtttgacaagtgaccgtgaccacgttggacgcctgatgtttcaggtccacttgctgagtgagtgggatggtatgtgcgtgcgaggcaatagtggatacccaggctgagacacgggctctgtccaagcagcaaatgggggcccctttccttaaagggtcttactgctgaggtggtaacaccagcagaaagatttcaggcaccatggaaactccaatattaggaaatcacaggtgtctcaaacatggatgtgtaagcgggtgacgtgtgtttggaagtccaaggcagaggttccaagggagccacctcactctctaattaggagagtctggtctctacgtcagcggctatgacatctttccaatagcaaataagtcataagttatttataaaaagaaaatgtatcatttttccctaggaaaagttacttatcagactacaaatgagtcacttttgtgaaaaag

SEQ ID NO: 198658 - DNA, 1000 bp, Homo Sapiens
tttcagtggctctcaagtccatatttctccatgtgttacgaagaaccacatcccccactactctcaaggaaaaagaaaaaatcaaaaccaaagtaaacaaaacacccatctctattcttcatctcaaagaaattttctagaagttgaagctcttttagccttaatattctattaacttcagaaccacacccttccatttatgacaatttaattcaaagcctcttatatctgaccctagaaaaagggaatccttctgcctctaggactcaaagcccagcaaaacatttcaaaagagttgaatgtgagaaggaaaatagttctcattctttaaaattctttataagagtaggatcaaaacatattatttgtgtctataaattgtctaatcactaatggtaccaggacttcttgtcactaaaactatgctctgtaatgcattccagtggaaagcggtgtttatagtgcacctgaattagacctgtgtcagacagggatattgttctaaaattaataatgagttgtaagattgtatacatttataattaatttttcaaaaccttgggtagttggtgagacttatttcaggtttcttttctttatttctgtaagtagctttgatccttgcatgcagtacaatgtactctaactagaattttagctttaatgttaccatctgagaaatatcttctggttgcaactttaacacattcctcatacatgatataaagtgcaacaatgttttattggtagcataccagtcagtacactgctatttaagttctgaaaaaagtaggcaaacaaaaaccaacaggacaacaaaaacaaactttgtggtcattttgtgataatatgataaaattttgctcattctgattttttaaaaatagctatataatcatgatatattttagcatagtcacataaaataacctaattactgttgccaaaaggagaatgctgaacaatgatgtttgtgggataaaattcttttgtggaattc

SEQ ID NO: 198659 - DNA, 1000 bp, Homo Sapiens
agtgggaggatcatttgaagtcaggagttcgagaccagcctggccaagatggcgaaaccctgtctctactaaaaatacaaaaattagctgggtgtagaggcatacacctatagtcccagctacttgggaggctgaggtaggagaattgcttgaacctgggaggcagaggttgcagtgagccaagatggtgccactgcactccagcctgggcaaccaagaggaactccatctcaaaaaaaaaaaaaaaaaaaaaaaaaatacagaatctacctctttgacaatttctctgggtgactctgttgcaggcagaccagagaccaactttgagatcctccagcctagttcaatgctctcctttttcacaggaggaggttgaggctcaaagaggaaaagtggtgtcatggaggtcacacagctgcaacactccatccagggcttgtcttgggtttgagatgtgaggctcaggcttctatctcactctttggacccagtactgttgtgatttaggagctaagaagaaattacttagatagtgaaggtatggaagtccgttagaaacgagctcagaattgaaaggaaaatgagcactcaaaggatttctcagcaaggcaaatttacttctgcagaagggtgctgctcatacttctggcagctgcaagagcacaccaaacaaaggagagaaggagtttttatccctaacgcagtccctatccctgtgtccttcccctattggctagggttagactgcataatctaagctgaccccgattgactaagacttaaacttttccaagtagggtaaatgtgtgattcgcaagggagggagggggcagtagtggtccctctactacagcacaaagcatgttcagacgtgtccaggcaagtcagggcacaacaagagcaggagggctgctctcagactagaaacaaagtacaaggagatgaggcctccaaaccaaggacaaggacattacacaattaaccctttgaagaggaattc

SEQ ID NO: 198660 - DNA, 1000 bp, Homo Sapiens
tctcacattcctttgtactgtatctcatttaggcagaaatagctattcatcatcaaatactcatcttcagagattaaagaagagcacaaaatttttcaaatatagcagcattttaatcaaatcatacaattaaatgtgaagtaactggcgctctcacacactgctaaaaggagtagaaattggaacaacaaatttgaaaaaccataaggcattactgctaaagttgaacatacatatttctatgaccagtttttccacttccagaaatacaaacttgacagaaacgtgggcacatgtgcaccgaaagatgggtgtaggaatgttcatatcagtattattcataatagtgcaaaactaaaaacatccatcatacattagaatcaacagcaatgagaatgaataaactcttcctatatagaaaaatacagattaggccaggcacggtggctcacacctgtaatcccaacactttgggaggccgaggcgggcaggtcaggaggtcaagagatcgagaccatcctggccaacatggtgaaaccccgtctctactaaaaatacaaaaattagctgggcgtggtggcaggtgcttgtaagcccagctacttgggaggctaaggcaggagaatcacttgaacctgggaagtggaggttgcagtgagccgagattgcaccactgcactccagcctggcgacagagcaagactctgtctcaaaaaaaaaaagaaaaacacagattagtctcacaaaaataatgttactcgaggaacacttattatatgatttcatttaataaagttcaaaaataggcagacctaatctatggtttttagacatcaagataatggtcaccctattatcttgggaatacagaatacagaaagggaataactagaaaagaatataaggaaagctttcagggtgccaataacaatactgatttcaataaacactcaccaaagcagaataagtgtgttcatatattggaatatgtagtgaattc

SEQ ID NO: 198661 - DNA, 1000 bp, Homo Sapiens
aaaagatagttctggctgggcgcggtggctcaagcctgtaatcccagcactttgggaggccgaggcgggcggatcacaaggtcagcagatcgagacaatcctggctaacacggtgaaaccccgtctctactaaaaatacaaaaaattagctggccacggtggcgggcatctgtagtcccagctacttgggaggctgaggcaggagaatggcgtgaacccggaaggcggagcttgcagtgagccgagatcacgccaccgcactccagcctgggcgacagagcaaagactccgtctcaaaaaaaaaaaaaaaaagatagttctaaagataatagctgcatacatattttttacataattaaaacattctttttttatgtcagagcataattttttacttttttctaaaagaccttcatatttctaaataatttttgtgtcttaaatgcaaatttttacttacagaagaagaagaagatactgaggatgctggattggatgattgggaagctatggccagtgatgaggagacagaaaaaggtgaatacctcataagcacacactgatacatccagtggttattagaaatgaatgatatatatttaaatgaatagtcttttgattatgaaagccatatgaacatttctggggatagggataagtctcttgttctctcctttgccatggtttctaagtcctcaagtggatcttcattttgtgaatgagtggttcctcagaatgttatttgtaagatagctgcctaaggtttagaatgcattttttcagagtgatgatgttacaaatagggttgttactaaagctgacctacaaaaagcactgttaacttaaaaggtaatgagataaatactatagttcctgataagtatgaatagaaagtaaacgtttttgtcattgtttccccttctttattactgaaatctctacttcgagatttaatttcctgttaattttactaacttactgataatgatatctggctctt

SEQ ID NO: 198662 - DNA, 1000 bp, Homo Sapiens
tacaaaaattagctgggcatggtggcagtgcctgtagtcccagctactcgggaggctgaggcaggagaatcgcttaaactcaggaggcagagcttgcagtgagccgagattgcgccactgtactccagcctgggcgacagagtgcaactccgtcaaaaaaggccgggtacggtggctcacacctgtaatctcagcactttggaaggccgaggtgggcggatcacctgaggttaggaattcaagaccagcctggccaacatggtgaaaccctgtctctaaaaatataaaaactagccaggtgtggtggtggacacctgtaatcccagctacttaggaggctgaggcaggagaattgcttgaatccaggagacggaggttgcggtgagccgacacagtgccactgcactccagcctgggtgacagagctggactctgtctcaaaaaaagagaaaggaaataggctcatattctgatcagttattgacacagtattctccgctgacaatagcaccatttgggcctagtgttttgatattaaaattaggagatctcaaaatcatgtttgagtagggtaaaatacatgatatgagaaaagtaccaaaaccgttctaactacacaaattgcataagctctctcgttaacctatagctgctggagcattgtacaaatttatttctgacttactctaaaaccattacttaattcctttcattttaaaccaagaagacccataggaaacctatcttcaagattcagtacctccctgatactgtgccaaattgaagcttttttcacaccagtagtaagtcccaactttcaaagtttccagaaaacatatctttgttttctaaataaagtaaaattaaaattctcagtagagtaactcacagtctgaacacagcaattctctccctttctaataccaccccatccccacccctaatctcaacgtaaaaacattgagattctttctgaggtatggaatcatatacatcaagt

SEQ ID NO: 198663 - DNA, 1000 bp, Homo Sapiens
acggggtttcaccatgttggccaggctggtttggaatcgtgacctcaagtgatccgcccgccttggccttccaaagtgctaggattacaggtgtgagcctccgcacccggctaatttttgtatttttactagagacagggtttcatcatattggccagtctagtctagtactcctgacctcaaatcatccacctgccttggtctcccaaaatgctgggattacaggcgtgagccaccgcgcccggccctaatttctgttcttgctcattattggtaaagtggagattaattgattcgtttctcaaattcttcctaggtgcctaatgtgtgctaggctgagggtacaacagagtataaaacaaaagtatggctgggtgcggtggctcacgcctgtaatcccagcactttgggaggcagaggcgggcggatcacctgaggtcagtagttagagaccagcagaaccaacagagagaaaccctgtctctactaaaaatacaaaattagctgggcgtggtggcacatgcctgtaatcccagctacttgggaggttgaggcaggagaatcacttgaacccaggaaacaggttgcagtgagccgagatcacgacattgcactccagcttgggcaacaagagcgaaactctgtctcaaaaaaaaaaaatgagaaaacaaacacaaagtacctgtgctgaggaggtggaggagccaataaacaataaatttaaagtagtacattacatggtgataattgctattaccaaaagacaataatatttactttaaagatcttaactgacttgtgatcatagaatcaggcaacacaccattctctaaaccattctgtgaaacagaatgagtgtttcctctttttttgagatatggtctcactgttgcccaggctggagcacagtattgcaatctcagcacactcctgcctccaactccctggctaaagtgatccttttgcctcagcctccccagtagctgggatggtaggtgtg

SEQ ID NO: 198664 - DNA, 1000 bp, Homo Sapiens
acataaaaacaagtttgtcttccagtaaggtagtaaataaaaatttagaaatcagcaccttatatattagcaattaaacgtctttactatcacacaaggggaaaacaaagctgtattcctttaagcctaaatgtctcaaaaagaaactattttataacactgtcataattttcagattttactaaatctctgaacataaaatctacccattttaagtccttttaaatataatagtacattttgaaatgtttagttcttagctttgttttgttttttgaattttagagacagggtctcactctgtggcccaggctggagtacagtagcatgatcatagctcactgcagtcttgatctcctgggctcaagagatcttcctgctttagccttccaaataagcaaggactacaggtacatgctgccatacttggctaatttttaaatttttgtagagatggggtcttgttatattgcctaggctattctccaactcctggtctcaagtaaccctactgccttggcctctcaaagcactggggttataggtatgagctaccatacctagcttgcttaccattttgcttaaattttttctccctgtaagggctctacctactttctctaaaagtatttatttcaatttaattgcctctaactctagttattaatacattaaaccttattcctctctacaaattattttgacctgaaattgatcaatatttagtaaaccagcagggttaatttttaaaaacatactgaactgaactcaaattgagtcacggtaaaattaggggctatactgatattgttacttattaaatatcaaactctatagatcaatgagatagtctttctttttctgagagagggtctcactttgttgctcaggctggaatgcagtggcacaattatggctcactgcagcctcaaccacctgtgctcaagtgatccactcacctcagcctcccaagtagctgggaccacagatgtgctccatc

SEQ ID NO: 198665 - DNA, 1000 bp, Homo Sapiens
ccctttttttctgaaccctcaaaatgtttcttcataaaaccactccagactgcctttgaaaatatgtttattcaaatgatactttccttatctggcaacaatactttttaaatggatgggatagaataaaatgttcatatttaacagtaaataaatgatgttaccattgatggatcaacagatgtggttttttcctaatctattttcagaattgtgttttgacttacagtatgtggtctaggtgagtaaaacaccacagcacagaggaaacagtgataaaatacaaccatggcaataatataaatttctcccatctaagtactaaccagcccaaccctgcttagcttccaagatcagacaagatagtaatataaatttctgttctgaaatgaagagacctatttaaacaataaccgtgtaatgatttattagcaatgacacatctgatctgatttaaagcattcatttaacatttatcctgttcatagctgtttattacctttattcataaaaaacattctttgttatttctctgcttttaacttaatttgttacctgcctatatgatagcatagcgaacagacttcaactgccgtcttctatttaaatagttccattgtcttttctagttttatcccctacacagtaatctaatcttactcttaatttttcttctaaagcattttcttctatttttaagtacccctgagagggtaaaaatctgtagctgtatgtgggagattctgtgaatgtttctgcaatgttcatgtcaggtcactactatacaaagtaaaatatgaagctgcaaccttcattacagtcacattaaatagcttgctgattgtctgtaggatattctttcttaataaaatacctattccatttcttcaatatgtcccatgatgaatttctttattttttctatgatatgaaagccatattttccacataatttactttgaaattgttaaatgtatttttgcatcattttatatatgaa

SEQ ID NO: 198666 - DNA, 1000 bp, Homo Sapiens
ttagtaattctggagtggggcccaagatcatgcttccagttgatgcccatgataatggtccctatagcttgctctgaatagtgagactctacgctactgtttacaattccgatgagcttattcccacaacatactgctctggaggaagcttcggtcaattggagtgaggcctgggcttacaggaccaaggcctggtttggaaaagtgcttctgctctttattatctaagaggtttgagaccccaaacctttcagagcctcagttttcatatctttaaatgaagatcattaattgctcctttgcagatttgttatgcagatgaataaaataacccaggtgaaagagtctggcacgtgctggctgggtgcggcggctcacgcctgtaatcctagcactttgggaggctgaggtgggccgataacttaaggtcaggagtttgaaaccatcctggccaacatggtgaaaccccgtctctactaaaaatgcaaaaaaacttagccaagcatggtggcacacgcctgtaatcccagctacttcggaggctgaggcaggagaatcgctggaacccggaaggcggaggttgcagtgagccgacgtcatgccactgcactccagcctgggcagcaagagtgagactccgtctcaaaaaaaaaaaaaaaaaaaaaaaagtttggcacatgctataactccacaaatgttgattcattctctgggctccccaacttaccctgtctggttacgttctctaacaaatactttatagttttccttctgtatctgctgtaattaataactatattttatctatcttggctttttcctattattttacctctggattctttctcttaaacatgtataagccagcatcaaatgttaatatgtctctcaatatcaaaatgctttccttgagctaatttcttgtcttgttaactattataaacttacctctgccttcctgggttctaatttgatctaggccatgcaacacaagtgagac

SEQ ID NO: 198667 - DNA, 1000 bp, Homo Sapiens
ggagaattgcttgaacctgggaggtggaggttgcagtgagccgagattatgccattgcactccagcctggacgacagagtgaaactccgttctgcccttcaaaaagaatgaagcaaaagcctactataacttattgtcattctctctgcacattcgaaaacctatcatttgaaactaacaaactctgaaaaagtatcccaacatatgggcagccataatgttacatcaaagagttcaccaaatcaggaaatctagctcataaagctccccacagctaccatgtgaccttgggcaaatcaaagagggcgctaccttctgaatatgtaaaataactatggatctaaaattgtgatattttgattccattttaagattttatagtctggctaggcacagtggctcacgcctgtaatcacagcactttaggaggccaaggtggaaggatcatttgagaccaggagtttgaaaccaggctgggcaacatagcaagaccccatctctatttttatatacaaaaaaaaaaaaaaaaaacttcacggtctgtgaaaaaaaaaatgcaaacatttacatcaggggcatccaatctttggcttccctgggccacgttagaattgtcttggaccacacatagaatacactaacactaagaatagctgatgagcttaaaaaaaaaaaaaaggaaaaaatcacgtaatgttttaagaaagtttaggaatttgtgttgggctgtattcaaagccatcctgggccacagttgcatgtagatcaagcttgatctacatgaaactatcagacaaaagtagttaaaaattcaacatggttgttttccactaaaacttttaacatgtagcacaaaactctatgttgtaacttatattcagatagcagtatatttcagagaaaatatttcatatataataatttgaatttttgtagtgactttgataggcaggtactatttactcttctttcatctattacctgacatgaaaaccaaggc

SEQ ID NO: 198668 - DNA, 1000 bp, Homo Sapiens
gcttttcctcctcctgctaccccttttcctcctctttcttctcccttccctcctcctccttttcttcctcttcctcctgagaatttaagtagaatttatggaatttctttggaataattaactatttttggagaagactaattgatgactgacccaagcgagaatgttctttaccatatgtatcaatagttctcaaagtattgtgggagatcttttggggtccccaagaccccttttagggaatttatgttgtctttcattttccaactacacacctgctggaggattctcctcatgtagctcaactgagacaacatatcacaacaggtcaaatgcagaaaaaaatatggggatctagctgttcctctaaatactaaaaagatttgtaaaaatttgtaacagtgtcactcttctcattagttctttttctgttttggaaaatgtagttagtttttattaaaaaaattctgtctatgttatctgtgtagaagttttgctatagttattttaaagtaaataaatgaatattttaaaatttaatatccaatatataattcttgataggtataactcagataaataagtgctgtctggagtactcaataatttttaatagtataaagtgttgcgagaacataaagtttgagacattttatagaattctattctcagaaattttcaaatatgttaagaattaatataaaaaagttctcttgctattatgttaatataccaaaatatagtctaggattaataaatatgtattccttttatttagatcttaatctcacgagggattaatattaggttggtgcaaaagtaattgtggctataccattacttttaacggaaaaaaacgcaattacttttgcatcaacctataccattatgttaactctcacatcataatgctaatggattaaattcttaaacaattttcattacttttagactcaattactagtctcaagaaaaagagctgtttgtcattattgaattc

SEQ ID NO: 198669 - DNA, 1000 bp, Homo Sapiens
ttgtaatactctaaaaatattattattagaaggctaaagtgggtggaactcaccggattactctgggctgacagcagggtcttgagataaacagccagagttggcatttgaggcaaatgggcatcaagtcacggcagtgaatccttgggtggctgaggtggtggttggggactggctgatgtacacgcttaggaaaacacacactgcctctcttctagcccctgcctgaggcatgcctaacccatgccaggaccttttgataatattagtgttttgtaatttgtttattccatttttctctccagctttcaggaaactcagagctaaatttagagttcatgagtaagaattatttcacatcaatcatcttcctctgatgaataaggtggtctctattctgctttgactcttaatcccctgttacattttggaagtatgtggggacaccaggacccagctaggaatcagactttatgttccgaagaagaggagtggagaggagcaaggttggatgaagagcttggggcagactgggctggtggggaaaggtcaaggtccagaagagggaaggagttctgcagggagcctccgcaagtctccccagctcttcccacataccctccccaccccccacagtgtccctccacccacccatcaggatgacaaatggaggcagccatcattctccctgcagaggggcgggctgcctctctgatgaatcctgctgggctggactggagcttaaacctaaaataatgcgcagtttcattaccaaattctagaaaggttttatatgtattcatagtgggagataaggtgagtaaaataaccctttgcccataattcttctgaagcatgtgttttcaaaatattgttttacccagaggatgccaccttcaaatagttgaagcaacttctaagagggccaggctgtcaaaattgagtttaatgcatgaattgtagttcaaccctacaaacaaaatccattctactggaattc

SEQ ID NO: 198670 - DNA, 1000 bp, Homo Sapiens
ttgttaatgatgaaagtgaaattaatgttttacttattaaagtctgtggaacatttctaactcacttgaaatttttaaggtatttaacgtcattataaagtcaaggataacaggtataccttgcaaagaagagttaggataaggatttataaaaaatttgaaaacaacttagaagttaaattttggtatgtgttttatttgatattacatgaagcagtaaaaaatgaatatgtggtaaatatgtgtgtgtgctggtgtgtgtaattcttactttgatgtcaagcactattactaaaagttacccagagaaaggaagtcagtagagaagacatgaggagagagaagaggcttttacaatgtaagtagaagtggcctccagcaactaattttttttttttttttttagacagagtctcgctctgtcacccaggctggagtgcaaaggcacgatctctgctcactgcaagcgccacctcccaggttcacgccattctcttgcctcagcctcccaagtagctgggactacaggcgcccaccaccacagccggctaattttttgtatacttagtagagacagggtttcactgtgttagccaggatggtctcaatctcctgaccttgtgatctacctgcctcggcctcccaaagtgctgggattacaggcatgagccaccgtgcccggccacaactaatattttaaacataaaatgtgtgtgtgagtaagtgtctttagtcaagtacagttataactcaaatattaaataaaagtttggatctaggccttctctttggtgaaatagttttgatgtgtgtggtatataacataattgctatatttttgtttgagtatttataactcaatgtagttagtaatcaaaatcatgctaaaatgttttaatgtttttagaatgccttaaaaatgtgcatttcaggattatcattttaatcatgaaatttttataaggtaggctttttagaaacattagttcagagggaattc

SEQ ID NO: 198671 - DNA, 1000 bp, Homo Sapiens
acttaagaatcaattataactcttattagctataaattgtaatgactgaagctggtaatttgaggaggggtggacagtggattaaataatgccaaaataggatgtagtcattgaaaatgataaagaactgtaaaacaattccagttaaagggacatcattggtttaagcagtaattgttctaacatatctattaacattagtagatgaggcaaaatcagagccatgcagacaccagacctagctcctgcactaggcccaagagagacgccaaaccaaggacagattcaaataaaaagcagaagaaacttacctatgcctagtctgccattcatggcgccacactagaaggtgtgtgaccctgtcatacattgtgtataccaaaagctcattggacaaagggtatgaggataccagagagggtatctacctttgacaatcaattaagttctgtctacagtagtgtcttccaaatgtggctattcatcagaatggcctgggaacttttgaaaaatacagattccagtatctagcctcagattcagaaggggaattttcatgagtgggaccttggcatgtgtatctttaaacatgcccttaggtgattatgataaacagctcagtttgagactcatctgatctagacggtggggccatttggatgacctagagtcaacttttgtagaccagcctttgtgcgagtgctggtcactgccatggtgctatccagagtgctggagtgcttcaacctaagtcctcctgagagtcagagcctgatacccctgtgctctcagactccccataccattgctccacctgacctcagctgccatctaccctatcttactgcccagatctgctttcacccagcactcagcaggtcctgtcctagaagcccagttccctgaccttgttcttgacaggttgttctgacccacttgcaatttagcaaaacctgcaagggagaagggagacatcaagcactgcaagcccaacgaattc

SEQ ID NO: 198672 - DNA, 1000 bp, Homo Sapiens
tgaaaggaactactgtacaatgcaaaagattttctatattactattatagggactaggtgctttaaataaatatcttttaataactgttacagaaggaacaaaaaccaaggaatagaatagagagtagaaacatttatatgtcaccagaaattcacaataaaaactacagagaaatacatagcataagtttttataatatttgaaattccatacctgggaaaaggtttactcctaaatttgatatctaaattttgaacaagtggcagtcactgaagaaaacatatgtagaagaagaacatattctgaaatcataggtaaaatccaagattatgttatgttctactacaataagaatattagaaaatcagaactcatattacctcttgtccccaaaggataccatttttaataaaactacattttactgaactgacatcagagatcatgcttgaaataagaaataataataatattattctgaacatctgaacacttcacacatctccttcattgaaacattgtcatatcttggagaggaaaatccacgaaattttaaaatgaaaagagtttgtctggccacattaatacaagctactgtaggaataaaataggaagtaagaatcaaaatatttagccaatgaaaaggatctaccaaaatagcaatcacaaagtcaaagaaactgtaacaaaacactccagtgtgaattcaaaataatcaaacaagaatttggaggtatgagaaagtatttcaaattaggaattttaaaacacagaagagaaatatgcaaagaaacaggataattgtgaaacaaaaatgaaatgagcctagaaaatactggaaaagacaaaatcatttcataataaacagtatattagaaagagcccaaaggaaaagatttagctaaaaacatgataagaatatggcaactggacaattagtgatacggtttggctgcgtctccacccaaatctcaacttgaattgtatctcccagaattc

SEQ ID NO: 198673 - DNA, 1000 bp, Homo Sapiens
tggaagccattgtctgcctctcattccttgcttgcagagagcaaggcaccctgatgtatattagatcactctagatttttggttgcctgataaagacagtgagaggagataaaaggcatgtgaagtgttggaattatagtatcagtgctctctaataaatacctgatgtggcatgaaagtgcctcaagcacattcaaagcatcaattaaattaggtggagtgagagagggcagtggaacaattgcaggatgcgcctggccatctcctcccttggttggggcatccacacatccattctgtctagggtgtgaataacctcaagccctttccttttgatgtccctctgagcctgcactgctttgtgacagtcttaggcatgacaaagctctccttctgtagctgacataaatcagaatagcctcccccatgtgtatccttcacacttcctttatttcctaggctttatgatcaatgggctcccttctctgctgtgattatggctgaaagcttttgtttatccatgcacattcttaatcgatattagttcccaatcctcccaccctgtgatttatgcatttgcctgtcttctgtattgagtcctgaaggattggaatttgtgtaaatgtcatgtacaaggagaaggcacatttggtgctatctcaagttgcattacttttaaagcccccagaaccatcacattgagctgtggaaaatatgactctctgcccagaccaatggcaggcttcctgccatgaggcacacagagcccaaaggctcaggtgtagtaatactagtctgaaatgctcagtcacagggtgaccagaccattaaactgtaattaggttgttataattattgaaaaccaaacagcattataataatagaattgtgcctctcacattttatatctcgcccaggatcatattagtagcctattcagtatatgggcattgagtaatagctgctattcttcagaaggcatttacttctattaaaagtg

SEQ ID NO: 198674 - DNA, 1000 bp, Homo Sapiens
attaaataaaatgagcaacagagccgaccctgtcccaaaataatactactattaaatgttatttaatggtactaaataaaattggggtaaaagggattgattagtaagaagcaaagataattctcataaatatagcaggttaaaggaatagccacagccagtttccatggctcactcctgtaatcccagcactttgggaggctgaggcaggtggatcacttgagttcaggagttcaagaccagcctagccaacacgcgccattacagtccagcctgggcaacagagtgagactgactcaaaaaaaaaaaaaaaaaaaaggaacagccactactctagaccccggggtagaacatccaaggaaaagtacaactcacacccctgccactctagggcaaagagatcatggccatggctcatcagatggcaaaaaaaaagtctctctggtgccagatgggtggaactttctagaaatccaccttctggaacttactggaattcttcacaccagggtgccagggaaagggggaaggtgatgtatgccacagaagctggatgctaagaaggggagcatgctgcaggaacctcaggatggagtgcaggggcccccggaagttaaaaccttttctttttgcaatgtctctctagcgccctctactgatagtttctgtgccatctggcaagagaaaacttaaaaggcccagaaccattttcacagagcagaaaacagggtgaatttggagctgagagcccatagataaataacacacagtccatttatactttaacattattactaatatatttgatcttaaatctatgtgttttgtatttgtcctacttgttttatgttccttttagtcccctttcttgctttttttttttttttttttttgagacagagtctggctctgtcgcccaggctggagtgcagtggtgcgatctcggctcattgtaacctccacctcccaggttcaagcgattcttctgcctcagcctgcc

SEQ ID NO: 198675 - DNA, 1000 bp, Homo Sapiens
tgcttcacgaagttcttgtgctgtgtttttttttttttttttatatctccatcaggtcattaatgttcttctctaaactggttattctagttagcagctcctgtaaccttttatcaaggttcttagcttccatgcattgggttagaatatgagttcccctctagctgagaggagtttgttattatccatcttctgaagcctacttctgttaactcagcaaactccttctccatccagttttgtgcccttgctggagaggagttgcaatcatttggaggagaagaggcattctggtttttggatttttttttttttttttttgcatttttacgctagttttccttatcttcctagatgtatctacttttgatctttgaggctgatgaccattggatggggttttagtgtgggggtcttttatgttgatgttgatgttattactttctgtttgctagtttttcttccaacagtcagctccctcttctgcaggtctcctgcagtttggtggaggtccactccagaccctgtttgcctgggtatcaccagcagaggctgtggaacagcaaagattgctgcctgctccttcctatggaagccttgccccagaggggcactggcctgatgccagctggagctctcctgtatgaggtatctgtcaacccttgctgggagttctctcccagtcaagaggcatggggttcagggacccacttgaggaggcagtctgtcccttagcagagctcgaggactctgctgggagaatcctccttgtcaggatccactcttctgttcaaagctggcaggcaagaaggtttaaatccactgaagctttgcccacagttgctccttcccccaggtgctctgtcccagggagatgggagttttatctataagtccctgactggtgctgctgcctttctttcagagatgccctgccgagtggggaggaatttagaggcgtagtctggccacagctgctttgctgcgctgtggtgaattc

SEQ ID NO: 198676 - DNA, 1000 bp, Homo Sapiens
taaaaatatagttcttagacttctaggaattgtcataactatttcagaaggtaggttaccggccggctgcggtagcttgcacatgtaattccagcactttgggaggctgaggcaggtggatcacttgaggtcaggagttcgagaccagcctagccaacatgttaaaaccccatctctactaaaaatacaaaattagccaggcttggtggcaggctcctgtaatcacagctactcaggaggctgaggcatgagaatcacttgaacccgggaggcggaggttgcagtgagctgagattgcaccactgctctccagcctgggtgataaaaaaagacagtctcaaaaaataaaaataaaaataaaaaaaataaaaaagaaggtaggttacctggcttctcctggttccttttatctatcaagatactgttaagtaaaataactgcctgtttcttttttgcagctgcccaaatatatttcaagacataaaagtataaaagtgaggaaacataagaaagaagttataggacctccaaaaagtctcaaagaattcatattagccagaacgaaaggaaagtctaaggtaggtcatctgagtcttgctgcttctttgatagtgatataaaacaaaacaaaacaaaaaactatagcaaagaaacaaacgaaaaccttgtttgtagctgcgtctgagtttaacattgttggaattcagcaaggtgcagtaaaaaagatcctgcactttggaagatgcgtatctgtagttctaatcctgagccacctctaaccctgctgtgcagcctgagaggttaccacacctctctaaatctgtccatgcactgatgaagtagggataataattcctatctcacaggattagtatgaaaattttaaaaagagatattctagataacacatttaacacaccacagatgttaaaagaaaaagaaaaaaaagaacacccgaaaattaagctcctgctattacaagttatgggctattcagagc

SEQ ID NO: 198677 - DNA, 1000 bp, Homo Sapiens
ctcgagcccacttcctacacccctcgtcctgcgcccgacccttctcactctctctccttccaggagtgtactccggcttcctgccctgctttggccccagcttcctgactctgcatgggggtaaaaaggcccctttcaggatccaggaagaaggcgctgtaagcttctcacatcagctctagggtacagtggaggtagagcttccccatgtaaagcactagggcctgggacgtgccccgaggccccggccctggtttctgtccctcggggtcttgtggaggacgtgaagcctgtccatgagcagccacgtgcatgtgggacaggcgtgggggcacaagaaaggagcaagcggaagctctgggctttccctgaggaaggggctttgagaggagaccatggtaagattttcagcaggtgggaagggcgcgaaggacggaggacacagcacaggcaagtgtgaggaagcatgaggttattcaggaatggcggtaaatgccagaaacccgactcgaacaggcttaaacccagggaaaaacaagagccctgtccgcccggatctactgtggatcccagtttctgactgtgcaaagaggccctgggaaggaacgaggcagggaaggatgctgaggaagaaccacaggcattggtcctcaaggccactaggaggtcctcactctccttcccccctgcctcattccctcctgcctcagtcagacttcccggctgggaacctcaccacacagcctccagcagggaaggccagggaagcattctaattgtcctccttaggtcatgtgtgctccccgtggctcacagttgccaaggaggcagggcaggctctgattggccaggcgggtagtgcaaactcagtggtaatcacagttaccacccagcctgaagcatggtgggagcacggtattccatggggcaggcaggatcccagggtgcagaagagggctcaatgcccagaggtttcccggcgtggaggtttctggaattc

SEQ ID NO: 198678 - DNA, 1000 bp, Homo Sapiens
tgggaggccgaggcgggcagatcacttgaggtcaggagttcaagaccagcctcgccaacatggtgaaacactgtctctactaaaaatacaaaaattagccgggcatggttgcaggcacctgtaatcccagctactcgggaggctgaggcaggagaatcacttgaactggggaggtggaggttgcagtgagccaagatcatgccactgcactccagcctgggtgacagagcaagattctgcctcaaacaaacaaacaacaaacaacaacaacaaaaatttatactttaaaagagtgaatgctgctatgtaaattctatctcgatttttttaaaaaaattagactatttatttatgatccctgaatggaattaaactaaatgataaaaattttcttaaaatcaaggtaggagtcactttttaaccaaagattatattctttttttttctcttttttaacttttgttttaggttcaggggctcattatgcggttttgttatataggtaaactcatgtcacgagaatttggtgtacgaatatttcattacccaggtactaagtgtagtacctgataggtatttttaaaatatggaacacttcatgaatttgcatgtcatccttatgcaggggacatgctaatcttctctgcatcattccaattttagtatatgtgctgctgaaactagcaccaaaagttatattctacagtgtaggtcaaatgaaaattgcatctgatctatgaatattactctggaaaaatcccttgaattgtccagggtatagtaatagtcaggattaatatattctttactgtatcttaataaacgcagtgcagccagtttttcctccagcgttggagtccatcactgttgctgtggatcggcaacaaatgaagtcattggtttgcatttcaggcctctactgtatgaaaaatacaggttgtgtgaacatagttgacttgtgagaaattaaagacatagataatccaatttccctgaattc

SEQ ID NO: 198679 - DNA, 1000 bp, Homo Sapiens
atcaaggtaaggcctaggtcaacattttgttgtgcagaaaaggcatctgctttcagaggagaaaatttagatacaatattgaggtgaatcttataagtgatgtaagataatttgatgacaagaattgagattatatgctgagatcttactgtcttaaactttgttgatttctgaaaataatagaaatgcaatcctagctaaaggaagagaagtagtctagctcaccagtggccagcaaactctgtaaagaagtattgccttcatgcagcaatctcacctaatatgagactccagatagaagatagctcctgagaagtcaaaacacaaaccaatatcatgtaaattactctcacgtgaaaaatagacaagagataaccaacccagtcccaaccgtctcacacccccactggcctcctgcactcatggatgccacattcttcaacatttgtacttctgttaacagagttaaagtagagcaaacataggctcttttaccaagagcgtatggactaaatacagatgcaatgctaataaccacatgggaaaaacaagatcctgagacactgttatgtttttctccctcttttgtggccaagagtgtgtgctctcttgcctttgtagattttgctcacgtttttgggtgataggaccaaaagcagtagtgtctaggccactaggagacaaggcaaaccattatctgtgaaagcctgggttttctgagaggaagcatgctggacactgccagtagagggagaagtcatggtgtgaagttttccatgatgagagataaggacagctagggcatggggatgcagaggatgttcttgttgttgatggtgttgtggaggttgtaccccaagtctctgggataagacagccccatgcacatagaggtcatgaaaaatgtgaggaccctggacactgagtgtcacggctttggggacagtgatgacatgtccctgtgtccaaacagctcagtcagcttatctaaaagggatgg

SEQ ID NO: 198680 - DNA, 1000 bp, Homo Sapiens
ttccacatacaacattttttaaaagacattggtatcagctgggcatggtggcgcttgcctgtggtcccagctactccggaggcttaggtgggatgatcatttgagcctgggaggcagaggttgcagtgtgctgaaattgttccactgcactccagcctcgtgacacagtgagaccctgtctcaaaaaaaaaaaaaaattggtatgaatgtgggaaaaatctccatgttctttctgtgctacacgtacccccaacaaatgcagtgaaatacgcttgaccactctcatgctgagtaatagggtgagtgcatagtctgtgtgtaggtgacagatatagccccaaccatctgtgctattaactgcttaactcttgcctcaaagggcttggaggctcctgaaatgactggttttcattgtgatgggaagagaacattactgaaggaatgttttttcttcagtcttaacatccatccatgtaaaaggaaacaaggagtcaattagtgtgactcctggcctctttcccatttatttatttatttatttatttgatggagcctcgctttgtcacccaggctggagtgcagtggcgcaatctcggctcactgcaacctacacctaccaggttcaagtgattttcctgcctcagcctcccaagtagctgggactacaggcgcctgccaccatgcccggttaattttttgtatttttagtagagacggggtttcaccatgttagccacgatggtctcgatctcctgacctcgtgatcccaaagtgctgggattacaagcatgagccacggagcccggcctctctctccctttttaattctctctgccctaagagaggtggagtgatgtgtctgattggtaaatttggaaagaacagactgggcacacgctgcttatccctttcctgttccttcttgaaattgagtgactcatagcaaacaggtattctgccctgcttctcagggcaagaaacttcccatatctggtcttgt

SEQ ID NO: 198681 - DNA, 1000 bp, Homo Sapiens
tcagttaggcctgaactacttttctggaagttagtaaattatctcacaggcagccctgtgagccatgggaaaatgtgtatatggtctttctaggccacagtcaaattacaggtatatttgtcatggcttctcttgatgaaaggcccagtatcggtttgtctgaagatatataatagcattgcttttgggggtaatatgggcagtaactctgtccacatctttgggcaggctgtggttctgcctttatatgctatgtcagtgtaaacctacgcgattaatcatcagtgtacagtttaggactaacaatccatttattagtagcagaaagaagtttaaaatcttgctttctgatataatttgttttgtaggccccaatatgggaggtaaatcaacatatattcgacaaactggggtgatagtactcatggcccaaattgggtgttttgtgccatgtgagtcagcagaagtgtccattgtggactgcatcttagcccgagtaggggctggtgacagtcaattgaaaggagtctccacgttcatggctgaaatgttggaaactgcttctatcctcaggtaagtgcatctcctagtcccttgaagatagaaatgtatgtctctgtcctgtgagaaggaaaagtatatttgcagattctcatgtaaaaacatctgagaatgtttgtcttagtttaatagttgttttcctgtggactttatatactttgtattgtcttaaaagagtgattgatggtagctacggaaaactttgatttttaaaattgtctctttaagtagacaatttataagctactggtacgagttcaccttataaatctccactaccatgtttttgcttggactgttcacacttcctggaatggtccttcttgccgtttatccaacttctttctaatttttaagtccctaatgatgggaattctatttctgtagtgatttttctggtcatacgaccgtaaggtcatgggtgtttttctctgaattc

SEQ ID NO: 198682 - DNA, 1000 bp, Homo Sapiens
aggaagaagggttgcctctgtgcaaggatagctttggtaaaaaataaagattaaaactaaaaatacatgaagacaaatgaaagataaaccctcctgacaaagttgtttgtgtgtatgtgagtgtgatttcattatagactttgactttttctgctcagggatgctagacagcacttcagcatcaggcctggggaaggcacaccagacagaaatcagcaacaaaaagtgcaaaaatgcaaaaatgtggcaggaaatatgctgcaaaaggatgcttgtttacagaaggcagcagaagcaagaggcaggcgtgtgaacatgcatgcgggaggctcagagttttcaccactctgcacttggccatgagtgacccaggaagtactgcaaatgttgatgctggggttgccaccaaattctagtgagcaggtgaattcgcaaataccttctatcctagggccaaagatggggtcagttagtgccattttctggtttcgtttttcttttctgattcatttcttcagtttatttcatacttgtataatttgacaactttattctgttaaagtttatttctccagtatatgtctaagtaatgtagaatatataatatgtttacctgtagcatatcgagaggaaacaggcatcattggactaagtctcgatgtgtggacagcgttggtagaatcatacttagggagctcatcttcgtgagtcacaaattgggtttcctattcctgctcctcctttcccaccctctcttctttaaagttttgaggtttgtcccaggtggctctgtacagctccccacagaatggttattttatgcaagaacagaatccttgtctattttttcttcaaagtagtaattttaacctgtggcatttatcagaaaacaagattgtcttaaaaggaaaatttaaaaaatattccatttccatttatttatgtttttatcaagttgaaattcacataacatataatcaaccctattaaagtggaattc

SEQ ID NO: 198683 - DNA, 1000 bp, Homo Sapiens
catatccatcctaatgtgtggtatgacattcttggtttgatttgtgcttccctatgatgagtgactttgaacatcattttagatgcttattggccattgctatatcttctttaggaacacgtctactcaagtcttctgaccattgttgatgggatgctttgggtttcttgttgtttagttgtagctgttctttatatatgatggatatcagcctcttttcagatatatgctttgcaaatattgttcctaatccatgggttatcttttcactcagttcacagtgttttttgctgcacaaaagtgtctgtcatttagatgtaatccaaggaatctaattttcttttgttgcctatgcttttggtgtcatatcccagagaacattgcccaatctgatgtcatgaaagcgtggccaatgttttcttttaggcgtatgatacttttagcccttggggtgaggcctttgatccagtttgtgttaatttttgcacctggtgtgacatagggtccaccttcattcttctgcatgtggaaatcaagtttctccaacaccatttcttgaaaaggctgcttttccaccaatgagctttcttagcactcatgtgaaaaatcatttgaacatataggtgagaagttatttctgggctccaaaacaaacaaacaacaacagacaacagataaggatacagcatggtccgggcgcggtcgctcacgcctgtaatcccagcactttgggaggccgaggcgggtggatcacctgaggtcaggagttgaagaccagcctgaccgacagggagaaacccccgtctctactagaaatacaacattagctgggcgtgctggcgcatgcctgtaatcccagctactagggaggtggaggcaggagaatcgcttgaacccaggaggcagaggttacggtgagccaagattgcaccatgacactccagcctgggcaataagagtgaaactccatctcaaaacaaaaaacaaaaaaccagcatga

SEQ ID NO: 198684 - DNA, 1000 bp, Homo Sapiens
gagacggggttttaccatgttggccggtctagtctcgaactcctgacctcaggtgatccgcctgccttggtttcccaaagtgctggaattacagggcatgagcgagggtgcctggcctgttttctttctacttttcagccatatctttgcaccacacttatttctatgttgatggcattttcttatttaagcacttacagctatattaacaatgagcacctaataaagttaggtttattgtttagttgtaattttttctaatatgctgggagactaaccacattggaaatcaaatttcaactagagttttgggagactaaccagaccatgtgaatcccagaactttaggaagccaaggaaggcagataacttgaggtcaggtgtttgagaccagcctggccaacatggtgaaacccatttctactaagaatacaaaaaaactagctgggcatggtggcagatgcctgtaatcccacctaccggggaggctgaggcaggagaatcatttgaacccgggaggcggaggttgcagtgagccaagatcacgccactgtactccagcctgggtgacagagggagactccatctcaaaataaataaataaataaataaataaataaataaataaataaataaatacaatgaagtttcatagagggacaacttcaggtcactggcatcttaatttgaattcgtttattaagcaattctcttcccaaacagaaagtatggcagcgtggagtctgaaatggaatcgaggtaaaggaggtgtgggtagtaaaatgagggaaagagaatcaagaagcaagtgtgggaagcacagcagagcacaagcttcaccatttgcttagccctactgtcgagtcttatggtcaggtggtgcattgtattgtctctcctaataatccctatgaaaatattacagatgaaataagttaaaagacatttaagtgttagttttatttgggaaaacagaggtaggttgccaggatatgaattc

SEQ ID NO: 198685 - DNA, 1000 bp, Homo Sapiens
gagcaatctagtctcatgctctggaagcctttgaagacttgaggaccaaatagtgggaatagaaatgagcaactttgatcaatgtcaagggacacttctcccctaaaacacacatacaaaggaccacttaattgtacattctagtagctttccttcgacatgatattttgttagcaacttttccttctcacagaaactattacttatactcttgattttttttattatcagcatcagttggcctagcattcaaagaaaggagtagatgctgactaaatatttactagtggatacaaaatagatcacatattgatggtcataaagaagatatgaaacagaaatttcccttctatatatattatattcattaatgtatttgagtcacactggaacaagaaggcacacattatatcaaacatggaggagagatttaattttgtattttattttctattctaagcttactaggacatactactattcactatcttgactaaataattatacttcctgaatcatattacatcagaactttggtgaacaacaatgacataggaattaatagtagacatgaaggtgagtgaattaaataaaaggttattactatattcttataaagtaattaattaaatttttagcattttgttttgttaagattttacatatgatttttttaacatgctactttataatttcattttttaaagcattaagttttaaacatctttgtacatcattaaatattcttttacataaatatttttaggtaactacatagatattcattttataaaattatcatgatttttaaaacatttttcattgctggacctatgggtcatttttatttttattactataataaagaataccgcaaataaaacatttagattttcatgctaattgttgtcttatatagctttctatatataaagccgaggaaccaaataatgcacaaatgtttctggttttgttaaatgggcattcaaacatactatac

SEQ ID NO: 198686 - DNA, 1000 bp, Homo Sapiens
tattccttaatgcatgtcacatttaaaatatgacctatttttaaagtacattgtatatgtcacaagccagatttggtcacaggccatggtttgctaatctctgtcctaaagcaatatggtagttctgaacgtttggctgaagaacatggatggcggtagaagtccctaaactggtcttcatagcttagaataacagaactgctgagtttgaaggaaaccgaacaacttatctcacttactctccaaacactgttcaatttctcttcatacttttttttacaatgtggtagtctctatatttatatttgattcaaaatataatgttttaaaacggcctgtactgatgtctcttcaaaatctttatcttgcttaatcttagaaactttcttgccaaggagtgtaggagtagacatgatagcaagggaaaggtaatagaataaattttgaaagctaaatgctttattttgatatagctaatattcatagaccttaacatttacattagtcagcaatcaaccaaaagtcatagtttcaaatacacgagggcagaatctgcctagctacacaggatttgaccacttaaaagttgagctctatgattattctgatgaagtggattggagaccatcacctttctcttagtaaatatttgtccttcacataccaatcgtaagtataattaagcattttttacttcatctggtgcttcaaattttgtatgatgcaggatttagttttctattctaattcctaaaagccatatttcaggctgcattctattaggggtgtctcacttaaaataagaatactattatgtagcttaacttgcatctatttcctttttattatggccactcaattgttcgtgactttctttgggaatgatttgttaattttattccagtctcagctatgtgccttcacttaacaatgaacattgactactggatacttagcttaccttttttacaagatatatatttcaaggttttgttttcat

SEQ ID NO: 198687 - DNA, 1000 bp, Homo Sapiens
taactatatcagaagaaattgcatcttgtttttttcttttgcataagtagttgtgatcatatgtaattacaacattgtaccctgctttttctttccactttgtattataaactacatattcccattttattgtaactcataacatttcttttttatttaaaaattactttaaaaatttgacataaaattgtatatattatgtacagcttgatgttttgaagtatatttatatatacatattatggaatgaaaagtttttaatggccaacagaattgtgattaagtaaattatgtggttgtggcaaatttacagtttgtgacaaactgacttcctcagttattggcatttaaatcgtttccatgtttattttttatttttttagaaccctaagagaggcttcttgcacctacgcaagaaaaaattgagggcaaatccatagagtaaagtgaaggcaagtttattaagaaagtaaaggaataaaagaatggctactccataggcagagcagcctgtttccatgttttaaatttaagtatagtatttattatttccttaaaaaatgtactctcttggacattttctctggcctccacttattgtgatatcaaatagtggcttcttgtggttttgtttagtatctatgttggcttctggctaactgctaagggttagtctctctagatgttcttactgctgtcttggacacctctacgttttgttctctgtgtttctcccaggtaggataatttccttgccagcttctcttcaagctcatgtttttctggttgtaaggtaggcattaagccacacatttgtgttacgaaaattatcttgccagttaggcctgatgataggagatgtgtgtctaagaccaaagtagactttgcccgttggatggcgaaaacctgaactatgaattgtcagtatctagagaggtcaaagttactcagaaatatttgggaatgtgtacattttttgaaattgtttataaaaagtttt

SEQ ID NO: 198688 - DNA, 1000 bp, Homo Sapiens
aacaggcatcagcatcaactgggaacttaactcgaaatgcaaatcctcaggcccaacttcagactagggaatcagaaatgctagatgtgggaaccagaaatcaatattttaacaaccccacaaggtgcttctggtgcacattgaagtcagaatcactggcttaaacagcatttcctccaggaagctttctttaacttaactctttacccaacaaggaatagggactgctcctgtgtgtttccacagttccccatccttatcctgaccataacccttctcacagtatagtacaaatgcctacatacttatttaaccccagtgggctctctcttagttcccacaggcagggactgtatcgtgttgactgctgaatccccagcatctacataatgcctgtcatgttagtagttcaataagaaattttgaagccaagattcaaatccacgtgtacatcacaatcttctagagaggtagactgcaaacgccaaaaacaagaaatgtaatgcaccgacgatatttgtaatcagcagttggatcaggcttcaaataaatgctttcatgcttgcataatagaaaggagattctgaggaggtacaggatacctaactacaaaagactgtaataaaaccccaaagatatacactgttgaatctacctaaatccctgaaaataaactacctgactctagccctgaagtcagataaaccaagctcatcatcttcccatttctgcccaaccagttcctccattgcttgtattttagtatgctatgtttactggagtttctaaaatgccactaaacctttggaaattttgtagaaaagaagaatctgggtcatgcaactgtgaaatctaaataaggtgtaattaacatgtccatcaactttcacagaagtgacgctagtttgcaaactattcattaattctgcacaataacagcaactggatacaatgcagacaccaagctgaggatgagaggctcaatgtagtgccaacccag

SEQ ID NO: 198689 - DNA, 1000 bp, Homo Sapiens
cctggatccatcctcccactttgggctcccaaagtgctaggattacaggtgtgagccactgtgcccagctgttttctgggagtttcattaattcttgatgtcttatcagcagtcaatttatttacagagttgtgcctttgggtcacttttgaaaggcctggaagctgtttgcagattgggctcagagtaaggaagattaccagaactgggccctgtgtccttgcccatcagcaggcaccaggactctgtcctaaccactgctgtcaatgacacccccacctcagggggattaggagtagaatggacttgagaaggaagttctagaaacccagcttcaaatcccagttctctaccaaacacacacaggtgctccatcctagaggactctgggaggtgcccttcctgtctaatcactcttagcagctcccacagccttcatttcctcatcctcactcattcctttatagtttaaaatctggctgccactctctgaaatctttacttgaaagttggccaggcttttttattcctcaaagcaatagccctcactatgtccttgggctccatgttgtccatggttggcagcatctctccttcccacgctggactccttctcttcctaaggcctgtgggaaaccttgccatcctcaatttcttcctccctcccacttctcctttcttccttttcctatcccctcaggcaggcagttactggagctttgattctcagatctcttctttctggcctcttcaacatcaatctttacttctatcattacaaatattgggtattgattgtgaacggttctgaaatttctgtctccagtcccaactctcccttgattattttatatctccacatggatgccccactgacagctcaagcacaacagatctcaaactgaatttatcatctctcttttccaaactagctcttcctcttgacttccttgtgtctactgacaccatcatcatgaaactacataagccttttgaattc

SEQ ID NO: 198690 - DNA, 1000 bp, Homo Sapiens
agcactgacctgtacccattcatccattcattcagagagcactgagttagggcctctgtgggcaggtcctgtgctagtccattgaaaaagggaagggagatcccctgtttttggaaacatgaaaatacatagaattacttttaaaacaacaggaagcatatttgtgcatacagatgaactagtaatgatttgattgtttgatcatagctaacacttattgagatctcatcaaaggctagagccactgtgttaagagctttatgtaaattatgccatttgatccttacaaggatcctgaaagacctaaaagacacttattattattctaagcttcgaacccaagaattctaactccagagtccgtattcttgactactactctaaactgccatcctaagacaatatagattgctaacccattcagtattgggttaaactagtactcaataatctggtacctaaagtactagatgctcttctggtatagcctgtcctccttgaagacttagaccttatactttgccaccatgctgtatcgatcaaacacagttgcaactgcatttattagcagttataaccctgtacatttttatctgcaatttccagtgaatcgagaggcattatatgttttgttatttagacctcatgtttcaccaacaagaccacagggttcttgtttatgtaatcctaactgggaagtcactactatctccattttgctgctaaagaagctgagccttggatagaaccactccactgatgagcaaaatcaagtatagcttgaactcaggtctttgacccaaataaattatgaaatcatagttcatcttttaaaattggagtaatgcattttatgcaaccaaagcaaaagtgactttaaatttgatgactgaaccattgcatcatccctctgtagccagctcatttcttgttcattcagtcaagatcactgagctcctcccaagtactaagcattgtcaggaaggcaaaaataaatcag

SEQ ID NO: 198691 - DNA, 1000 bp, Homo Sapiens
ggtgcaatcatagctcattacagccttgaactcctgggggtcaagtgatcctcctgcctcagcctcctgaatagttggactgaataggactacagacacacagcaccagagctaattattttaattttttttttagtagagatgagttctttctttgttgcctaggctggtcttgaacccctggcctcaagtgatcctcctgccctggactaccaaagtactgggtgataggtgtgagtcaccacgcccagcatactgtagctattttaattgggaaaaaatttataaattgtcgttggaacaaaaaaaagacacaggctcaagtctagagattctcaaacttggctacacattggaatcacctgggagctaatgcccatggcacacctcatctcataaatcagattgtttgcaacagaacccaggcatcagtatattaaataatctcctcaggtgattccaataaacagctaagattgagaatcagtactctagactgagcccttaggagtaacatctagacccacattgctgaactggcctaatgaggaagctgttcagcaagctgtagccactgctgacaaccccagaaacactgcctctgcagtcatctgtgctagcaatgaatgtaccctcagtggccaggctgtttccttaggtagctctttctgaatcaaagtcttacataggtgcatctgaatggtacatcctatcacatgccctcaccctaatgctaaagtaaccttggaaaatagtttatttagatttttcaattggaaggtgagactcgtaatatgaactattaaaatgtgatgagaatgttaaaataaattttttttggagcaaataagaaaagtagggtcaattggttggttacaaatctggatgcgaagaattacatatcctgagcagaccaataacaagtagagagattgaaatggtaacttaaaaattaccaacacaaaaaagtccaggaccagatggattcacagcagaattc

SEQ ID NO: 198692 - DNA, 1000 bp, Homo Sapiens
gtgagagctagaccaaagatcctttttaaaagaataaagaatacccagtgagatggtataaacatgttctaattctttaataaaaaaataaataaacagtgggctgggcatagtggctcatgcctgtaatcctagtactttgggaggctgaggtggggggatcacctgaggtcaggagtttgagaccaacctggtcaacagagtgaaaccccatctctactaaaaatacaaaaaattagccacacatggtggtgggtgcctgtaatcctagctactcgggaggctgaggcaggagaattgtttgaacccaggaggcagaggttgaagtgagccgagattgcaccattgtactccagcctgggcaacaacagcgaaactctgtctcaaaaaatagtaatgataataaataaataaataaataaataaatagtggttttaaagaagtaacttcaaagtatacctggcacattggggtgtctagtaatttattttaaatatcccaagaaaaaaatccaattgaattatttgattcaaataccctatttttttcagagtaaaaaaaaaaatcacaaaatattagccatgttaaagcatttataatttgtaaaatactttggaagtatttttaagtagctaaccccaagaaatttgccatcacaaaaaggcaacaatgaacttaagactgagtaaataagttatataaggattatttttatcatttccttagaagagagaaaataaaaatacaatctgttttctgatgagataaagatagatatatattaagataaaagaaactcaacatgtaaggcctctttatatgcaaattatttaacccaaatttccaaatagcactgagatgatagattccttagcagttcctgtgttaaaggagagaatttagttttcttagcctgaagcagcagcctatagagaatcaagctgaccaaactatagcttctaaacctggagtgtgagggcccatagactgaattccgcg

SEQ ID NO: 198693 - DNA, 1000 bp, Homo Sapiens
cagcctggccaacatggtgaaaacccgtctctactaaaaatacaaaaattagccaggcatggtggcgtacgcctataatcccagctactcgggaggctgaggcaggagaatcacttgaacccagaaggcggaggttgcagcgagccaagatggcaccattacactgtagcctggtgacatagcgagactccatctcaaaataaataaataaatagtacactatctagtggagaacagaaatccaataaataagcttaccaataatttcaaattggattagcattgaagaggaaaagaatagggagctttaaaatattacaagagaaacctgattttattgggtggtgaggggatggctaagtagctgagaccagaagcatgaggaggaagtgttggccaaataaagatagaaaaaagcacaagggcgctcaggtgcccaagaagatgaagtgacccaggaactgaagggggtccgtggctgatgggtagtgagaaagggtagagcagtggagtgtgagagtaagcagtggtcagctggggtcagtggcctagatttcattctgaatgcagcgggaagcctgacatgacccttgtacctccttcaggccatggaaaatgtttctaagctcctacttaaagcttttcaagcatcagagaatcctcttaacccagagagggatatgatgttgacagagcaggtttactccaaaagtcggcttgaggtcaagtcatttaatcttcttactctatatgggatttggaacagaaagggaagaagcagagtcctcccatccatctgggaattcacccagcctgcttcctgtagggtaatatgatggatataatgaaaacataaataaataaaatgtagaatcaccttcacattttggtaacttaggtgtcaactttccagagttccctaatattttggaattactttcttcaagctgtttcaagatattcaaggaaaataccacctaacctcttattgaaagtaatt

SEQ ID NO: 198694 - DNA, 1000 bp, Homo Sapiens
tagcaggatattaaattctaagttggtcatttttttaacgtcagcactctacaagtatgaattcattgtctcctggcctctattatggctcatgagaagtcctttgccaatataattgccattcatttaaggtaaagtacaccacagttataattaatttaaaatgttattttaaatgtctcattcacaatggtaacaaaaactacaagctacaaaccacaaaacacaaagatgtataagacctttgtagagaaaattataaaacatttacaggaagacccgtataacctcacagatggtctgtgttcatggatatgtagaaccatacatgtctttggatgtgtatgacaataatatacattctttgtaaattccattcaattctaatacatattccaacatttttaacagatatggcaacctcatcttagatttttaatagaacgtggcaggcttatcttaggtttatcatgaaatcaccaaaggccgaaaataagacaattctgaagaaaattagtaagggagtgagagcttgttctatgtggtaaaacatatatggcaaagcatataatataagtgagtgtggtattattaaaggtatagactgagaaactcagaacagaataggagacttatgttaattttattgtctgcttttcttagctttagtttttttcttgtttgaaagtttgctttgcacattcattttgagagacgtttctgatcaggttttgtttttctctttctttgtctctagcagctttggaattttgagtttcccccaccaaggccttttgcttccaatttagaaccaggtcctaaaatgcaactttagaatacctgttctgcagcaatatcgagaatatcacagatctagggcagtgacctgcttgattcctggtcataagaacgtcagggcatagcttctcagaaagccccaattccacaattcagttgggcagccttttccctcattctttctttacaagcaagcaagctt

SEQ ID NO: 198695 - DNA, 1000 bp, Homo Sapiens
tagacatataaaccaatgggtttaggaatggttagtcttctaaaatctaaactgtttgtagcaaaatgtcattgtaaaagcccaatataaagaatagctttaagaattcattaaaatgtaaggtacatgaaagcggagtacgtggttggttttgttcattgctatatatttatcacctataacagacacatagtaactcctatagaaatatttattggataagttaatgaagtataattatggaggcatagttatttttcagaaaagtaactatacatcacatatcaaccattgtttatataaaaatcagatgtaatttcatatgatttggtgagctaagtatggtcaagaagcatgtgttcttatcacagataatcataaaactaatttgaaaattatagaaaatctcaaattatatcccaaaatggacaattattacttgtactatattttctcttagtaagataatatttgttttgttatagaatatttgttgtcattcctactcatcaatgttagtacaatttctcaaatagatgtaagcataacttctaaatttaacaatcaaaatatggtctaataaactaagatgaattccatactcaatatttgtctttgtaacctagaatattttctcaattgctactatgaaaattaagaataaaaagaaaattttaaatgtaggaagtgcactgaactgagaagattattttcctaaagggaaattccactggctatggagtaactgggaactctgtcctttattgtaaaacatttatgaaaattgcttgacttgcaacttcattggttgccttggagagttcattctataaaaaaaggtgcatcacgtgaacaagaaatgtatctacacaatgctcaacagaaaacccttgattaattgaagtatagtaaatggttattggtccattccaatttcctttaatttgcagttgcttggaagcataaagctttttaatgtctttgttttgacaaagaattc

SEQ ID NO: 198696 - DNA, 1000 bp, Homo Sapiens
agtgatgaggttggtcttgctgtctcaggctggcagaaaatctgtatataagtggactagtgcagttcaaacctgtgttgttcaagggtcagctgtaatttttttgagacggagtttcactcttgtggcccaggctggagtgcaatggcatgatcttggctcactatagtctccgcctcccaggttcaaacagttctcctgcctcagcctccgagtagctgagattacaggcatgcgccatcccacctggctaatttttgtattcttagtagagacagggtttctacatgttggtcaggctggtctcgaactcccgacctcgggtgatctgcctgcctcggcctcacaaagtactgagattacaggcctgaaccagcgtgcccagccgggtcagctgtggaccttggtaagatccaggtaaaagctacattcctgtggacctacttttatattgtacatttgctcattttgtgctttttcttcttctccttatagttctggacatggcaagacatgtgccactctatcgggcactgctggaattgcttcgggccattgcttcttgtgctgccatggtgcccctattgttgcccctttctacagagaacggtgaagaggaagaagaacagtcagaatgtcaaacttctgttggtacattgttagccaaaatgaagacctgtgttgatacctataccaaccgtttaaggtactatatacaatgttcatttctcttgagtttgcctctaacaatgtttttaaaataactccatgggtgtttttgtttttcagtgatatgtgctttttaaaagcatatacaccctcggctgggtgcggtggctcacacctgtaatcccagcactgtgggaggccgaggtggatggatcacgaggtcaggagatcaagaccatcctggctaacatggtgaaaccccgtctctactaaaaataccaaaaaattagccaggcatggtggcgggcacctgtagtcccagctgctcggg

SEQ ID NO: 198697 - DNA, 1000 bp, Homo Sapiens
cctatagtcaagatagggtaaaaaaatacatatatgaacagctatcacactgggttgattgtgatcaggaacaggaaagacaaggaagggcctggagggtcagagagggctggttaggaaggtgacattcaagctaatccacaaaagaaggtgaatttgaacatgaggacccatcagtctgtctagaaactaaaaaatctcattgactaagacaataaaaatttgaatttaaaaatgattattgtgtttttgagcccctgttcctattgtgttggcaggaggcccactgggtcaagtatgttaggttgaaacaaaaattcaaaaatcaaaaataatcaaaaacgtcttggcagccttgctgagatcaacaacctgaaaacaatctgtggaagaaaaagcttgaatacttctggggcttctgccataggtctctcccttgtttctcactccctcttttctctcttgttctctctctcttgtcttctttattcccttcctttccaattattctaacccctgtcagtctgaccagtggcttacttgatttcaccaaggcctatgaaatcgatcttagagatagcatttccttcactttaagccatagaggttgggaagtcaggagacttggctgaggttacaaagtggtgagtggagacaaacacctgagtcactcagcccagccttcttgccaccttttcatgcttcctgtgtcctgggagtcacattcaggagcaggcatctgggaggttctccagtttatcttgtggtagagcagaatgcacatcatgttgctccatcctagccatctttccaggatcagttcaaaagcttctccctgggaaatcatttcttgacctctccaattcccaaagccaaaagagtctcttccctctgtgttcccaagactttggtgtgcatctgtcccaacttttagcaaggacattctgttctgcaacctgaatacaggtaaatgcagtgtgattttaattagaagcctgga

SEQ ID NO: 198698 - DNA, 1000 bp, Homo Sapiens
tttagttgctagaaaacccagaatcaaagttgacaacagcattggacatgacttaatggcacgcatgtttgtgtactgacctttgcttgagttttacatcatgatccgatctttaattttctgatatcccatttttctttgctgttcttttatacgttgtaaaaatatatattttttataaaacaactcaaatcttttttgaaaggaggttggagaaaataaatttaaaggtaactagaacatttagattattactttaaaacaattatcttcttacctcttctctattcccaccagtactaacctaggcatggaaaacagacgagatgttctgttagggtatctttgatgttcaggattatatatctatttttttctccctattttcacaaacataattgttaaaacagaacttaccagatagagaatatgaagatcattctctaaaacaaagcccttcattgctctttgcaggtcagcaaaaatatctaaagtatcagctggagaaagtgaagaagaaagagtggccgaaccaagatgtgttggatgatacacctttcctggtttagggttagggtgaggaaacagaggaacaaacattcaaaataaaataaaacaaaatactatctttctgttttccatgctaaccctcccggctgataaattttacaaatagtaccttatccagagcatgaaaatgtatgagcaggctctatcataatggtctgaagttgctaaatacaatactgatttactaaaaatgagttgatacactgctcaaaaaatcaaattccttttatactacatgaaaagacaatttccattcactgagcagtcatacaacctcactaaagaagaaaaagtgagtaaattgcaactgagaagtcacacttaccttctgttccatcactggcttctgtactctggatgaattcattttctagtagccacatcacacaggcctcaatcgctccaagctgaacagactcttgatttctct

SEQ ID NO: 198699 - DNA, 1000 bp, Homo Sapiens
tgtgccccagtacaaggacgctccagctgactctctgaaaaaagccagtaggagtgcttttttttaattagacaaagtgtgggaattgacatcaggggtaaggtttgcaggctgagctggtagcacatgatgggcaaggcatgcaagtcggcatatctggttgcaatggttatcttgggtaatggacaatttagtggtctggccggtgacaaaagggctgtaaatcaattactcagcatttcttcctgaggtggaacactccccaacctcactctgatatttagattttctaaggccagttcctggaatttttttttttctttgagacagagtctcactctgtcccccaggctagagtgcagtggcacaatcttggctcactgcaacctctgcttctgaattcagttcaagcaattctcgtgcctcagcctccagagtaggtgggactacaaacgcatgccaccacactcagctaattttttgtatttttagtagagacgggattttgccatgttgcccaggctggtctcgaactcctgagctcaggtgacaggtgatccacccaccttggcctcccaaagtgctgggattacaggcacgagccacacacctggcttatttcctggaattctttaagtgaaaggcatggttaaacattatggcatcagtgaggtagtggtgtggggttttttgttgttgttttttaatttttgtgggtacatagtaggtgtattatttatggattacatgagatgttttgatagtcatgcaatgtgtaataatcacatcatagaaaatggggtatccatcccttcaagcacttaccctttgtgttataagcaatctaggatgggtgcagtggctcatacctgtaatcccagcactttgggaggccgaggcaggtgaatcaccttaggtcaggagttcaagatcagcctggccaacatggtgaaacccccatctctacttaaaaaaaaaaaaaaaaaaattagccaggtac

SEQ ID NO: 198700 - DNA, 1000 bp, Homo Sapiens
aaggtctgacatctggaagtctcattctctgtgtttgctttggtccttaaatttcatttacatgtggcttcgtgtagcaatctttaaaaattaaaaggaacagattagtaggctgattaccatggttacctttgggactaaatagatatttgttgaacgactgccgtgtgactgtaatcttgtgatgggttctgagagatgtgagcaggaacttgatagagcctaaaatctagtgggaaagccaagacagatagaaaaaaaaaaaaaaaaaaaaaaaacctgctgtgtaggaaattgcttaggagatctagcaagttttatagaaattcagaaaaactgactaattttccatttgtcctgagtccggaatttgcattgccaggctgaatgacatccatttcattggtcagcctctcaagtcagaaatgcttccatatagcatttcttctctttctttttcctttttccttccttttttttagagaaaattataaaactttattaaaagacattttaaaaggcccaaataaatggagacatatgacatgcttgcagactaatagaccgtataaagccatgactccctgattaatctgtatttaatgtaatctggctaaaattctagcagcttcctgggtttttttgttttggtttggtttgttttttttactttaaattctgggatacacgtgcagaatgtgctggtttgttatgtaggtatacacgtgccatggtggtttgctgcacctatcaacccgtcatctaggttttaagccctgcatgcattaggtatttgtcctaatgctatccctccccttgtcccccacctcccgacaggccccaggtgtgtgatgttcccctcccggtgtccatgtgttctcattgttcaactcccacttataagtaagaacattcagtgtttggttttctgttcctgtgttagtttgctgagaatgatggtttccagcttcatccatgtccctgcaaaggacatgaattc

SEQ ID NO: 198701 - DNA, 1000 bp, Homo Sapiens
acaggatagctggaagagagccttgagatttaagagcagatttaaagttgaaatctactccaaactcaccagtctgatgattgaatttccattcctggccagtgcaccaaaatgatatggctctaatgagtggaggaacaccagggttcttggtcctcatgccaatttagataaaaggacatggacacaggtggagtggttttaaggagcggagagtttaacaggcaagaaggaagggagaacacctggtgttcacggtctctctggcttcagagtgaagctgcagaccttgcggtgagtgttacagcccataaaagctgcacagacccaaagagcaagccacagcaagatttactgcgaagagctgaagagcgaaatgacaaagcttccacagtggaagaggacctgagtggcttgccgctgctggtgccagcggccagcttttattcccttatttggccccacccacatcctgctgattggttcattttacagagtgctgattggtccgttttacagagtgctgattggtcccttttgacagagagctgattggtgcatttacaaacctttagctagatgcagagtgctgattggtgcatttataatcctttagcaagacagaaatgttctccaagttcccacccgacccaggagcccagctggcttcacttctcaatgacactgggatgtgtacataattaactgaaaagggggttgagggagcttcctggaatgatggaaatattctatatcttgattaagttggtggttacatgggtatacataatgataaagtgtcattaatatatacacatagcatgtgtgaattttaatttatgtaaatttaccaaaataaatttatatttttaattcatccaaagagaaaaaaacatattacgtagaggtaccagcagtacaaatgattgctgacttcttactagaaatctttaaagtgctaaaattaaacaaaagaaagcataattgtcaaccttgaatt

SEQ ID NO: 198702 - DNA, 1000 bp, Homo Sapiens
ggaattacttggaaagaaggtcctatagccagataaatttgggaaacctagttctgtgacgaaattacatttagaaaatactttaccctgggtttcgttcccaaaatttatttgatcagagaaccttgctcccaaagaagactagtgaatctctccatggggctacacgagggagatgagtgtcagtattttggagaatgacaacaacaggggcagatctcaaggacctctttttatataatagacataaattgaatcttagttgacatttaggaagaagtcattaagttactcacattttgtgatgcaaatggaaccattgaatgtccattttgttagattttctgtttttaaataaaagatcttatcatctgacacctattgccagaacatatgtgctatttgatgtggtttatataggaatagatattgaaataattgcttttgtttggaaattagcttaatatgttagcataagaatatgtgcagccaaatttaggcttgataatattatgagaactagagcaactagagcaatgcttatgagaataatgtttggacatgtcagctgtactttcaactttcctactctttcattattgcaatgacttttatttggcacaaagggatattttcatgttcatcaatgaaatttgtgtatagtctatggaaagaggtgaaaaaaattcctctaaaaggaattcagttagccttctatttaggccgtaactccgacatgctctcaagaattcttttggtaacaacctcaatttaccttgtctgctatttcagatgtgtcttaaaatagcataatttcccacagttttattaaaattgtggtgcctctcaacttagtaaaatgtttctgcattagatttaatttaattgcattttcatgtgtctttattcggaagctcaaattcaatttgagaacacagttaactaatccagtctttctggggattttattttgattagcctttggatttgggggagggag

SEQ ID NO: 198703 - DNA, 1000 bp, Homo Sapiens
gtccttggagccagcatcctggcttttgcactggcagactgtgcctgacttgcagagagttcctgtagggcggtccccacggccatgcaccagcctgcccactccctccccacacttcagcttccccctggggctacagcagtgccccacatcgctttgctagcatgtgtgtgcatgggctggctttgtttccttgccccaccagtgcacctatgtccatgcaccctgccctgccactgctgcagcaggagggcatgtctctcccgtgtcccatcaactgccactgcagtcacaaccttggcaagcacagggccagccagcactgtggcaggagtgaaaataggcatggagaacagcagattctcccccatcacgagcaaccacccctgcctgcagtgcacagagaaagcacacagacctgtattacataacagtaaagggttcagttcaacaagaagaactaactatcctaaatatatatgcacccaatacaggagcacccagactcggaaagcaagttcttagagaccttcaaatagacttatactcccacacagtaatagtgggagacgtcaacagcccactgatagtattagacacatcatcgaagcagaaaatcaacaaagatattcagggcctgaattcagcactgggtcaaatggacctaatagacatctacagaactctccaccccaaaataacaatatacattcctctcatcactgcatggcacatactctaaagttgattacataatcgaacatagagtattcctcagcaaatgtagaagaactgaaatcagaacagccactctctcagactacagcacaatcaaattagaaatcaaaactaagaaattctctcaaaaccatacagttacatggaaattaaataacctgctcctgaatggcttttgggtatataataaaaataaggcagaagtcaagaagttacttgtagctagtgagaacaaagatatgacataccagaatccctggga

SEQ ID NO: 198704 - DNA, 1000 bp, Homo Sapiens
tgattgggactgaatagggcttagaatccagggaggtttctattccgttcttggttatgctaagtgcctgataagtccaggtattttaattcctggttcccacactcaagagtacgattgaaatcaatgcgtgccatttctgctttttggcctttcaagtggcaatgaaaattgaaatgtttttgtgaattttgtctcttgggttatttgggatatagtaataaatttgccaatctacatcagaaaactgataattctgggagtatcttttaaagtttcaaatttgttcactgcatataaaaatattaagtcataaaattaccataagaaaaatttgaaataatttgggatttcctaaaactttagttcagtaactaccctagtcttttaaatctttattccttctaaatttaacaaatacgtttgtaacagtcactgtaccatgaagtagtgcctataaatctgaaaaaactacttagaaattatcaaaaatttcataaaattcaaatagagatgtggtaaatatattaacatttcaaggataagcagattgatcagatactcataggtagggaaatgtaggaagagtccaggggaagagaacaatgctgtttatctgaagctcaaggtacatgctttgagaaataagactggattgatctgcctatggaaggctttgtgtgtgtgataaggaggtccagtttagagtaagagtctgagaagaaaattgatatggtcaggggcacacgagttcaaatctccattatttttctgggtgaactttttgagttaagttcccaacaactgttgtggtctgcgatgccccagtaacaaggcaggtttgaaacagattttagttatgctgaaatctaaaatccttcttttatgagcaatgtgaacttttctttttaccaataaggtaagtttatgcaacctactcgccactggtagcatatcaccctagtgttggcaatagtttagtcacctcaattaagaattc

SEQ ID NO: 198705 - DNA, 1000 bp, Homo Sapiens
atgtacaaaaactgatgaatcacttgatgtcctcctacagtgcacatcccaggcaagtagaaagcttgctttgctgaaacccccatggctccagtgaggtcaagagtctttctggataagggggcgaccggggtggttactagcgaatgttcagcaccgctatctacaagaaaatcaatgtctctaccctcgactgtcattctgaccagaggctctttggggacactggagcccggtctccctcagtccaataacccttctgccaggttgagccgggccccttcctccttgtccagggcctcctgctctgagtcaccttcttttcttttgagctgagggcatttgttcttccactgtcctatttctttacaataagcacactggtcacgctgcaaactctgacacccaagctgagtttctttcccaaggccccccttcccttgcttctttggggggacagctctgattgctgcagctaacaaacaggtcggcgtttcgccgggcctgaccttcattctctttgggctttccctcgcggcttactgcatccctgtttacaaacacctgcttagctatttctcatcaatgtgatgtattcatccctgcaagcccagcctgcttctgcagttttcttctaacgtcttccgcgctttgatggactaaagccatgtgaatcatgcgctgattttcagggttatcgtgatcaaggggagtatacataccataggcctcacacagtctctggtagaattgcgctggactttctacttttccctgaatgacctcagagaccttgttaacgtttgtggccctctgagctcccctcttgaatccttccaagagagcttccctgtctcggtttagcctttgcatctcctctctttcatgtgggtccaactgggggtgggttcctggtaactgggtgcttccatactcttgggggttttgataatcagctggtgcatgttcctctagccacttagttgctgcgtgaagccct

SEQ ID NO: 198706 - DNA, 1000 bp, Homo Sapiens
cagtgaattcctgctgggccctttgtctccttcctgtcactgaggaggaggtcacaaattggggctggcttccaaatgtgtgaagaggaggttaccggttccagtgaataataacttggacagaactgtgccccccactgcctgtggtttgtctttggaggcttctggtgtagcctgaaaggagagaggggccatctgggtgggccagtcaccaccttcaatttcagggtcatctttggctcaataacaaaaatggcaggaatttctatatagtgttcattacatgccaggttcaacttggagcattttacacgtattaatttaatcgtcacatcaaccctatgaggtaggactgttattccaaagagggatcatacagctggaagcggcagagcctaaattcaaacctggttagctagcttctattatagaaacctcattttgtctgaatgcccaggggagattagcctcctgaggattgataaaccaaggtcccaagagcccaaggtgtaaataaaatggcaattggttgatttatactggggtgactgaactacttacgtgagttgcccagggcaccctggagtaattctttaagggtggtattccaggcaatctgagttgtattgggaaagcaactgatggaaaaacagaccctctgcttcctgttatgaggacattttttttttttttttgcagaggcaataggaagttgaagcctccacttttgacctcattggagcattttgtttttaccatgacgttccagggagaatgccaggaaggatcatgggcaaaaagaattctctcagtccgcctccttagtgtggcaggaggtacaaattaattcctttgttgggtcagtatgatattcacctgggattcatcagcagtatgtaatccattttatcgggaacacttgtgtgcgggttgctaggaagctaagcttattacctggctctggctcttagagctgagcctgctggtgctaacagatttg

SEQ ID NO: 198707 - DNA, 1000 bp, Homo Sapiens
atttactattaccagtgagttttttcccttaagataatttcatatggctctttaacatcctttttttcatgttaaaatactcccattagcattccttgaaggacataactggtattgataaaaaaaaaaaaaaaaaacctcaacttttgcttgttttggaatgtcttttattttttctagatgtactattctaggataaaactgttttggttttttaagcacattaaattcatcatgccattctcgcttggcatataagatttccactgagatgtttgctggcagacatattggagctccattgtattttatttgtttcttttctcgttgcttttaggatcgtttctttattcttgacccttgggggtttgcacatttaatgtcttgatgtaatcttattcatgttaaatcttctttgttttctgcaacctttttgtatttgaatatttacatctttctctaggtttgggaagttctcttttattatccctttgaatgaactttcttcccccatatttctatctcttcttcaaagtcagtaactcttttctttgcccttttgaggctgttttctagatcttataggcattcttcatttttttatttgtctcctgtgattatgtatttttaaatagcctgtcttcaaactcactaattctttcttttgattgatcaattctgctattaagatactctgatgaattcatcagtatgtcatgggcatttttcaactccagaatgtctacctgattcttttaaattatttccatctctttgttaaatttatccaaaggtattatgaattctttctctgtgttatcttgaattttgttgcctttcaaaaaaaagctattttgaattctctatctgaaaggtcacatatcgctatctctccagggtttgctactagtaccttatttagtttgtttggtgaggttatgttttcctggatggtctgatgcttgtggatgttcatcagtgtctgggcattgaagattta

SEQ ID NO: 198708 - DNA, 1000 bp, Homo Sapiens
aaagaaggcatagatttgtcttgtggagttgtgctttataatgcagacttttaaagtattagcggttgtctaatggctctcttacacaatatattctgccaggattgtaggcctgggctttaaactacaaaaactgagactgtgttccacaatgttacaatgaatgagacatggtctctaaattgtattaggtattagcagttagcataaggcccacctgagaaaattctgttactctttatcttgtttggaattgcattcactatggaggaggccaaggagagaaatacgaaggtctaaactttatcatctctctttttctctgtgagacttcttgggcaggttacctcttttaatctactaataattaaaaaaaattccttttacagatgtttgtcagggaaatgtaaatcgaaaacacaatgagataccacaccacacccagtagaatggctactatcaaaaaaacagaacataaccactgttggcaaggatgtggagaaactggaacccttgcatgctgttgatggaaatataaaatggtatagccagtatgggcaacagtatgctggtttctcaaaaaattcaaaatagtattaccatatgatccagcaattctacttttggatatatgttccaaagaattgaaaacaaggtctcgaagatattattattattattattttttgagatggagtgtcactctgtcacccaggctggtgtgcagtggcgtgatctcggcctactgcaacttccgcctcttgggttcaagcaattctctgcctcagcctcctgagtagctgggattgcaggcgtccaccaccatgcccggctaatttttttgtatttttagtagagttgaggtttcaccatcttggccaggttggtgttgaactcctgacctcgtgatccacccaccttggcctcccaaagtgctgggattacagacatgagccaccgcgcccagctcgaagagatatttttacacccatattcatag

SEQ ID NO: 198709 - DNA, 1000 bp, Homo Sapiens
aattttcagaacctattgaagtgtaacaccacgattttcttcaagaataccacatagtttgccaaaattccctctgtgctgtgaaaagactgctagaagaccaacgttttcagactgttcagcttgattacactggtgtggtcccatttatctacagctattttaagcatcttcttgaattacagtaagctatattgtaaatctaattatatttgcccacagggaagtaagtacataagaagcctgctctgtaatctgcttaataaaaggcactccagttttcttcatagcatttatcaaaaattgtcattatacagttgtttatatttctaatgccagtctcttccactgtaacttccatgatgatatatggatatgttacatatgcagtacctagcagtgcctagagggccaataaatgtttgatgactaaatgaacaaatgaataactatgtaagagacaactagatttatagacatatatgcttaccactttcaacttgtgccgaaaacttatatgtatattagagactcttggggtcatagtgcagagtagtgtaagtacagactttcaattcaaatggaatggatttaatgtcagaaatgttattagttctatgatccaagacaattggattgagctttcttaccctctgtttcctcatctgtaaaatgtgaataattacattggagtaaatattaaagttaatgcatatgaaagtatgcagcatagtctgtggcagaaagtaaagtctaaatcaaggaagtaatatcatttaccaatattttatacagaatctaagtgaattatattaatctaaattaattatccaagtgcttttaaaaattgacaacataaatgtattctgaggatatgctggcagtgataactcatcaataatctatggctctacaataaactttccaacatcctttgtgcctgtattcccaattattataaggtttttcaacaagttactttcaactaagtttcagaatt

SEQ ID NO: 198710 - DNA, 1000 bp, Homo Sapiens
gacctaaagccactgtaaccccaaagcgacccagtgtgaggccaagggagcagagcaagctcccatcttccctcctctgccctacccctcccagtatcacctccactgctctgaaatctaaatagatcctttagccttctggcccagaaagaggaaggggagaacaaatttctctctgagaggccaggcctgggggcctcagcttcctaaagtggaagcctgaggtctgccaatgtctttccctccagcctctcctgatgctaaacagaatgctaaacagatcacagaccccaaagtgcactaattgttttgtcagagttaagtcactagctactgtacttattggtgaggtggtaatacatagtaatgggaagccacattcccggtgtcttttaaagaaaacttaatagccaacttttgcgtgtgtttcccaaagcaatgcaaacagataatttaccagaagagaaaaattcagttaatatcttctggtgtcatattccttcattaaatattggcatcctaaatacttccaaattaccggcctctcttcctattccacatagagttaaaataatatttgcctaaaagcaatatttgcctccaaaaccataggattgagagtcaatactccttggtagctgtcctaaagaagtatacagaaaaagattgctatccccagtactaaatcatagcccaggcatgagtccagcagttgagaaactcacattggagtctttgggcttggatactgctaacgcaggaaatgccaggccccaactcctttctgtcttctgtgctcgactaatttcttaccattaacatgtaggagaggcttttatggcaggaggaggaaggagcagagcaaaaaggaggaagaggaagatgcaggggctggcaagacctctggttcctgccctgggtcctaaggaactcaggattcctttctccccaccactgccaagcccatccaggtggggacctccttgggacagaagcttgg

SEQ ID NO: 198711 - DNA, 1000 bp, Homo Sapiens
catataactggagaaaggagactatgtatttggagaataataagtgttaaactgtgtgccatgggtgatgagggtaagagaaacttcaaggtaactgaggtcagcaaggcctggagcattcaggagaggagaagcgtcttggagagatacttctgtgaggtctttaaagggtgaggaagctttgtttatgactacatgtgtttaaagtgcagtattttcacaacatcacactaagtgaggccctctgcatctggaggcgttctggaatgcagccgtcagccagtggccctgttcctttctcagagacaggactaccacccacagctcttctgatagccttgttttcaattgccatggcctgttggatcaaagcctctgagtttgatgcaagttcaaaataatttccttcaaggattaactcatctttttgggcctgaggagctacaacaagcaacatctggtatagcctgcagagggattttttttttcacccaaggagtttcaagtttcaacatgtgagccatcctgctgaataacatcattgacgggaaatgacacgcagagaccttatcttgtaatgagagctctgtgtaacaccccacagtcatgttttgcatcgactataatagatggtgcaaactgtaacaggttccttctcactttgtttcctgccaaagtgactgagttccacactgatggggttgaaatccccttgtgggtttcctctggggccattccatagcccatcctagtgccgttaataacaccctccctgtgttcgtcaggcccaccttttaatgccgtcatagggagtctcttggtcagttcctattatctgatcccattagtcacttccctgtctgcctaggtctcctggaaaattcctgggactatctccttgcttttggtaaatcctggcttcattcctccacgctgtgttttctgtattcccagctctcccctttgcatcccttgggctagtcccaccacccctggaatt

SEQ ID NO: 198712 - DNA, 1000 bp, Homo Sapiens
acatgagcaaatcatttagaattcagtgggcaaaaagagacaattatgttgtcttctaaatctttgaaaatattgttttcatgattcttttaaccaaagtaccctataaacaattatttttatctctgagccattatcactcacgaccacctccaccattctgttatgtttagcatgccgtgaaatcacaaactacacaggatcaactgctttttgacaacatctgaatcatgacagagatattagaaaaataaaatgtctgagttccaaataaaatttaaaatacagtatattcaaactcaacattttaagaaaataattgtatttcccttttcttttaaaaattgatttatttatacaaaaattagctgggcgtggtggcgggcgcctgtaatcctagctactccggaggctgaggcaagagaattgcttgaacctgggaagcggaggttgcagtgagctgagatcgcgccattgcactccagctgagcgacaagagcaaaactctgtctcaaaaaaaaaaaaaaagatttatttagagaaatgtgggagacttcttcggtaaagtcagtacttctgaaagagtattttctctcttaaaagactgcatccactctggagaagcacccagctgttccttttgaaactaagcatggactcatcctatgatccagcaagggcactcgtggtgtcactcatggtgtaccagagaaaatgaagactgactcccagcaccttcattcataacagcccaacactaggaactacccaaatgtcctgtaatggtgaatggttaaagaacctatgggacatccataccatggaatacgatccagccataaaatggaacaaacctttcacacaggcaacaacttggaagaacctcaaggaaattatgctgagtgaaaaaaaaaaaaaagccagtctcaaaaatggtgcatacgacatagttctatttatgtaacatccaaaaaaataacataattacagagatgaagaa

SEQ ID NO: 198713 - DNA, 1000 bp, Homo Sapiens
ttaacacatgctaaaaaaaataatcatttttagaatttcatctaagaaagttgaatcctcagaaagtaaagaaagactcactaataggtagtttttgtgttttttttttttttttttttttgagacaggatcttgctctgtcacccagtctggtgtgcagtgatgcaatcttggctcattgcaacctctgcctcctgggttgaagcaattctcccaccccaacctcgcaagtggctggactacaggcgcatgtcactacacctggctacttttttgtatttttagtaaagttggggtttcaccatattggccaggttggtcttgaagtcctgacctccagtgatccacgcaccttggcctcccaaagtgctgggataacaggtatgagccaccacacctgtcctaacaggtagtttttacaacttgagttcctatcagaagtatattagaatcttttagcttgacagaattaagcagagatgcagtgaatatacaaaacttgctctttcaaaaatgaatttgcctcaaacagtagttgttgaatgcctattatatcctaagtgccctccaaagaaccctgaaaaaatacatacataatgaacttatgttagggtacctcccaacaaatctctcctagtactttgtatagccacactatatgttttttaaaccactgcctttgtaaacatcacagtatcactcaagaacctctgtctcatccctggagatcagtgacaaggagataggtggcagatgatgtgaggcctgagatatgctgccacagctctcaataaacatgtaacatcttaatagtcatatttgtaaaatcagccaggacagggttttaaggttagagtctatgttaataataaacaaatgtttagtcatgtgatttaagtttggataagaaaggtaggactcgattacagagaattttgaaaactagggaagggagtttagaattcatatggtaagtaattgggcaagccactatgaattc

SEQ ID NO: 198714 - DNA, 1000 bp, Homo Sapiens
ggtgaaaccctgtctgtactaaaaatacaaaaattagctggacatggtggcaggtgcccataatcccagctacttgggagactaaggcaggagaatcacctgaacccaggaggtggaggttgcagtgagccaagatcacgccattgcactccagcccgggcgacaaaagcgaaactccatatcaaataaataaataaataaataattcaactacaagataggggttttggggaaaaaaagttaaaagaactggaattatggcccagtgcagtggctcacacctgtaatcccagtgctttgggagtgttgatcactatttttatatacatgaaacaaacaactgttgttgttgtttttttcctttttttttttttttataactacaccctcacagtattgcaaaaaggaggtagggcatattacgtgccagtcactgtgataaatattttgtgtcttctcagtgaaatctcataacagtctagtaagataggtattctttctaccattgcacaaaaaaggctactaaagattaaatgttttgatttacttaatgttatattcaatggtaaagatagatacaaacatttttctgacatagaaggccactctcttagccaatacactgtagtgccttcatttcatttagtgcatagaccatatccttaacttaggaatgcagaatctttcattaaaaaaaaaaaaaaaaatcaggattaccagcaattttcttaaaaaatacagcaaacatttcaactattcctcccaccaagaaaactatgaaacagaaataaaataaatttagacaaaaggagtagcatgatttatgctatggttttaaataaaactaagaggcatccctagcccaagtatgaaatggctacaaaagtataactttaaaatttttaaattaaatcattgaataatatgccagcattgccaagccaattcttccttcatctataaatgtttatatttttattgtttgattattaatgaattc

SEQ ID NO: 198715 - DNA, 1000 bp, Homo Sapiens
ttggttcgagtttgctcctgtagcttggagtagtttgattgtctgaagccttcttctctcaactcgtcaaagtcattctccgtccagctttgttccattgctggtgaggagctgtgttcctttggaggaggagagatgctctgatttttagagtttccagtttttctgctccgtttttttcccatctttgtggctttatctacctttggtctttgatgatggtgacacacaggtgggtatttggtgtggatgtcctttctgtttgttagttttccttctaacagacaggaccctcagctgcaggtctgttggagtttgctagaagtccactccagaccctgtttgcctgggtatcagcagcggtgtctgcagaacagcggatattggtgaactgcaaatgctgctgcctgatcattccgctggaagttttgtctcagaggagtacccggctctatgaggtgtcagtctgcccctacttggggttgcctcccagttagtctactcaggggtcagggacccacttgaggaggcagtccgcccgttttcagatctcaagctgcatgctgggagaaccactactctcttcaaagctgtcagagagggacgtttaagtctgcagaggttactgctgtctttttgtttgtctgtgccctgcccccagaagtggagcctacagaggcaggcaggcccccttgagctgtggtgggttccacccagttcgagcttcccggccgctttgtttacctaatcaaacaactaactcggcaatgatgggcacccctcccccagcctcactgctgccttccagtttgatctcagactgctgtgctagcaatgagtgagactccatgggcgtaggaccctctgagctatgtgcgggatataatctcctggtgtgccgttttttaagcccgttggaaaagctcagtattagggtgggagtgaccctattttccaggtgccgtctgtcacccctttctttgactaggaaagggaattc

SEQ ID NO: 198716 - DNA, 1000 bp, Homo Sapiens
aattagccgggtggcagtggtgcgcgtctgtaatcccagctactgaggaggctgaggcgggagaattgcttgagcctgggaggcagaggttgtggtgagctgagatcatgccactgggctcactccagtcggggtgacagaatgagaccctgtctcaaaaaaaaaaaaaagaaggacattacagtttttaaatgttgcctctaaatttgcctgtgaaccaactattggacagaattgatgaattattttgtcagcgatgataatgtgttttgactatacagaaaaactttattttttcacttgtgccctggagtatataaaggtgtatgaagacatgatggctgtgttctactgagaaatatgtcagcataaaacataaaatgaattaaggttttcttctgcataaaatgaattaagtttaacctcaaatcggagcttcacatcagcgttccagagataaaggtcataaagttgaggactggctgagaaagagggtggctctagggcaggcctggggaagccgaggaggtaagggactcagggagggaggggcccaggccctggcagggggcagcaggtagaggagggtggctggggcttcagaaggacttgtgagctgggtgctgttctaagcacttctgcacaaactaactcatttcatccaagcaatggcccgaagcggtgggaactgttattgtgcccatttcaaaaataaggaaactggcctggcatggtggctcacacctgtgatcccagcactttaggaggctgaggtggtcagatcatctgaggtcaggagttcaagaccaacctggccaacatggtgaaaccccatctctactaagaatacaaaaaaaattagctgaatgtggtggtgggcacctgtaatcccagctatttgggaggctaaggcaggaggatcgcttgaaccctggaagcagaggttgcagtgagctgagattgcaccactgcactccaagcctgggtgatagagtgagac

SEQ ID NO: 198717 - DNA, 1000 bp, Homo Sapiens
ttcaatgcattgtggctgctctcattatgtttccagtaccaatcaaaaagttgacaaagctgttaagaaaatagcgtgtatttcttctttcctgatgttgtttctatattcacaccatccagagccagcttcccaatcatagaggaggtaatgatattttgcagaaacaatggttggtattgtggaaatagacttttaacaagtatgtgatgagcagatggtgctatttttgactctggtaaaaaatttgattttaataataaatttattttaataagaagctgtgcaaaccaaaactgaagacatgtgatcagcattctcattcaacaatgggttatgagctttcaggcttctgaaagagttgttttttttttatagcttcgtctgtcttttctttcctgttttggagagaggatttcttccttctaccattccagaagtcccaacaaatcatgattataattttaaaactggaataaaaacttccatttgaataaaaggaatacatattattagaatttgaaagaaccagtatagctgaagaagaaggctcatcttttattcattgcatatatcttgcatgagactactttactagtttgagttaacgtatttattttacgtaatcgtgggaacgtttgggctatggtaatttagtgacattttacaaaaacataattttgcagggacttggacaaactaactgttctggttcctttcttaatttcccaatctcagatgagctctaagtcctgttgccacaggcctgtggtcctcatatgagtccagcatatttccagctgctgctcaacacagtcccactcagcacagtgtgcactaaggcacctcagtgggcaaagggaacacaggttactgttgtgcttttgaccgtgtgcatctgttcacctctcctccgagtgcatatctcctgaccaggatcacgagatgaaaatgtttttcttactcagatgcctgaaaactagaaggcaacaaatgaatt

SEQ ID NO: 198718 - DNA, 1000 bp, Homo Sapiens
tggcagtgacaggcctgacccagctcccacacagccagcaaggccagtcttactcccaccatgccctgccagcagtgctgagtttatatccaggcagctggtggatatggctgagatcttgccccaggctacaagcctctcaactgagaaagcaagcaggtctttcagaccatgaccctccctgcctgcctgcaccatcagctgcagcttctgtgctagtacctgcacttgattcatcccctggattctgctcaggaaaattagtgctcagttgaaattattacaaagttcagctagaagcttctttcaccctgtggcctctccctaattttgctggctaccttccccaaggatctctgtgaggtaaagtcagggatggcttccttgggctcaagctgggaaatgggagtgcctatagaactcttcccactgcttcttctacctttatatttcactgggttccctaaatctatttcagctctaggtaggttaaatccttctcccttgatctggattttctggttccccagtggggatgtgtgtttggaggcagacttatcccctctcacactttgagaactcacagtttttcagctgtcccgtggagtttacagtggcatgccacttttttcaatgggtgtatttgaagccttttaaacaataattcttacactgaccacaaaacttgtcatgtggcagactctttctagaagaaactagaatgtcatcctgtgtgcagtttcctgcaccagtcccaaccacatgagcccagctaggagctctgtgtgtccatctacttttccgcagaccaccgtggctgccctgttacaggtcttctctgctatttccagcttgtcttcattgaaagcccaagattttggatctcttttcttcttcttttcaatgttgtctttatttttctctttgcttccttccttctcctttgccagggaacacctgtccctccagaggtgcgtcagcacacttgtcttcactgaca

SEQ ID NO: 198719 - DNA, 1000 bp, Homo Sapiens
aaagaggcctgggcatcatttctttataggctagacaaagtggaagattttactttataaaaatcagagccctctgtgggatgacggagaagtatcccgatatcatctactatctaagttttctcattctggtgacagaaaatcagaggcaggaggtttggccaaacctgtggaatgtaaggttggagggaagattgaacatcaaatatgccacccctactccctgcttgcttcccctccaccccaattttataccctccagttactctcgcaaaatatggacaaaggatttcaacttgccagtttctaattaatccatacttttgttggctcaagcactttataataaacaactacttattatgcagtataccaggcactgtactaagcacgctacatgcttaatttcatttaatactctaacattcctgtgaagtaggtattactgttccctttttatcagtaagaaaactgaggctcaggccgggcatggtggctcacgcctgtaatcccagcactttgggaggccgaggcgggtggatcacctgaggtcaggagttcgagaccagcctggccaacgtggtgaaactccacctctactaaaaatacaaaaattagccaggcgtagtggcacatgcctgtaatcccagttactcgggaggctgaggcaggagaattgcttgaacccaggaggcagaggttgcagtgaggcgtgatcgcatcattgcactccagcctgggtgacaaaagcaaaactctgtccccgccccccaaaaaaagaaaagaaaactgaggttcaaagaggttaacttacttatgcaagaccacagcaatagagccagaatttgattccaaattgtctaacttatctgtctgtgctcttaaacacattatttatgaggacaaatgatgcaggtctttttcctgtaagcaggccactgtacaaatgattgatggtcagcctttctaggtgaatctgttaacccccaaaccctgaatt

SEQ ID NO: 198720 - DNA, 1000 bp, Homo Sapiens
tccaggccttggttcttagatggcatttctggatccatcctgggccagagtgaagactactgttccgaagggagagatccaggcctggcagcattcaccacaagctgactgaagagtccttgggcctggagcaaacatcagcagtaaccaggcaatcctcactgtgagcctagaacagtggtggccacagcgagagacttcttctgcatagaggaaagagtgggaagaatgttgtcttgtggtttgggtgccagctcagccacagtagaatagagtaccaagtagattcttacgtttcctaactctagacctgggctcctaaatggcatttcttgtcccactctgggccaggggggagctcaccaccctgaagggaagggcataaacctggctacatttgctgcctgctgactgaagagcctttgagtcttgagtgagcatcggtggtagccaggcagtggacacctcaggacattgacaagacccagtgttatgctggcttcaggtctgacacagtacagtcccagtgatggtgaccataggggtgcttgtgtcaccccctctgacagctccagggagcccagcatgcagagagagactccatttgtttggaggaaagcgagagaagagaacaaatctctgcctagtaatctaaggaattcccctggatctcacctaagaccaggaaggtggtatttctacaagtctgtaagagtcccagtgttactgagcatggagtgccccctaatgcagatattgcaacagtgactaaagatttagatcataacacttgaatacttggaaagccttcccaagaaggatgggtacaaataagctcagactgcaaagactacaataaatacctaactcttcaatgcacaaaaataaatgaacacccacaagcattaagaccattcaggaaaacatgacctcacaagacaaactaaataaggcaccagtgaccaatcctgagtaagagatatgtgacctttcagagatt

SEQ ID NO: 198721 - DNA, 1000 bp, Homo Sapiens
tgtggaggaaacagaagcaagagattgaaattattaaaacttacaaatgtagggacttaaatgcaaacctctgacaatggagcactacttggctggggtggtacctctgaggagagggtgccctgaagctagttttccaggtgttagaagaactgcacactggattcagctgctaccacaggaaaaacttgccactgctgtggtgaaggagtatactgttggcaagatactcacaagcagaaggaaagtccacagaaagcagaaacgaaggagaaggctgcttcttaccctctagccttgaggtttccctctagttccccttattagcatagcctgacagggatccagctgggcaagctgaagtgtggtctgaaagtcccagccccagcatcacgaagtgggagtttagatctgagagacaagaacttaacaattggcacagtaatcctggaaaagaaacctcagctttgtggtctcagttttccttgcctgtgaaatgggacttttaaaaaattaccaaatttatactattgggagcattaaatgaaacaaactatgcaaaacttcttttatagtacctgaaacaaagtagctattcaataaaagttaattcccttccccattccccaaattgtggtatcaactaatatataaaaacaaagatgtgtgtgagtcaataatcagtatatgtctcttatgaggcagccagatgttctcatcctttataaatgaccatatatcacatggtatgttagtcttactaggttttaacttttcctttttgcaaagttgggcagtctccccatctccccatccatttctcactctttctcctcccatccctctctctctctctttctctctctcttatacacacataacaaagagatttgcatgcacacatgctcctcttaatctcagagaaaatttttcccgtgaaggcaaaaatataaatgtgatcaaaaacacagctattactcagccagaactggatgaattc

SEQ ID NO: 198722 - DNA, 1000 bp, Homo Sapiens
agctgggactaccggcgcccaccaccacgcctggctaatttttgaatttttagtagagagtgggtttcactatgttggccaggctggtctggaacgcctgacctcaagtgatccgtccgcctcggccttccaaagttctgggattacaggcgtgagccaccgcgcccggcctgagtgagtcttaatccgtggccatctgcgttcctgcaggcttcatctggccctatggtcccctggtaaggaggccttccctaccactctgtgtctgtgggtattgtcggcttgctggagcgcgtacacgaacagagtgaagcaggcagccggggtggtggttgggctttgcgtctattgacgaaaagagtcaaactgtgtaaagtatttgaaaagacttattctgagtccagtatgagtgaccacggcccgtgacaaagccctcaggaagtcctgagaacatgtgcccaaggtggttggggtgcagcttggttttgtacattttagggaggtgtgttggggggcctggtccgggctgttggtagatttgacaattggttgagtttgtctaaagacttggaatcaacaaaaaggaatgcctgggttcagataagaggttgtggagaccaaggttcttatttatgcagaggaagcctccaggtagcgggcttcaaagagagtagatcgtaaatgtttcttaccaggcctgaaaaggtgccaaagtcttagtggagcctctcctggctcagggagaagacctggaaagggagggggattcactacaggacgtagattgtccccacaagagacagctttacagggccatgtcagaatatgtcaaagaaatatatttttgggtaaagtacttctgtttctttcagggcctgcaatctgtcatgtgatgctatactagagtcaggttgaaatttggtgtcttattgctacaaagtctgttttgtcagtcttgggatctcttttaatgctaacgctggtcagctgtgcctgaatt

SEQ ID NO: 198723 - DNA, 1000 bp, Homo Sapiens
aggattaggaatcataatgctttagacattagcagtcaacattaccagcaacaatagaagttggaaggcaacagaataattccttcaaaattgtgaatgaaaagttttcccaactggattatactcagctaaactcacaatcaagtataaaagtagaataagtacaaattttcagatatgcaagtctgaaacaatttatttcccatgcactctttgtcagaaatgattgaagattgcattctatcacaaaaaggaaaagtattcatagtttactagaggctcaactgtgaatagcatggacatagtgtagtaatgtagatactgaatattgattataattctattgggaagacagtggttggggatagtagttatgtggcagggacagagggaggaaggaggctaaaatctcatcttccacagtgggatgtcaacagaaataattaaaactgaaaaatcaagaagtagccactcaaagcatactattgagagtcatagaagtaaatatttcaataatctgctaaactatattaaattgatatattaaactgcctctcaggccaggcacaatgtctcacacctataagcccagcactttgggaggccaaggtgggcggatcgctttgagctcaggaattcaagaccagcctcggcaatatggcaaaatcctgtctctacaaaaaaatacaaaaaattagacaggtatggtggtacacgcctatagtcccagctacttgggaggctgaggttggaggatcacttgagcttgggaggcagagattgcagtgagccaagatcatgctactgcactcaagcgtgggtgacagagcaagactccagggaaggaaaaatggggatgaattgtttttaaataacaaacctgtaaagatagttgactttttaaaccatgggtctgcataactttgacaactacaaacctttttctaaaaattaagctagcagtaccttgagatggccactaaattcgggagagctatcc

SEQ ID NO: 198724 - DNA, 1000 bp, Homo Sapiens
attcaattcagtttcaagaattatatatgtgtgatgcaaaatattttaggtgtttaattagagttttcatctctttattctaccagtgacttttctatcattattcgattctaatttaacctgtggtcgactattggattctagtttaacctacagtccacctagctgcctgctgtgttgtctgtttatcttatccaggagtttccttggattcagctcttctctttcaggtcattaggagtccactcttcaagccacagaaatcttaaatatctgattagcactattatttacttaatattttaaaaataatatcccaccagataataaatgaatatttctatctcttcagcaactctatgcttcttgtatgtcttcagcaactctgttaaacaaatgaacaagcagttttatacccattctgcacaagataaaattgaggctttatacattatctaatgctttgtgactaaaatctggtagaatgagaaaaataatccaaatattatatattcccaatttagagctttgaaagtaaaacaaaagtgctgcataaatcaatcaaaggaagtgattgtgtgtggtcaggaggttgaagtatatagagaatagaagtattaaataagattagaagcggcttcatgacaaaagtgtcattttaagtagataaagaaataaacaaataccacatgttatcacttataagtgggagctaaatactgggtacacacagacataaatatgggaacggtagtcactggggactccaaaagagggaaggcagtgagggaggaaggtttgaaaaactgcctattgagtattttgttcactattagggtgatgggatcaatagaagcccaaacctcagtatcatgctatatacccatgtgacaaacctatacaggtacccctgaatctaaatattttctaaaaaaaagtatatcttttaaaatctctcaaaattcattaatagagaacaaattcctatttttattacata

SEQ ID NO: 198725 - DNA, 1000 bp, Homo Sapiens
aaacataattgatgttggtacttctagcttgttagattttatgtaatcagtgagtgcgttaaagtatttacttaacaaataatttgtttctactgagttactttttatttgtattcttggttttataaaatgaatacaacttgtaaatacagtttgagaggtaaacagactgatggcctaaatatagagatctaccgataaaacgtctctgaagatgtagcataaattaataaaaatgatatatatatataaggttattgaaactcatttattgcctaaaggacattatctgtcctgggtaattaatccatttatgcctagtgttccattattggaatgctaagcttgtggaagttatttatatcctgctgctcagggtcatcgccaaggtctgattttttcacaaaagaaatttgcaacctccaatataaatgggttaataaatatttgttgaattaatgagtgtattttaagacatatccgatgctctctttccttctgaagacttgagtttccatctagcaaccttcagaaatcttttagcattgtatgtgcagaccagtcatgaggctctgttcctttttccccccaatttgctttttctcagttcttcaaattcggtaatttattgatctgttttcaagtgtacctttttctctgtcgtcttcattctgctgttaagccatcagtgaatgtttttattttagatactgtatttttcagatctagaatttctactttgttattttttaggtttctattgctttgttaatttttcaaacttgttgtgttgtatttttctctgcatcattaagcagaatcataatagttgcttgaaaatctatgctgattccaacatctggatcatcctggagttagtttctattggtttccttttgtcttgcaacttggccactttttcctgatttttttgttagtcaaggaattttagattgtgttttggatattgtgaatatgaagttgtggagcctctgaattc

SEQ ID NO: 198726 - DNA, 1000 bp, Homo Sapiens
cagttttatggatgtatcttgtgtgtagatgcttctctaagattttacatgtattgtttcttttacgatgcaatatgtgattttgcactggtcaatttagctgagctgggtcttcacttcccagattcctttacccatatagttccagtttaagttcagccacgggcaaatctgagtgagatttggtgaggtggaagtgaagggatagccattacactctggtcattgttgatttgaggtggtgagggacagttgcaaaggtgatggtgggaaagagtttatctttcccaaacattccaacaggacaagaacctcagaatttaatctctcaggatggatctggatcatgaatagaatatgaaaactggtcagggctccaccatgttcttacccttggaggtgacaacagaatttttcctacccaaactacacagactgagattgggtaaatgggactcgttaaaggaaatgcaaagtcctataaccagaaggggaaaatacatgctcaacaagcaaactggcctattcttgatttttcctgctccatgcctggttctttgtccaaactgctggacttgctgaccaaaagttaccacaggccagggttgctagatttagcaataaaaatacaggaatattcagctaaatttgaatttcagataagtagcattttttaaagcgtgagtatattccatgcaatatttattccatggaataaatttgttgtttatctgaaattcaaatttaacaggacatcctgtagtttctctggaccctaacacaggcatacctcgaggtgttttactgagaactcagagaggcagcagcggcaaagagccaaccaccatcacttcatgggcttctacggcagctggatgtacctcgcttctggaaacctcccacccattcaccatgccagggctggttcacaagtttcttccaatgcttttcagaactttatttccccagattcttcccatggttgtgtaaggttgaattc

SEQ ID NO: 198727 - DNA, 1000 bp, Homo Sapiens
acacacatactgattttgcagacttctaccccctcgaatattctgtggagaacaacctatttttttctatcctctcccaaaccgccatgctgagctcatcgcctctgaatttatctccgtgtcaaggagaagatgacagccaaaagtaatacattttgtttaagtcaagtcatgacacatctatgccaaatggagaactcagctggcaattaccacactgaaaagtgggacaaacaacagagcaaggaatagacctagaagtacatttaggtgtcatttcacccactgtatttaaccagagaaagaaaaagaaaatggaattttgatttcagaatccaaccttggttaatggttatttgcagaaaactagaaacattttaattattttcaactccacaccataacagctatcaagggaatggagacaaaacaaacagggacttattaaatacataattaatgtgcactaaaattcgcatatatgaatatgagtaagctgggaccattataaggtatgcaactgaaacgtgatcaattaattaaacctgttatttgctggggctttgggaaaaatggggccacctcaacagaggagggagactcatcagcagatgagatggctccttggtggtccatcctgcttgcaaagtagccaggtatttcaagaaacaaaaatcttagaaaagctacaattttctttacagtgaagcaaaaataaatcaagcccttgtcaatcaagaccttaatcaagaccattgtcaagctacaaatagattactttattccctcttgcctggtctccagtctccattataatcaaataaaaatacttttcaggcactgcatctggtttagaaatatagtctgtggccaggaaacaaaatgaagaaaactggcaacacaggaatgaaatcacttgtagcgattattaataaccgtcctcttttgaaatggattaaagtgcagtacaacaataggttataacatggaagaagaattc

SEQ ID NO: 198728 - DNA, 1000 bp, Homo Sapiens
tgatccacccacctcagcctcccaaagtgctgggattacaggcatgagtcactgcgcctggccaacctcgtctttacaaaaaatacaaaaattagctggggacagtggcacatgcctgtggtcccagctactcagggaggctgaggtgggagggtctcgtgagccctggaggttgaggctgcagagagccatgactgcgccactgcactccagcctgggtgacagagagagactgtgtctcaaacaaacaaacaaataaaccaaagaaatcgctgatcaagagctgagaccttttaacttttgctccagtatcaagcaagacatacaggtctaactcacttttccccacataaaatattctaatcatctctagaaaaatcctctttcaaaatgagctaccaagtaataatacagtaaaaaagacagggcttggctaggcccggtggctcatgcctgtaatcccagcactttgggaggccaaggcaggtggataacctgaggtcaggagttcgagaccagcctgggcaaaatggcaaaaccccacctctactaaaaatacaaaaaattagctgggtgtggtggcgcacacctgtaatcccagctatttgggaagctgagaaaggagaatcgcttgagcccaggaggcagaggtcgcagtgacccgagactgtgccactgcactacagcctgggcgacagagcaagactttgtctcaaaaaaaaaaaaaaagggggggctttctacgacactatcaactatgtttaagttaactaaatcttttaactttctaattcattacatggtgctactgttttctctccaagacctaaaaactaggaattataacttttgataatatgtatattacaaattaattccaatatcccaaaacctgaaagccctaaggaatctgttacggtgaatgaaattttccttgcaatagtacttgcagaatttaatgtaagccctcatttaaacctattttacacacacagaattc

SEQ ID NO: 198729 - DNA, 1000 bp, Homo Sapiens
tggcccattatcattcctgttcacctagttaaaggaatccggaatttgattaaacaaatcagtttatgttgcactaacacgtgttcacgtttagaacacattatatttaaaattaatagaaagatactaacagaaaataaagacagtgcagggcacatctgtgaatgcctccagggaaaacatcctgttacagagggtcttgtagaatgtagagtaactccatatatacatttgggggttctgtaaatggtcacagggcaccaggaagcaggaacaacatgaataaaagcagtatgttttaggaaactgggagtaacttcaggtgatgagagataaggacacctggggagaagtggcaagagatgaaggtccaaagacagaggaaagttaagaatagttttgcctagtgtgcaaagtactctactcaatttaattttgaagaaatgaaaaaaaatcaaaagtttttaaatgcaatcatgactgtgttttagagtgatagtggcggcagtgggtggtaatggatcagaacaattatgttagaattagcgaggagagttaggaagcatcgcggaaatacacacagagtacggggctggtagcaatgaaggaggagagggagaaatcatgctgaagcggaatcagtaggatttggagatagtttggatgtgaaaaagaatggtcgtaagcatcccattcaatagttgttctttcctttgggtatgagatgagtggagtgccctaccaaacaaggaaatgcttcagaatcaccaaagaaggaggaaaccacagtttttagtcttgaagagtaaatagtggaactaaagaaaaccaattgttaacatatcagggccaaagatatagaacatatgattattcaggtacctgatagtttctctggaacagatccatgataacatgtgtattgagcagagatttataggaaaatgtcagatgataattaatttgaatgcaataagaaagatttgaaaccaataacagc

SEQ ID NO: 198730 - DNA, 1000 bp, Homo Sapiens
ccaaaagtgccactttatttcactgcatacaagttgagttttccttaaaattttttaggtgagtacccagaacatgaagatgggtgggctgccgcgtacaacacctccaactcagaagccccctagtccccctatgtcagggaaagggacacttgggtgagtatataagtagtaattgaaaaccatttcatgtagtattgtttaaaaatgaagcacaacatatttaaattattttttgaatatttgaagagagaacattttctttgtaggattgttgtttgtgtgtataacttcctcttctcttgggaaacacatttttatacttcagaaagatttgtttagaaattgtttttctagtgaattttaaatttgaggtaaaatcctagcccaagttcatagtttattgtaaattgcagtctaattttaattccttttctttcagaaaatgtatatagtcttttatattacagtttaactccaactatcctttttaagctgtgtagattataaaattctataaaacttataagaatattgagcttcaggccaggtgtgttggctcatgcctgtaattcccaaagtggggattttgagagaccaaagcgggcagatcacttgagcccaggagtttaagaccagcctgggcaacatggtgaaaccctgtctctacgaaaaatacaaaaataagctgggtgtggtggcatgcacctgtagtcccagctacttgcgaggctgagacaggaggatcacctgagcccaggaggttgaggctgcagtgagccgtgatcatgccactgtgctgcagcctcagtggcagagtgagcccctgtctcaaaaaaaaaaaaaaaaaagaagaatatggagctttattttggtcctagagttgggctctagatttgacttttggcaaaaatggccaattaatggaaaagcttgacttttttcttctagagcatcgtattataaacttgacttactgtgattgagatttacgattagg

SEQ ID NO: 198731 - DNA, 1000 bp, Homo Sapiens
tctcatttctttttaatttattaaaagaaatgatttcatgaagaaatgcttcccttatttgctatttaattcctcagtgctatagaccacttagaaaagttggtaatgctgtattacatggctgtattactctagcatgagctagttgagctattagataatatttgacagtaaaaactttgtaaatttttattgataattttaaaattataattttctaaattttagattggagaaataaaaatttgccaaacatgtcaagagtacacattttcccaaataatatacaacagtggttattaaacttgattttggtgcctatcagtggtaccaccatacctctaatgtccatcagagataaaccacataaatgataattttaccactggtacttttaaacaacagagaaccacacagcaatgagaatgagaatgacaaactgcagctaacaatatagacaaattttacagacataatgctaagcaaaaacaacacaaaacagacagagtataaattgtattattccactttaaagagttcaaaaaaggaaaaactaatctatggtgttaaaagtcactatggtggttatgtttgtgtttggaggggtggggtgctagactgctttctagaaggagtcactagaggaggttctggaatagaatgttctatttttttatttgagtgttgttacttttctcagagtatgctgtattccagtaaaaggtcaaaaagtgaacaattatggtttccagatttgaggggggaaaacacaactttcctgctggcagaattccttgggagatgcttttactttttttccattttttgcagagatgggggtcccactatgttgcccaggcttgaactcctgagttcaagtgatcctcctgcctcagcctcccaaaatactgggattacaggtgaaagccaccgtacctggccaggaagctgcttattttaaaatgtacattgggattcggcagtagggcccagtttctgc

SEQ ID NO: 198732 - DNA, 1000 bp, Homo Sapiens
tgtttgagtttcttatatacgttggatattactcccttatcagatgtatggtttgcaatattctctcctaatctttgcattgtcttttcactctgtcgattgtcttcttgattgtgcagaaggtttttagtttgatttaatcctattttgtttacttttgctttagctgcctgtgattttgaggtcctaggcaataaatcattacccagaccaatgtcatggagattttcctctatttttttcctagtagttttgcaggttaaagttgtatgtttaagtctttaatccattatgagttgatttttgtatctggtttaagataagggtccagttttgttcttttgcatgtggacatccagctttcccaacgccactgactgaagagactatcttttctttattgtatgttcttggcagctttgatgaaatccaattgactgtaaatacttgggtttatttctaggctttctatcctattacactgattgatatgtctgtttttgtgtaggtactatgctgttttgattacaatagcttaataatagattttgaaatcagacagtgtgatgccttcaacattgttctttctgttcaagattgctttggctatttgggagtttttgtggttccatatgaattttagtttttttttctatttttatgaaaaataacattagaattttgacagagattgcattgactctgtagattgcattgagtagtgtggacactttaacaatattaattcttcaaatccatgaacatacagtgtctttccatttatctgtatcttcttcagtttctgtcatcaatgttttatagctttcagtatacatgtcttccatttccttggttaaatttattcctatgtattttgttttttgtagccattgtaaatgatattgtttgatttttttctcttagatagttcattgttagtgcacagaaatgctagtgactttcgtatgttgattctgtatccaacaatttaactgaattc

SEQ ID NO: 198733 - DNA, 1000 bp, Homo Sapiens
tttatcttttcaaaaataccaactctccactttattgatcttttctatttttttctattctatgtttcctttatttcttctcggatctttattattttatttcttgtgctaacttcaggcttaatttattcttctttttctagtcccttacaatgaaataatagattgcacttgagatctttcttcttttttgatgcagatgtttgttgctataaacttccctcttacaaccacttttgcagcatcccatcattttgggtatgttgtgtgttcctttttgtttgtgtgaagacattttctaatttctcttaaaatttcttctttgatcgatttgggtttttcaggagtaaataatggaattttccaaaattcattctgttcatttccttcagtgttttgaatatatcatcccactctcatctggtctgtaaggtttctgctgagagtgtcataccattgtggttggaaaagatacttgatataatttcagtctcttaaaatttattaagacttgttttgtggctcaataggtaatatatctgaagaatcctccatgtggcttgagaaaaatgtgtattctgctgctgccggatgcaatgttacgtatatgtctgttaggtccatttggtctaaagtgcagttcaagtccagtgtttccttgttgattttctgtctagaagactggtccattgctgaaggtgggatattaaaatgtcttactactattgtattacagtatgtctcacccttcagatctataaatatttgcttcatacaattaaggagcttggatattgggtgcatatatatttacagctgctatatccaattgatgaattgacccctttatcattctatagtgaccttctttgtctctctttataattttttattaacatctatttttatctgatataagtatagttaactttgctctcttttggtttccatttgtctggaatatcctttttcataccttcacttttgggatatgtgtgtc

SEQ ID NO: 198734 - DNA, 1000 bp, Homo Sapiens
ttcataggaattccattgagtcttcggctgaatgtcaatctacaaagacatcactggatgtgagcaatttcagagagagaaacaactatgaaggagctgtaagctgaacaatccctggagcttacaaaggtctgggaatcatctgaattcccacaagccaaagtgaagagactttcatgaatatatgatgcatgtagcagaaacctagaagaacctctcattaaaagtgaggctaaaagagcactacagtaaaggttatctagatccacactaaaagatataacaaaacacagcaccctaaaatgtaaaactacaatgtacaacatccaggaaaaaaattcctccatatgtgaagaagcaggaaaatgagaatcatatgttgaagaaaagtcagtcaatagaataaacccaaaattaaaaagatggcaaaaatcatacatgttttgtgctattttaaagttcttgtctgttaatgctttgttttattgttttatcttgttttattttacatctatgtgtaaaaatatgtatctatatatgctgctatatgtatagctctatatatcatcatatatatatatatagaaatatatataccaaatatatatatggggtatatatacatatatatctgatatatatatatctgaatatatatatagcatcatatatatatgaaatatatatatatagcatcatatatatatgaaatatatatatatataaaatcctgaataaaatgaggacagaaatggaaaacataaaaaagacccaaatggaaatactaatgacaaaaatgaaacaatttttgaaatgaaaaatttgctgcatgggataaacagcatatttagatactgtggaaggcagtattatggcacataaagatgtagtgataaaagtatccaaaatgcagcacagagaaataaagactgaaaaagattcatctctcttgacctatgagaaaatatcaagtgtcttaatgtaagtacaattggaattc

SEQ ID NO: 198735 - DNA, 1000 bp, Homo Sapiens
gagaccaggtatgccacacatctaagtggcctgcaatgcttggatgtcccccagacccccgacaaagaattattctacccaaaatgtcagtagtactgagtccggaaaacctagctctaccctgtttaatattaggccctctgttaaaagctcctgagatcttgtttagaaagatgcttaactacatttgataaataaaatattgtgacagaacagcggaaaagttacgagcattttcctgccagaatagacatcaagtccagaggccaattttccacgaagagatgtgcactcaacacaaaccgcaagatgtcacataccttgaggagtctgaacgctgtcatccagcacgtcctggtttgctcgtcctctgcacagagcaacctcagctctttagtttcattcctgactttgtttggctacaggaggtaaaagaaagtcctgttagtgttacacagggagtcagaaacagcttctgtcaaggcagggctgcatctgacacaaaccagagacaaccagctggagatccccctagcaaggagcacagcagatacacacacacctgtgtgttaagcgttcattcatccaccttcctgacaagactttattaagtgcctaccatggactggccccaggttgtgtaccacttagctgaataataagccatcctttgggaacttcagaggagacagaaaaacaaactagcacaggacaacgtaatgtggtaagcacaataggacaaagaggaagaggcatctaactctgtcgacggactggattctatgggaggagaacctgccttctgacttacaggaggagagatcttaaagttgcccccaggccactgagaggaggggctgctgcagggcttagccaagaggggcaacccctgaggagctcagggattctgatgtctgagcagccccaagatcagaccccaagtagaaggtccagagagggagactgatgttggctctggagaatgagacagaaggggaag

SEQ ID NO: 198736 - DNA, 1000 bp, Homo Sapiens
aaataaaaaagaaaagaaaaaagaagagaccagcctatgtggagcctacatttctccctcagatttattgctttttaaagaacttcacttaagttgtcttaggaacttatttggttacttgctcattgtatcctctcctcaccagagtgtaaatgttgtgagatcaggcacattatcaattttgttcaccagccatattctcagtgcgtagaatagcacctgttacataatatgtactcaataaacactaattgaatgaacaaaatactgcaacagactcctaattggtctgtttccagtgacttttaaactttctttgactttgacccacagtaagaaaaatattttgtgctgtaacctagtaacacttacacacatgcatacatgcttatagatgcatatgtaaaattaaaagtattgttacatgtgatgccatctgattgtatgtgaagccgtctgataatatttattgtatcctattatgttttactgaaaaaaaactctgccagttacaacttaaagaaaattaaaaaaaaaattttttttgagatggggtctcactgtgttgcccaggctgctcttgaactcctgggctcaagtaatcttcccacctcagctttcccagtagctgggattgcaggttgcacaactgcacccagcacaactttaaatttgatttcagaatccactcatgtgacttaaccagaagtttggcaaatactgtccttatctattctccacaaccagagtgctctttctaacctagaagtattcttatgtgacttccctacataaaagctttccatggcaatctgtcagcctcaggcatttttgcccaaacgtcagtcattcatggttgttcatgtaccaactataatctaggtagtattctgtcagttgaattacttttgtcagtcaacctcatcctaagcaaaaatataagataagcaatgtgttgcatgtatgaaatagatctatatctatctatctatatattttc

SEQ ID NO: 198737 - DNA, 1000 bp, Homo Sapiens
aaagtatcttcactttaaacagcaatgcaagttattccagtgcacatggtgctcacacactttcataaagcattgatttatgagctcataagatttctccattagcagtctctccttctaagattaacacgttttctaattcctgccacctggacattttttaacacaccttgttaatttagagagatgcaaaataaaactgaaaaataacacattatgctcaaaattaaagtagaatttagaagacatgttcagatttacttcttccaaaataaatacttagtcaggattcattattagttgatgcctcgggtgttgtattaggtgctagggttacaaagattgagaagaaaagatccatgctcttttaaataagcttgtttcaaatgaacaaatatgtactgaatgccatgctagacatcatgctaggcatagaggcattgcacagtcttgcaggaactagtcttagttgtttggaaaatattgcttaaataactgaaattttctcttgggtttcctctgattagttccaaaattattctgaaaactttaaatatgtgtgccatatataacttcttatatgcccatttgaactgccatcacctagtacacaaaaaagaagcatgtattcaacaaatcttggttgcatttaatataactaaatttctaaattccaaaaattattactgagttgcttatcaaagataaaatagcaattcaagcttgatactgtattacaagactttgtaattacaagacttgtctgcaagcagccaacaaacatatgaaaaatgctcagcattgctaatcatcagagaaatgcaaatcaaaaccacatgagataccacctcataccagtcaaaatgactaattaaaaaattcaaaaataatagattctggcgaagttacagagaaaaaggaatgcttatacactgttggtggtaatgtaaattagttcagccactatggagagcaatttggaggtttctcaaagaactaa

SEQ ID NO: 198738 - DNA, 1000 bp, Homo Sapiens
tagttaattataatattatgtgcaaccctaatacaagatgttaataacagaagaaactaggggtggggcagggagggaatgggggtttatggaaactctactttcttttttattattattttaaaatttatttttaatttttgtggtgcatggtaggtgtatatttatggaatacatgagatattttgatacagacattcaatgtataaaaatcaaattagggtaaatatggtatccatcaccttaagtatttatccttttgttgttttacaaacaatccaattttaccattttagatattctgaaatgtaccataaattattgttgactatagttgctctgttttgctatcaaatgctagatcttattcatcctaactatatttttatacccattaaccatccccaggttgaataggagggatgagagaaggcacccttgtcttatgccagctatcaagagaaatgcttccagcttttgcccattcagtacaatgttgtctctgcgaggttttggtatcagggtgatgctggcctcatagaatgtattggggaggagtcccttctcttcaaatttttggaatagtttcagtaggaatggtactagttcttctttgtacatctggtagaatttggctgggaatccatcaggtactaggctttttttggttgatagagtatttattactgatgcaatttcagagctagatattggtcattcagggaatcaacttcttcctggttcagtcttgggagggtgtatgtgtccagaaatggatccatctcttttagattttccagttggtgtgcatagaggtgttcatagtagtttccgatggttattttttatttctatggggtcagtggtaacgtttccttcatcatttctaattgtgtttatttgcatcttctctattttcttcattagtctagctagcagcctatcttatttttttttcaaaaaaccaactcttgcattagttgaacttttgaatgaattc

SEQ ID NO: 198739 - DNA, 1000 bp, Homo Sapiens
cctgtgttttttgagttgattttcagcagtgggctaaggggaaggttttttttttggccctgaagtacacgttatgtaaagagagattcttaaaaagagagagctcattgagactgactttaagtatttgaataagcttcaaggaacagataaaatttgactttaaagtatttattattaccacttatattgtactaaagacagtggcatattccatggcatctggattgctataactgtataaatagactttttccaattaatagctcataaaaaactaggacaaaattgcattattaacatcaataggctcctaaagaattattcagcagttgagcagttcatttttcagctactttgtttgtgacctctgttgtaaaaatcctgatatttttcatccatgaatgaacccagcaagcatttcaaaattgaccggatcttcatcagtcttggccatttcctgagaccaactaggaattgtgttcaaattcatctcttatacaatttcctgacttaattctcacccaagtcaaagttacctttccttcctctaaagaatgtaactctgtacattttatttaaaaactctcttagattttactctattatttgcatatgttactatattatttataaataaatgccatttttctcagctatgttagaagcctatgacaataaaaaccatggcttatacttaaatacagtgttttgccaaagaggcacttagtaaacagtcactgttgtaatttgcttttaatggaaaagcccacacatgttacagaatctgtactagtcaatgagtaggtgctgacagcctacaacttgtggcttttgatgatttattgatacgatcctcaaatcctaggaccttacctgtgatgcattctaatggttttctagtctgtattattccatttcaatctaattcattaaacaaaattataggttcactcaatgataaaattgattttatcatcatctctggcggcatgaattc

SEQ ID NO: 198740 - DNA, 1000 bp, Homo Sapiens
ataatggtggcctggaccaagataatggtaggggagaggattttatatttgggaataacaaagaaaatacttgaggtgatactaagtgtttttttaaaaaataaataaataaaaactttgaaatttaattacaattttaaaaaataaaaagacaaacgaattttttttttgagacaaagtcttattctgtcacccaggctggactacagtggtgtgatctcggctcactgcaacctctgcctccagggttcaagcaattctcctgcctcagcctccctagtagctgggattacaggcgcccaccaccatgcctggctaatttttgtatttttagtagagacagggtttcgccatgttggccggactggtcttgaactcctgacctcacgtgatccactcacctcggcctcccaaagtgctgggattacaggtgtgagccactggacccagccgaatgaattttttaaaaaataatgaaaatacttgctgatgaatggtatgtgaatggtgaagggaacaaactcctgggtttctagcttgaacaactgggtagagagtggtaccacgtattaagagagactggaggagaagcaaaatgctcgtgagatagccaactatatcacactaagaagaaaaaaaaagtggaccccagttgtgtttgttcaaggggaagctaggaattaaaggcctgaagctgctactctggtgaagataaagtgtttgggggttatgatagagagtaaagtgcaagaatctgaaaggatgccttaggaaacaggggttccacttacttcatgtggccatcactgccaaactgggaccaacgtgcggaagacagacaggaaaggaattcagtctgacataaggaaggctgtctcgtggtcagagtgaaataagctgccttgggagtgggagagggtgaatgatgacttctctgtcattggaagggttaaagaaaaaaacagatgactccttgactggagggttagagagagaattc

SEQ ID NO: 198741 - DNA, 1000 bp, Homo Sapiens
gtcaggagttcaagaccagcctgaccaacatggagtaaccctgtctctaccaaacatacaaaattagccgggcatggtggtgcatgcctgtaatcccagctactcgggaggctgaggcaggagaaccgcttgaacccaggaggcagacagaggttgcagtgagccaagattgcgccattgcactctagcctgggcaacaagagcgaagagccatctcaaaaaaaaaaaaaactgcttccttctatccatctttaaaaagacaaagcctatttttctattcaatttcctaatgtttcactccaaatattcctacattttaaaaacaggagacttccttagtacaaagacaccaactactaccctttacacgtgataaatgaagaatccagtttagttcttgcttttctcgtacacttaaaattatctaagaggtatcctagttaccactacaatctggggcctttattcaaatggcattctgctgctctaaaactcaggtttcaattgcaagttattttaaaaagacacgaaaatcaagaaaaattctaaatcttaatgctatcttctattttcatgcctcaggtaacagtactttcctttgatctcagttttgactacaaagtaaattacagtttttgtatcaaagcactgaacaaaatcccaaaagggaaaaaaactgaccttaaaaaaacaggccacctccctcactcagcaaaatcttaaggtcccagtccttccttacaagaatcagtcatatgaataggaatctgagatatcaaaaagaaaatcatctttatttcttcaatatatgtttaattacttaatatcctaataaaccatttctcaatacaaagaaacagagataggtaaaacaaatttcaggatcctctctgaaaaaaccacaacagctttgactactctatctcccagataatctaaggagaagacagttgtgtcttcaaaagaaaaagattccagacactcctccctaatggaattc

SEQ ID NO: 198742 - DNA, 1000 bp, Homo Sapiens
cctgcctgtcttgttcaccagggcatcctcagggttagggcaatgctagcacatggtcagcataataaatgtctgatgaataaatgtacatctgctcatctttcagactgagctcaagagtcacttcctcaaggaagctttgccttaacgccaagtccagggcctatttttctttgttttgcagtctcatagggccatggtattttgttgtcatatttttccccttttaaacatatctcttactttgtaattcatcatccaatagcatgactattcattaaacatttatcttctccccagtttgaaatttccaggacaacagaatcaaatatatatttgtcatgccatcctatgtccagcacctagcagagcatatggctagatgttcaataaatgtctgctgaataaatgaatggtcaagcaaaaccacagtgactcagtgaaatccaggactgggatcaacctctcttagagcacctcttcattatggtacatgttgactggctggagatgtgcaatatatagcaattttgttctatttcacttactctgtgataagctaattgccttcacagagtaggtaaggcagtcctgattgatgcaaaggaaatactggaaccaacccacgtcattttaaatgtggatttcctgtaaagcccatggtgacatcaaggccatctcataatgactaacgccattcagcatcagtctaacactgggctcacagacaggtcagaaaaaggagcatcaggagaggcgtgcaggtccctgaaaagactcaatctctggcccctgtgctcaccaggtttcccaagtgcttgtggtcacctggttcttcccaggtactcacatgtgccttcccgtagattccggatggcagtgacatactcatagcccaggtacatcttggcatccatcctgggggggacttttaaaaacccgtgggcagagtccttaaacagcaggtccttcccatgaggagagctgaatagttggaatt

SEQ ID NO: 198743 - DNA, 1000 bp, Homo Sapiens
aacaatggagccctcgagagactgtcttgcatgggatagccatctgagacttctggccgggactctgtaggggtctcctccaccaagcgactgggatgggtgagggggttggatttagcaagtgcttcccaagagctgctaaataattgcaaagttcctccctgggtcttgctatgggggcctcctaagacccgctgtccctaggcgatgagttcacagctttgtgggagagagagacaagagaacatgcagctaacaacctgggctaactgcaaaaagagaagcgcaaacattctcctcaccctccaccacccccgaatatggtcaaaacatttataccaggtgagagcatagtataaatatgttactgcatctgcagtgctagagaagagccatttaatttttttttttttttttttagtttttggtttcttacccttaacccgaaaggatggaaacggaacaggaggtgacctgccctgcatgactgagggtgcttgcattaggcacagggtttcactgtgggtgcaagaggaaccatggaagggctgctctctgccccatccctggattattgttgtgaggatcaagtcgaataggggttatgcttagttttgtatgttataaatcaataagtaactaaaacataatattattttcttgataattgcaggcttgagagctcaaaagatgttttcaatttattgcgtacctgtgttcccaggctatctaaggacttcccacatgttagacccaactaaaatccaagcttgatgagagcagggagttagccttctgccaggagttagccttgtgccagtcacatagtgagacttcaataatttttttttaatggtagaaaaaatgatttctaatcctgactgccccctagggcattagccttgctgtacagatgggagtatggaggctcagaaaggttgagtgacctgctctaggtctcaccactagctagtcggtgagttggggtaggagctcagtc

SEQ ID NO: 198744 - DNA, 1000 bp, Homo Sapiens
atctgagaccccagttcttggttttctgccatgattagggacaaatcttcatggtctaggaacatttacatttctccactcccaggagcccgcccttctgccctgaagattaggcacagccgtgccctgaagttaacaaaaaagacaaagatccatggccactaaaaatgggagatgtatatacaacatttctcttacatttaaaaaacagggagctcttcaggggctcctgataaagaaagtgcataagaatcacacagttctcagtatttcccctctctcccacttttccacccatctcatgtaggcactaaaaagaaatttgaaaatttgctccactgataacatatgtgcctaagtgcctggcctttgtggtaaaagatgcctcaaagatgcagagatggaatttccaagctgcaatcacaaatccctatataacttctttcatggagacattaataacatacaatatatgcttgggaaagaggcagaatctgaagaactccattccctgtttgcaaaatgaaaagttaaatttttctatttattcaatgaacatttcttgaatatctgaattctctatgccagatgacatgatacacgcatgagaacggagctaatagcctttgaggatgacaggctcaagtgggttttcaaggtggttagtacagtgacagaggtcagctaagtaaaaagtgtgtgtgcagagagaggacactccgctccacctggggaaaaagagagtgaggagggatttcctgaggaggtaacgcctaacctgaggcttaaagaattatgaaagaagggaccaagacagcatgatcttgcggatagatgacagttgatgaagaacgttacatgcggctggtcgggtgtggtggctgatgcctataatcccaacattttgggaggtcaaggtgggggtggatcacttgaggtcaggagttcgagaccaacgtggccaacatggtgaaatcccatctctaccaaaaatataaaa

SEQ ID NO: 198745 - DNA, 1000 bp, Homo Sapiens
gaaccaaaatgacaagtaacaggcttttttaaaactaccgtttcagccaataataaaaattaaatttaaaagtcaatcagtatacctgaaatacagttgacccttgaacaacagatttgaacttcaagtgtccacttacatatggatttccttgagcctctgtcaccagagacaatatgatcaactcttcctcttcctcctcagcctactcaacatgaagaccattatgatgatccacttccacttagtgaatagtaaatgtatttttctcttccttatgattttcttttttttttttcaagagacaaggtcttgctctgtcaccaggggtgcagtacagcggcacgatcatagctcactacagcctgaatttctggactcaagcaatcctctcacctcagcctcctgagtaacagaagactacaggcacacaccaccatgccgggcttttttttttttttatgattttcatcataacattttcctttctctagcttacttgattgtaagaacacagtaataatacatattttaaaaatgtgttaatcaacttattttattggtaaggcttctggtcaacagtagactattagtagttaaatttttggagaatcaaagttatacagtggccgggcatagtggctcatgcctgtaatcccagcaccttgggaggctgaggcaggaggattgcttaagcttagaagtttgagaccatcctgggaaattctccatctctactaaaaatcaaaaaacttagccaggaagggtgaacacctgttgtcccagctagaggaggctgaggtgggaagattgctttggcccgggcaatagaggctgcagcaagctatgatttcaccactgcactccggcctgggcgacagagccttaaaaaaaaaaagtcacgtgaggattttcgactgcagagggaagaaggtcagtgcttctaaccacacccccgcactgttcctgggtcaactgtattcccttctaaaaagaattc

SEQ ID NO: 198746 - DNA, 1000 bp, Homo Sapiens
ttgtgccctcccactgagctctgaccaggaggcttcttgccccattcaaattgttacaaagttcagctagagatttctttctccctgtggagtttcaccccctacttctctggtcccccgccccctccgcccccaccatggatccctgtgttgttaggcaggaatggcctggcctgctaggggacacagcaagctcctagggcctttctgctgcttcctctacccctgcattttgcttggctctctaaattgtctcagcttcaggtaaagtcggaatcttctcctgcaaacagaatttcagcttctcccgtgggggtgtgtgtctgggagaggaggatctcccttccccctcacagctggggcactcacggtatttggggtatctcctgggtcctgcaggagtagtccacttccttcagagggtttgtgggtcctctcaggattattgctttgttcttgcagtcgatctagagctaaaattcggcgaacttccacaggctgctctgtccagagctgcaatctagtcctgcctcccgtccgccatgatgatccaatttctccttttggttctttcagtctcagccccaactttgtttattgacaacgaccttccccttcctggctcctcctcccagatcctggaatggaattagtgtggggagatggggtgagctctctctcagccccttctcctcccctgtgccttctgctgtgatgctggtgcaaggaggaagagaagaaggaccaggaaaacagtcagtttctccctgtgtgacttctcccggcaagctcacagtcctctctttggacagatgtcacttttcaagtacattgtctatggctccatttctgccagctcttccagaaattggcagtccttggaccttcagcgggcagctggcacagcattccactggtgaccacacctctctgctcatgccccagcagtctttagaaggccccaggtcccaattcatctaccagctttcacccaacagta

SEQ ID NO: 198747 - DNA, 1000 bp, Homo Sapiens
agtctgcatttgttccctggaattctcctctttgtggaagagaaagcataagaaaccgacagagagctatttagcaggcagatgtgatacagaggaaacacctgcattcccacctgcacatcctgggctcctctcagagagggacccccagtttggtgcctctcagtgtctggctgccagaaccagctgtcaggtgtgcactcctgcttggctcagggcagaggaacatgcggtcacacaactgctgcctggttaactgtggacaggctgttggttggccttctcttcaaaaagactcctgttgaggaccttgcagagcctctctggctttggtgatatcctggctttctgacctgcagaaggggcagctcctgatgttacccccattcctgctccgactgtatctcctgtgtgcttagctcttcagaacctggctgtctgctgggtcagtgtttcgtattaactgtatccttgctgggtaccttgatttggtttctgctttggacagtaactctactgggcccttatagcccactcttgtgacatttctactatagtctcagagacccctcctacctcagagctcagtagccctcatttgatatagaccatgtgaggcatgcccctcatttgaggcatgcccctcatttgagggtgagaagtcacaagtcgagtggtcacatatcagctagcggcaattttttcttgcttttattattattttaatggatgcataataaactgcacatatttatggggtacagtgtgatattttgatacacatataccatgtttaatgatcaaatctatcacattttaataaagaatttgtaaaaccaaatgctcagagcagccggctgcttctctttagactctctgcttgcttaactctctttatgaagcctcactaatgtgtcactaatgttactttattttatgctcacagcactgtttgttttcaatattatattattaaccaacatcaatgtttctaatctgg

SEQ ID NO: 198748 - DNA, 1000 bp, Homo Sapiens
tcagtgtctcctacctggagctccacagttgcttatctatttttggtttctgtaatcaaaacattggccacgttcaaggaggtgccaattcccagaagactttgcattcagcacttaactcagctagggatatggagccttccagctaggttaccgctgactgactgagggagaaatggcttcatctacatggtggactatgctctctgcctgttgggcagtgccctagaggcaggatgtcatatgtgattttaaggagtaaaattagaatagaaaaaccctctttcttaaatatactgcactttctccagtagtgacttaggaggaagatagtttagaaggttaaattttcgtgtacagacccaaatgtgctttatttctagaatttatataacacacacttctttgggaatttcctttagctcagacttgtgtgctggaatcctcttatcctaaaaacctgctctctctccatatctatatatctatatatctatatatttcagcttaaaaatagactatttagagcagttttaggttcacagcaaaattgagcagaaaatagagttcccatggacctcgtccaggacacacacacaccatcccctaccatcaagatctcataccagagtggtacatttgttacagctggtgaacagggtcatcactctggactctgaatccaggtagaattcttgaccattcccttcttattaccactctttctattcctctgcctctgtgttttgttttgtttttgtgtttgattttttttttgtttgttttcttcctgtgcaaagccagcagcagatggagaggaattggctgtgaaggagtggcacctagccaccctcttcatccacgccctagggcagactttggattagaacctttatatatccacctagtgagaggcagtggtttctcaataaacatttgttgaacgtcgacatctgaaaatcatgctatgttttcccgcctttattccctgtcaaagctt

SEQ ID NO: 198749 - DNA, 1000 bp, Homo Sapiens
gccatgtaagcatgaatataacctattcagaaataatctatatgagatcattttatctgtgaagtttagaaaacatataatattttagttagttttcctatataaaaataattgtataattagtgcagtaagaatattcctattctgtcatgaatctactaaatgaatctttgaactctttattcttgtgaatgctggccttatgaatcatgaccccaagtcacaaaaaatacatgagtaaaagagtcccatttggtagctcacaggttgccacccatagagttaacatcaaagagtgttcagggccagacatcacacatataaatatttttccaaagttatacaagttcccaaataacaacttgttaagtctccttccaccagtccatctttctaatacaatggtactctttgctctttttcttatttattcataacattgttctcataaaaatatcttattccataaaattctgaaatattccaaattctaggttttatatacctgaaggagacacttactttaccttcctatctgtctattttaggagcaagtccagatttggtgggtcttgaaatacaggggttactttgaaaaaaaaaaaaacagaatatgagggaaaaatgggtatttatttgaaagagaaaaaaatgattcacaagttttacaaaactaaccacaagcattttcaaatttatagaagtagatactattttattagtaaattacctaatataccactatttttgctattagtattagcttagagatgaatatgtaaatttttttaagggaacactaattttgtgaggtaatttctctgcattgtaggtaacttctctacaattttgactgagatttccagatatcttcaggataaaacgtatcaggtactgaacaacatgatctgaaacaatggactgcttagaacatgtggcaatacacatgttgtttgttgtattgttacagattttttgctgtaaaaaaacataggaattc

SEQ ID NO: 198750 - DNA, 1000 bp, Homo Sapiens
ggatatacattcctagtttacaggtaactatttaaagctgccaaatttagataaagatgcctcccctttaaattgccccctttaaattctatggcatgtctcacttaagagttacaaatattcagaatattcatggcaaacatggcaaacggcagtgagggaatctaagtggtcaaattcctagaaatacttgtcctcagcaccactaggtggcagtagttggttgaggctgtgaatgatcggtaacataatcactagtagtgaagccatcacagatgctagcaatgacttaggagtctcccacagctggtcagacaggcattctgtgaagcagatggccagtggacagtgtgagcctatcagacttgaattaattgaggaaataaatgagcggaatgaagtatacagacctttgcttggtaaaagaataatttggagaggggactagcatcttaccacctggagtaaaaaatggtatcataaaagatctattcaagcaatattccaaaagccttctgaattctttctagtgctccttttgtatatcattgatagagaattcatctcatgttttcttagctaaagaagcacacaaaccccctgtgtttattgagaagctccaaaacacaggagttgctgatgggtacccagtgcggctggaatgtcgtgtattgggagtgccaccacctcagatattttggaagaaagaaaatgaatcactcactcacagcactgaccgagtgaggtaagactgcacaatgagaacctgatccttaactgttcagtcctaatgatgtatcaaaagatacattttatatagcatggaaatctatgtgtaaaagccacatagatgttttgatttttgatgaaatcaatcaaagacaaaaaccatgcgttacccaatgtaggattaagcttttagaaggaagctatgggtgtttgatctaatggtgatttcttaaaagtgtttatcattctatctaaaagaaaagatgaattc

SEQ ID NO: 198751 - DNA, 1000 bp, Homo Sapiens
acatgattcccagtgacacctctgactctgaagagcgaatccaagattttatgagtttcatcatctctaggtcatttgtgtaatgaaaagcatgcctttccacagccaggaggtggcagcaaagctctgttttgaagggggcgttaggccagggtaggtactgctctccaactccctagagctgaaagttcaggtttggaggctcggttttactcctgaataacaacaacaacaacaacagcattattattttcattattgttagtaaaacagaagcaacaatgccatcttcaatttgggcaatgctgcatagttgaggaaacatttttgtgcatcgcataggaaccttttaacaactgcatcctgtaggtaggtaatgccaggacttttagccccatgttgaggctcagggacatttcttgacttgcccgaggccctctggaaagtattgatgtgccaggataggaacccaagctttcttgcttttgttcttgttctgtgcactccctatcttatggtgtggaagacccaaggcaaggtcccctctacctccttttccattttgcaagagagtaggagggtccagaggtacccagctcagcctgagggcttaagactggtttccggctgccagatgaaatttgacatatacaagctgggaaagaaaactcagcacacaaacctcagcttcactctcttctctttcttctagtccccagaaaagaaaaaagatatgtatctttagttacttaccatcagggtgtacctggtgtctctcttattcattcattaattcattccttcaataatcagagttctgatgaagtgtaagactctgttatgtactgtgaaggatataggaaggttctttctcttctgactcagagatctgggggtcaggagctgggatatgggagccaggtaagtgcatagcttcttgggggtatcttaatcctagagagcccccactgaactgggagttcttgaggagatggaattc

SEQ ID NO: 198752 - DNA, 1000 bp, Homo Sapiens
ctccagcagaagaggggcatttctcagtacaaatagcagtagagtggggatgctattcatcaatgcccccctttcctttttacttcctgggtcatgtcctcatccctttatccaggtaacccatgctagaaaacttttcttgctcctcactgaccagctgccaagattccagcatgccttgcagctgagcaggtccaagttatgacgtattcctattacagcttctccagccagttggaagaatttgggtgctactttcccagtatggaatataaggctgtcagggaggcatgctatagtcatgacaggggataggcagtctgacttctactggaaatcagatactgtttaaagtggagaattggatgttggggacagacctgatttggttgaggtcctgagaaaaagatctgaggggtttaattgtgcataggcttcatcagagccgacaaggtgatggggtggctcaaaacaacaccatcttaaatggagctaagagaaatgtggggtcccgattgggttcttcctggtcattctgtgcttatttatgaatatggatttgagaggggaccctgcccaactcaagtgtgcttcgtggagggcatctggtgtcaggaggaggttgggaagcctagccacaaaaggtctggtgaaagaagctcctctgttaagacagggagaaaacgctgagggtgactgtggtcaaccacaaaagaagcaggacttcctatggaaaaacatactcttcagctcgggagaaccagaagagcccagagtgaaaagtacaggaacctaggttttctagaatgagcatcttcccaacccgatgggtaaacagatgggtaaacagtaaactgtttcagcactggccagcagttctgctgcctggtttttgcaggactcctgccctgggaacagatggtcatccaaccagtgtacctctatgtctttgcggctctgaggctggaacaccacttcctttcctgatttctttagagca

SEQ ID NO: 198753 - DNA, 1000 bp, Homo Sapiens
tctaggtcacacagatagtttgtggcatacaaacgctagaacagaggcttctaacttctagaagagtaacatatttattgtgtgcctaatacgtgccaagaactctgctaggcactacgttagactagtacccattcttgtacatcaagatacttcccatagatgttctaaaacatttaaaatattaatttaaggctcacattctaaggaaatccctgtgttacaagaagacaacgcccacatctctaacaaatacattaaaacaggcaggcagaggggggaaaaaccatacaagcaggaaagaatttggaattccaaacaatttactcttccttttctggctatgaaaattcgcatactattgtttaccaataaagagattaagaccaccaaaaggcatttctacccaaatttcatgacccaacagtttggaaaaaatgaacattattcctggcagaaaaaaattatctgtttttgtcacatcacatgcagagccatctgagaataaatgtctaagcaaaaaaagaaacaatactggaatttgataaagactcctcaggaatatggcatttagctgtttcttttcttttcttttttgagatagagtcttgctctgttgcccaggcttgagtgcagtggcgcaatcttggctcactgcaacctccacctcctgggttcaagtgattctcctgccttagtctcccaaggagctgggatcacaggtgcacaccatcatgcccagctaatttttgtatttttagtagtgacggggtttcaccatgttggccaggctggtcctcggactcctgacctcaagtgatccacccaccttggccttccaaagtgctaggattacaggcgtgagccactgcgcccagcctagctgtttcaatggaacctttcatcaaaggatctcaaaacaaatgttactgacattaccaataatcaaattggtgaccctatggctacagaaagaaatatatcaatgacctaaggaatt

SEQ ID NO: 198754 - DNA, 1000 bp, Homo Sapiens
caaaaaaggcagggcacggtggctcatgcctgtaatcccaacattttgggaggccaaagcaggcagattgcttgagcgcaggagttcgagaccaacttaggcaacattgtgaaaccctgtgtctacaaaaaatacaaaaattagttgggtgtggtggtgcacacctgtagtcccagctactcaagaggctgaggtgggaggatggcttgaatccagaagttggaggttgcagtgagccgagatcataccactgcactccagtctgggcaaaagagccagatcctatctcaaaaagaagagaagagaggagaagaaaagagaagagaaaatctggttcttgagaggatcaataaatatattaagctcttaaaggactgatcaggacaaaagagaaaatacacaaattactcatatcaggaatgagagaagcaacatcactatagcttctacagatactaaaaagataagagaattatgaataattttatgccagtgaattccataatttggataaaatggacacattcttgaaagatataaattattgaagttcactcaagaagaaataggctgagcacggtggctcatgcctgtaatcccagcactttgggaggctgaggcaggtggatcgcctgaggtcaggagtttgagtccagcctggccaacatggcgaaatcccatctctaataaaaatacaaaaactagccaggcgtggtggcacgcgcctgtaatcccagctattcaagaggctgagacaggaaaattgcttgaacctgggaggcggaggttgcagtgagctgagattgagatcatgccactgtattccagcctgggcaacagagtgagactctgtctcagaaaaaaaaaaaaaaaaaaagaagagaagaagatgaggaagaagaaatagacaacctaaacagctctatatctctcttaaggaaatttaaattataggtaaaagccttcccacaaagaaaactccaggtcccagatagctagt

SEQ ID NO: 198755 - DNA, 1000 bp, Homo Sapiens
gcctgggagacagagtaagactctgtctcaaaaaaaaaaaaaaaaaagtacagaatttcactttaacattgattgacaattgttacaataaaaagctctacgtttttgttttttcgtagatataaaatgatatttcaaagttgttttcgctcacattcctttcattactgtcaagaatgaacgtttttccatgtatttatttactaattatatttcctcttggatagaagagatatttttcttaaactatgaaaaagcatgtctgaacaaggtaactatataatgggagcaggacatttcagaatctggtaaattttcagttttcatgaattggcttagtaggaaggtatataaatatttctcattttaatttacttttttgtaaagttggactgaatatactttagccacaacagaaggttattcagaaaattccatgagtgtgcataccttaaattcttgtgaaaaaggatgtacccaataattacattaggtatttttaaaagcataactttaaaatacatatttagcattacagactaaaaattaacccaagattatccctgaatcttcttacatttaattatatccccgaatctgtgtcttagtctgtttgggctgctgtagcaagatatattaaactggattgcttataaacaacagaaatgtttcttgcatttctacaggctgggaagtccaagatcaaggtgctagcagattccctatctggtgagcattcactctttccttcatagattgtgccttcttgctgcatccttacgtggtggaagggcaaacaagcttcctcaggcctcttttataaaatgctataaaatcctatttcaaagttgtttctgcttacattcctttgattaccatcaagaatgaacatttttccatgtatttatttactaattatatttcctcttgggtagaagagatatttttgctgaacaagataactataatgggagcaggacatttcagaatctggtgaatt

SEQ ID NO: 198756 - DNA, 1000 bp, Homo Sapiens
agacaattttaacttggaatttagttcattcagctttattccagcctttgtatctgaagtgagctttttcttcacttttgtgtgatttgccattcagtgcatcatatctccttttctaagacatgaagtagaggaattttattttaaaaactgaagaaagtacagaagtgaagagcagtatcaaaaaccatacctgcactaagtgcaatcgcacacccagccagctgactcactactgctggcagtccgcccctcagtacctgcactggatctgctgaggcatccacaagaaataggggccggcaggcagctcggatgcagtgccattggcattcataaactgcactgggggtgtgcggaatgagaggttgtatgctagtgctctcataattccagggtcatctatatttaaaatgctagtttcaacagtggtattaactgctgtaagaaatgaaaggcagaagaaacacaaaggtgaaataaagaggaagcccacagtgatgttttggaagtgaggtttttatatctctgacctgaatgactgactgcttgcatatctttctcatcaattgtacataattaccaaggatcatcagtagtaggtctctaaaacgtaaatgagactaaagtgataataaaagaacatagttggaaacacaccaacttgaaatgatttagacaagctgtcctataaatctaagagtggttactacagcctattttcactatttttgaaatgcatttggaacttcttttaaccattagtgattcaggtttataaaagggatatgtcagtttaaagcatattactatatttatttttataagtattaggtttatggatcgcacttagaggcagcaagtttcacatgttttacaaattactcgtagtaaaggctagtactttggtttttatcttttatctttttttttctatttcttaaaaatgcccgaatctcccagaagttagagtcattcggcaatgcatactgcataacta

SEQ ID NO: 198757 - DNA, 1000 bp, Homo Sapiens
agttctaacaactcctgactctccagttattacaactaaataaaatcgccaaatgtttccaggcggcaacatcacccctatttgataactatgtctctagagaattaattttcactacttggtagaaccgctgattccattaagaatctgtcaaaagctatggattctttaaccagaaaaatcccatatgtagaccaaaaatgtacatgtaattttcagggctcatggattccctgtgtacccaggttaagaacttctcgtttaaaggaatggtagcttatgtgtcttccaggaaaactttcataaatgtttatttcttgcaattgaaccttatatacagttggatgattttaagggatatgtagagaaattgaatattgttgatagaaataactgaaatgagagaaaagactccccaactacagtttaccaaaagtaatttccataatcaaaatcaaaataactcagattacttttttgtggagaaagcaggcaagttttaaattaaaattagaggttgtatactaaatgtgtactgagaagacaatatcagaagtgagatcaggtatgagaaaaagtatttaattaacaaaggctgttgtagttagatttgttgtttttacatgactagcaactttcaactatatcttacttagagcagaccacattttatttgagaactcatatctcacctcctattctgatcactgagatgtcactagtctgacccaccttttgtttccactgaaaagcacactaacccagagcatgccatttcagcgcacgccatttcactgctccagatattatttcaggtatgggacatgacctcagtggggccttcataagtcaacccaggcagttgaaactttttgtcctactgtatatgctaagcctgaagctgctgatgttcatatattaggagcattcaacgaatatttgttagtattttctattcaccagccaatattaaaacaactaatgaaattacattatagtg

SEQ ID NO: 198758 - DNA, 1000 bp, Homo Sapiens
actcctgtcagcagttctctcccatactcatgcaaggcatttgggattttgtgggtattttttatatgtctagtatttcacaggtggggccagccccgaccaacaaaaattattctgccccaaaagccagtggtacttctctgaaacactgaggtctggttgtccttcctttttctcaagaccaggctgaagacatacatcagtgaaaaatcactgcattttgcagtaggggaaatggttaaataaaatacaacatgacagtattactgagtgattagcttttacagagttctcaataacatggagaagtattgagttgcaacattaagtaaaaaggcagagtgtgtaattgtatagcattctggaaaaagtctgcggacacagatttgaaggcagtacactgaatgccacattgtttatctaagtgctaggattttaatttttcttcaaagttttcattaagaacacttaaaaccataacttttttttttttttttttgagatggagtttcgctcttgttgctcaggctggagtgcaatggcgtgcgatcttggctcaccgcaacctccgcctcccgggttcaagcgattctcctgcctcagtctcccgagtagctgggattacaggcatgtgccaccacgaccggctaattttgtatttttagtagagacggagtttctccatgttgatcaggctggtctcgaactcctgacctcaggtgatccgcgcgcctcggcctcccaaagtgctgggattacaggcatgagccactgcgcccggcggtcataacatttgtattagcaaaaattggggtggggggcttgctgatctctctgcactccctcccctcacattttgggtacctacaatgtggcttacttgatgttttatagggcttgttcccccacataacccctaaggagggcatggaaaacaacatgttctcaaggagaagcctgagtttaaggacttagcgagagtttgccactgtgaggaatt

SEQ ID NO: 198759 - DNA, 1000 bp, Homo Sapiens
ggttgcagtgagctgagatcacgccactgcactccaacctgggtgacagagactctgtctcaaaaatataaaaaataaaaataaaaaaaacctaatgcagataggtactattatgatcccattttacagatgagaaaatgaatgcgagagatgcaaactaccttgctaaggtcccaaagctggtaaatggcagagggtttctcaaacaggatttgaacacaggcaatctggctccagggtccatgcatttaaccactgtgcagtgttttctctatgtatttatccgaacaatctctaagatagatggataataaaagcaacgtgggagctgtatatagaatgttactattctatttgaatatataaaggtgagtaaaaagaacacgcacatatatttgctgctgctgctgcttcttttttttttttgagacagagtctcgttctgtttcccaggcctctctctccttggcttgtaggtggctattttctctgtgtcctcacgtgatctttcctctgtgcctgtcagtgttccaaatctcctttacaaggacaccagtcctattggaccagggcccgtcctagtgaggtagcaggcgggacttgactccagagatggggctcagatatggggccaagttgagagctagctagaacagggacagggtggaggcagctttccataagccatgcccaacagtatgccatgttagtttaccattgccatggcaaaacccaggagttaccaccgctttccatgaccatcacccagtgacccaaaagtgactaccccttccctggaaatttctgcataaactgccccttaatctacatgtaattaaaagtaggtataaatatggctgcaaaattgccctgaggtgctactctctgcctatggggcagccctgctctgcaggagtagtcacggtgctgtaacactgcctgagctgtaacgcctcttcaataaagctaccttcttctaccctaccactggctcaccctt

SEQ ID NO: 198760 - DNA, 1000 bp, Homo Sapiens
aaatctcatgctttgaaaatttatattatgagattattgattggaaggttctatatatctttcttaaactaagcttgctaatttgaataaaggttatgtataaactttttctatatttttattttttgtctgcttaataaatactaatatctgatttttattgggttttctcccagtgtgatggtgatttatcaattccttctttaattctgcccattaatgcttcagatatttggggggaggttatgtatattatgcatttatatatttagaatcttacttgtgaatttcacattttagtgttatagattgacattccttatctctagtaagctctctgataatgattgttttgatttgaaattcattttcatctgacattctttatctctggtaacctctctagtaattattcttttgagaatattcttttgagaattattcttttgagagtcagttttatctaacttgacttttgattagtattagtttggtgtatttttttccatcctttccattttaacatttctgtgtcctcttgtaggcagcatttaactgaatttatttattttatcagtttggtaatctctgatatttaatttgcaagttatttgtttatatttagtatgatttggatttttttctatctcccaattaggtaaaagtttatcctgatttttctatattaccttttgttttcccttttattttggtttattttcgaaattctgtcttttctctcttctaccagattggaaattatacattctaattccatccttttagtggctaatcttaaaatttgaacatgcatatttacctaaaagtctaaccttggcttatatttctcttttcgtgaataacacagaaatattttaactttcctcatcttctcaaattttaaatactatcattatccagtattttagtttcaccttcatattttactttctttgctcactattatttcttgtatttgagtactttttttctggattga

SEQ ID NO: 198761 - DNA, 1000 bp, Homo Sapiens
cccaggggattctaacgagcacaaggttgagatctctgtcattattatcctcacctttcctattagggagagtaaaaaatgtatctaaagcccattcttgagcctctagtgttcagcaaacttgctaactaaacttaatggagagaaaagtattttatttctcagctgagcatgtataaagagattttgcttaaatagaggcctacagggaaaaaccctgagaggctggctacatttcattgttgacattgatctctgtccagggaaaatgatcatggaccaaagcatctctccttccttccttcctttttttttttttttttttttagatggagtctcactctatcaccaggctggagtgcagtgacgccatctcgactcactgcagcctccgcctcctgggttacagccattctcctgccccagcctcccaagcagctgggaccacaggcatgtaccaccatgcctaactaatttttgtatttttagtagagacagggtttcactatgttggccaggatggtcttgatctcttgacatcgtggtccacccgcctcagcctcccaaagtgctggaattacaggtgtgagccaccatgcccggccccttatttttccttatttaccttttaatatgtctggaatttaggactcttcaaaggagtacactctcaccttcagggacaagactaaaatcagagtggataatattcaaacattttaggtactctatgtttaatcaggactaaaaggcagatgaaggcatttaatttcattttgttcctctgtgccttgcaatttccttttcattgcaattatgagaatcacaatatgatccatctgagagagaggctgactcaattatggcagtctccaaaacaatatagttacagtctatttgaagacattttggcaataactgctttaaaattttatataccctttatgctagcatttccactcctagaaatttattctacagacctctcacaattgaaaag

SEQ ID NO: 198762 - DNA, 1000 bp, Homo Sapiens
taggttttacaatagtgatgttatctccaggagaaattcagagagggtcagaatcttacagcctcctcggaggttgcagtgaaccaagatcaaactactgcactccagcctgggtgacacagcaagactccgtctcaggaaacaaaagaaaaagaaaatgaaaaaaaacccacaatcttacagcttccagcttcatggctcgtaaactgtaatttctatcttttggctaatttgttagtcctacagaagcagtctactccccatgcaagaagagggtttgttttgggaaagggctgctattgttttggtttcaaactataaactaagtttctcccaaagttagtttggcccaggaatgaacaaggacagcttggaaaagttttgacaaaggaaggaaggaaaaaagggagggagagagggagggagggaaggaggaaggaaggaaagaagggagcgagggaaggaaggaaggaaggaaggaaggaaggaaggaaggaaggaaggaaggaagatggagtcggttaggtcagatctcttttactgtctcagttatagtcttgcaatggtagtttcatgatcacttgagcccagaaggtccagcctgcagtgagctgtgattgagccactacactcagcctgggctatacagagtgagaccctgtgtcactagcaatgataatgataataataacttttaaaagtttaaaaagaaataaatttaatttacccttaaacttgaaagcaaggatgataacagtccctccctaaaactaatcccctccttgctcaaggaccaaaaactgcctttgtggaaccaataaaaggccacaagattaggattgtgggaggggcctgaactctgctaaaatgtaagcgtagtttatttttcttttctttcttcttttttgagactgagttttgctcttgttgcccaggctggaatgcagtggtgcaatctcaacttaccgcaacctccgcctcccgggttcaagcaattctc

SEQ ID NO: 198763 - DNA, 1000 bp, Homo Sapiens
ctcaagttccatccatgctgttgtaaatgacaggatctcattcttttttatggctaaatagtactacattttctttatccattcatctgttgatggacacttaggttgcttccaaatcttagttattgtgaatactgcttcaataaacatgatagtacagatatctttggaatgtactgatttccattcttttgggtatttacctagcagtcggattgctggatcacatggcagttctatttttagttttttgaggaacctccatactgttctccatagtggctgtactcatttaccttcccaccaacggtgtacaagggttcctttttttctacaccctcaccccagcatgtgttattgcctgtcttttggatgaaagccattttaattggggtgagatgatatctcattgtaattttgatttgcatttttctggtgatcagtaatgttgagcaccttttcatatacctgtttgccatttgtatgtcttattttgagaaatgtctattcagatcttttgctcacttttaatcaaattattggattatttttttcctatagagttgtttgagctcctcatgtattcattctagttattaatcctctgtcagatgggtagtttgcagatattttctcctattctttgagttgtctcttcactttgttgattgtatcctttgctgtgcatttttaacttgatgtgatcccatgtgtccattttttgctttaattgcctgtgctttgggggtattactaaagaaagttttgcccagaccaatgtcctggagagttttcccaatattttcttgtagtatttttatagtttgaggtattagattcaaaactttaatccattttgatttgatttttccgtatggcaagagatggtggtctagtttcattcttctgcatatggatatccagttttctcagcaccatttatgaagggactgtcctttccccaatgtgtattcttgatactttcgtgaagaatgaattc

SEQ ID NO: 198764 - DNA, 1000 bp, Homo Sapiens
agatctgatacctgttcttatggagtttagtgtctgaaaagaatgtgttcattttcctagattatagatatctaagaggagggacacattttattaatttttgtcttctttcagtagcttatacatagcaggcattttgttgaaaaagttgatattaatactttgcaggtggtggtgtttacgtgaggatttaaagttcttaaaagcagccttcattaaataaatgtattaagtaaaatttctaaaatattttaaattaaaatttgtttttaatttgttaaagtacaaagaaacccatctattggaattttaaacattcagattttattctaatccttaattatcaaaacatttttcttccaaacagtggttatcttacatgattctggaaataaggattaaaatttttctttctcagaaaaaacttcctgaaattaaaatttagaaaatttttgactatattttaaaaacatattcctcttatatgataagaaatggtcaaatcctacatgtgatacaacaaagttcagttcaagaaagatgtgtaaaatataataaaaacctaaaggtaattatccaatggaaacattacatatataaaaagattgccaatattttcagattttgaaaacctaattgaaggacaggttccagtaatgattttaaccatacttgtattataacattcaacttgatttatatgtgtgcatatatatatatgtacattcaaaactcaaatgttacttaggctaaaagttaatgaatgctatttttaggctataatcacttaataacttacattctaagttgccattaggctatcaaaaacaaaatctataaatctcaataacaatcaagattttatacatataatactttcgcaggccttcaaaatactcatagctgaatgagtatggtgacgatatcaacctatccctgatttgaaataaactttaacataggaaaagtcatttactgttgataccaggagagtgaattc

SEQ ID NO: 198765 - DNA, 1000 bp, Homo Sapiens
ggtcaaccattggaagcagcctcctgagctgcccggttgcataaatatagccaaggctctgatctccactgtatctgctcaaccattggaagcagcctcctgagctgcccggttgcataaatatagccaaggctctgatctccactgtatctggtcaaccattggaagcagcctcctgagctgcccggttgcataaatatagccaaggctctgatctccactgtatctgctcaaccattggaagcagcctcctgagctgcccggttgcataaatatagccaaggctctgatctccactgtatctggtcaaccattggaagcagcctcctgagcctcacttgcttctgcccttcctaggaccttttgttagctatcttgttattactaattgtcagtccttgcttgtttatcttcttggtaaactttgtgtcttctagattacaataggaaacgtcccaacggctatgaaatgctggcaggtattatgctagggtttagggatttgagttctgcacttttttcttttttgtttttctatcatttctaaagatgaggcgaagtgggaagacagggaggtgcaggttctagtccagatggagccgtggggccctgagtgaataggcaacctctggagcctgagtgcaccagggctgcgacctgcactgttggtgcaggtggccctccctggctggtccttgcccttggagaggtcagccgtctgtcctttgaggaggcagcaggacagggaggacctctgtcccccatgtgccacgtggccagagcaggttcctgccccatcctcatggtgtgagggaggggcagggcggggcatcctcacaggcccttagctcagaggccccgtgacctgagggacagctcaggaggtcaaagggggccacaggtttcaggctggccctggcatcgagagtccagagaggcctcccgcatccttgcccttcttctcctcacctggtccaaggtattccaatgcgaggaattc

SEQ ID NO: 198766 - DNA, 1000 bp, Homo Sapiens
agctcttcccaccctacctcatttaatttaatgaggacccagggaggcagatgctgttattgccattatacagattaggaaacgggctcagcagggcagagtcatggcacagagtccactcctcactaggagtgcagccagactcacccaggtcagtgtggtcccaaagcacaggtctttatacctgcaggctgtgggttagctccttttatttcctctattgtcattgctttcatgtctctgttcctttccctctttgagccttattgttccttagagattgatagaagcatttcatactttggggttattaaccctttcctgccagagtttgctgtttgcccttgtggtgggtttgacctgctctcaggtgtggaccctggctttatcctcagttccctacgcaatgcggggagggggtgaggggcaatgattaagatcattggactttagggaaatgtgggaatatagagatacagttgcagaaatacaaggtgccctggaacaccaggctttgattctgcctttttaatgttgatctcactctcctcttcttctctttctcctgctctaaatttttagaagacaaagtaatcaagaaaaacattctgtacttttcctttttaatctcctttggtctttgctctctaatgggaagactatgtaagaaatgcccacagaagggcttgaattgggaaaagagttttggtgatgggaactgatggctagacatcaggtaggcaggaacattgatgggatttggtgactgcttcttggtgcccttccaggggaggagtcaaaggtgagagggtggccaggagggtgctgtgccctggatccctgggggtgtccgggaggctggttctgttgagtgggaggagagttcctctttgggacacagtggctttgacgattcacctgaccgtctgacgcttctaccagaatgtcccagggaagagggggcatgagcgatttgtgtggggcatggtgtttggaattc

SEQ ID NO: 198767 - DNA, 1000 bp, Homo Sapiens
ggaaagataggaaatttattcaggaaagctgggcctgagaatggacaagaactggagaagctcagaggacacacaaccatgggctcatggcattgagctgccttgtcaggatgctactgactcaaagtgatgtcattccattcattttctttttttttttttttttttttttttttttttttttttattatactctaagttttagggtacatgtgcacattgtgcaggttagttacatatgtatacatgtgccatgctggtgcgctgcacccactaatgtgtctacgtttccttgctcaagattctctttgtttcagcttgtctatggtaggaataggaccctgataaatatcctctagataggtggttctcaagctttttggtcttaagaaatctttacactcttaaagattattgaggaccccaaagtgggtcctcattcaccaatgttggttgtagctacctatattatttactgtgttataagttaaaagtgaggcactttttactttaaccttttatttattatttgaatgaattttaaaatagcaataataggcccagcatagtggctcatgcctgtaatcccagtactttgggaggccgagatgggcggatcgtgaggtcaggagatagagaccatcctggccaacatgttgaaaccctgtctgtactaaaaatacaaaaatttgccgggcgtggtggcaggcacctgtagttccagctactcgggagtctgaggcaggagaatcgcttgaacccgggaggcggaggttgcagtgagtcgagatcatgccactgcacttcagcctggtgacagcagagcgagatttcatttaaaaaaaaataataaacatgttgcatgttagcctagataacataggtttataaaaaataactaattttcccacccctccacccccaaagtgcaaagagtggtattgcattacatttgtacaaatctctgtaatgtttggctaggcagtagatagctgaattc

SEQ ID NO: 198768 - DNA, 1000 bp, Homo Sapiens
attactactgctgttatttaaatagtttttaacagtattatcaaaacagcaagcacagttcatggtggtaaatgccctaatggaagtgttcatctgtcaccattgagaagggaactgttaatatccactgactgttactgacagcttcataaggaccttgtgagatgagaagtacttttcctggtagagaggggaaaggtttcctaggaacatcagccatgcagaagatcaggaaactagcaggctaaggctgcagcaccttattctctgtgtagtaaggccagtaagctttcgtttgtttgtttaaacaagggagccacctgtgcagatcattcctggtggcagtttgtcaccttgtttggaggagatgggccaaaggcagtgacccgtgagtatatcactgcaagagccgaggtgtgagatgatggagcctggcacgtagcagtgggaatggagagaaggcaggcagacctagacaggaagcatgaagttgcatgaggagcatgggcttcagagtggcgtgaatctggaagctgaatcctggttcccctactttcctagctgtatagccttgtgtgaatttatttttttctttctttctttcttttttttttttttttggagacagagtctcgctctgttgcccaggctggagtgcagtggcacgatctccatcttggctcactgcaacctccgcctcctgggttcaaacaattctcctgcgtcagcctcccaaatagctgggattacaggcgtgcaccaccacacctgggtaatttttgtatttttagtagagatggggtttcaccatgtttgtcaggctggtctcgagctcttgacctcaggtgatctgcccgccttggcctcccaaagtgctaggattacaggcgtgagccaccacacccagcctccttgtgtgaatttcttacttcttggaacctcagtttcttcctctataaaattggagctattccttagggcttctgagagaattgaattc

SEQ ID NO: 198769 - DNA, 1000 bp, Homo Sapiens
ctactaaagagtacagccactacattaataagaaaatatctgatagatgaatgcccaagataagatttcacttccattcaccacttacagggacctctccaccaaggaggttcccaagtttattaaaatgacctagaagttgtttctaaattctaagttgtttctaaaatcacaccatattcaaaggggctaaaagatgagaaagaaaattcagaaagaatgctctgatttttgctcctcgatttctatagcatgtattcttctacaagacaaaggaagaaactatcgccatatcctttcggtggtctcaaaagaatatccagcatttttttcttcagagttaaattacattacataaagtaaaaataaaaattattattaataatcgttttatatcagactttagcattaactatttctcatatattaagaaaacaaaccaccctttcaacatgtaaatcacttcatcacacgtagggtctctgtgaggaaggtcagcaaatattgctgtataatctcattttatcaacaggggattgaagcaaagaagttaagatccagttcaaaatgagatccattccaatctcccaacacctagagtttagaacaggagcacaagcaagacaaagttatggagtcacacatgaatcatttacacttggttaagttagatgtttctacctggagaaggaagtcagactgagaatctcccgtcctcacacaatgagcctctaccacaaaggaaactcaatgctggcttattcctctgtaatctcccccctgtagcatcacctcccaacatggtgcagtgagccaggccaacttcagcaatagcattctccgaactcctctaacggagaaagagagattctttattcatttcaaaaatattaacaagaagcttcttcccatcaatcactgagtttggagattctgagacaagagcgaagcccaggatgcgttcttattcccagaaatcagataacagactgatgaattc

SEQ ID NO: 198770 - DNA, 1000 bp, Homo Sapiens
tatatatttacaaattattatatcctcttgtcaaatttacccctgtatcattatatgatgaacttctttttcttttttaatagtttttgttttgaaatctattttgtctgatatataaatctattttgtctaatgtaatagacaaaatagtatagctactcttgtttttttttggtttccattggcgtggaatatctttttccctatcttaattttcagtcttcgtgtgtctttacaggtgaagactatttcctgtaggcaacagatcaatgtatcttgattttttaatccattcagccactctatatcttttgattggagagtttagtacatttacattcaatgttacttttttctacttctttcccaatatttgtacaatgttatgattgataagtgataagttactgctgccattttgtcatttgttttctggttgttttatgatcttttcttccatctttctctctttcttgtattacttttagtaggtatctttgatctttgggagttcgaatattaaatgccttgaagtagtcttctttgggttaaatctacttggtgttctataatcttcttgtacttgatattgttatctttctctaggtttgggaagttctttgttattatccctttaataagctctctacccctgtccctctgtctacctcttctttaaggccaataactcttaaatttgctcttttgaggccattttctggattctgtaggcgtcctttttttttcttttctctcactgactgtattttcaaatagcctgtcttcaagctcactaattctttcttctgcttgatcaattctgctataaaaagacataaattcttttgtatgccaattgcattttttcagctccagaatttatgcttaatcttttttaattatttcaatctctttgtaacatttatctgataggattctgaattccttctctgttttcttgaatttttttgagtttcctcaacacagccattttgaattc

SEQ ID NO: 198771 - DNA, 1000 bp, Homo Sapiens
tgagtcttcttccatcttgtcattctaaaagtcctgaattcatgatctacccttcagatctgatcttccttttacgtttctcattaactttgttaaagaaacattattctttgacacttattaaagatggtaaagaaggttctactaagaaaggggattatggtgatgagtgtaggaaccacgtcaataggagaagagagattgggtctgaattcaactccaaggaaaagtggagatttatagccaaggagcagagtgggagtcaatggatgaaaaattactaggaagaaatatcaagggttagggggattcttgctagacagactcaacagaattcttgttgaagacaactcaaggtgataagaatggagagtggttggatactaagggtgggaaattttcactaaactgacttagcaggattcttgctcagactggattctataagaatagagagggaagctgaagcttgggcccagttgagcagagggctcagaagagcctgattaaaatttggtcaaaggagagagagtctttgtcaatatgaaaggcatcattccctcacccaaacctgaaacttaggagatttctgtggttctccccctccctcacccctccacagagtaagtccgcaagtccccttgatgctaaaccccaaatatctctcgagtcagtctcttttgctccttactcacagtctctgccttagtttaggcccttggccgagctcctctgggttgcaccaacaggcccatatctccttatctcttgtttcacttcccacccacatttactacaattgccacagtgatgccacagtggtttttctagacttgaaaccttttcctgtcattcatctatcataagtcttcccacttaaaactttgagaagcttcatactgtttttgtataaggcccaaatttattatcaggcttattgcactccctatgctgcagccaagcttgcctttccaggcttgtcatgccctcacatgaattc

SEQ ID NO: 198772 - DNA, 1000 bp, Homo Sapiens
ctaacaaattagccacaagataagaaattatgatttaggagtcatgcagctggaggctgcaagattctaaacctacccaaattgctcctggggatagcatcactactgtaaaacctaagatcagtgcttcagatattttgcagctcctgcacttgatggatcagccggcaccacccagacagataatcccactcatctggtcttgtggccccttcccaggaagtgactcagtgcaagaggacagcttcgactcctatgatttcatctccaatctgagtaatcagaacctcggattcactgccccccacccacccacccaccaaattatcattaaaaactcctatccttggccgggtacggtggctcatgtctgtaatcccggcactttgggaggctgaagcgggcggatcacctgaggtcgggagtttgagaccagcctgaccaacatggagaaaccccgtcgctactaaaaatacaaaattagccgggcgtggtggcgcacatctgtaatcccagctactcaggaggctgaggccggagaatcgcttgaacctgggaggcagaggttgcagtgagtcgagattgtgccattgcgcttcagcctgggcaacaagagcgaaactccgtctcaaaaacaaaagaaaacaagaaacttttgtcctcaaattgtcagggagattgatttgaataataacaaaacttcagtcgcccacacagccagctctgtgtgaattacttttcctgtatcacaattcacctgtcttgacaaatcagctctgtctaggaagcagacaagatgaacccgttgggcagttacaattcacttcagtttgttctgttggttggtttgtttaagtatgaaaaacattgctttgttttttcgtttcagaatctttgagtccacgtggaggaaggaaggagaagaggagaagactgttttccaggatggaaagggagcctcgctttctctttaggtggattacagaaattggttgaattc

SEQ ID NO: 198773 - DNA, 1000 bp, Homo Sapiens
agtcaaagcaaaatgaaaaagtgtgaatacgtagttttttagggctgagtgtgtggcttcccactggttacctccagtattttaacattgtgactaacacttgcaggtgcttttaaatgttagttgaatgaatgcaaagcaatcaatgaagtgactggaaacatttcactgtggtccccatctcacaccccctaaaccacaaagctgtttctctgcactgcctcttacacttaacttcgcccctctcttcctcctctttccttctgataaaatccaaatcagccaggcacagtggttcaggctgggcatggtggctcacacctgtaatcccagcactttgggaggctgaggcgggaggatcacctgaggtcaggagtttgagaccagcctggccaacatggtgaaaccccatctctacgaaaaatacaaaaaattatccgggtgtggtggtgtatggctgtaatcccagctacacgggaaactgaggcaggagaattgcttgaacccgagacggaggttgcaggacctgaaattgcaccactgcactccagcctgggagacagagtgagactccatctcaaaaaagaaaaaaaaaaaaatccaaattgcccaaacaacagctgcaaatctgcagggataattcctccatctttagagagccatcctggaccaactcttcttgaaattagctgaactctggctgactcctcctgccaaagccctatgaaaaaattccatcctactcccctaagttaaaacactcctttagagccttctcttgcccagcattcttgaacaaaaacttataccaacagtactaactcatgctaactccagaaaccagctcctcagacctctagttcaggaaataatgcagtcccccattctgggatcttaactctgacgagtggaaaacagcaattaaattattagctaaaaataagcttcaggcaagaacctccccaccccaccccaccctctaattgtgggtactgaattc

SEQ ID NO: 198774 - DNA, 1000 bp, Homo Sapiens
tttaaaaaggcaaaaagaagaaaatgaaattaactttaaaaatggattttatttaacccaaatatatccagaatatttcacattctttttgtccaaagtcttcagaatctggtgtgcatttatctttacagacatttgaattgagatcagccacatttcaagtgttcagtagccacatgggcttaaatggaggcacttgcagcatttgcttggctcctgaagctttagcaattctaaacaattccaaagggcatgacggtgtcccaggcacaaactcatacacagagtgaagtcacagatggaggctatgccggaatggctgtgagctgtagtcctgctctttgtggctctctgtctctttctccttatttcctccttgtaggtctgtcttcttagtgtatctttatcttcttttaccactttctgcctttctccttttttcctcttttcctctttcattttctctttctgctcctttgtctttttcccactctctgctttttcctttaatggatgtttatgaaactgaagagtatatattttagtatatatagattttaatatttctgtatgtgtccattcccaaattcatttttgcttttccaagtaaagcttatagcctcatctctccaatccgtgcacaggcatgacagaaacatcccattgttcatcatcttttcactgccatgactttccaccttttgttgattgaggcacgcaaacatatgttattgccaggtggagatcttatggacactcattggtgaataaaaaaaaattacacatacatactttttataactacacttattgcagtgcctactaggagttcttaaaaactaaattttcttcatatatcatctggcatatagatagatagacatggggagaaaggacgggtggagagagagaaagaacactgatttttgttcatagaggacaaaggtaatttttctcaagaattccaaagttatagggttaaaaatatattaaagaattc

SEQ ID NO: 198775 - DNA, 1000 bp, Homo Sapiens
gagtttcactcttcttgcccagggtggagtgcaatggcgtgatcttggctcaccgcaacctctgcctcccgggttcaagcaattctcctgcctcagcctcctgagtagctggcattataggcatgtgccaccacgcccagctaattttgtatttttagtagagatggggtttctccatgttggtcaggctggtctcgaactcctgacctcaggtgatctgcctgtcttggcctcccaaagtgctaggattacaggcgtgagccaccgtgtccggtcatgtttttttgtatttaaaaatcactttcaggctgggcacagtgactcatgcctgtaatttcagtgttttgggaagccgaggttaagagttcgagaccagcctggctaacatggcaaacccccgccccccgccatgtactaaaaatacaaaaattagccgggtgtggtgaaatgcccctgtaatcccagctactcaggaggctgaggcacaagaatcgcttgaacccgggaggtggaggctgcagtgagccaagattgcaccactgcactccagcgacagagtgaaactgtgtcttgaaataaattaataaaataaaataaaaaataaaaatcaccttaggagtccatgaaaggaagatcagatggaaataagaaagacaaatgagaaggctattgcaaaataccaagtttaagaagatgagacttgaacaatggcatagaaagcagagaagaggaaaagggttccagaaatatttgtgaggtagaatgaacaggatttgacaattgaaggaagaatacagaaagaatcccaggtttccgattttggcaactgggtggggatacaggtggcagagttttaggggaaaagtgatcatttacgtttcagacatgttggttttgaaacgcctgtgtggcaatcaatacagatatgaagtagagagttggttctacaaatatgaagctcaagagagaggactggactagagatacaaacacagaattc

SEQ ID NO: 198776 - DNA, 1000 bp, Homo Sapiens
gatgaggtctccctgtgttgcccagtctggtctcaaactcctgggctcaagagatcttcccacctcagcctcccaaagtgctgagattacaggcatgagccactgcgcctggccaccgcctggccaaattttttattttctatttcaagaggtgctaagaagtaatgattgatttgaaggcagcaaactcttgacctcaagtgatccgcccaccttggcttcccaaagtgctgggattacaggtgtgagccaccgtgcctggccaagatcttagcatacattattatcatatctgagaaaaaatgctgaactttccttcagaagacgtcacttatataagcaatcagagagttgagaagaagtagaaagacgtgcagtacatctaatctcaaatgactaatttccacaatttcacttctgggtatatacccaaatgatctgaaaaccaggacttgaacagatatttgtccacccatgttacagcagcattactcacaataggcaaaagatggaagcaccctaagcatccactgatggatgaatggagaaataaagtgtggtacagccattcaatagaatatcatgcagctttcaaaaaagaagggagtgctaacacatgcttcaacacggatggaccttgaagacatcatgctaaacaaaacaagtcagtcacaaaacaacaaatactacatgattccacttatatgggccacctagagtagtcaaattcatagagataggaagtagaatggaggttgccaagggctggagggaaggagaaatgagggattattgtttaaggaatatggagttttagtttgagaagatgaaaaaagttctgcagatggatgatggtgatggctactcaataatgtgaatgtactgaatgccaccaaactggacatttaaaaatggctgaaatgataacaaaaaagaacacaaatttccattcctagctaacactcctaagatcctagcagaactgagactcccagaattc

SEQ ID NO: 198777 - DNA, 1000 bp, Homo Sapiens
gttaattagtgacagaatttttctttttctttttttttgagacagagtctcattctgtcacccaggctggattgcagtggcacaatcacagctcactgcagccttgacctcccaggctcaggtgatcctcccacttctgtctcccaggaggctgggactacaggcacatgccaccatgcctggctaatttttgtatttttttgtagagacagggttacaccgagttgcccaggctgggcttaagattcctgggctcaagtgatccacctgcatcagcctcccaaagtactggaattataagcatgagctactgcatccaaccaatgacaggattggggtttttttttttggagacggaatcttgctcttttccccaggctggagtgcagtagcacaatttcggctcactgccacctctacctcccagattcaagcaattcttctacctcagcctcccaagtagctgggattacaggtgcacgccaccatgcccggctgatttttgtatttttagaagagacagggttttaccatgttgcccaggctagtctcgaactcctgaactcaggtgatccgcctggctcagcctcccaaagtgctgggattacaggcataagccactgtgcccggccaatgacaggatttttaagacactaaatgccacaggaagtgagggttaagaaaagggctaaaagttgagagatttattagaagtctatatgaggagcagagaataccccaccctctcctgagcggccaggtgactacccctcacataatctataccaagaagaattaaaccagtggagctccagactcgggaaccccagcccagtgaaaggcaggtaataggcacaaggctaaaaaagatcaagtgtaaagtgaatagtgagaccctccctgcatgctcagcttccagaacacagggaaccagccttatcgccatggccgcctccttttcccaccaccctctacccaaagagagcaaattgtagaattc

SEQ ID NO: 198778 - DNA, 1000 bp, Homo Sapiens
cctaccccttcggcacacactacatatctttcacattttataaaatcacaggagatttccaaattattgtgtctttcaaatactttaaaaatatattgtcctcctaatataaaggagagaggtggagtatttagctgatgaactgaatttgaaagtaagtttgcatttttgatatatttccttccttatgagtgagtcatgaaaaatgcatattttgtctaaatattgataaagctttagaatataagagctggagtgaacctaagaggttttgtagcccggcaatttccaacccaggatgtgtctcagaatcacatagagaggtttcagattcccagccaggcacagtggaatgtggctgtagtcctggtgactgggaaggctgaggcaggaggatcactggacccccagagtttgaggccagcctggggcaacatggtgagacccctgtctctaaaaaataaaaagtaagtagaaaatacaaatcacagattcctgggccttttccttcccctgccttccccaagtgattctaattctatgtcagttttggctgcttgcaaccagttatggagaccagggatcttgatcaatctcttcatctatctgatgaggaatctgagacccagagaagtaagaggtacagtgatttctctaaggttacacagtgtatgagtccatttgcacactgctgataaatacatacccaagattgggaagaaaaagaggtttaatggactcacagttccatgtggctggagaggcctcacaatcatggcagaaggcaaggaggagcaagtcacatcttacatggtggcagagaagagagagcttatgcagggaaactccccttttcaaaaccatcagatctcttgagacttattcactatcatgagaatagcacaggaaagacaagccccctgattcaattacctccctctgggtctctcccacatgtgggaattgtgggagatacaattcaagaggaggtttgggtggg

SEQ ID NO: 198779 - DNA, 1000 bp, Homo Sapiens
tgttggccaggctggtctcaaactcctgacctccgttgatccacctgcctcagcctcccaaagtgcaaggattacaggcctgagccactgcacctggccaatagcttgtctttcaataatagtgttcttgctgtgatatcatactacagttttgtaagatattaccagtaggggaaatttggttaagagcatgtgatgtttctattatttcttacaactgcttatgaatctacagttacctcaaattaagtgtaatttaaaaaatactggaaaacaacaacccccttaccccatgcagatattttcatctattttggttgtatttatttggtattgacttccacaatgtatatagtatgttttgattgctaatctatgatttattaattgaagacgattttagatagatctgtatctttatggtagagtttatttattgtagctgcattttaatttaaaacttaattactgttgctttgtttccttctggtttctgcatgatttccactgcgtctcttgtgttctgtttgtttgttttggagtttctcacattgagagatttttctcattgttgggtaaccatgactctatcttcctgtttaagaattaggggctgggcaccatcgctcaggcctgtaatcccagcactttgggaggctgaggcaggcagatcatctgaggtcaggagtttgcgccagcctggagggttggagaaactggctgttgcattagtccgttctcacactgctataaagaattaactgagactgggtaatttatgcagaaaagaggtttaattgactcagagttctggaggctgtacaggaagcatggctggtaggcctcaggaagcttacactcatggcagaagggcaaagggaaagcaagcacatcttcacgtggtggcaggagacagtgaaagaagaagcactacacacttttaaacaaccagatctcgtgaggactcactcactatcatgagaacagcaagggagaattc

SEQ ID NO: 198780 - DNA, 1000 bp, Homo Sapiens
gttctccttaaatcaagttatccacacgtgcaactccaataacttcttctatattcacgctgttcaaatttctaccttcagtctcaatctcagaattgacttctggtcctatgttcccagctatttgtaagacatttctacctggcttactaagctccatttgtctaaaattacactcagttatttattcagtaagtatctgctgagtgcctactatgggggggacactgttctgggcaccagggaaacccttcgacgaagctcccattgacaacaaggttcaactctttaacctgacattctaggcctttcacaatcttgggctagtttgccattccaactttctacttcaattcacacactctttacctccaaactgaatgctattgcttttccagttatttcaggaaaggcttgcagttatctctgaaataccctcttcccacctcaacctactgaaattctattcttcaaggcccagctcaaatgccacctcttccgcaagcttttttgggtccctgatcctaaaatggtctgttctttctttaaactgccactgaatatctttggtacctcccccacaacatatactatatgctgcatgttccttctcaaatgacgatgacaataattacaggttatcaaaagcctattttgtgccaggtatgtcgcttggtatttcatatctctaagccccaaaatgtacaatgtgagtactattaccctcattttacgaatgaggaagctcaatgatatcaagtaacttacctgatatcaagtaacacgcctacctactggacttagaggaacttgaaagcagcaattctgccctcttccatttgtgtaactctcactgggcctagaactgtggttagtacacagtgggtactcagtaagcatttgccaaatgaataactgaataaacagtatattttcaagccactgacatctgtaagtatatataccactctagtttcctggcaaaattatatttgaattc

SEQ ID NO: 198781 - DNA, 1000 bp, Homo Sapiens
ggtttctgtcttaaacccattccacagcacctcataaggtaagagccactggcttggaattccagccagctgaaagcaacaggctagagtctgcctgagaaggactgcattctaagggggaggggaagctacaatctctgtggttccattgactcagctgttccagcctgccagttctgaagagttcagatggtgcagatgaggaagggtcccccacaacacaacacagctgcactaccaaaaagcagccagattgcttctttaagtgggtccctattcccattcctcctgactgggtaagacctcctgatggggtctccaaccacctcctacacatatagttcaggctggcaacaggtcagtacccacctaggatgaaccttccagaagaaggagcaggctgtcatctttgctgttttgtacacttcactggtgatacctccaggtatgggaaataccgaggaaactaggatctggagcagatccccagcaaaccacagaagttctatgaaagagtagcctggctgttaaaagaaaaacaaacagacaacaacaacatcatcaacaaaaagaaactccaaaaaaccccatttaaaggtcagcaacctcaaagattgaaggtagataagcccacaaagatgaaaaagaatcaatgcaaaaatgctgaaaactcaaaaagccagagtgcctcatgtcctccaaatgattgcaacacctgtccagaaaagacagaactgggctgaggctgagatggctgaaatgacagaagtagacttcagaaagtgggtaataaggaatttcactgagctaaaggagtgtctcgtcacccagtgcaaagaagctaagaatcatgataaaacaatacaggaggtgatagctagaatacccagtttagagaggaacatgaccgaccttatgaagctgaaaaatacaatgcaagaacttcacaatgcaatcacaaatatcaatagcagaatagaccaggtggaagaaagaattc

SEQ ID NO: 198782 - DNA, 1000 bp, Homo Sapiens
ctgtcggcatccactctgcaccctactttctactacttgacatgttttaaattgtgattatatggttgataccagtgtcccctactcgactgcaggctccacgaggccactgagtctctgctgctaagagcagaccccagcctaggttagacgctcactaaaggtgtgtgaggtgcacagctgggttgggggcacaccaggcacccttctgtgttgtttcttatacttggctgatgacagactctccgcatgtgacttttgcttttttctcatccgctttaaacctgtgttcccggtttggaaggcccatgcctctggcagtctcatccccttgacaggtcctcaccatgctcgggcgcctcctccacgcgaactgccctgaacttgctctctcaccacccagaccctgcctaggcttccagtctctgccaaccagagatgtcctggtagacactcttccagatgctggggagggtgtggacacatacaatgtatgtacatatgtggtctttgcatgtgaaatagaatctcttagcttgtatcctatggtctttttttcattcagtggtagatcatgaacacacatttttatgccaaatacatgtttacattatcattttcagttgccatcagtcactctggcatagtaacactacataggaaataaaagtttttggaaaacttttgtctttagggctagatacccttaaatttctaaattagatttgtgtcattgaattgaacttttatatcggagttaggaaaaaataataaataaagggataatacagatatcagaaacgtggccacacagcttgttatgtgtgttgttgcctttaagattagactgcacacaaaacctggggagtattttgataacctggtaaaaacaattttgaagtgaaagttgatgtgttgacaatattggctatagtcatgaacctatactggggtggggcaggaattgtggtttattttttaagacacaccccttgaattc

SEQ ID NO: 198783 - DNA, 1000 bp, Homo Sapiens
ctgtaatcccagctgcttgggaggctgaggtaggagaatcacttgaacccaggaggcggaggttacagtgagccgagattgcgccattgcactccggcctggtcaacaagagtgaaactccatctcaaaatttaaaaaaaaaaaaaaaaaaaaaaaagggaaattcggcaaattacctttttttttttttaaacttgccaacttacaaaaggtgggttttttgtttttgttttgagacagagacttgctctgtcgcccaggctggagtgcagtggcgtgatctcagctcactgcaacatcttcctcttaggttcaagcgattctcctgcctcagcctcctaagtagttgggattacaggtgcatgctaatttttctatttttagtagaggtgagggtttcaccatattggccaggctggtcttgaacttctgacctcaagcagtctgcccaccttggcctcccagagtgttgggattacaggcatgagccaccacacctggctcagaggtgttttgtatgatgttttatcctagactactaattctagatatagcttttaattatttcttacatatagaaagtatatgattccaaatatttgttaaaatatattctagtaatgggggtgatttaatttggggtataaatgcagtttggagtagatttgtcatacttaaatttttttaagggcaccttatgtaaaatagaggtaaaatgattttatattgattaaattggtttaaatatatatatactgatagctaaaaataaattactgcatacatgttatcctcaaagcattgtgttcagttctttgacttatatatattttttgttcagtcaactctgtgagtaaggtaacatcaatttataggtaagaaaattgatttaaagagcgtaagcaacttgcctattgtcgttaatcataggcagctggaaaaaacaacccctccccccgccccccacacacacacaatttaagcccaggtgttcagaatt

SEQ ID NO: 198784 - DNA, 1000 bp, Homo Sapiens
tgatttttacaggttggcaaccaattcaaagtttatacatcactatgtaggtcaaacaaaacatatctgggggctgggcatggtggctcacgcctataatctcagcactttgggaggccgaggtgagcagatcaacttgagtcgaggagtttgagaccagcctgaccaacatggtaaaaccccatcactactaaaaatagaaaaaattagctgggtgtggtggagcatgcctgtaatcccagctacttaggagatggaggcacaagaatcgtttgagcctgggaggcggaggttgcagtgagccaagatcgcaccactgcactccaccctaggtgacagagtaagatcctgtctcaaacaaacaaacaaaacacatatggaggaaatttgacaggaagacaacaatccgttttttttatcttgagctaagtttcccattttgcagacaaactgagacccagagaggacaatgaggccgtttggtcacaaggcccgcaggtgacactgtaggactgaacacctggtctctccttgctcctggtggtttgctggactcatgggtgtttggtggaacagatccttccctcacatcccttggaaagaaccgactctgctgacacctcgattttgagcttctgatcccaggtgaagagaatacattttgctgcttcaggcactcagtgtgtggcactttgttatagaagtccaaggtgcataatagcctggaagctaggtagaaatctgggattactagactctcggaagtttcacatgtgagagtgtggggaaagtcgccccagcttgcagcccacccgctttctcttcctgaccccaggcttcatcctctacagctaaggtcttcacacacttgcagatgaacaccccaacctgcagctgtccttggccaaccttcagatttagtagtacacacgccagagtgatgcaggtgaaccccaaagttagggcttagccttggtaggttcttggcttcactcaggaa

SEQ ID NO: 198785 - DNA, 1000 bp, Homo Sapiens
ccctgtctgtcttcctctccgcggtggagcaaactgtggacttgcctggcacttaaaccttggtagatctgggtttataatcggccattcttaagcacgtggggttgggggaaagttcggagtacccattcctgccgttgcttcctatcctgggcttggaagaatcctggtagaaaggccagagtgggtttgtggagtcgccactgcgggaccagcacgaaagctgcttgtctgctttggcggagctgagctgtgtatgggatccaggaggctggggtgatttattttatgggattcctggagcgcagggctggtgaatccatgacaaggtccgggagcagcagaccaaaaccacagcagcctcctattaagtgtaacaaatagttaagcaaactcgggctacaaacaaagactttgctacctccctcctccacaacccccaagtaattagccttctggagctggctcttagctgaggctcctgctacctcctgctccacccgccccttcctaggttacaagtaaatcattgtcaagggccagccaggggaaggtttcaattaaggttctgttctgctgcctttgtttctcccctgctgttgtaggcacttacagctgcgttgttatgaaaggagggaatagccctttgtgtctttgatctaattaaacctgcttggctgtgtttatccgcagggcaggtcacagatagggttggctgtgccactccataaagtatctattgtggaagcagccaaaaagggctgctgtggcaggaattggttaatttctccttccacttcccttcctgaatagtgaagggagcccttttaaaacaaggctttggtggtaatcctgtgatttttttttctcccccatcccctcactggcccatccctctcaccctcacttttgttctgctggtgggtaaaatcttaggctgaacacatatttcaatggtaagatacttattttgctatccacacttgatgcaattgaattc

SEQ ID NO: 198786 - DNA, 1000 bp, Homo Sapiens
gaaggatgggtacaaacaagcccaaactgcatatactacaataaattactaactcttcaatgcccagacacacacgaacatccacaagaatcaagatcatccaggaaaacataacctcaccaaacaaactaaaggcctcagaaacagagatatgtgacctttcacagagagaattcaaaataactactttgaggaaactcaacaaaattcaagatgacacagagaaggaattcagaatcctatcagataaatttgaccaggagattgaaataagtgttcttacatcaagcttttaaaacatcaagcagaaattctgaaaaatttacaagctaaaaaattaaactgacatatgaagaatgcatcagtctcaaaagtagaattgatgaggcagaagaaagaattagtgatcttgaagacaggctattgaaaatacacagtcagaggagacatgagacaaaagaataaaaaacaatgaggcttgcttacaggatctagaaaatagcctcaaaaaggcaaagctaggagttattggccttaaacaagaagtagagaacgagagagaagggtagaaagtttattcaaagggagagtaacagagaacttctcaatcctagagaaagacatctatattcaagtacaagaagattatagaacaccaagcagatttaacccaaacaagactacttcaaggcttttactaatcaaactcctaaagaccaaagataaagaaaggattctaaagtcggcaagagaaaagaaacagatagcatacaatggagctccgataggtctggcagcaggcttttcagtggaaaccttacaggtcaagagagacagcggcatgacataattaaagtgctgaaggaaaaacatttttaccctagattatctggcaaaaatgtccttcaagcatgaaggagaaagatcttcccagacaaacaaaagctgaggattttcaccaacaccagatctgtcctacaagaaatgttaaagggaattc

SEQ ID NO: 198787 - DNA, 1000 bp, Homo Sapiens
tcattttcttcccatctttctttctttttaatctttctatcttaaaaaatcaacaaagaagtctttcattggctttagataattaaagccaagcaagctaaacaaatgttggtctttcctatagaaaccacgtttaaaatggttacataagcaccaagcttcctacccccatcacacaccttgtccttgagaactggtgttgctgtgtttcagttctgtccagttctccctggtgaccttttcctcccttgattagttccatggcactgaaggctaaggaaaaaagggagcgggtgggtccaggaggggactgacctaggagacaggctgatatttttttttacttttagacaagtaagaaatgaaaaaatgtgcaagactattccctcagcaaatgctcccttcaggttcgaacttggaacttcccagctttggtcatgtattttatgcccttaaagggtttgtacttttctccatacatatccagacgattcaccttgagtcctagaaaggagggagagagggaaaatagacatgagtattattcaaaaggagcaggtcgcctaactgtttctgttcaatacactgaggtcagtgggaccgacattgctgtgacagggaaccacttatgcagagcagatggattctccagtcttgggacagatactgacagcaaaaaaaggctccaacagacaagctacctatgagaagacctgtccctgaagtggaaagggtacaaagtaatgtgcagactaaaatgaggataaggaaaaaattagaccactgcatgatttttctcaaattattggactgaaaaaatgaataacaaaacaaatgaataatgaagtaaattataaataaaggaattaacaatgaaagtaattaataaatgaatgcttcctaagtattctcactagactaagccaagaatattttatatggtatagagctttatagtttattgttttaagattgaagagcttatacatcaaatgaattc

SEQ ID NO: 198788 - DNA, 1000 bp, Homo Sapiens
taaatggaaaatatcaaatataggatataaaattaacctatttgttatgcttaagatatattaaaataaggaacaaagcactatgaaaccaatcaccatgcttatcagaaaaaaatagaacctctagaaatgaaaaacttttcattgaaatgaaaaggtcagcagaaaccttgaaagaattacggtaactgaaagaagccagtcacaagaaaacacattgtgtggttttctttttatgaaatgtccggaataaacaatccaagagagacagaaggtagcttagtggttgccttgtgctagaagggtgggataggggaatcagtcctccttagggactggtaataggcactactaataaataaagtgataaaagcactcatttaggagtgatgaaaatgttctaaaaatagtgattatggtcacacaactctatgaatatactacagacccctggcttgtatatttaaaagggtaaatgctatggtatgtgaatgatatctcaataaaggtgtttaaaaaaatactcagcaaacagattacgcagcaaattaaacacaactgaagagggaattcataaactagaagataaatctttaaaaaattaccaagaatgtagcacaaaggataaggaaatagaaaatagggaaaataagaaacataaaagatggtgttttcctgatgcccacttaagtctgagcaagaaaagaagaaaagaaaaaactaaaataaaataaaacaaaaagatggtgtgcagagagcttatggaagtctggttgaaatctcaaaggaaagagagtcaatcattgaagaagttatgcctgagaatatttcagaactgataaaaaataagtatgcacagagaggcacaacatggactaaatagaataaagaaaaataaagtttagatgacagagtgaaattgcagaagacctttaagccagccaaaaagaaaaggaagatcagctcccaggaaacagcaataagattgccagcagaattc

SEQ ID NO: 198789 - DNA, 1000 bp, Homo Sapiens
tcccaaagtgctgggattacaggcgtgagccaccgcgcccggccggaaagtagaatcacttttgttggtggcccctagaacctgaaagtgaacagtgtaataaaagtttagtgcaggaagaccagaagatacagataaagtaaaagagaagaaacaatgaccagtaattccagatagcctgctcatttattttttgttttgtttctttgtttttgagagggagtttttgctcctgttgcctaggctggagtgcaattgcgcgatctcggcttaccgcaacctctgcttcccaggttcaagtgattctcctgtctcagcgtcccgagaagctgggattacaggcatgcgccagcacgcccagctaattttgtattttcagtagagacagggtttgtccatgttggtcaggctggtctcgaactcccgacttcaggtgatctgcctgccttggcctcccgacgtggtgtgattacaggcgtgagcccccgcgcccaggctacttttttgttttgtttcttaagcttccacgtgaagggcatgtcgtttgctttctaccacccctccctacatgctttctctgtgggactgaactgtggaagttctgtcttgtagcgtcttcattgaccggcacaccacgagcatggcagtgcctgtctgtgttccagcatctgggagagccaggtccatgaacatcctcatgttttcaacgtatgtggaaaatcccccatggctgggcgcggtggctcattttgggaggcaggcagatcacgggaggccaggagcttgagaccaacctggccaacgtggcgaaaccccatttctactaaaaatacaaaaactagccggatgtggtggcacgcgcctataatcccagctactcgggacgctgagacaggagaatcacttgaacctgggaagcagaggttgcggtaagccgagatcgcgcaattgcactccagcctaggcaacaggagcaaaaactccctctcaaaaacaaaga

SEQ ID NO: 198790 - DNA, 1000 bp, Homo Sapiens
aacagagacatctctttataaaacaaatttaaaacacaaatcttgtctcttcttgctttaaaaattttctagggctttctacagctgacacaataaagtctaaactccttaaaatggcatgtaaggcttcctacattctgagcctaactttccttcccagtgcccttcacaatcttggtttcttttgtttccctcttcctggaatgtcctcctctccagaggatcatctgctgccttcaaaaaccaagcttaccctgtaagccctcccaggttcagtccacgctaccaagtgtaactcattctactgcagcaaaaccctgagtttcttgacaggaaagaccgcgttaaacctgtttcccagcaacaaaggcagtgtctgcaattacagatgctcatgaaatacatatttattgaatgagagcattgataaattctgatttcatcccgttggcaatgctccatttccccctttattatcacttctgattagagaaagagagagagtaagagagagacacacacagagagaggtcttctctttgctccctaattttccagggaacaaataatccattactttaacagactttcaaacaaaggcattgctcactaaaaagcctctgtattttcttttaagctattgcccaagtgatttctgagctgaaaacctgaaatgaaacctgagacggacctcaggaggacttcgaatttcttgaaagctcagctgcaaaacaagaccgaaagtcaagtaaaccccagaactgtgaaacgccctcatgaaccaacatagggtatgcagtcctgtggtccccgctctccctcctttataaggcattctctaacaccttaaaatttattgaaaattctctaaattcgtgacatcagtatccctaggttttgttggtgactatcacagatctctggcaaatcagaaggtgtcaagagatgtgatagaaataacatttcagaaggtgagtcaaaaacttctcacagtgaattc

SEQ ID NO: 198791 - DNA, 1000 bp, Homo Sapiens
caatctagtcaacatggtgaaaccctgtctgtactaaaaatacaaaaattagctgggtgtggtggcacacacatgtagtcccagctacttgggaggctgaggcaggagaatcgcttgaacccaggaggtggaggttgcagtgagctgagatcacaccactgcactccagcctgggcgacagagcaagactccatctcaaaaaaaaaaaaaaaaaacgatgagtgacacttgagatcttgattgttagtctgttccatacttgtgtgtttgctgtatgttctcagtgcttgcgttcatcagcaggagtataatccttctcaggcatgtgacatctaagtcagtatagaaatcaaggaagtttttttgttttgttttgtttttttgagacggagtcttgctctgttgcccaggctggagtgcagtggcgcgatctcggctcactgcaagctctgccttccgggttcacgccattctcctgcctcagcctcctgtgtagctgggaatacaggtgactgccactgcgcctggctaattttttttgtatttttagtagagacggggtttcaccatggtctccatctcctgacctcatgatccacccgcctcggcctcccaaagtgctgggattacaggcgtgagccaccgcgcctggccagaaatcaaggaagatttttatgtcctgaagtccttagatacccaacttctctgttttttttttttttttttaacaataacaatgtctatattattgtaacattgatattataagtattgatattttctattcttttttaggctgtttcatgaataaaacaggtccttttttctggaagttattctatgatgttttactactagagagacaggcagcaacagagtgcctaggccttgttcctcttaggggacaggattgattttattttgtctagaaataagaaagacttgattttctatgcctaggctttatgtacagaccgagatcttcaggaaataggaattc

SEQ ID NO: 198792 - DNA, 1000 bp, Homo Sapiens
atgagtccccataccttgtctgtggggctgggaagaggaccagggaccacatattccctttcttcctctttctgggctctggacatttatgtaagaaacactttcttgaaagtttcatcccctcccatgaaaatcattcatgcacattggggcttgaggggttgccctcccacatgacttcagcccaggatccatggaatctgcaggcctcatggcatttcatagggaggttctgctccggggtgttgggggtcagaagattggattgtttaagcaacaaggagcttcccagggcaaacctaaatgtgatcatgggagagcctccacccttggaagagagacaggcagcatatgtcaagatggtagcctgggtacataactgtggcagtggcagtatctcatctccaagggggtgactgtcctctgcactgcacacctgaaggcaagccacttaactaattaattcatctcagctggttcacccttctccttagaaatagcattcacaggacaaccaaagtcagtggcaactgaggaacaaagaaggaggagacagctcttttttttaagagacaggatcttgctctcttgcccaggccggagtgcagtggtgcaatcatagctcactatagcctcaaactcctgggctgaaaagatcttcctgcctcagccccctgagtacaggagtgcaccaccatgtccagctaattaaaaaatatatatatagagagagacagggtcttgctctgttgcccaggctgagagacacaatccttactgtgtccctacaacctacaagaaactttgctagtatgattttatttaattttcacaatgattttgggcttggaattactatcgcccattttcctggcaaagaagaaactaagatgcagagaggttacacacttgcctaaggccatgaaattagaaactgatagaaccagaagtggcccaagtggtctgtctctaagggcccttgtgcttgaaacaggaattc

SEQ ID NO: 198793 - DNA, 1000 bp, Homo Sapiens
taaactgaggtacatgaagaattgttaagagctttaaaactttgatctaaccagagaagcaaaggaggctgaggcctcctacttatggtcactggtgtagaatcaatagataatgcattcacaaaacctattaggtatcagattcttcctgtcaaagagaattatctgaagaatagagatagtaaaatggagtagaaaacccaatacatgcagatagattgtaagagaacacctactattgctaaatgattttctcttggcccagaaaaattacattctgggttactgaatttgcatatgggatgatgaactaccatcagatctccaaggcattaccgataatgaagtgtagtaacagcaggctggaaaaggtagactcggcttagcattgatactgagggggattattaggaggatgacttacaagcatttagaaaagaatgtcatagtcagtagatattagtgtaggtgtagtaaaaaggtcagaccaaataacttcattttctcatggtcaggaaatagggaagaaatagtataatttaattttatcaaggtatttgaccaaaaaaacctttggaatataacttggaaatagttgcatatatacatgactgagcagccctgctccaagatttgtagtagatcattactgaaaggagcatgatgattcaaagatatgatgggctctattcatgcgtcattcctttccagcattttagtcaatgattgaggcaggtcatgggagacatacatatgagattttcatatgtatgtgagagcgtttagctaatacattggatgtccatcagaatccagagttactgccataatcttgaatgatgggctgatgagattaaattaaatagaaaaattgaagtcttcattgcagtgtcattcgccccagtttaagaataacatttggaaagacctgtctttaccaagcagtacctgtgaaagccaaagacattttgttcactgtaagctctctctgactcaatta

SEQ ID NO: 198794 - DNA, 1000 bp, Homo Sapiens
caactaaaaataataataagagaataaataaatggaggttgagagattatttggtcttgtttgagctttgtggcattgcccctgtgatctttccctccacctttatctttcacctcatctctaagaaaataaaactttagaacctaaaattcccatttgtagaacttgcaagtaagaacagttccctgaattgagagcttgaccttgctgtgatttctcccaaacagacagacacaggctgtcctgggaactctgctcactccttgtacaactctccctacaaggggaggctatgggatgctatatcctcttaatattatttcttgctccaccagacatgtactctttaatcctagcaagacagcagttgttcatcttacatttagataagaatggcgaagtgacttgcccaaagcaataagagagctttctactctatcctcattatttccctgtaattcttttatcaccacccccagtttttccagcttctcacctagacttaccactgcctgctgacatgctccaagaaataattatgtagaatatggttcacaaaattgcaccttttctttcaacataatctaaatatagccccaccgttttctactaaaacctggtgattccaagtaatcagtttgctgtgtttggttaatgctaaatggtagtaattaaagaggttattctatcctgataaaagtgaggtggcatccacaatgagtatagagtacaatgctattattgcatatgtcaaattctataggatttgtgaatagtgcaatgaattctaattcatttaaaaacactcaaaatgaaagtaaacccatcagtttaaattttatctggagcaaggcaatgaacaaatttaaacaaacaaacaaacctaagtgaactgaaattacaggactgtgcaactttcctagatacctgacttatatcttcatttgtgaagctaaaagttttatcattactaggttgtaggacactgatcctcttagca

SEQ ID NO: 198795 - DNA, 1000 bp, Homo Sapiens
gtctttgacgtatgtattggtgatgttaatcctgggcaaaattccaaaactgattgtcaaatagagcttttttcagcatctaaaaagaaagcatgtgatcactgacagctatagtgggtacattaacaaatcagctacaattaacctcatttcttttttaacatggttacccccacacctacttactagcaagtcatataaaaagaggtaaatagacaaagtgctactgggtttagcaggacacacagcaaaatctcatcaaccactacctgaagtgcatgggaaacccaggggccagtgatgaacagccacatggatctgcatgtggttgattgctctcaccaaagggggatgtaaacctggagggctgtgggtaggaccacagtgctacccttccagttcaaaaatttcatggacaaattagaaaagagcactgattttgtttggctctgtgcgcccacccaaatctcttgtcaaattataattgccaatgttgaagaaaaggcctggtaggaggtgattaaatcatgggagcagatttcccccttgctgttctcatgatagagttctcacgagatctagttgttcaaaagtgtgtagcacctgcccccttgcttgctctctcccactggccatgtgaagatgtgcttacttcccctttgccttctgccatgattgtaagtttcccgagatctccccagccatgcttccttaaagtgtgcagaaccatgagctaattaaacctcttttctttataagttacccaatctcaggtagttctttacagcaatgtgagaatgggctaatacaagcactgacggcagtctgacaaaatatgacttctcattagataaaataagtcatctgtcttatgatggattgaggacccaaaaggacctctctctacagaccagaaaaatgggtctaggccctttgaatttttttctaaatttaattttcaaaataaatgttgttatcatagactatatggtctgaattc

SEQ ID NO: 198796 - DNA, 1000 bp, Homo Sapiens
ccccatatcagttgactggcatggcattcctgttttgactctcctcacttaggtcccacattgtataacatttgtttctgatgttttctttgcttttgagttgatatttgttattaatggttgtcatattatatcatgtttgtatacactgtcttctgcatgtacagattcctgctttttgctttttatttatttcagagcctcaactgtagtaattcatacacagtgaatcctcaaagtgttctgaatgtacttgagacaaatggatggtattcagggaaaaaatataaaattaaaaaaataaaaactgccgttacttctgaatataatttagatcaagggtcagtaaacatttactgtaaaaagtcagataataaatacggtaagttttgctaaccagatgatctgtgatgcactcactcaaccctgccatgacagtgtgacagtacccacagaaaacacattaacaggtgagtatgactatgttcccatgaaaccatttatggacactgaaatagaattttcatataattttcacaagtcaccaaatattactccccttttgatttttttctccaacagttaaaaaacataaaaatcattgttagcttgcaggccatagaaaatcaggaggcaggctgaattcggtccatggcccagagtttactgaccccaggcctagatctagagttgtcaaagtgagaacttctggtggtctgcaagatcttttcagcaagttcaattaccaatgtgtgagacaaaattttctttgtgtacgtcaacaaaatagaccaaatgcagatgcaaatatgaggagctagttaccttctatttaaataagccaaaaattgaagagattgacaaaaatgtaaaagaatgccactcttctcaataatttttcctttatgtttataaaatgtaaagtggtatcccatatcaaatactgtttatattaacatgtaataggcttatttttcatatgttaatatttttagaattc

SEQ ID NO: 198797 - DNA, 1000 bp, Homo Sapiens
tctcactctgtcacccaggctggagtgcaacggcgtgatcttggctcactgcgacctccacctcccgagttcaagcgattctcgtgcctcagcctcccgagtagctgggactacaggtgcctgccaccacactgggctaatttttttataagtttagtagagatggggttttgccatgttggccaggatggttttgaactcctgacttcaggtgatctgcccacttcagcttcccaaagtgctgggattagaggcatgagccactgtgcccggccaggcccatgcttttaacttctttgttttaaatagaatccaacagattctacaatatttaacaaatatttgggtgtctgggtttaccagactccaaggatacagttgtggatgtagcaagcaacgtccccgctcttatggcttttacatgttgatgagaggaggcaaataataaataagtaaatgaatcaatggaaatatctgagagagagagagcagggctatgaagaaggtaaaatagggaaatgggattgaatagctgtcagtaaggagagggtaatgggggtggcctacttgggttaagatggtcagggaagggctcctgaggaaatagaaatgagcagagacttgaaggatgaggagccagccttgatattacctccagagggaagaccaagagcaaaggttagagggggaaaagactggaagtgattaggaaaaaggaaagactacagttgtgaccagagtacagtgagtgaatgtagctatgacaggaggtgcaggtagagaggtgggcgagcctttgagtttaagggcatccaggcagctgccctacaggaaatggactgcaggagcaagaaaggaagcaggtcccacagaggcctgggctgtgggaggaaaggcatcccaggcagatggaggctggaggaaagcaaagagcaggctgggaaaatgccttccccaagagcagcagttcgataaagaaatattagttgggtttgaattc

SEQ ID NO: 198798 - DNA, 1000 bp, Homo Sapiens
agtggaaccaggattggtctgactctagaatgctgcttttgatcacttttctatgttcctcttcctctacagtggacaggttttgttttgtttcgctttgcttcagattcttggctcatgccaagtgctgtgtgccatgggtacatcacctgaccctgaagagcccagatctatgtcttttcatgcaaccttgccctgtgctttccacatattcacatccttcacagtcaatcccaccctggccactaggccaatagggactccccacatcccacttacaggggggcaaatatttatagccaaaagaaaacagaagatgtgggtttgagtcacagttccactatgtggtcatggatgagtgccttcaaccctcagtacctcagtttccctaaatgtgcagtgggagagcatgagaacacttatctgatgtcttccctggggttttgtgaggattaaacacaccatgtaggggcaagtgctttgagaatggaaaagcactgtgcagacatgagtgatgtgcatgatggttattgttagatgttctctcctggaatcaagttcaagcttcttgcatactcagcagagaacagacccaaactcccgaatctagtgctgtggcatgtggttggtgctcaataatgatttgttgtgtgaacaagtgcatgaatgagtagtaggtcaatgacctcaatgtgggcctggtcaggatttagatttcttgtctttgtgtgtgctcagcccaggactgaatgcacagcaggctgtcaggaagtagtcatggattgatgtgtccgtattcgccataaccaagcaggagatagatgatttcgttctggtctctggattttggctgcattttctctcatagtaggaattattcccggaagatccaaatgctcagctttgtcctcctctcatcctggtgaggcgtgtgatccaggtgagaagcagggagaactggccttcctggtgggaagttgtgggccatcaccttaagctt

SEQ ID NO: 198799 - DNA, 1000 bp, Homo Sapiens
atcatttaaaaatttctttctgggtgggttcaagaaccagtaagctaaagttaaacaaaaggcctagcgagcctaaattgaagtagtaggaaaagagtaatacaaaagtttcagaaagagctatttattttgtaactaaggaaaataaaatgctatttattccattctttgaataaatgttaactgaccatcttgaatcagcaaaataaacagtgttaaactgcaactaactcacctagaaaattaaaacaaattctttgccaattagcaatggtaaaagaagtttatgactttgtatttcatataaatataataagttctgctagctaggaactcagaagtcactttacagagaagaacactgaaacatttttttctggactatagtagcatattttttaaaagtggaaaatagtgccaaaatttggctccctaagtactttggatgtttattctctagttttgcttagtttacttttcatgtttcataatatttccacatgatcagcattctagacaatctctccacatggacataatttttcttcttcccccactgacttcacataatgagtgtttatcagaactcttctcaaggaaaaagttcatgaaaaagatttagaaatgtttgaacctaccttctaggccaacaaaaagtagtgagcagagccattagatcatagtaatgcttcttcctataaattattaggcgagtcaggtaaaacaagttaatcaacaatgttaaagagtctcaagttatctacagaagaatctccaggcttctctttacttatggctgttttggtttctggctgaacattctgaagaaagtaggacacagctaccaaggctccatttcccatcccctgtcttaaaggtgtttgatagagagagtgattccatcgaactcagagaaattcatggacctcacaggactctatgcaggcaccatgattgagattatttaggtttttaaattatagttcatatttgagaattc

SEQ ID NO: 198800 - DNA, 1000 bp, Homo Sapiens
aagtaaaccccagtgtctgttgtttccttctttgtgttcataagttcttatcatttagttcccacttacaagtgagtacatgccgtatttggttttctgttcctgtgttagtttgctaaggataacagcctacagctccatccatgttcccacaaaagatatgatctctttcattcttatggctgcatagtattccatgctgtatatgtaatataagattttcttgcattttcttatattttttatggaacataagattttctttatccagtctgttatttatttatttatttttgggtcagagtcttgcactgtcacctgggctggagtgcaatggcacgatctctgctcactgcaacctccgcctcccaggttcaagttattctcctgcctcagcctcccaagtaactgcgattacagatgtccaccaccacgtctggctaatttttgtatttttagtagagacatggtttcactatattggccgggctgatctcgaactcgtgatctgcctgcctcagcctcccaaagtgctgagattacaggtgtgagccaccacgcccggccttatccagtctgtttttgatgggcatttaggttgattccatgtctctgctgttgtgaatagtgctgcagtgaacatttgcatgcatgtgtctttatggtagaatgacttctattcctctaggtatacactctgtaataagattgctggtggaatcgtagttctgcttttaggtctttgaggaattgccataatgctttccacaatcgttgaactaatttacgctcacaccaacactgtataagtgttccctttcctcttcaacattgccagcatctgttattttttgactttttaataatagctattctgactggtgtgagatctcactgtggttttgatttgcatttctctaatgatcagtgatattgagctctttggccgcatgtgtgtcttctgagaagtttctgttcatgtcctttgcccatcttttaa

SEQ ID NO: 198801 - DNA, 1000 bp, Homo Sapiens
gtggtggcatgcacctgtaatcccagctatcaggagaatgaggcagaagaatcgcttgaacctgtgaggcagaggttgcactgagccgagattgcaccactgcactccagcctgagtgacagtgagactcctcaaaaaaaaaaaaaaaatttaattttaaccacagtacacttgattggctgtgtgcctgactccaccaaatttgttttagtcctcccagcaactccaacagctttattcccattttactgatgagagaacagacacaggttatagaaaacccagagccatttgtattgttggtaggatttttgcagctgtgttagtgaataagtgtaatgaccgggcaccctaataaatgctagcataatcaatgatagctgggatccctgttgtcaacattcatagtctcaaacgattgagatacattagctttctccaaacacctgccaatcccaaagattgttaagcaaccaggataatagaattaattatcttgtataatgtttaatcacagtattgaaaatataaaacggggatagaattgaaaagcttgaattctaaggcagatttacatcactttctcatgattcaggcttatatatactgcaccaagcagttctgtgactgtgttttattgtatttgatataaccatctaaaaattggcacttttaataatatactcagacaataatgtggcttaaaacttaaactaattggctgctctgtaggccagtctagtttttgaaaggtttgagatgtaatttctgaaaaaattgctgtggaagagaaagcctatttgccaccccaacctgagttcttgctggtggaaggaggctcctccctctccttgctgctccaagttaggtagaacaacatgactggacacaggctctagctggtgggaactagcaagtttcagcaaaatatgaaatgggtgacctttgagaaatgtaaggaagttaaagaattgaggtgtacattcttttccaagaattc

SEQ ID NO: 198802 - DNA, 1000 bp, Homo Sapiens
actggcaaatcaaatgaaatacatggcatacatctaataatgagttacactgaaagtaggatggcttacatttttatccgacatacaattcctccccatgcagaggttggatatgctaagatttttgcaacttacagcaaatttaacatccatatgagatgttttttgattggaaatatttctcaagttaggaagaatagaatgaagtgagattttatttggttcttctcagagacaactagcttagcaatgattgggagatccattttcctaacgcattgttagagcaattacaagaccattttttagctagtttagccactcaattgtaacaaaagagggaggtatctaatacaggagagtcagttatgaattaagagctgggttccaaagttagcatcctaaagtaccaacagtcacagacaggtcaaattatccttaaagctctgtaggaaggcaccgcactgactatctcctccaacagcaacagtctttcctccagagtggcagcaaattactatttctttggctgagtcctaagtgaagtagtttatgtaggggccatactgcatttaaaaagcccataggtacatgttcacactattagagccacaagggaaccaaaacccagcaaagtcatgtcacccacctcatgatcactccactacggcaggtattcattgagttcaatggtgggcaaaactgctcatactactgaaataaccatttaataaccatctgttcttccaggaacataaaactgactttatgtacttaaaatacatatgtaaagttgactccactgtaatcttctttatcatgttttgctgaatgcataaggtataaactgttattctcagtataaacatagattgtcctccaaggacagtgcctagaactaagtaatgggcactgagtcaacacgatgatttcttttaatcatattaacacaaactttaaaaaatcttccccaaatcagtaatttttttcataggaattc

SEQ ID NO: 198803 - DNA, 1000 bp, Homo Sapiens
cgcgcccgagcgctgttgggaggaggggggcccgacgctcttcctttatccttccccgggtgtttaaacttaggggtcccttcgctgcctctatgaatgcccccacaactggcgcaccccaaaactgcacatcgtcaagtcagacttgcggcgggtattccgcaaacaggttttgcggcgggagcagcgaggcggggaacagctccgggaacaaagatcccccgggtggaggagcagtgcgaaggcgtctcggaacccgcggtagctcgggcgggccgcgccggggagacggagcctcgcgggcgggagcccttcccgagatgcaccgggaggcggcgcccggcgacccccgctcccgcccggccttttgtgctgcgccgctcgagcgcgcttgaggcccgggaaatagccgccgccggatgggcgctttggggcgggcgaagtcctttttcacactttttcgattcttcgtctcgtgacgccggcaaaataattctctccctaatttacctgtaggagctttgcccaaggtgacagcatcaggagaagcccatgccttgtcagtcccaagaaactttctgccatttctaacgcttaggatggctctcggcggggcagaagttgcctcccttttgcagtcactcaaaacgcagttagcggtatagctagcttaaaggtctaacagcatgatgtcaagaaaaggggtcaggggtctcccaacaagggtcacctgatcgtaagcagaactggtggccctcgtggttgaatttgataaaatatactgaaaaccagtatgtcgagtaacgtttgtgggaatcatctttgaatgatgaatgtatgctcagtactgagttaactagtaaattgattttaaaagacactgctcttataaatgttctttccatacccttgactattatgtgaacagaatgcaatcatagtaaaggagaaattagaaaattccaagacgtctttgtgtggaaaggaatagagtgaattc

SEQ ID NO: 198804 - DNA, 1000 bp, Homo Sapiens
ggctgggctgctcagtgggcccagctgttagtccacgtgtttgcctgtgggtcaacagaacaggaaaggctcctggattctctctgttgctttccatccacctggactgctccacctcctatcctctctgtctccttgattcaactcgatgctaccctcatttatccaagcagagaaaggtgctcctttcctcttttagttttctctcacccttccttcttttcacatctatttcttactgtttcctgcacagtgcttgtcttttctctgacattgtatgagcaatttctttgatacaatggtagtctccaattatgctactgggcaagccagcctagaggttgtggaacagaaaggctctcagaccaacttaagtcactcatatcgcaagttttattgaatcagctgaaaatatccagtactttcaaggggaaagatgtgagaaaggttcacccacttagcttaaggtgcaagcaggtggcaggaccacacgacccgatcctcagtgactcagtgttcatgtgaccggtgttctcttctacattgaccttccaagctcatggggtagttactttggaacaaggaggctctgcagagaaaactgcctgaagccaaaatgatcttgctctaccagagagataaaggggcaagtatgcctggccaataaagagcttgctaaacagccattgcttttctctgtgtttctagacaaagctcatgtggggagagatgggattaatgtagtttcaccaatgatggctgattcagcaataatgtgcctgtcatatagaggtggcataatacacacgttgtaacttggcctgttcatcttttttctgactttaagtgtcagaggcatgtgaaccagagcaactccatcttaactcggagctgggtaaaatgaggctgagacctacggggctgcattcccagttggttaaggtatcctaagtcccaggatgagacagaaggtcagcataaaatacaggtcataaagatc

SEQ ID NO: 198805 - DNA, 1000 bp, Homo Sapiens
tggtctgccctatagctgtaagatcctcctaaatggatgcttttatcgttcagagctaacatctgctaaatcacaccattgtttcttcagcagatggcttgtcaggaggccagataataaagatgtgtttacactgtatatacagccagactaatggtctgataccgatagggcctgtttgctatgtcgatactaattagccaagcagagccaatgaaagctttccaaaagactgcatgttaatacattagattcattaagcttcattaggaaggcagaaacaaacattttaggatatggaataagtgcatttttataatgttgttcttaattattacacagacaaaatgttttgaccactttacaaaaagtgattttaaaaaaataggctaatccttagaaagagttagaaaggcgtcctaggaaaacattcaatgttctaataaatgattttctccatacatttttccctataataaaattaaaacaatcttttctgaaaatcaaaggaaaagaggaaggctaaaaaggaaatttcaaaataaagccaaatcagaaagttaagaaacaagaaaatagtatgaatgtattatcaagtgtaattaattttattaggcttagcattatctcaacgagaaaatttgagtatgcaaatcagctgtgtaatcagctatgctttttccatgaaccattaaataaaaaccttaattaaaataaaaactttaaagtatatattttgttaatgttattaaaaagtaaggcaaagactactgcaaaattcaggcgcatatattaggttatgtttataggttttacgtttataggttttacgttcagccttcagaccttcttaagcaaaaacaaagccattagtgcaggcacataagcaaattgtgccataagtcatgatcttcaaactcaatccaaacagcaatgctaataaaaactagctgcagaaatgcaaaaagcactgagctgtgcaaatgtaaatgacaagctt

SEQ ID NO: 198806 - DNA, 1000 bp, Homo Sapiens
agtacaaaacctttagcatttattttctacattttgttatttgctttgcatattagcatcttggaaatctgatgcattttatattttccccatcctttagaacctcatatagggtctgaaacagagaatgaatacataaatatttgtgaatgaaaaaatacgatttttattatcaaccatgaatataaagtgggctcctttttggtaaatggacttctgaattgtgaggaatctattttcagtaggttgtcttatacaaaattgttcaacttaaatattgttgaattcttcctttgtgatctataacactgctgaaatagcaccatcaccaagcagtttactctgtagtgctgagaatgacatataaacaattaacagtatacaagtcagattacaaattctagaggtacaagaaaatgcttatgggatacaagagaaagaaacagttaattttggctggtactcagcattacaaataaaaccacataaaacagacggggacacaatctcaaatggcattcaaaatggtcaactaaatgaacactgtgggtttttaaaattctgcataaatgtggtacatggtgaacaaattctgtcctctaactactaaattactttttaaatttaccactgcagtcgtgatttataaagcattcacaaacactcacacatgcaagactgccaaaggcagtaatttcattggctgagcattcagccctacttttaaattaaaggcaaagattaacatgtgttaaagtgagggtttgctaaggcttaactatgggtatcagattgcctaaataaagcagtaagtcaaataccaggccaagccaaaagtgtttgttcttcacttaggcttccaatcccaggcatcatgtatttaagagcaagctcaaaggcaagcttttggaaaacagagcataatgttggcatgcaaggctttcccaattaaacaaactaattcccaagaacaaaactacaataaattgtctgagaattc

SEQ ID NO: 198807 - DNA, 1000 bp, Homo Sapiens
aattttgtcaactacttactcacagcatcaaccgatacattttctcaacactgctatttccttaacacatagtcatacaggtaaataatatctctcaatctctatctgtatccctattatctctatatccatctaccttctacttccaggagcccaggacattactatctgccaagaaccaaagatacaaaattaggttactctagaaaatatgctcctctgatgagaataataaaagtatcaggattgtttttctctttgcagctcttctgccttctcctcatccttctttcagagtggtgcaatgctattagatttgcattctttttgagaggcacatcgtaccataaagagcttagtatgagagaagaacctagggaaaaaccattatggctgtatgctctattctgtctctcatcctgactttgaagaaacaagtagaagaagttcctgaagttttagctctttaaagggatcctcaaaacaagagagtccagaaggaatgcagaacattgctggaatgaaaaactgtgcatctacatgtagcaagtcctcaggaaaccaattatgccaacaggagagtatattgaacagatctgattgaatctgcaaaatgaaagtctaatgatcttgtaaatccttgctgaatacacttcttgcttccaaatactcactagcacaattccccatgtcaaaagcttcctactgatcagtgtagagttaaataaatcatcgtagatctttgtgcttttcaaaatttccagacacaagtggtcacactactaaaatacttatatacttttttaagtatcaaataacttgacatgactcatttcattgttctctttggcttcatctatcatgtccatatagaggattcccaagcatttcatcttagacatacctctgtcatggattacagtcttatatgtcttcttacagaagaagtggacattctcatctatgtgtctttaactcagcatatctaaaagctgaattc

SEQ ID NO: 198808 - DNA, 1000 bp, Homo Sapiens
ggaaggagaggaacagaaaaaaacaactattgggtactaggattagtaccgtgatgaaataatctgtacaaaaaactcctgtgataggagtttacctatataacaaacctgcacatgtaccccggaatctaaaataaaagtttaaaaaatggaataaattttgaatacaggtaaataagtagcagttaaaacactaatagtagtctttaagaaacatacatccaactgagaaaactgttacttaaatgaggcaaaatttgtatggccttttaactaaattacaaaataatttcaatagccccacttacacacaaaagtatgaaaattaaccccttttcaatagaaatgtatacattgactagattctaatcactaaaagaatactcaggatattattaataaaatagttgcaacatattctccagtcttaaacggcgttctccaatattttccagagaacattttacaactaaacaagagagtattactgttactatttgatgtccttacaattttatcggaagttttctgcagttcaaaactcagaaagcacgatcagctaatcacttttctcatctgtcaggtgtcagattcaaaaaccttaaactttagtatggcaatatcctaccaagattggaataactttttgatatttgtggtaagataaatctgttacactgaaaagagacaaaggattgcctaattttaattatataatctcttgatgtacgttttggttgggatgcctgaaattagcttggagatacaatgcaaaaatatgaaaactgtgatttttgcaaggggactgcacagggaaggtctctttggagtatgaggtatgagcagtaggactaggaagaggaagtatagagggaagcagtgtgactgtgagtagatttatagatgagagagaaggaaagatttttttttccttgccgctctgtgagaaagcaaccttggaggtatgaggagtcatataaatatgtttaacaagaagctt

SEQ ID NO: 198809 - DNA, 1000 bp, Homo Sapiens
atgcatattaacccaacagtgaattaatccactgccaaagaggatgagcaattagaatgatgcaaattgaatcagcaataatacaatttaaaatttctaagtaaacttgaaaatatctttcaacatttatttaaccataagcacacaaaacatgaaaatatcaaactgaaaactagtcttaaacttggaatcaaattactttgtcaatgtgagaagattcaggcagctctcagtttataaaataatctacagagacaaatgatggggactgttttaattagcattaaaaagtattatgctgaaagcaacatttagattttttttggcctcactgtcagtattaatttattatttactgcattaaatactacacacaatgggaaaacagtattttctattatatcaggttatatattcccaagttataaaaataaatctttctgcaaataaaaaacaaaaacagaatagtctgcattataagttttaaaaaatatggcaaactaacctgatatcatgacttttttttggccatgattatactgagtctttaagttatttattcaggaagttaaatcaaaaatctttgatccaccaatgttttggatgccaaattcttttgtcctactgtattacggatatatctaaaaatctggaaaattaaaacaattcagaatgaaaagaaatataaacagaattaaatatgcacgtcgattaaaatatctagattaaattagctaattctctcaactattttcatgtatcaggtatctgaatcccatagtgatacataaaattatttcaagatgataatttctttcatagtttcatagtatgttcccatttagagtaaattcttatgaattaataatacaaattctctcatgttcacagaaatacactttaaaatatatagaaaggcaactttcttctaagtctaaaactacggaaacatcaaaagaatctactcactagagatagaatttcttcacaattctagatc

SEQ ID NO: 198810 - DNA, 1000 bp, Homo Sapiens
atgagtggaacatgcaatatttgtttttctttgtctggattatttcactttacacaatgatctcccattccattcatgttgctgcagatgacagcctttcgttatttttttattgccaaattgtattccattgtgtatatataccacatttctttatctattggtccattgatgagcatttaggttaattccatatcttggctacagtgctgcagtaaacatggaggcgcaagtatctctttgatatactgattcattttcctttggatcagtacccggtggtaggattgctggatggtatggtagttcggtttttagttttttgagaaatctccatactgttttccatagtggctatactaacttacattcccaccaacaatatataagttcccttttcttagaggctgggaagggtttttggaggaagataaagagagcttggtcaataggtgaaaacatcagttagaaaaaataagttctaatgttcgttagcagaatagggtgaccatagttaacagaaagttgttgtatatttcagaatagctagtagacaggatttgaaatgttcccaacacagaaatgataaatacttgagctgatgaatactctaaatacccagacttgatccttacacattctatgcatgtgacaaaatatcacatatcccccattaatatgtacaaacacttgcatcaactttttaaaagtccagacaagaaaaaagcccatgttgttgataatatagaagttgcagtcctctccatcacacacgtcataaaggcagcaccagaaacaagccattgcccaagataagggtacctatttactgcgtgaatttttgtttcaggtttactttattgctgctctaattagaattcttgtccctttgtttcacactcgtagcatgtatttatgtcatctcttctctgatttgaaagataccattgtttcagcttaaaacagcccctggtttgaaagttgcacgggatgcttatat

SEQ ID NO: 198811 - DNA, 1000 bp, Homo Sapiens
atgaggaaattaatcctagagtggctaaattactagctcaaggtcatacattggtaatcttcctatatgagtcccctgtgtaaaagatttagagcagcacatggcacacagttaattttatgtgtttactaaacatatgaatcataaaatatatcctgcttcttttttcctttaacattatatcatgactattttcctatatcattaaatatccatgcaaaatgactttagtggctgtaatgcttcactatatgaatgtttcataacttagtgtttgatactgaggccacttctattttttaacgatataaataatagcacaatgaacattcttataaaaagattaattttttaaatgataaaaatgaccagatttgtactttcaagggctagaccatgggtaagagcattttgtatcccatcaggacaccaagtgatgcaaaaggcaattggaaactccagaaaaaccaaactgaccaaaaagaaaaacaatcactccacttcacttattgttccaaaacacattaaaacagtcatattttaaaataaggtgctttgagtttgcctagccattcaagaatatattcttcttaaccaccgtaaatactttgtattttaaatgcagtattggatagatagaatttattagctgttaaaacttgggcaaataactacatcctgatgcttgattttaaaatttgcatacagtcattgcatgattaagtgagaaaacattttgagcaccaaacacaatgccaggaatgcagaaatgctgcttgaaaaaaatctcccaaaacaaaaaatgagcagtagtagcacttactgaatttaactgagtgagaagataaatagtactgtcagttaagtgctctagaccttcagaaaaagcataattaatatgggctggagaaatgggctggggcttggaaggtgacagcattcagatgggcagggagaaaaggatgcaaaagccaagggatggcttttccacatgaataaa

SEQ ID NO: 198812 - DNA, 1000 bp, Homo Sapiens
ctgggattacaggcataagccaccatgcccagccatccctgtcacttctataacccatcttgtccaaaatcatgatgacttatcttaaggactattggacacacatttgaaaggaaaggtgtccactgagatgatgttgagatcggaaatcatacagtcctctcttccctcccacttataatggaacagaaacccaagtccttccttgaggagaaggaggaaccaaatgattcctcaacatcctttccagctgtaagattcaataactggatgatccatcatttcctgaaggaacttagcctaggagattggatggtagtaaactgtggaaatgtcataagcctcatcatacctgctaagcagtcaaagctatacatgagcatcctacaaaaagaaaagcccagaagagagaaagagaaaatataaaattttatatcagcaaacaccaggaggatgaaatcacactcattatttgctcattaagcaaatattcttttagcactcactatgtaactggcacagtgcttgaaactggaggcagatatgtaaaataaggccctgggctcaaagagtagtggagatggccttcaaaataaataattatgcacagtctcatgaatgctgttgtgagagtcagtactgcaaagttctgtaggaatccagaaaggtaagtagctctactgagagaataaagaaaaactttatcaaagagatgacatttgagttgaactttgaagtatggataggagtttcctggtaatttaggagaagggattgcaagaagaaggaatggcatacataaaggcttaaagacatatttggagtgagaggaccaaggctgagtttccctgtctgccctggtatcaaggcagacaaggaactgatttaaagtgtactgtacgccttgctgaaaccttagatttttttcctgtaaacaatggacataattgaatgacttttactaagtgtacttcatgatcagatttcttttgttaaaaaa

SEQ ID NO: 198813 - DNA, 1000 bp, Homo Sapiens
ggaagtcattacgttaagtgaaataagccaggcacagaaagacaaacattgcatgttctcatttatttgtaggaactagaaaaattaaaacaattgaactcacagtggtagagagtggagtgatggttaccagatgctaaaaatggtaatttgggtggtggggggagtgggaatagttaatgggctcaaaaatgtggttggaatgaataagatctagtatttgatagcacaatattatgactagagtcagcaataatttattgtaccttttaaaataactaaaaccgtataactgaattatgggtaatacaaagaaaggaaaaatgcttgagttgatgaacaccccatttaccccaaaatgattattacactgcatgcctgtgtcaaaatatctcatatactctacaaatatatatacctactatgtaccccaaaaaactaaaaattaaaataaaaaagagatatctatgtggagaaatggaataacagcaatgggagaaaagaataaagagatggtcataatattaaaatggagataaaaaagaataggtctagaatattcatttaaacatgtttgatttaatataatttttactactcaaatagaattgcactcagccattcagtataaaaaagaaaaagtgttttcacaaattcactgaaattacatattgaatttgccaagctttgatatgtagaatgaattgcacttgtgttcgttgtggcttctccactttaaaacatatccctccactgtggtccagtcctcatatcaccctactttccagaggacttgcttctatacatatttacttagcaggagtcagcaaactacatcttatgtgccaaagccaggcttctgaatatttttgttcagcctgaaagctaagaatggttttcacattttttatcgttttttagaaaaggaaaaataatattagtaacacatgaaaattgtatgaaactcaaacttcactgtttgaaaacaaagttttatgga

SEQ ID NO: 198814 - DNA, 1000 bp, Homo Sapiens
tcagtctgcaatatacatctttaaaaattatctttaggcatttgagcaagtactcttataagataaattcatggcaatggcatttctgagtcaacaattttataaggattttcatagaaattttatagaaattgccaaattgccctccaggaaagttatgtcaatactaggcatatatttttaaaaacttcctttcctatatgctaaccaagctgtgagatattattactcttttttatctttggtaatctgagaggtaaatatatctcttattgtttttagatgtgattatttaaattttagttagactcttttcttctgtttaatggttatatatatttctttatctgggacatgcttgtacaaatcccttgcccattttctcctgggatgttcatatttttcccggtgattcataataacttgttatgtaccagtacactgcctgtcgtatagtgtcattttttcccaatttgcttcatttttaaaatttcttatttatgatgtcttttaccaggctgaaattttaattttcacatagtatataaatattttcttcttttgttcatttaaaaaactcagtaaggttatgaatctacttctaacatttactctcaagtattttaatagcctccaataaagaatttaagtttgttggctagaagattgtgtgctaatacatttcggctactagatgtaattggtaaaaattttgtgaggaaatcattgtatgtctctttttaagttgttctatttccatctgtgacattattttgactctgaacaagtgtttgtagcacatttttctattaagtaatgattggcagttgagacgggggatggtcaaggtttctagctcatctctacaccatcttggtgaatgatcttgggtgaaccaagtaagctttctagtttcgtcttctacattttgaaaggagtgggttagatgacataagctcagaactgttctagcaccaaactttcaagagcctgtgaattc

SEQ ID NO: 198815 - DNA, 1000 bp, Homo Sapiens
accaggatttcatacattgggctcaaatctccccatgatttaagtgtagattactagcactatttcaacattaaagatcctactttagatagatgaagtcatctgtgacatgagatggggctatgttgcccatttggaaactgcccagtaagtggcatgttgatcttcataataaaaaggccttgagaagcccctaaatgatgtcacattttactcagcaatagctggtgcatacaactctctgtttcttcagcaagatacttcacacaaaaatctgtgattttactttgattaaaaactaaataattacaatgaaaactttttatttttgagtttactgtagactcataaaccatttctcaattatttgagaactactttttgctatttggctgttcctaagtgaattttctttcatgcagggtcagatgggtctgactggggaagtagcccgaagagatcaaagtcaggagatgaatatcttagtctgtgtagggtactataacaaaataccttagactgggtgatttacaaacaacagaaatttatttctcacagttctggaggcagggaagtccaagatgaaagtgccagtggattcgatgtctgctgcaggcccactctctgcttcatagatggcatcttcttgctgcatccttacttgtggaatggggcaaacaagctacctctttcttcattaatcctactcatgaaggtggagccctcatgacctaatcacctcccagagggctcatcttttactgccatcatattgaggattaggttgcaacatataaattttatgcgggacacaaacattcagaccttagcaatggataggcaaaatcaggaagaaaaactgaagccaatgtcagaaactagacaggaattagatccaagtgggaacaggctggaagcaagcaacaaggcttgaaggagactgtagcaaataacactgggtatgctggagttgtttaacagtccagggttgagatggaaa

SEQ ID NO: 198816 - DNA, 1000 bp, Homo Sapiens
gctattataaaacatgtcatgtgcattacatcttacatagcccttatactaaattagtggcccatttttcaactgaggacactgagcctcaggggttaaataatatgcagactcacagaggtcagaagcagcaggggtagagttcaaaccaaggtttaccaaatgttggtctgtgttcttaccactgtgctaggtagctacaagaatacaaataaattagatctctaataaggttggcctaaaatgatttccaaaaagccatccaacatataataccctgttatgccacggcatgatacagtgtttctctaccaccatccctttcaataaactttttatttggtacaactccatcctatcttcgcaagcatgtgtgtttgtgtatgcagtggccatataatctctctagtttgagggagaattggtcacagaggaccagctgttttctccaagaagtgagactcctgctacccactggccctctctggtactcttccctgaaatcatcactccctctgctagccatagagtctctgagaacagatgggcagggatggatgtgggtgcagcagccatccctgcagcttcccccagtgcttcatcactagaaagcaaatggatggaagcagctggggacagagatagtgcagggaaagcactgaaggacaccagaagtgggtagcagaattgccccagcacatactgttgctacccctgtgatggagttatcttggtccagaccctggacagaaaaaaactactccatgaccacaggccgttcctgagtccgaacttgggtgaactctaccatccaagcaaacagcctgacaaggaccagaggtgatcgggatcttctccctactctgggcacaaggtcaggcctgtcctcttagccaactggatatgccaccaagggaaagagtgagaggatgacactaaatagcacagacccagatgactattgtgggagacaggttaggagtaagtgaacatgacctgt

SEQ ID NO: 198817 - DNA, 1000 bp, Homo Sapiens
ttcttacattgtttgtttcagtacctcatcagtcaattgggctcctttgaaatgctgatctgcttacacaggttaactccttgaggaagggggttgggtaaggagcccttaatgtcttgtaaacatcaagaagccaaatggagtttgtccggctttcccagccaagagaaagtcttactcgtatgggaaaaacaaggctgggtaactaaggagacaagcagggaaaacttaaaagtaacgagttagagtaaaaacaaggttaggcattaccgtatttgcatatagtctataggtatcctcctttatactttaagtcatctctagattatttataatacccgtattagtccattctcacactgctatgaagaaatacccaagactgggtaatttataaaggaaagagctttaattgactcacagttctgcattgctagggaggcctcaggaaacttataatcatggcggaaggcaaaggagaagccggcaccttcttcacagggtggcaggatggagcgagtgcaagcaggggaaatgccagatgcatataaaaccatcagatctcatgagaactcactatcacgagaacagcataggggaaactgcccccgtgatccaattacctccacctggtcctacccttgacacgtgaggattatggagattacaattcaaggtgagatttgggtgggtacacagagctaaaccatatcaatacctaatactgaaactgcgtttgcaaaattatgactgagatagtgataaagatccatccaacttaaatgactccatcttgcctctaacctccaagctgtccttgttcattcctgggtataggcggaacttactttgggaggaaattagtttatagtttaaaacaaagacgataacagccctttccccaaacaaacctccttctcgcctggggactagactactaacattagccacgagattagaaattatggtttaggagtcatgtggctggaggctacaagct

SEQ ID NO: 198818 - DNA, 1000 bp, Homo Sapiens
tagtctatattcctttcctggaaccctgtctcccaaatttcaggtgagattttataagaagctctgtttatctgagatttaaaatataaaaacttgatttaacctatacagttttttaaaaagaccctaaataagtaaaatttagtactccacaaattgaagagaatttctctcttctctttactgccctctgagttttctctttccttctctcacctccaattttcatgtaaacactttcagttcgagtggaccttagagattgtctcattcaatactttaggaaaacaaattttatagaacccttgagttctgtggaattgcttctaatgaacaacaccttttgttgttgttgttgtttagtgacactgtgtaacaggcatttcaggaggagaatctcccagtctagaggaatcctctcagaggtagctataaaatattgaactctgatcttcaataagcattgtgcggtttttgtttttgtttttaatgacagttttaaacaagaaagttgctttatttctgaacttcataaaaatttctattaaagagacaatttctgaattttataacaatttctagaacagttgagtacctcactttgagacacatttttgctaaaagttaaaaacacaaaacccttatgagataaaataggaagctagtagagataggaaagccctctgcttagtaaacctcttttttgcgtagtttagacacatacaatagtaaagttacttagtacgttgatagttttctttctcctcaaaagctacaatgtcttactagctagttccttcaagaaaggaaacaagaagccgctggaggagattggtgagtgggataaaacactattcaactcttcagttattcggtttttaaatcctcaatgaaaggctgctgtattatagagtattttttttttatttttaatagacttagaaccaagtttcttgagaaacctttggcatattgtagtttttttatggctatgactcac

SEQ ID NO: 198819 - DNA, 1000 bp, Homo Sapiens
caggagagtcctaggggactgaggtaaggctgtgtgaaacaggcacccttctaacctgtagatttgctgaggccataataggcacagttctggccaaatctggcttcaccccatctgactgctaccaccgactgcataagtctggctgaccacctcccttgaactgttcacactgggcagggtcagagagccagaatacaggcccttgctgctgcctagagcagagagcagagggcagagggctacctccagaggacttgctgagatgcgggggctttccacagcctccacctgtgtagcttccatgtgtggtcagatcagcctctgaccatagaagcttttcctaatttgcacaagggcactcgatgggctctagattctagagtttctgctttctccctgatgccccatttggacctggtactctgtgcctccctgacaaaatagtgggctccagccccctcacagctgccattcccacctcaggcctgcagcacacagattgctctgtaagtggctctcccaacagcaagaagccctctgcaagagtggatgtccctctgtcttatggtcccccagaaacatgggagggcagccaccccagctcctggggaggaagatggcagggctgctctacacaagctgagatgagttattttggagagagctgaaggcacggcctagctttgccccatctcacttggaatctgacctgctgagagcccatccccggcatccaggcctctttgagctgtccacctgttgggtccacccttgatgggggactggcactctttgccacccttatttgggcagaatcaggctgtgggattcccagttgtgggccagtaggcgtgcgtgcactcagatgtcgttctataagtatttgaactaaaaatagggagaggctgccctaagtgtttgtcaatgatgcccggccatagtcttcttgggacttaaatgttgcagaatggctcctaactttagagctcatgaattc

SEQ ID NO: 198820 - DNA, 1000 bp, Homo Sapiens
gaaggcctttctgttaccatagacataaaacgaatggattgggcattatatttttcagtttaatcttttctcctcctctttaggattttctaaatattcctccactttcctctgccattaaatgttgttatgggaaaagtaggaggtcagattaaacccattgtttttctctcaggctgagtagatgagtattttattatgattattatttggcccaaaagttatgtctgtttagtgaaattattattattactattgttattgttatcctgctctcagatacatctttctgttgattattcagcataattatttacctaggagatattgtgcatgtttaatcagcaaattcaaatttttacttattttaacaaggttttcttcttttataatttcaaataatctgctgtttcattaattctgtaaatttagcaatacctattacgcatatgttgagctactgtgtcatgtttctgtattatctcctttctaatttctctttctgtcattttctatttttatttttaataggatttttataaatcttgaccttcatattattgtaccattcatgattttgtggttttaaaggtggcttttcttttcctaattatttattgaaaatctttaattcctcctgtgaattctgccagctcacttttcatttttccatggtcatgtattttattttatatttttcattcttttttaaagttaaaattatttttaaaggatttctgttcctggctctgatggagcaacacggacagatttaccctcttacttaaacaaaatacagacaaaatttataaaggatggttctgaaacatgggacaacaggcagtataaacagtaatttttcaaagaagataaaaaaaggaagtaaaccctatggtttctctactgattccctagaaagagatttcaagctatcagtctcactcaattgagaagacagagttcattgagaatttggggaaagtcaaagtggacagaattc

SEQ ID NO: 198821 - DNA, 1000 bp, Homo Sapiens
gtatgtcatttaatcatcgacctttgcattacttcaacagcagccttacaagtaacaaagaataaatcctgtgcttgcctctaggttttccacagaggtagtgaaaagaactggattttcaagttcactttgcaagaggcaagtaggaaggagactgaaagctgctcgtaaatcagtaaatcagttgctttaggccggacacctgccctgtcagtctcagctacatccaaatggaaaaatgggtgatctaggattaccctcaggcgatgccaatggccaaggcactaaaaggtcacatctattattgctggcatttctttccccactgggctgttttttgagtggatgtcatactcatctcatacagaaggcatgtccatcatgctagagcagtgctgtcaatattagatctaatgaaatacaccctatttttcttttctgcaaacttcattatacctagctgccgctaaaagatgattccttttttccttactactccaacattacattttagggacatgaatccttaagcaaagtttcattcgccacctctgattttaaagttaaaatgagtcttttaaaaacattaaccaaaataaatggcacagtgagtgccatacccagaagtggctacataaagccactacataaacagtcaatgctcccttggaagaagtcactggcctttactaataatatcatgttcatcagcaaacaatttggcaagtgtgtagtatcagaagttgggggaggactagaaacacaatcttaacacacaaaaataaatgtggataaaaaagtgtagcaacagctgttgccagctgcaagcaaccacgcagtaaaatcctgtccaactctgcaggggactgtatgaggactcttggagcctgagacaggagtgacaaaagatcgcattgtaagaacatcgaacgtgaaccctggctagcaagcacccctaggaattaccaataggaggaattgagaacattgccaagaattc

SEQ ID NO: 198822 - DNA, 1000 bp, Homo Sapiens
actagaattaaaataaagatctttctaaatatcaaaaattacattttaaaaagataatttaaggcttcaaaatttctctgaaaaatggcccttaacctatatctcacaggtttttctggttaacatttccattatcatgttctaacattttaaaattcctattacattatatatgtgtgtgtatatatatacacacacacacacttttatatatatatatatatatatatacacacacagtttatatatatattatattttttactttgggttatttagaatgaaagagttttgctaaatttaaactacattggaataaatttattcattattttgtaatttaattctaacttcagtgtgttgtgatcagaagcatggtctgaaaatttattatttaaagtctgagacccactttaacatggttcatttttacatgttctgtatatgcatttagatcatatgggccatctccaactgatgggtccaagttgattaaattagctttttaaattgtgcatctacacctcttctattttttctaaaatttctttttgaaatgttaataattgtgaaaagtatgtgaaatttcctaaaataatgtgattttgtcaattgttccgtttagctctcttgaatatgctctctagatatcaaaattattctattggttttatattacataaaatcattaaatctctctggtgaattaaacttttaccttttccataataatgccatctctttcaagtctatttttcctgacacaatacacccccgtgctttgttttggtttgtatttgccaagattattttatttcatcttttattttcaacatttcaatgaaatgttggtgttttttgttattgtgttttgtctgtttggtgggctggctaattagtttggttaattcttctttaagagcacaagggctttaatcacacctgtaatcctagcattttgggaggccaaggcaggcagattgcctgggtgcaggaattc

SEQ ID NO: 198823 - DNA, 1000 bp, Homo Sapiens
atttgccacttcatttcctatatagatatcattatgcccggatgaaaaataaagacagttttgctgatgtagttccagatttctttaaataaaagatactaaggagtttaaaagtattcaggaaataccaagacagctgtaccaaatgaaactatacacattaaacatctgttaaatgtatgcatgccaaacagcaaatctaatcatattttctgaacacttgtaggtcctacctacttttctataaaaatctggaagtcaaaagctgtatgagtgtctcattttatagctctttatttcttcaataaaaacactgatgtatatttttaagtttacagtcagcatatatacacacacaaactttaccaaaaatatagtcttttggtgatagcagaggtttagatttaaatggattaagtgtctaaccttgcctgggttggttaaatgatagagaaatgagggaaagcaggaataacgtttggagaggatgatcactacactaatgcagacttaaaagtcctctgcagtagtttttctcaaatatagcattagagctaggagtaccaaaagttcattagttcatggattagtctaaaaagtaccaatatggattccatttttaaaggagtcttgaaccataattaagaaaagacatgtttgagtcttgcttagttaagatcagcaatcgaaggattgaggcctccagggagtatcaggaagagtttctacacatgtcccgtagacaggaaaaaaaatcataagtgctggatttggttgagaaactgaccatttggagcaatcatcaaacaatgggacaaaatcccaggaagcaaagaaagcttgactggcatttccttgccttgtagaacttcaccttactatttgatgctccctctacaaggttccttatattggaaaagccaatgacctgtcatggccattggtatataactattcataaaaaagttgtataaattataaatattaaaactgagaattc

SEQ ID NO: 198824 - DNA, 1000 bp, Homo Sapiens
tggggaaggcatcttgactaatttatgcatgcagtcaataaatgtttatcttctggatttcagttgggcctacacatttcctgcctgtagggagtttataatctagaaggtagaggcagacaaactggaaaatcaaaataaaatgagattagagtgctttgtttcgttagaactttgtaactctggtctttttgtactcacgaatgcttcgctccttagttggatggtgtagaaatgaaacaagatgagctccttggcacttgccagaactctttggtaaattggaaaatttagagttagaaatggggaacaggattgggtgggcgcggtggctcatgcttgtaatcccagcactttgggaggccgaggcgggtggatcacctgaggtcaggagttctagaccagcctggccaacacggtgaaaccccgtctctactaaaaatacaaaaattagctgggcatggtggcaggcgcctgtaatcacagctactcggggggccgaggcagaagaatcgcttgaacccaggaggcagaggttgcagtgagccgagatcgcgccatctcactccagcctgggggacaagagcaggacttcgtctcaaaaaaaaaaaaaaaaaaagaaaaagaaaagaaatggggaacaggatttatccttaattgaactaatcaaaataaattccttaattttcaagtgatcaaccagccttgaaattcacagatgctgactttcaatcagcaatcaattctggagaatgaatttattcattcaaaaaatatgtattgagtcaggcacagtggcccatgtctgtattcccagctactccagaggttgaggcagaaggctcatgtgagcccagttctgggctgtagtgtgctatgcggattgggtggctgtgctaagttcagcatcaacgtagtgacttcctgggagcaagggaccaccagattgcctaaggaggggtgaatcaacccaggacagaaattgagcaggtcagaattc

SEQ ID NO: 198825 - DNA, 1000 bp, Homo Sapiens
agacttttacatataaatgcacaccaggtgtgcataagcttcagattttttaccaacaggtaagtaccacctaaagttgtaaagaccattattcaagatcaagggtcagcaaactttttaataaagggacagagagtaaatatcttaggctttgcaggctgtacagtcagtcaaaactatttaatgttgccatgaaagcagtagtagacaatatggaaataaattagtgagctctaaaaaagttttatttatgggaaacaaaatctgaagttcatgtaactttcatattatgaaatacgattctcctgattttttccaaccatttaaaatgtagaaatccttcttagcttgcaggccattcaaaagtagatggtgggacagatttggcccatggggtgtattttgccaagccctggtctagaaacattttgcagggtggaggtaaatcagaattctaagtggtggttattatattatttctggagtaaacaatggatggaataatacattttactaaaaaacaattttctgttgcatgcaatgtcaggtagtaccaaacaacagatttaatattttatatatcactgtggaaaatggtgtaggattccctttatagaataccctaatcaattccttgcatgataatttcaactaacccaaatcataatcttggcaaatgatgtcatcatcatatacataatgcacagcatataccatatgatataagaacagtacactaatgtctttatttattcaaaggatgcaatttagccttttttttttaagacaaataacattatttagtttctttctccatgagaatataagaagaaatttatctcgatctcaatatcaagaaaagttgcactttcctttcattttgagttttctttatgctcattgagaattttgtacttgatcacatctcccttttcataggagctgctagaaagtttggggctaaaattattgcttatttcaggcaagtgtgtaggaattc

SEQ ID NO: 198826 - DNA, 1000 bp, Homo Sapiens
tagtcaaatagctctagtgactcaagaggcagaggaatctaagaaagacaggatgggagcagtgaccccaggatttctttttttttcttttctaattttaaaaactgtttaattaaagcacaatatgcatacagaaaagtatccaaatcattcagtaattaatgcaaaatgaataaatctatgtaatgaccacgcggatcatgaaataatccctcccgctcaggatcctactctgtctctcttcccaaccattacttattaactactccctaaacagctctatggtgactcctaatgcttactgtaattggaactttatataaatggaagtatgcaacatgtattatgttaccaggcttttgctcaaaagcatgtataagattcatccatgtttgtgcttgtaactttagctttttcattgtgtggagtatttcatcatattaatatgccacaatttattggtcagttttatttttgaggaacatttgggtcatttcaatttagagttaatattaaggatgtcatgctcattcttaacacaatttttaatacacatgtatgcatttttgggggggtacatatattgaagaatgaaattgttggattgttaaaataatttttttttttttgagacagagtctcactccaccccccaggctggagtgcagtggcacaatctcggttcactgcaacctctgcctcccaagttcacgtgattttcatgcctcagcctcccaagtagctgggattacaggcgcctgccaccatgcctggctaattttttcgtatttttagagacagggttttgtcatgttggccaggctggtcttgaactcctgtcctcaggtgatccgcctgcctcagtctcccaaagtgctgggattacaggtgtgagccaccatgcccaggctgttaaaataatttaaagtgaggaagtttactatatgtaagtgcttttgatccgtttgttaatttatgtcctaaatagattactgaattc

SEQ ID NO: 198827 - DNA, 1000 bp, Homo Sapiens
caaagtgctagaattatatgggtgagcaattgtgctggcccaaggtgaagttctttacagaggaatttcagctaattaaatgtgaaaggaataaaagaatcagaaaatcagtttttgtaaccactaatgaaagaaaaaattcttttgtgaaaccacagatgaaagtttgatgggaacctttacagtggagaaaccagactgtcttcctaaacccactgatcaatactggcatcactaaaagtggaacaaccagacctcatgtgttccctgttgtgacacaatgacaaagacagcatcacctatggagtattcttgccaaaaaaggtggaccgcaatctaattgtgtctttatggctaggttctatttagaggaaatataacagatagggaaataaattaaaggaacatgaggaagcaaacacgtatattcagaatgtgggctactggataaaacaactggcttagtttagcaagctaaaaacatgaagtcaaaaaagaaaaacacggtgaaggaggggctgttttcaattaagagggacttaaacagacataaccaccaaatacaccgtatgaatgttccttggatcttggttaaaacaaaccaactgtaaaagcagatttttgacacaatcacagaaatgtgtttatggaatgggtgagataatagtattatggtactccatgtaagaaaacatccatattttgttagatgtacacttaactatgtaggaaagagttggtgtgatacctgggatattctttcaaattaaagagaaaataataagaataggaaaaatatccaacccctaagatgtgctttctcagagttaaaaaaaaaaatcatatctaagcttttgaatttggaacacagaagggtggatatcattttttaaatttgcttttgttattctccacaaaatcctccaaaatgtttaacatacagcagctactcaaaaactactgacatatcagaataccttttatatatttatgagaattc

SEQ ID NO: 198828 - DNA, 1000 bp, Homo Sapiens
ctgggattcccttcaaaataaccaatgaagacttacagataaataagattagctatgaaactaattgttaaagttgaataataaagacctgagagttcattgtcttttctctccttttgtatacattcgaaattttttacaatgaaaagttaaaagaggggactgggtgtggtggctcaggcctgtaacccagcactttgggaggccaagatggaaggatcacttgaggccaggagttcaagaccagcctgttcaacatagcaagaccccatctctgacaaagaaaaaaaaaaaagttaaaagagaggaaggacttagcagatccttttaaaaggaaaagcaaataaaccatgtaggacctacagctaagagactgcagtctgacacctaaaaaccttctgatgttgatttaaactgtgaaaaacttaaaatttacaagagaaggctgtaaatcaaagattcaaccactataaccagtctactgagtgactgttaatcagtatttacttaagttaccactgagtgatactgaaagaatattatttgaaagtgtaggatataatgactcatttttgctttctaatgagttattttccttttttgctgtccttccacgtataggtatctttccttacgtgattgctggttgctccaaatgctgaattttaccattgtaatatttaaaaatagctaatttgctctaacaggattgtaaaaatatgtattttggggaggcagagtactgaacaaattgtgctgctctctttagcctcaatctatatgccttccctgttttctttaatgcaagcattttcaggttgatattaatattaaaagctcaaagagtcaacaggattcaaatatgtcaaataacaggaaagcatttgcacatataatatactccttaaagttaagaagatcttcaaataaatttatttagtaagaaacaccatggtaaatatagcaggaaccaaaaacatggtcttgacaggaagaattc

SEQ ID NO: 198829 - DNA, 1000 bp, Homo Sapiens
catggtttattagcaacagcagtttactgtagaagaaatgcttgtttgtgtttctgttggcttcatccaaacaggttctgagctaactcagtttatactttgataggctctgttttcctcagggccatgttggggaatgtcagataatacaaaccagagatatgtgcttacttcttccatgtgttgcctaggttttatgcggctaagcggaataaaatatgaactaacttgacatttgcttgtaacaaaacctaaaatgtggtgcctacttcttgagaattgcctcttaaaattttttgaagtgttggattttagtatttgagaaataacaaaataaattgagactgtgggggcacttagggagttatgtaagcttttaagctggtaaagttcccctttaaaaaaaaattgcatgttcatttgttacagtatttttctttctttttatggtaatgtaagtgaagtcattagatcttgccccactatttggacagtgctgatgatgcaatcaccattcattttgatgcttttgttcaactgtctttgtgcgcttaagatgccaagttaagcagtaaaacttccagaaagttgttttgctttcttgaccgtatcagttttctagagaaaatttgttctgagaaactgtagggcccagtgaagcaaccaaatgaattccttagctcagcccctgtggggctctcctgccctgtgtcttaggtttagtagccacctgaggcttgtggggtttttttccccatatactttcttttaatgtaattttctgtcttattacttctaaagaacaaagcccagggactagttcctgcaacaactcctttaatagtctggatgtagaaaaaagtttgaaggagtgtgtgtggtttatttctcagcatagttcccccaaattgttaccttaactcctaaactggctgcaatagtgatcactcacctcacgagatcagactagtctgtctcttgcttacaaacaaggaagctt

SEQ ID NO: 198830 - DNA, 1000 bp, Homo Sapiens
ctggtgacatcctcctaatattcccattacatggctcctgctacagccattcaaaacatccttgtatttgccaaaggatccactccttttcatgtcacctgcctctgcctgggagcctttccccgccttatcctccgggaaatgccttagtcattcctaaaagctcacctaggggttctctttctagctgagctgtttctacctcctaccccacttcctcctaaggtagattagtcatatcttcctctaatgtaaagctctttgtgcaagctctccagttcggacgttgtactgtagttatctggttatgtatctgtttctctcactagacaatgagcttggaggagaagaatattaatattcatactgcagcaggctacaaatcttgaatgactcaataagtaaaagtctgcaattcagccaaaatattggcccttatatattgatagtacaagccttgggatctccgccttgcctaagaagaccatgatatggcttaaaagaggaagaaaacctgtttcatttggctccagctagggccagtggcctaatgtgagttcagctaaagatgacacattcattcccctgttcactgaaacacatgaaaaaaaaaaaattaagacattcttccagtgtgggagaagttcagaaaataaaataacatttaactatgtacctaccctcaaggtgcaacaggggttgacacttgccgtattcgctctgaatgtctttgttaaggaaagaaatgttacagatagagttgaagactgccctcctttacccctctccccctcttttctcagaggcaagcttactctaaggccgatatatatgtttttgtacttttaccacacacaatagatagcatttaaaaatgaatatgtatgtatatatgaaatacataaataaatatatgtatgcgtgcatagtattatattgtatatatcaatattacgctttctgaggcatttatttagttgcatgtagatctaatgaattc

SEQ ID NO: 198831 - DNA, 1000 bp, Homo Sapiens
ccttcttagcaatagcatccctggtttttagctgggttcatggtgtcttggaaaaaggctacatttcctagctttccttggagctaagtgtggccatttgactatgtctggccaatgagatgtcagtgaaaaagtcaaaggatactttctggaagtctccttcaaaagggagaatgctggttcttttccctttcttccatctttttgcttagaaggcagatctggtaactgaagctcttgtcatcttgaacaggagtatgtcatagcctagggatgacagtgccttcacactaccatgagttatttacctctagatttatttcatatgagacagaagtaaacttctgtcatgtttaagccactgttggttgggtttcctgttacttgcagtctaatctaatcctaacagacagcattagatacggactagaaacaaggtcaataaatgtttattgagttgaggagaggtcccccagagaagcctggcctgtctttttccatctctgcaggtatttaggagagaagctggggttttcacaacaaaacatcttgaagccctaaaatgacttgtcatgccttgtgagtgggggtgggcttatctctggaaaccagggctgtggctggaggaaggtgcccaggtatgggtggtctggcactgtcggtcttctctctcagccacagagggacaaacctgtggacagagctatcctttggttccaaatgtgggtctctgcacacggtccgtcccctaagctctcagctggtgggctgaagaagcctgaggaagccaggatctgtgagatggcccgattaccttgcctgttattcactttgttactggcatgttttgaaattgatgatttcttttctttcctcaaaaaacttgttcctccctttgctttgcttttttttaaattaatttttctgtcatgaaatatttcaaagatagacaagaatagaaaagagcataatgaatacctatttacccacgattaagctt

SEQ ID NO: 198832 - DNA, 1000 bp, Homo Sapiens
taaaagaaagatggtgccacagctttatgtcagggtaccagatcttaaaccctatcaaagagtttgagtttgaggctgttgacctgccatgtctattgccgacaccagaactagcccagtaagtgaaacaaaactgagtctctggggatgtatgggttaggagaggtactgaatcttcccaacagtgagaaaaaaaggggtagcagacgcttgagaaaaagtccattaccttatgatggatcttggaccttgcagaagattatctctaatgttacaattttaaattaaacagcagagattttatttcaacattagacttaaaatggaaaaaaaaatggttccctatttgggtacaaaaataaattcacatatgaatttattttaaaaatcatggatcagccaactataaaagagaataagtggattgaacttgaggagatgactacaccatggagaactgcattaaaattcaaaatagccaagaaaagctaaattatataacacacaaaaataagaaaaaccataatagcaaaagtaataaataataataatgatagcaagcactctgcagcaggcacttttctgcgaagtagatatggtggtaaacttttactcccacaacaaccctaatgtagctacgattattatcctcatttctacagtgggaaatctgagaaatagaaaggcaaagtaaccacagtaaatacaaccaaagggtcatatccctaagcaaaaaatataaaaagcacaaattcaaaatggggcacatatttaaaaagaaaaagataaagaatgctagaaccccgagatttgcagggtacagaaaagcagcatctcctatgctgatggtaggagtataaactgatatagcatttctggaaaggaatttggcaatagctataagaagccttaaaaataaccattttcttcttcaatccagtaattccactactggaaattctcctaaagaaaaaaagaaaataactgtgaacaaagaatt

SEQ ID NO: 198833 - DNA, 1000 bp, Homo Sapiens
cctttcctctttaaagatcttgagatctgttcagtactaatagatctaatgcttctttcttatgcttccagttagtttgcacttgttaccctatatatagcttcacatatgcttcagaagcttaagcaaattaaaaaaacaaatggggactgtgagagtttgagactgttttcaattcttgataaccattttagaggaaaattaaataatgtataaattattcagactcatcgctatttcaagattttctgccatttagctcctttccttaattatccagatttaaagttctgaacttcaaataaaggtttataaatgtcttatcttctctcagcccactgtgctcagatattaatcaaaccatctaaatcactgcacaagttttatttcattcatgacgtcacactgaatgtgctctctctccttaagatttcatttggtatgtcattcatgtatagttaacaaacatttaaaaatctaattactcatttttaagttaatgtgtaacataaatatactacttatatttaaatgtagttcaccttaactgacatactaaagacagattttagcaaatattttgattcagaatgatacctcaaactaccatttttctaactgccataatcctctattaaacttatataatccatttttagattgtaagatcttaaagaatacctaaaaaaaaccctcttaaatgttgatgaattgtttttccattataaagtcatttttgacttttagaagtcaagactaatacattttctagaaaacaaggtacaaaagcacttgtgattaatggtagcactagatttctttcagcaaatccttaagagtacagaggttgaggggacttctgttgtttgtcacattccgcatttgaaacaactcacagtgactgtcagcctaagaatagcaaatgtagtcttgctttttgttaaagagttcttacttataccttatggcatttttgttgactattagaaatgtaaattga

SEQ ID NO: 198834 - DNA, 1000 bp, Homo Sapiens
gagttcccatgttgaatttgaaagcgtctactcctatctgcctacgttccacatattactgagagatatggcagaaccaggcccaagtttttcttttaagtttgctatttttctttttttctttttttttgagatggagtctcgctgtgtcacccaggctggagtgcagtggcgcaatctctgttcactacaacctccaccttccaggttcaatcgattctcctgtctcaacctcctgagtagctgggactacaggcatgcaccaccactcccagctaatttttttgtatttttaacagatggggttttaccatgttggccaggctggtcttgaactcctgacgtcacgtgatctgcctgcctcagcctcccaaagtgctgggattacagacgtgagccaccgtacccagcctcaaatttgctgttttttctgagaggcttataggtacctgtgtccttcagaatcatgcctgcaactgcctatatgctggcattagttcagcactttatgccagacaagggcttcctttgcccttcctgagggaagctggctagggtattaacttttcctttttacagaacagggaacaggcccaaagagcaacagtggcttgtccaaaaccacactagcaagtgagaagctgagttacagttagagcccagatctctccaagtattctctctcactggataccagcctgcctgggtgtaagacaaatgccagcgcatggcgctctggctacgctagttgaagagtgagatctgtaaagcagggagaaatctggcctagttcagaggatactcccttgtagaaagagatacagggtggtggtggtggggctgtgtgtgtgtgtatatgctggaatgggagagattgtagttggtggggttattaaatgccctagatactgtccaggggacccacagctaataacacagcctcctgagtataggcccagggtccatgcagcccatgcctgctcagtgggcagatgaattc

SEQ ID NO: 198835 - DNA, 1000 bp, Homo Sapiens
cattatgaaaacaacaaccagaaagaaagattttggaaatgaaaacaaaattaattgccaaaacaaaaaaaaagttagggttagacgataaagtccagaaaatattttaaaatgtgagagctattaaaattatcacaaatatgaatgaaaacagaagaaatataaagaattgacacaaatgatccagtgtccaaccagtgggagtcctcaaaagagaacagaacaaaaaaaaacaagggagagggaattaataaggaaatagtacaaggaaattttccatagtagaaggaagacatgagacttagaatttgaaggccctggaagctctgaacaagacaaaaactaaaaatccacacctagaaacattaaaaaaaaaaaaaaacttctaaagaaatgaaacagccacagacaaaggaataaaagtcaggccaacataagacttcccatcagcaacaatggatgctagaagatcctgtcctctagcaagccatcatctactctgcaaccagagtcaccttccttgaattcaaatatcaccaagctactttcttgcttacaaatttgcaatggttctctttggcattaagctgaatttggagtcttcagttagctcatgtgactctctataatctgcccagaccagcctctcctgcctattcctgcctcttcagcctttgctccaccttgatggggctccttgtggtttcctggacacatcatgctgtttcatgccttgctgtatttgcaaatactgctttctcctcccagtaagctcattcttctattttacctaacaaattctcatgttcttcaaaactcagctagagtagcagcttttctgtgaagttttccttgctttgatccctgccctaggtgaagcccacagctgccatttgcctgagaagagaatttgggcagaaagcaaaacctttttcagtgactttcatgtgccaagaattgtgctggggacacagagtttacatagtttctcttaaagctt

SEQ ID NO: 198836 - DNA, 1000 bp, Homo Sapiens
tggaatatttgaagtttaaaaatggaaacggtctaaacatttatcaataagaaactggttcaacgaattactattttttttttttttttttgagatagggtctcactctgtcattcaggctacagtgcagtagcatgatcacggctcactgcagtctctacctcccagtgatcctcccacctctacttccccctagctgggcctacagcaggcaccaccacacccagctaatttttttagtttttgtagagacagggtctctctctttgcccatgctggtcttgaactcttgggctcaagtgatcctcccacctcggcttcccagagtgctgggattataggcgtgagccaccatgcctagccaggtgaaatgacttataagccatttatacaataggtggctggctgcactggctcatgcctataatcccagcactttggaaggcctaaggcaggaagattgtttgagcctaggagtttgaggctgcagtgagctatgattgtgccactccactccagcctgagagagagagaacttctcttaaaaaaaaaaaaaggcaaaaaacacaaaccacatgcagtaggctactaatagtgtgtactggtgtcctctttccaaccagagctccactaatatatgtgtctgttcaacttgggtatccagaagaagtcaactgaatttagttgtacaaagatattccagcccttaaaactgacaaggataatgaaagaacggagtagtgcagaagattaaacgagtttaacaaaagaagtcttaaattaattttataacataaaaatccacagatgcagcattctccatcaatcagaactaatttgctatgaatgacactgatctactgcaattacttttaatcatttaaaattacgagttgtccttgtggatgttgcttctgggaaaactgaagataccttttctatcctttacctggatgcgataaaacgaggttccttccattttgcggtttgtttggaattc

SEQ ID NO: 198837 - DNA, 1000 bp, Homo Sapiens
gccaggatggtttcaatctcctgaccttttgatccgcccgcctcggcctcccaaagtactgggattacaggtgtgagccaccgcaccctaaaaatacaaaatacaatttttgtatttttagtagagatggggtttcaccatgttggccaggctggtctccaactgtggacctcaggtgatccacccgccttggcctcccaaagtgctaggattacaggcatgagccaccgcgcccagccatgaatgtctaatgaatatctcagagttaactatgacccaattgacactcttttttttttttgagacagagtctcactctgttgcccagactggagcacaatggtgcgatctctgctcactgcgcagcctctgcctcctgggctcaagcaattatcctgcctcagcctcctgagtagttgggattacaggtatgtgccaccatgcctggctaatttttgtatttttagtagagatggggtttcaccgtgttggccaggcttgtctcgaactcctgacctcaagtgatccacccagcttggcctcccaaaatgctggaattacaggcctgagccaccacacccggccccatttgaaactcttttttttttcttgagacagaatttcgctcttattgcccaggctggagtgctgtggtgcgatctcggctcgcagcagcctccgcctcccgggttcaagtgattctccttcctcagcctccctaatagctgggattgcaggcgtgtgccaccatgccctgctaattttgtatttttagtggagatggggtttctccatgttggtcaggctgatctcgaactcccgacctcaggtgatccacccacctcggcctcccaaagtgctaggattacaggcctgagccaccacgcccggccccatttgaaactcttgactctccctcaggtatgctctttctcatatcttcctcctctctgtgaactggcacccagtcaccctttggtgaacgaaggtgaatgaattc

SEQ ID NO: 198838 - DNA, 1000 bp, Homo Sapiens
aaaaagttttggagctagggcacggtgatggctgtacaaaaatgtgagtgtgtatcaggccacagaactgcacacttaaaaatgaatacaatggggacttttatcttatgcacattttatcacaattttagcaaatcagtccaggttgcaccatgctgcatctggactgttcttgtcaccatctctctccagtgtgaggcgagatagaggccagatctgggggcagagtccagcattggctgcaggcctcctgtgagcaagcttagaccaaaaggcacacaaacatttcccaagagcaacaacagtttcctgctcaggccaagtctgcatgtggggagaagaacaaaatatttctccgaactctgcagggtgcagttcagcgggcactctcaaatgcactcagggcgtgcagggggccccaggagaataatgaacatgcctcgagttcatggctcccaaagaccccgcctggttcattttctcaaaacaaaagaagcctttctagggcattaagagcttcgacctccagtgcagaaactgctggcgactttgaaatggcagccctccagccacaaagaaaatctccaggctctgcatgccgcgcttacacacagacattgcagcactctcaaaatctgcacagatttgcaagatggaacttgccttcaaagaaatgttgtctcccttctggctagacatccctgccctttggggttctttgctctctcgccttaagccttcaggagcagttgagtggaaagtttgggaagtctgagccggggtcaactctctctggagttgcctgccttgggaaaggcccaggttgaagtcttccttgctagaggccccgcccagacacctgagtagcccaccctgttgaacagcttagcattctccacttgtaaggactttgactacaatgagcctgaagggagctgaaatgcaagaaaagaaaaagaacagcttcaggtgccacagtgaaatcccaccaagagaattc

SEQ ID NO: 198839 - DNA, 1000 bp, Homo Sapiens
ggttgcagtgagccaagattgcgctgctgcactccagcctgggtgacaaagtgagactccacctccaaattaaataaataaatgaatacataaataaataaataaaattagcaggctgtggtggtgcacacctatagtcctagcaacttgggaggctgaggtgggaggatcacttgagctcaggacaaggaggctgcagtgagccgtgatcacaccattgcactccagcctgagtgacagagtgagaccctgtctcaaaacatggtctctacagtcagaacgcccaggtttcaagctataccatgctggtgtagtcttgggcaggtcacttcatctgtctgtgcctcagcttcctagtccatggaatgagagtaaaaatagagcaactttcaggccgggcctggtggctcatgcctgtaatcccagcactttgggaggccaaggctggcggatctcttgaggtcaggagcttcagaccagcctggccacatggtgaaacccccgtctctactaaaaatataaaaattagctgggcgtggtggcaggcacctgtagtcccagctactcgggaggccgaggcaggagaatcgcctcaaccgaggagacgggggttgcagtgagccaagatcatgccactgcactctagcctgggcaacagagcaagactctgtctcaaaaaacaaagcaaaacaaaaaatagtgcagctttctagggttgcccgtgtgagaataaatggagcatgcccaggagtagagcatccagtgcatcccaggtgagcccaaacttgagccttccttcacatccccctttagttggcacctgtttaatcagggtctgtcccactgcgtgcataagagtcctcaagtttccctcccattaatccctacccccttgggcaaattcatggccactctttcatgttgtgtccccagtgcagaggggtggcagcagcccactgcagtcacttagcagagatgcccacccaacaaaggagaccaa

SEQ ID NO: 198840 - DNA, 1000 bp, Homo Sapiens
tttaaattgaatcagattaatgaattaagtttctttcttaaggataaaatgtaaaattagatattactctttgattataaaaataagaactgcagaaaacatgttaactgtgttacaaggtaacaatcaaactaccagaaaaactgacacctgcaaattaagaaacatgtcatgacagtactatttggactgggaagcccagatccaggtctcaaacaaatgaagaaactgaaaaggtgctaattctgatcgatttaaatattagcaggtatcacctgcatggctggaggctctatgctcctgggatgtgtactatgtaaactttggcacattttcaacaagtctgagtgccaggacttagtgtctagctttatatccttgctccacaacttaagcatgttaataagctctctgtgccagtttcctctttggcaaaagtgggataataacagtagctacttcacagggttgttatgaggattaaataagtcagtatctataaaataccaagaagagtggctcatagtaagcactgtatgttagctattactgttgtcactatctatgcaataactgaaacaataaagaaaagcacacgttggatatattacaatacaaaaacttatagaacacaaagtaattattactaggttgatgcagaaaataagagacacaataggctgaagtttcgggaaagctttgagaaaaagctaggagtgcttattgaaaagattctaatggatcaagaaaaaaaaaacagaaagtattccatcacagtataagagcacaaacatagacatacagaataagtacggaataaaggaaaatgaagactgggttcattgatacaaatactggtggacaaagctggaaaggtaggttagggccaaattatgcagactctttagtgctgacgtgacaaatttggacttgatttgattgataaagatctttccaggatctaaatagggaagtggcatgagaaagtacttaggaattc

SEQ ID NO: 198841 - DNA, 1000 bp, Homo Sapiens
gaaagcattaactagtaatttgaaaagatcgcatttgacaggccagtatgaacataccttgaatgcagccacacaggttccccataagaaaaatcaaaatcagggaaaatgaaaccacaaaggttcaatctgctctgacctttgaaaaactcagcacagatagtggcacttaggaccaagggcaggagatccctaatcccatcaccatggcgatagggcataaacattccagggtgaaggcacaatccacactgtgaggtccaactgctgccatgcagacaggtgggcttttacaagtacaggaaggtcatcaaaggctcagtgttttgtttcaaaaactgaatcccaagcccacacattattatgctggcttcttaaaataagttatgagatgggaaatagggcaccgacaaatatatatatataaaattatatataatataatatatattatatatatatatatattttgggaatttgggaataaactgaatcccaattcacactgggactacaccagctgccatcatgcctggctaattttttgtatttttagtagagacagggtttcaccgtattggccaggatggtcttgatctcctcaccttgtgatcctcttgccttggcctcccaaagtgctgggattacaggcctgagtcaagatacatattttttaaatgaagaaaaatttcaaagatactctgcttggtacaataatcaaatatataaattgaggaataaaacctaaccatgaaacatatttataactgcatatggaaaatacagaggctaattttttaaataacatattttgaaagcattaactagtaatttgaaaagatcgcatttgacaggccagtatgaacataccttgaatgcagccacacaggttccccataagaaaaatcaaaatcagggaaaatgaaaccacaaaggttcaatctgctctgacctttgaaaaactcagcacagatagtggcacttaggaccaagggcagga

SEQ ID NO: 198842 - DNA, 1000 bp, Homo Sapiens
tagtttgagtggggttggtattatttcttttttaaatgattggtagaattcagcataaaagccaggttctgggctgctctttgatgggagacttttcattactgctttaatcttgttacccattataggtctgttcagattttctatttttttcatgattcaatttgggaggttgtaagtgcccaagaatatatccatttcttctaggttttccaattgatttgcatatagttgttcaaaatagtctgtaataatcctttgtatttctgtgatatcagttgtagtgtctcatttttcatctttaattttatttatctgggtctttttttttcttagtctagctaaaggtttgtcaattctgcttatttttttaaaaaactaactttctgttttattgatcttttgtattttttcgtttcagttttgtttatttctgctctaatctttattattattttttctaaaaattcggggtttggtttgctcttgcttttctagttccttgagatctattgttaggtttttaattcgaaatctttatgcttttttgatgtaggcattgctgtaacttctgtcttagaactgattttgctgtgtcccataggttttggtatggtgtgtttttattttgtctcaaggaattttttaatgtttattttaatttcttcattgacccaattgttgtttaggaacatgttggttactttccatggatttgtacactttccaatgctctttggttattgatttttagaaaactaaaaattccattgtggtcagaaaagatacggtgttctttgttggcaggtggtttctttcagcactttgaatatagcatcccattttctcctggcctgcatggtttctgctgagaaatctgctgaaagccatattggagctctgttgaatgtgatatgtttcttttatcttgctactttgagtattctttctatgtctttgatttttgttaatttgattataatgtgcctttgtgaattcc

SEQ ID NO: 198843 - DNA, 1000 bp, Homo Sapiens
cttccaccaaagctgattttaagctatccacctcatgtcattgaacatggagttgggaggagatgtgcagtagtgcacccttaacatagaatttccgccgggcgtggtggctcacgcctgtaatctcagcactttgggtggccaaggagggtggatctcctgaggtcaggagttcgagaccagcctggccaacatggcaaaaccctgtctctactaaaaatacaaaaaaattagctgtgcatggtggcacgtgcctataatcccagctgctggggggctgaggcaggaggatcacttgaacctgggagacagacattgcagtgagccgagatcgtgccactgcactctagcctgggcaacagagcgagactccatctcaaaaacaaaaaaaaacaaaacaaaaaaacagcatagagtttccagcatccaaatacaacggacataaaaaaccagaagagcacatagcataaacaaatgtagtaagataattaggaagtgatgggttttgagtattacctctatttttagtaacttaatttattgtaagttggtataatttaatttttaataatggctatgtttaaccatctctcaaaattcctgaaagtttatcagctcttctgagcaggtacaagccaacttcctcacaccactacgtaaaggaaagatccttcttagttcctgctccccaaatcacattcatatacctgcttgaatctgtaagacttcaattttcaaagggaaaaaagagttcttccctggaaaagtttagagatcttttcctttgaccttatgtttagcatccacaaaacttcaaaagtgatatggtgatatgtcaagcatctatctaagctctctggtctgcaggagttgggatatggtactagaaaatgcagtcagctgccaacacttgcaggtgactggagaaaagcaatggcttgacaactggccactaagagtgagctcacacgtgcacaggcttcttaagtaataggaattc

SEQ ID NO: 198844 - DNA, 1000 bp, Homo Sapiens
catctggggaaaaaatcgtgagaccaggttctgctctccagctctgatgagaaaagcaagttttccctcctctctttgccacagtttctctacttatcagattgaaatggtgtcttccccacctactgctcaaagatctctcgtgccattgatgtgaaacacttttcccatgttcaaggtggctggcctagtcattggcatccctgtggcaaagaaatgtaccaacgttatgcctttacaaatggattcataaagagtccgttttttttttttcaggctgggcacggtggctcaggcctgtaatcccagcactttgggaggccaaggcgagaggatcactgaggtcaggagtttgagaccagccttgccaacatggtgaaaccctgtctctactaaaaatacaaaaattagcctggcgtggtggcacgcacctgtaatcccagctacccaggaggttgaggcacgagaatctcttgaacccaggaggcggaggttgcagtgagccaggattgtgccactgcattccagcctgggtgatagagtgagactcggtcttaaaaaaaaaaaagtctgttttttggaattaattttccgtagatggaaagatgcagcagatgcgtgatgctctggcttccatggccacagatggcccggaacagtcactagctagtttgtcctcaaaagaagtgagacccgcagagagtcaaagtcatcaaacctggcctgcaggagacctcagcagcacctgggagcctctcaagtgcaggggtgggggacagtctgtggctatccactgctgaatgtccactgctagggccttccctttactagaagtttctatcgctaaaaagcaacaatctctcaaagtgagaggagggagaagaaggatatgaatttctgcgtggccaacctgacaacattttctgaaagagcttgggtctgtgcagtctgaggaaggcagtgaggccagcacaggacaagacaaccacaggatgaattc

SEQ ID NO: 198845 - DNA, 1000 bp, Homo Sapiens
ctaatgacagcatcttctttcttgatgtactttggacatgtatttataatatgaattacatataatatgaatatatgtctcataaatgattatgtcaaatttataaagatttgaaaaataaaattgttagagcataaggagaaagcataatttgtaagtgtctgcatctagttgtggtttttactaatttctcatattatctaatattacaccaatgacaatcagaagtcatctgacctaaatttttaatatctgatacttataatctaccttagaatatgtggaggtcacttctggatagtcatatctactcactgagttaaattgaggaatcctttgtttttctgcttacataacgaattatcttagcaattctagagaaaagtttatgtacttgaaattaggaagtggtcaagcccttattatagaatttttattacttataatattttacaaatgttaaaaatcggcacagtggttcatgcctgtaatcctagcagtttggaaggcagaggtgggaggatcgcttgagagcagcagtttgagaccagcctgggcaacaaagtgagactccatttctaccaaaaacaattaaaaattcactgagcatggtggtgcatatcagcagtcctgtagccccagctactgggaaagctgagcttggagcagtgcttgagcccaggagtttgaggctgcagttagctatgattgcaccactgcactccagcctgggcgatagtgtgaaaccctgtacatatatatacacacacattatggaccacatatgctcaaaaggccactcaaaaagcagagtatcgaatctagaataagggggtttgtgcgtctttatcgatcataatcataattatttcactagcctgggagatcaggaattaaatttagaagcttggaagtaagctttgagtcttttccaaacatccccatgaacataggtttgtggaatgaaaatattattcttcttcctgaaaagaattccgcg

SEQ ID NO: 198846 - DNA, 1000 bp, Homo Sapiens
caggttcaagcgattctcctgcctcagcctcccgagtagctaggattacaggcagctgccaccacacccagctaatttttgtatatttcagtaaagacggggtttcaccatgttggccaggctggtctcaaactcctgtcctcaggttatccacctgccttggtctcccaaagtgctgggattacagacgtgagccaccatgcccggcccagtttctcttaaattaagctgattagcagagcatcaaccctttcccctcctcaacttcctcatacacatttgaaggggccttttcatttggtagagtataaatgttttaaaactgtaggaataggagatccctgacttaacaaacgtgcaagctgggaaagaccagtatattgacacatagattagtggaaggctggaacccatgtgtgattgcaaagcgctggcccacagccggactgagggctccccagagcatagggtgatgggtcaggtcagcacaggggctttgtgccaggggcagctgctaggcccacagctttgttgaatcctgagttagaataaattaaattacatgttagacacaagacctacatgtaatatgtatacttagagggctgcctgggaatcctgactctaaggtataagagtaattaaggaagaactcactccaacttccaaacaactccactccaacttttggacagagcccatttgtgaactgagtactgtctataattctgcaagattttatctgggaatccacctcagatctgtcacctaaaaacacaaaacttgttgggttttaaggagactcacttaagctttctctgggaaaaggagttccatggaattcaggaagagccgggcatccagggctcacaaggacctggcacgctctcttctgtgtctctcatatggtttctctggaaaaactctcttctatgtacccacacaccagtgggttagttagggttttgaataaataatacttgcatgtgatacagaattc

SEQ ID NO: 198847 - DNA, 1000 bp, Homo Sapiens
caatctctctatgcttcttggaaaactccttctctaaacaggcattaaatattttcttttcttaaagttcagattctcaccctcctttccctccacaatattggttagggattttattccaatccatacttttagcattattgacatgccaatgattcagcacaggcctctcttcttgagttccagatctatgtgtataattgtccaccaaaacttctacctacttcctcaaatatcttcaaacacaactaaaccaaaaccaattgtatgattctctatccatatacaggagaaaacaactcagttctcttccagtgccttttatctagtagaatagcgtcatcattcacccagttatataaaccagaaactctcttcctcagcctacatttctcattcattcccgaggcccatcaaagccttttaactgtgaatattgtcgaatttcatcccttctttccatcttcatggttgctaacctagcccaagcggccaacctgtcctacctgaagacctgtagtagttcattacgaggtctcccccaatctactataattcattctccaaaatgatggtaaattgattatttcaaaatacaaatatgattgtgtcctccctacctcacccctatctaaaactctttagtgttctctattcctttaaagataagaaaacagaaagtacttgtattagttcattttcacgctgctgataaagacatacctgagactgggcaatttacaaaataaagagatttaattggacttatagttccacgtggctggggaagcctcacaatcatggctgaaggcaaggaggagcaagtcacatcttacgtggatggcggcaggcaaaaagagagcttgtgcagaaaactctcatttttaaaaccgtcggatgtcttgagagttatttactatcacaagaacaacatgagaaagatctgcccccatgattcaattacctcccaccaggtccctcccacaacacgtgggaattc

SEQ ID NO: 198848 - DNA, 1000 bp, Homo Sapiens
ctggtttggctgctgtgacaaaggtcaaactaataggggctaaaatgagataaaggtttgtttttctcttaagtcacctccatccaggactgataggccagttccgcagtgtcagagattcaggctgatacatcctagtccacagtggctactccaggctgcggtggctcacacctgtaatctcagcactttgggaggccaaggcgggcagatcacttgagatcagcagttcagaccagcctggctaacatggtgaaaccccatctctactaaaaatataaaaaaattagcctggcgtggtggcgggcacctgtaatcccagatactagggaggctgaggcctgaaaatcgcttgaacccaagaggtggaggttgcagtgagctgagattgtgccactgcactccagcctggatgatggagtaaggctctgtctcaaaaaaatttttttaaaagggctactgcagctgggcgcagtggctctcacctgtaatcccagcactttgggaggctgaggcaggcagatcacttgaggtcaggagtttgagaccagcctggccaacatggtgaaaccccgtttctactaaaaatacaaaaattagccgggtgtggtggtgcacacctataatcccagctactcagaaggctgaggcaggagaattgcttgaaccagggaggcagagattgcagtgaggcaagattgcgccactgcactctactctggatgacagagactttgtctccaaaaaaaaaaaaaaaaagggctacttcagtacccaccatcacactaacaatccagccagcaggaagtaaaaatggagagcatgcttgtttcttttaaggccacgacctagaagttggacgtgtcactttgctcacattctatgagccagagtttaatcaagtggcaaacacggtctcctctgagtgctcaggtaacacacagggacctagtactgaagaaagaagaggagaatggctatcaggggaaagttagaattc

SEQ ID NO: 198849 - DNA, 1000 bp, Homo Sapiens
ctaaggtgactttattcattttagaatgaacttaccccattgatactgtaaccagagttggcatacatcacgattggcagaacccggtcatgtttagcgatatggaagtgttctggaaactcctccttcttgtagacgtggaggtgacggtgcgcattcttcagtgcctggtaaagggcttcctcttgccccaacttgggcaggggcatcccaaagccaccgtagcgcacaatatcaaacttgaccaggtccctgaacttgacgtagttggacaaggggatcttgttgacattgggtctcttctttacggtggtcatcccacggtctcatgtagtgatgacgctgaggtgctctgcaggctgtgcttctcagtggctcccaccagatacccgatggtcctgtcgatttgctgaatcatcaacttccttttctctgcctctggcccgaatcgatgtcccacgttatctggctctctgtagcacagagtcacaaaatcaaagtcttccttggtgaaccagttcatgacgatatcgatgttctccttccgctctgtctcgttgctgcttgggtgagtgtaggaatccaccagggaccacttgacagcctcaccctcatatttagcacctcccctggaatagtggaatgatgccgctctgttcccctgtaagtacaagaagaaaattccatcagggccatttgtcatacctttctcacaatcagcaaagctcgagttgtctacatctgtgcccctgtccaaaggtgtaggaaatatgtggtctttggagtcagacagggtggagttagattctgggcttccccaggatctcatagcatctacaacactgttagttacaagatgtactattattttatgggctactgagcagaaaaatgctgtcaatgagaccgtgacattccagtgattgtaaggtgtattacaactacagagatggcaatatgaaaaatagttccttagaatagaaggagacggtaatttctg

SEQ ID NO: 198850 - DNA, 1000 bp, Homo Sapiens
agggatgcaatgaacttagctatccacaagctggtggtttcttattccctagcaggaaggttacaatttcccatgggccccaagatcttcaggaaggagtggatctaggattttctggggcctaaagtttatatatgtctctttttgctgatccttcttttttttttgacagtcttgatctgttgtccagcctggggtacagtggtgtgatcttggctcactgcaacctctgcctcctaggctcaagtcattctcctgcctcagcctcccaagtaactggcactacaggtgtgcaccaccacgcccggctaatttttttgtatttttagtagagatgcggtttcaccatgttggccaggctggtctcgaactcctgacctcaagtgatctggctgccttggcctcccaaaatgctgggattacaggcatgagccaccatgcccagcctgacccttcattttttatttctcagataaatcttattccttaatccataccaggtgacacagtagaatttatctttgcctccttcatcttaagtgctactatttgtgtgttgattcagtgctattaatttacctccgtttcacatgtagctatgggggaaattaatttgaaattttattctggacaaatgcaatggaacagtaagatataactctgtagtcacaattatgtggaagtggaatgtaagaaagattagaaaaatatttaaaattagaaaatttcattcctatcagcaaattatgacagatctaaaaaatcttaggaatgaaagtgtctattgctacaaattatgtgtttttacattatacgattgagcaacataggcttaaacttcccaggtccaattatatatggattttcttccacttctgccacctctaagacagcaagaccaacccctcctcttccacctactccttactcaatgtgaacacaaccaagttgaagactttaatgatgatcaacttctacttaatattatacatagtaaaca

SEQ ID NO: 198851 - DNA, 1000 bp, Homo Sapiens
tgagttagggatgagtcccttcttttcaattgcttggaatagtttcagaaggaatggtaccagctcctctttttatctctggtagaattcagctgtgaatccgtctggtcctgggctttttttggttggtaggctattaattactgcctcaatttcagaacttgttattggtctattcagggattcaacttctttctggtttagtcttaggagaaatttatccatttcttttagattttctagttaatttatgtagagatgtttataatattctctgatggtagtttgcatttaggtgggatcagtggtgatagcctctttgtcattttttgtcacatattaatttatatttacttgagataggcatttttcaaggatttaaattttatttatattatttaacctctgttacaaagtatagaaattcagtcttttagatattcattcaacatttttcattattaattcatttaacaaatacctgttgaatggtctactctaaattggttatgttagggtctttattaagtgctaggaaaagaaaaattcacaaatcatagtctcaatgaaatctgctttcgttataaactaacggccttttgcagttgagaactgctattttttcttttaatcttactcaggtctgacttttaagaacatatgcacttatctggaaattgaaacaatattatctagtatatccgaggaatcttgaaattttaaaatatttcacatttgaagcacgtagtagtttcataagcgtctagcactttaaaatttattattattgcactacttctattattactatattactattgtttgtactatctctaagttgcctgtctgatgcttgaatttcctagatcctggatccagaaaaattaaaatcatatgagagggttgatatacaagaaaattcaaaagtagagttagcaaaagtggtttttaaaaaattgctgcaaattttgctgcaagtttgaatacagtcttggaattc

SEQ ID NO: 198852 - DNA, 1000 bp, Homo Sapiens
tagtactttttaaggtataagtagtaaagccatatgtttctacaacaacataaaatgcaaagatgttagaccctgcttaaaagtcccatgtgtctgcctgtgatcctcatgattatggattgcatggagtctgtaatcatatcagagtgcccaatagaactagactatcacaaaatttatgattctctgattttaaaattatatcaaagagatcaccattagtgatttagtttcttttgtgtttgttattccttagaaaggtcttttttttctttgaaaaatgcatgaggtttgaaagttactacttaaggccgggctcgatggctcacacctgtaatcccaggagggatttggaaggccgaggcgggtggatcacccgaggtcaggagttcaagaccagcctggccaacatggcgaaaccccgtctctactaaaaacacaaaaaattagccgggtatagtggcagtgctgagatcactccattgcactccagcctgggcaacaaaagcgaaactccatctcaaaaaaaaaaaaaaaaaaaaaaaaaaaaaagtaagttactacttaagatcatgctgatattctaaagataacaataacagagtttcctacctgcccgagctatgttcccgtggagatccttcttcaaaaacaagtcactttgttggacaatagaacttcctgaatgttttttattctatgcgcttaccctaatttataggaagctacgtaaatgtggacactctgtgaacaattgtttaatgactcccaaggttctgactgattaaaaagcatgctgactttaaagttctttttcttctttacatttccttttgttaagtctattctactgaagtaactcttctggaagccatcctgtttcactattatttttcagtgatttgggaaacagttgtataggaaaaaaatttatgtctttgcctgtggtacatagaaatttttgtggaattctcattgccagtaagtaccagacagaatt

SEQ ID NO: 198853 - DNA, 1000 bp, Homo Sapiens
aaatggaattaaacaaaaattgattcttcagtcacattagccacatttcaagtggttagtgaccacctgaactagtggctaccttattagtcaggtgaacaaaatatttatgtcatcttagaaagtcctgttggacagagctgctctagacagtccctgtgctctgtcctttggttggatctggagaacattgagcaaaaagtttcattagaagcagatgggacaatattctagcgtcaggattgggctaactttcttgacagcatgaggtgactaaatttcctccaaagcatctagaaacaggactgaagagagtcttcagctgaggacaccatttccccctccctacccagctttattgaggcataattgacagataaaaattgtatatatttaaggtgtacagtgtgatgatttcatgtatgcatacattgtgaaatgattaccacaatcaagtttattaacacatattaacacatctatcacctcactgtgtgtgtgtgtgaaatctatattgtagcagatttcaagtatataaaagaatattaactgtagtcaccatgctgtacatcagatccccagaacttcaaggtctgagggcaccctttgaaagacgtagacaactgagctagatagactcttattttcaggttatgcaagagtggggaagtctacaatacttagagcccattatgaacactgaaaaatcatttgcagcattcattattctaagtaacaaccctctggtattcatcagagataaacatggttgacttggttttctgtttacatgagcttttgattagtcattcaaatgctaactaccccagggtataggttaaaaataattactacccttgtatcacaaaaatacccatgttgtaatgttttgaaaaattgcagacaatatgactgcctgtgtatagatagcctcatttagtttttgcaacaaccctttccagtagaaattgcaggtattaatctcatttttgtctctatt

SEQ ID NO: 198854 - DNA, 1000 bp, Homo Sapiens
atcatttctaataaaattgaaaaaacaatgtgtgagtacagaatggtaattctgtattaaatattgaatgttacattcagtaaaatgaggcaatttaaaatgatattaaaaatattgatatattagcatcaaatcataattctaactttaaaattacatataagttttataattttatttttgaaagaatttttcaaatgataaaaatgaaagagtaattatattcacgctaaatactaaacactataaaaatcagcaatatatattaaatagataattagataaaaaccttaaaatttcttactgtcctcattcaataaaaacaacaatttgtaaacttacatgaagttattaaatgcttcatggcaaaaagatgcaacaatttcacaagactgaggggtgggggtgtgtgtgtgtttgtctcgaaggaataattcaaaagaggaataattgtcctatgtattatttctaccttttctttcaaattcattacaaattgaaaacttctaagttgcacacttaagctttttaaaatattccaatgaaatcataaaaaaatactctagggggtgtaagatttcttaccaaaagtcaacttggactagacattaaagcaaatgtgaactttatattcttaaaaattagaaacacaatgattgaaactttgctaaataattctgattcaatttagtatgctgtcaaaacaataggcctcataggaaaaaaatcaaataactttatgtgcttaaacatatcttcacttaaaaccaatccattcaagcttctaaagcaaattatttgtataaatttacttgtaatcaactggaatatatgcataatagtacaaaaatatcagcatttctctttttgtacaaaaatgtaactgaaattattttaatattactttaaaaactgtaggaatttaaactaacttacattttgatataattttgactgctgtaaatttgaaacattacaaaaaatcatatattctacattt

SEQ ID NO: 198855 - DNA, 1000 bp, Homo Sapiens
tgactgtcatatattgctggtaagtgtataaaatgaaacactcattttggaaatctctttggcagctttttgttttttagagttaaacctacaccaatcttataatccagtgagttcactcttagttatatatccaggagaaatcaaagctatgccaatggaaaggctgtgtaagaatgtttatagtggctgggggcagtggctcacacctgtaatcccagcactttgggaggccgaggtgggtggatcacaaggtcaggagatcgagaccatcctggctaacacggtgaaatcccgtctctactaaaaatacaaaaaatgagccgggcgtggtggcgggcgcctgtagtcccagctactggggaggctgaggcaggagaatggcgtgaacccaggaggcagagcttgcagtgagacgagatcatgccacggcactccagcctgggcaacagagccagactctgtctcaaaaaaaaaaaaaaaaaaaaaaaaaagaatgtttatagcagctctgtacacaattcttcaaactggaaacaacccacgtatccattaacagtgaaatatactcagcaataaaaaaaaataaacatgcaatagtatggctgaatctcagaaacattatgttgggtgaaataatccaaacttataagagttcaaatgtatgagttcatttatatgaagttcaagatttggaaaggataatctatggtgatagaaatcagaatagtagttacctgtgtatgagggtgagaggggtttgaggggtgacagtatgaggaaacctggggtcatagaaatggagtatatcttgagttgttgcttatacaggtggatctacttgtcaaaacctatagaattgtactcttaagagctataattttaactataagtaacttatattttcagagagttggggtcttgctgtgtcacccaggctagagtacaggggcatgatcacagctcactgtagcctcgaactcctgggctcaaggaattc

SEQ ID NO: 198856 - DNA, 1000 bp, Homo Sapiens
gccaggagttcaagaccagcctggccaacatggtgaaaccccgtttctacaaaaaatacaaaaattagccggacatggtggtgcacacttataatcccagctactcaggcagctgaggcccgagaatcacttgaagccgggaggcggaggttgcagtgagccaagattgcaccactgtactccagcctgggtgatagagcaagcctctgtgtcaaaaaaaaaaaaagttcttcttgttataaaaaggtcactctgtaacagggataaggaagctgacagagtggtgtgagaaatgcccccattctgtagccacggaacttctcggagactgttctgcatgctattgtatacattcctctctttgtagccagttggaactcaatcgtaaaaattacacagggatcatttcattcttgaaagtctcttaatatggtggctcatgcctgtaatcccaatactttgggaggccgaggcaggcagatcacctgagattaggagttcaaaaccagcctggccaatatggtgatacttcatctccactaaaaatacagaattagccgggcatggtggtgcgcacctgtaatcccagctacctgagaggctgaggctggagaatcacttcaatgtgggaggtggaggttgcagtgagccgagatggcgacattgcactctagcctgggcaacaagagtgaaattccatctcaaaaaaaaaaaaaaaaacagttgtaagaaaattagcagggtttagattgccaactaaaacatcttacactgatgtaacagcagggagtaggagtattctcaactgtaaatgtggattcagttaaaccacactgccattttgcctataacggctaagctataggaagttagtatcaaaaggagagatgttattttatttaacttatgattactttatgaagagttgaaatcatttggagaaaggcatgaatggatactgaattatttgcttttaaaacgtttgggggctgttgaattc

SEQ ID NO: 198857 - DNA, 1000 bp, Homo Sapiens
tcagatggtgcatttcaatgatctccctgggtgaattgtgtagccaggaaagtttgagaagtcctggcctccaggatctcagagggaaatatttcttctcaccagcctatataattagttctctttagtccagtggagaataaataataagctaacattgtcaacatgtgtcatatttacaaaggacactattactgtatgcctaaaggagatatataaataatatctatctatacacacacatatagtctttttttttgtttttgagacagggtcttgtcctgtcgtacaggctggagtgtggtgctgcaatctctgctcattgcaacctctgcctctcgggctcaagcaatcatcctgcctcagcctcctgagtagctgggactacaggaacatgtcaccgtatctggctaatttttgtatttttagtagagatggggtttcatcatgttggccaggctggtctcgaattcctagcctcatgtgatccacccgcctcgacctcccaaagtgctgggattacaggtgtgagccactgcacccagcctacacatatagttttgatgatttacctttccaatacccccttagctcaatcccatttaaagatgagaaaactagacttagaagtacgcaagtatccaagaggagagctgagatgtaagcacaggtttttggagtccacagtgactgtatttcaaagtagcaatagaaagaaaggccagcatttatccagtgcttgctgtgtactaggccctatgccaaatgtcaaatgtgttatttaacatcatcttcttgacagttctaagcagaggaataccattgtccccgcttcacaaatgagaacactgaggagcagagaagtcaatgaacttccttaagaccacatagctgctaaaaaaaaaaaatgacctatctagaattatcacccaagccagtatgactctgagcctgagtttaacactacagcttaaagtcttcctgagaaatgtctgaattc

SEQ ID NO: 198858 - DNA, 1000 bp, Homo Sapiens
agcgaccttccccgattccaagcagctcggcaggctctgcagctgagctccagctcagcctggaacaggtgaaggaggctgcaggatgtggggtggagggctgccaagggccatggcagggagggaggcatccgggggctgactgagcttctgctgattctgggaaggccgtgattatgggggtaaataatgacgagagcaaattttctttttttccttttttaagagacagggtctcactctgtcacccaggctggagtgcagtcgtgcaattatagttcactgcagcctcaaacttctgggctcgggcgatcctcctgccccagcctcccgagtagctgggactacaggcacatgccaccacacccagctaattaaaaaagcaatttttttttaaagagatggggtctcactatactgcccaggctggccttgaactcctggcctcaagggatcactcccacctcggccttccaaagcgctgggattatgggtgtgagctactgcacctggccaagagagcaagttttttttaatatccagcgtgtctgttagctttctttgtttcagtagccagaaaatagaccactgagggcctctggcctgttagagtcagtttaccagactgggacagttgcactggaatttacggtcactattcatgctcattagtcacacctgaaactgtcagcctatccgagagtgggcttctataagaaaccttaagtaacctacttcccacttgggaagataaaacatgtctgtgaaaaattaaatgattggcataaacccaagattatgaagacctgtgagccacaggtgcttggaagaggaggcacagagttttgttaggtgtctagccaaccttttgtgcaccaagaattgagcagactgaatcagcactatgtcttatatgcttgtgggctactgtttttcaaatctttgcagacactgtttggagtaattaaatgcatcattattttgaagcatgactgaattc

SEQ ID NO: 198859 - DNA, 1000 bp, Homo Sapiens
taaggaaggaacatgcaaggagagagagaaaagcagagagaaatgcatcagaagcaaaatattaggtaccaatatagtttcagtattctttaaaagaatttgaaaatgtaaataaataaaagtaataaatataaatatcttcaaagcaagtatattggcagacttaagaataagttttatatattattagtaaatcctgttcacatttcataaagttatataaataatttgatataacagatgcattagaagaagacaaccataatattcttgctttccattccttacattcagtgaggttactgagtttattcatttattattaacacttacatatgatgggtgtaatggaaagaggaagtttggaattaaatagaaaataaaataagcaatattgattacaatttcgttgtatttagtaaatttataatgcatgcttgtgtttttaatattataatgtattttgtcttttactataacataataataatatttataggtaggaaagagctattacaatatttttggaatattggggagaaaaaaatatataatagtcgaaggaaatagaactctgttttccagctgcagttcatgttagtttcctagacattcaaatttatcatgtttaaaataaatatgtctaaaaaacaatttttaaagaagtttcaacttgaaaactgctgtgaaatgaccagctttttctagcatgtggagttcctgaataacaggtgatactcacattatctattttacacaattttagatcagatatttagacctagtacagacaaagaaaatacatcctcacatttacatgtaaagatattacatgtaaagatattacatgtaaagttcagacaaatgaaatctacttgcttgaagtatattctctgagctaagctctattttcttgaagcaaatacagttatacaattatattgttattcctagttagtggtcataaagagctacatttttattttatttgaaagaattc

SEQ ID NO: 198860 - DNA, 1000 bp, Homo Sapiens
tccgggtgactgagcttggaaacactcagccctcacctggctcctgagaggccctccggaagttcttgctgccacagtgataatgaccctcctgcgctctgtgcctgcagaggtggaagccaagggggacactgacaggctcacgcccgaggcgctgaaggggctggtcaacaagccagagctgctcgcgctgacagagagcctcacccccgaccacacagtggcgttctggatgcccgagtcagagatggaggtgatggaactcgagctgggggccggggtacggctgaagactcggggcgatggtcccttcctgggtgagcaatgcaaccctcactgtggcccactgttcctgtgtggcccatgggggctcttggcctcccttctgcctagagctcatgggagcaggcaagggctggcctccatggggacacgaccaagcccttgagatttactcctaaatccctgcacaagtgccctagggccattgggctcgacagcctggatccccgggtgccacccaatcccatggttcctgtgagcgactctcccaccataccttgggggtcccacccaggggctcattgaccacatctatgcctggagaaaacagtggtttaacccaggcctaggggaccccaccataatgggcccagccctcactatgtttctaccacagggacagaggacattcaatttcatctcttctttcagattcattggccaaacttgaggctggaacagtgaccaagtgtaatttcactggtgatggaaagacaggggcatcctggacagacaacatcatggcccaaaagtgttcgaagggggctgcagcggagatccgagagcagggggatggggcagaggacgaggagtgggtaggtacctggtgttggtgcagttgtatctcctggcaggagcatggtacatactggttgaggttgtgggtaggatgagaagacgacaggatgaatcttaccccccagctttagtggaattc

SEQ ID NO: 198861 - DNA, 1000 bp, Homo Sapiens
agtaatgatttttgttctcagatacacattatttcccatctcaaccactaatgtaatgaggacttcaatgaaattacctggtttgcatgaggataatgcaatgctgtggctgggagcccagttcaggaaacgcaaacatgccaaggactccatggtgcccagtgtacagactggcaggcacctcaggagtgatgattggaggcagaaaactgcatgccactccaaagagttcggctgcagacaggtcagcaagatttaacaccacgtgtctatgggtaagaccttcttggacaattgggctttcttttgaaattttagcctcacagaattaaatatttccaatattcagaatatactcatcacaatgaacactatttcccctgttttcacacactgatctcaaatagccagaactatgctcctatcaccatccttctcccattatctttctgatgacagaaaagaaagtagagttaatgtttttgtttgggtaatgccactttgtgctctgcctgattaatcatgggcacccatgcacgtgccacttccctgaatctctaacacattcagactgctcttctacagctaagggcatggagggaaaccctctacatggtccctgcgactgaatttccataccacgggcacaggccaacagaggtttcagacttggaatgaactaagctttctgctgtctttgaaagagacaatgtttcttccatgtaatcagaataataagtaagttaattttccacatgcttttttcccaagggcctcctgaagccctcatcctgtggcaagagaaatctctcactgctgtgtaactttagggtggtaggaaacatttaccaagcaagtacctagcacacaccaggcatctgacagtcatctctccacaacaattttatgaggcatgtattgttctcaatttatagatgagaaactgagacttaaagaagtaacttgccccatgttacacagatattaaggtgcagaattc

SEQ ID NO: 198862 - DNA, 1000 bp, Homo Sapiens
cccaagctgcctgtccctcctctgacctctgcccttactgtcctctttgcacagatgaggcccgagggaggggctgagagatctgccatgtgcacacgtcaggactagggcagagcaggtgggggtatctcccatgcgggggtgggagggggccccattctaggaaggagggcaaatgtctgataaactcaggaatgggtcttccctctttcccagcacagaccgggtttccctctgaccacctgtgctaggttccactgtctgctctctctcagggggccctggcctcggacggcccacctcttctgtgagtgctggtgccagaccgcccatccacctgtcgtggccctcagccccccgccttaccctgtaccccattggcttgccagaagggggcagccagttgaaatggatcttcctggacccagcggccttagcattggggttctgcggggcgcccaggtcgccgtgagggggtggctgtgatgacaacatctgactcgtgaagctccggtccagttcatctaacgggtcaggttggggccgggcaaccactcagatcccccttcgccaccagggggcgccagagacccacttcaacacccagggcgctctacccagcgcattcaactcagacctgcccacccgcgtctctggagacctggtggtgccccattgctgccacatagagcatcctgccaagcttggcggaggacccaggagggtctctggaggaacagaagcgggagggagttggtctgcccctttctcccttggcagctcagggaacattccacatgagaacatttgctccccgccccatctccacactgtaccctgagtatctccctcctctcccatcttcctggcaggctttctcccagttgggaggctgagggctgataggaactaactggcccactccttccttccacaagcatctgcatgttagttggaattgaggctgaagccaaagggccagggtctgatgggagaattc

SEQ ID NO: 198863 - DNA, 1000 bp, Homo Sapiens
tccaggaggcccgacctatctaaccacagagggcccgacccatctaaccacagagggcccgacccgtctaaccacagagggcccgatctatctaaccacagagggcccgatctatctaaccacagagggcccgatctatctaaccacacaagtccttcaaagtgaaaaagggaaccagaagagtaagtcagagagatgtgacatgagaagcacctgacccaccactgctggcttttaagacaaaagccgggggctatgagctaaggaatgtgtggagggctctagaaggtgggaatggccctcggctgacagccagcaagaaaatggggacctcgatcctgtaagtgcaagaatctgaattctgccaaagatccaaataagcaggaaatggattctcctcttgagtctctggaaagaagcacagcctgccgacatcctgattttgggccagtgattcctgtcctagacttccaacctacaaaactgtaaggcaatacatttgtgttgttttaagccattaagtttatggtaatttattatagcagcaaaagtaaactaacacagattttggcacctaaaagttaagaagcgtttaaaaaaaaaaaaaaactacctaaaagcatttaagaggtttttaaattgggcaatgggctaaggctggaagaattttgagaaacatgttagaaaaagctcagattgccttgaacaaactatttagtagaaatccgtacgttaaagactgtgccagtcatggctcggaaggaagtgagaagtaccacggagaaagacaagtgcattagagtttcgggaaatgaagaatggaaaaggcagctacagtacctgggaatccatttcaatcagatacaggaagaccacgtcttctctctccactttgatggctttatgtagcgggtactctgtcttggatttgatcattttgtataacaactgagcgctcatgctgctgaaatcctccttcctcaggtcgtcctgagaattc

SEQ ID NO: 198864 - DNA, 1000 bp, Homo Sapiens
gttttccaattaaaaataaaaatttttcagtttaatttatttgaaagcacagctaagattgagaaccattgcgttatatgacctgtaatgaaactcaatttatttttcaatcagctgaggcaaatactaatggggaatattttatttgtgaaggaaatgtgattcaatattcaaagaaatgaggttttaaaaaaattaaatgttttaaagcatgtgattttgctgtatcataaaggcatgaaacaaaatatataatacactaaaagcttaaattttatctcacaatgcccattcaaatgctaaatgaaggacttcaacaggagagaaataatgtatctgagtaaaatgactttaacagcctgaaacagaatttgcttcacaaaatcacgtaacccaagtagttcaattacgtatctaatggagagtgtttagaaatatgaagttttaccttaaaacatgaaaaattaagaggagttatgcatttaattttctatggagttgaggatcttcttaacaatgtgtaagttctgttttaacatccttatttcaacaatacaagaacctgataaatcgtttattcacatagacactttgaccactttaacacaaagaagagccatagtatattaatgtacctgacatgaagataaatgactgcaattagctttctcattagttttaactaacattacttctttagccatgactgatttatctccatttcacttctctaatacttcaggaaattgtctgttagacattaaaggcaggtaaagagagttaatttgaaaatccagacagcaactttcttttttcctttgggtttacttgtggctgacactcaagggagggtgcatacacacgtgcttttgtcattatgctataggaaaatgatcaatgatatgaaaagtgaacatttatgaaatgtagtcagagatatatgtcacatttaatgcgaggaaaaaaagctaaaagttttgaacgagtatctaaagaattc

SEQ ID NO: 198865 - DNA, 1000 bp, Homo Sapiens
aactagaaaggggttttttgaggaaaggaaaaaggaagtcgtaccaattcttatcctcttcagagcagacactcagaggacggacgtttctgggtggagcagcccctagactgttacagtgagggccacagatggacttctgaccacaggcctcacagacacccaaaggggattcagtgcagggccctgccccaagcaccagcatgggctccggccggtgagcgtgctgccccgctgtgcctgtggcatgttcctgcccagcattccccagtgagccatgaaatctggaggctgtatgagtgtctgtgcaacagtgtgcagttgattcttagaaaatgtgtgtttttccccatctgcccttatttcccctgaacctcccccattcctccgcattcacctgtcctcctgtgcccaaagcaggagataagagggggacacagggttaaaggaaggctgaggaggagctggtgaggaccgtggtgagcaccatgtgctgtcgctgggaagcaatgccctggaaggccacttgacgagcgagccagagtctatgagacaaaaggccccccccgagtccacctccagggctgtggtttacgagcacagaatccttctcaggaaggaagaggctggaatccaagaagagagttctggcaaaccagactgtagctctaaattattcataagcttggagcaataatgtaaaaccctcagccacctacttaatatcccatctcaagcccacatataaaaaaaaaattctgcttcctttcgtaagaggacatcaactctggatgccagagtgaagccaggaacactgtggactcccaacacacatccatctatgcaccaagtcgctttgatcctgaagttcatgttcagggtggctgtcctgatctatgctaaattgccccctacaagaggattctactgcaacggaactgtcaactgaactagattagcatttactttttcacctgcttttccagatacacctgaattc

SEQ ID NO: 198866 - DNA, 1000 bp, Homo Sapiens
atggatgtgccatccttaatataggaaaataatgctcctaaaacattttatgggaacaagtgctttaagttacatttttattggtactatcaaatttgtcttggcttagccactttattccaccttattcagaggcaatgacatgccagagtttaagagaaatttcaggtgcaaagccacagtactagctccgttaacgtaatgattgaatggactaaattgatcagttaccaatatagcattgagtaaattttttagcaaatatgagttagaacagggagcaaaaatctatatatttaagtttaaggagtaaaagaataagaaaagaaaaacagttacccacaccaacatttgttcagaactgtgatgcaattactacctgactactagaatgatggctgcatggaccacagaaagaagaaaggccactgatagaggactgaatcaaggtcttagatttcaattatatctcagtaatactgtcatgtatactgagtggagggcattggctagaaatgactactaggctaaagattaattgtaattcaaaaaattttccacagaattaacaaactatccaattttagctatgatttctaagacagtttccttctgtgacaccacattcaaagatccataaagcagccttttttggatttatttcacattcctctagcagatcccacagtgttcaaaggagccacagccagaattggcacagtggtttgcagtattttccttgtatctgaggagaaacaggttgtaaaggactaatcaaatgctgtccttgcaagagcaggggacggaaacgcggggaaggaaggcacttcctgccagtcttcactccccctccactggccctcatgcacctgcagtgacccccaaaccccagaggctgaaatcaacatggagagaatccaattaatatttgtgagtagacaaagtaaaatcttaataaaatataagagcaacctggattcgtgctttttagtggggaaaa

SEQ ID NO: 198867 - DNA, 1000 bp, Homo Sapiens
gaagataaggatgttagttatctcttgctatgtaataactttctccaacttgacagcttaaaacaaacaaactttttttatcatagtgattttatggtcaggaattcagaagtggcttggatgggtggttctggctcagggtctttcaagtctgaaaggattccttgccacattgatctcaccatagggtgcttgagtgtcctcacaatagctatttcctcccaaagcaaatgatacaagagaaaaggatagaagtttcaatgatttttatgacctagcttcagaagtcacactctgtcatttccacaataccttatttgttgcacaagtcagccctattcaatgtgaaaagaatcaacataggataccaagagacaaggatcactggaggccatctcaggggctggctacaacagtggaagagtcttagtcaagatgaaactcagggattgcaactccaaagggataccgcgatgatggctttgctgtttgctgatttagtgttctcgttttagaaacacaatctatcccatctcatctgcatctatccaatgagataaaataaataaacactgttcaatagtataaaatatgattgagactttttatgaggtactgtattaaaaacattttctactttaactttctgtacagtttcattattatttgcataaaattgaaaataatttaaatggttgaactttttggcatttcaattaagttcttctttgttaaagatactattgtctattgtgtaaatatcaagatatattaaccaaaaaattaaattatattttttctgaaagcaaaatcttttttaaaaatttaaggaaacaacaatttacattgtgtagcaattactatcggctgtaactgtacacttttggaataattatttcctcagatatttgtaccatgattgataaacaccccctggatttctcatgtgtttaaaatttgaaacatttcttgccagattcactataaacttgtaagaatt

SEQ ID NO: 198868 - DNA, 1000 bp, Homo Sapiens
agtaacaacttgaacatttaaacagtcctatgaattcctaaacaaataaactgaaaaacacacatatagagtagagaatttagaaataataaggaaaaactgagaaagaaatattatatataaaagaagagcatgagatagaaacatttacataaatattaacagtagctaggaaaataactattttcaaaaatctaatgatgaatttaatggtacactgatatgaataaaaatggagagctgtgaagcactgtcagcattttataatcaaacacatagagttggctatctcatcccttttcaccaaacgtattacatcccctgttaaaacatcagttattctaaaagtacccacagatgatagtgtaatttctgacttatcgggtgaaatctgctaatttatatcaccaaacacttcagacatatttacatcagtctttaacacagcaaagtccattatagcgtatactcttgatagaaacaatcattcttcgttaaaaatttccagagaacaaaaagaaggaattgttgaaacacatcaaaaaatttcaatatagacaatgcaaaaataagacctggtgacaaatcttaaaaagcatctggttcctccttcacataaatgacaactgcatatagttcatcacacttcagtgacaagcatgaaagtcgtcttcagcgatgtagaatgagagcatgccttgctaagtagagagggagcatttttagatttttcagtggttatagatttgacaaaacctttcacccatcttcccatttgctgtcctgatgaatatcagatgactagctgataaaacaaagtaatattcatgcaaaaatctatttttatttcaaatcttgcaaaagagaaatataaaaacgccctgcagtacagtcagctttctatttctgaacaacttacaattaaaccatgagcatgtgtgttatcaatagcttatggtaggaaagacatggaggataaatggggagagggtaattaaat

SEQ ID NO: 198869 - DNA, 1000 bp, Homo Sapiens
tatacatcttaaacacttacctgcttataaatttctagaattaatcttttcacactttttagtttgaagcgccagttctttttttaaaatctttttaaaatttttgttccttgagtttattaacttaaaacgaatgctactacaagcatttcttccatgccactaaactttagcccagacatacattttaacgcttgcataattttctgtcatatgaatatccttaaatgtatttaaccaatgatctttgttggaaatttagtttatctactatttttatgatcatgaataacactgtcatttgatgactttaagttgtcttaattctatattggttttttctttctttttttttcaacttgtattttaagttcaggggtacatgtgcagtatatgcaggtttgtttcacaggtaaacatgtgccgtagtggtttactccacagatcatcccattacccaggtattaagcccagcattcgttagctatccttcctgatgctctttcttccctcaccccaaccctgacaggtgtgttgttgttccccacaatgtgtccatgtgttctcatcgatcagctctcacttataagtgagaacatacagtgtttggttttctgttcctgggttactttgctgagaataatggtttccgactccatccatgtccctgcaaaggacaccatctcattcctttttatggctgcatagtattccatggtgtatacgtaccacattttctttatccagtctgtcattgatgggcatttaggttgattccatgactttgctattgtgaatagtgctgcagtgaacatatgtgtgcctatatctttataatagaatgatttatatttctttgggtgtatacccagtaatgggattactgggtcaaatggtatttctgcctctaggtctttgaggaattgtcacactgtcttccacaatggttgaactagtttacactccctccatcagtaaacaccaattcttatatctggca

SEQ ID NO: 198870 - DNA, 1000 bp, Homo Sapiens
tcttgggttatttcattaaatgatcaaaatgatccaatcaatacaatgtttaatattaaaatactgttaattgaatcttttaaattttgcattaaacgttaaaatgtttaaatattaaatatgtgttcatgactagcgcatctattaaacccaaattctttttcaattatcagaaaagcttaagatattcaattgactatagatattctttacatcacaactaataccgcaatgtgatgtttgttaaggtttcaaaatacatctgggttgagacatacttttgcattcacttaacatctattaaatgcttaccaatatgttaagtgctatggctttaataaaagaattttaaaaagttataacaattctaattatatatatgtatataaaaccaaatttcaaatcaatttttgagtattcaagccttctgaggcagatgtagtgagaaaagttaaaacaaaaataaaaaagcaaatgaacaaaacatagtgctaagaactgaataatacataaaatggtaaataagtatgatctacaagcacagatacacaaataaaatatattttcagagatgaccaaagtgcaacagtaacccaataaaagttttacattgaatgagtctttttgacactgccgcatcggtataatggaaaatggaatgaacatgaaaaagtatgcttttgagctcatgttgtttccattgcagatataaaaaggggattgacacaggctaaggaatataagatatgctagagaacactgctggaaaattctcaaagagactatcaagaacttttaaaatcacaaacaagttattttcaaatttaaccccttttcaggtatagtttccagcatgcatttctactatttttgtcctcattttaaaaggatatattttcattcctctattttagatcagaatcattaagtatcttctattttaatacctgaaataaaaatatgtggtcataggtgcaaattacacttccatatttgatat

SEQ ID NO: 198871 - DNA, 1000 bp, Homo Sapiens
ccacattcatggatgagaaaacttaatattcttaaaatgataatacttgccaattaatctacagattgaacacaattcttatcaaaatcccagttggcttttttacagaaactgtcaagctgatcctaaaattcatatggacatacaaaaagtccaaaatagctacatcgatcctgaaaaaaaaaaaagaaagaaaaaggggatgtatccttcccaacttcaaaatttatgacaaagctacaataattaagacattagtggtactggtataaggatgcacatatagatctaatggcacagaattgagagtacagaaataaaccgatacatttgtagctagttgatttttgataaggttgcccagacaagtcaatggaaggaagaatagttgtcatataagtattaatatatttttaaaaatctggtctttgtccctggttcctggcacagagtttcagaaattcttgaaattccctgagtgatagatgtgcctttgttatgctaatgaggtggcacagggttgttgccacagatagcctacaggatgggggaggttgtcaaaagaataaaaaatcccggccgggcgcggtggcttacgcctgtaatcccagcactttgggaggccgaggcggacggatcacgaggtcaggagatcaagaccatcctggctaacacggtgaaaccccgtgtctactaaaaatacaaaacatttagccgggcgtggtggcgggcggctgtagtcccagctactccggaggctggggcaggagaatggcgtgaacccgggaggcggggcttgcagtgagccgaggtcacgccaccgcactacagcctgggtgacagagcgcgactccgcctcggaaaaaaaaaataaaaaatcccatgtaattagagtgatggcgtttccagtcccctcctacctctggggaaagaagaagatctgaagattgagtttagtcacatggccaattatatgcttatgtaataaataccttgaata

SEQ ID NO: 198872 - DNA, 1000 bp, Homo Sapiens
ttgcagagagtctataaacggatgtgcaagtaggagagagatcgctaaattcttttcctagcaaggaatattaatagtaataccctgggaaaggaatgcattttttgaagcccttaataaaaacttgctcatctgagactcagggggcatcacggtcctactgatgtgtaatgtcacccgcagcagcccagctgtaaaattcctctttgtagtgtctctctttatttctcagctggctgacacttatggaaaacagaaagaacctacattgaaatattgggggcaggttccacctatatttctttcatagatttacttattttttgtttgtccccctctgtatcctagaaactcctggagggcagaggcatgcctgccatcttcatcattgcattaccaccacccaacactatcgggggacctgccctgataatcaggtaggttcttttctattttcctaagcgtcgactggcttgagaaataaaaggacagagtacaaaagagagaaattttaaagttgggtatccgggggagacaacacacattggtaggatccgtgatgccccacaagccacaaaaaccagcaagttttcattagggagtttcaaaaggggagagagtatatgaataggagtgggtgacagacatcaagtacttaacagggtaatagaatatcacaaggcaagtggagacagggtgagatcacaggaccacaggatggaagtgaaattaaaattgctaataaagttttggcaccattgtcattgataacatcttatgaggagacagggttttgagatcaacccgtctgaccaaagtttattaggcgggaattttctcttcctaataagcctgggagtgctgtgggagactggagtttatttcacctctgcaatctcgaccataagtgacaggtacgccccggggggccagttcagagacctacccctaggtgcgcattctctttctcagggacgttccatgctgagaaaaggaattc

SEQ ID NO: 198873 - DNA, 1000 bp, Homo Sapiens
cacttttccatatgaattttagaacaactttgtgagttccatgaaaaaatcctattgccattttgtttggaattttaatacatttatttattaattttgaagagtatctttatagtattgaatcttcctattaatagatctttgcatatggagggttttttttaagttcttcaataaaagtttacatttttttcatctagggaaagccataggattcctcatcatttttgttgatgaaataattggtatttttattacattctaagttactagttttattattgatttttatatatctattttgtatgtcacattctcttgttagtttatagatctgtttggattttccatatcggtaatcatatcccctgcaatattaacaatgtgttttttcctaatacgtaatatctttcatttcatttttctgtattattttgctagatagattctttggaggttaattgaagccattatggtgggcatccttttcctttcatcctaactttaatgaaaatgatcctgtattttgctgttggatatggagttttctataggctggtggtagttgtgagttatgttgatttgtttattgttttcgttgttgtttttagattaaagaagttctatttctagtttgctaagaggttgtagggatgtgtgtgtgtgtgaatgctttcacttgcatctgtatagatgatcatatgggttttttttaatctattggtgtggtaaattacattcatagattttcagttgataaaacattgattatgagattaacgcaaattcagcgtatttttttaattactggatttgaattgtaatgattttatttagaattttggcatatgtaacatttgtttctgttactgccctttgttgggtctggcatcaaaattataccagttttataaaataaggaatagtccctctttttctgttatccagaaccatttgaataaatgcatattggttgttccctaaatgtttgttagaattc

SEQ ID NO: 198874 - DNA, 1000 bp, Homo Sapiens
tcagttgtctttcaatttgctagagtatatctttgagtaatttttcaggaatggcaactttttactcctctgactaaaatatgcttatatagaaattacatcttttgcaaaataaaagctacctactagtcacttgtaatcattgctcatcttagttaatgagtattagttcatttgtacaaaacatatgaagaacctaatatgtgacagacaccattttgaaattaatcaacaaacatcaactaaaatagacaaagacccttgcccatcaagagcatatgttctagaagttgggagattctagatgttggggggaggggagaaacaacaaaaacaaacataagtaagcaagttatgaagaatgtgagaaagtaacaaatattatgtaaaaaaaagaattcagtggaggtggacgaagtttgaaattttaattagggggtaatgaggatagtctcattgagaaagtaacacttgagaaaaaacttgaagaaagggaggcagaaagccatagggttaactcatggaagagaatcccaggctgaggaaacagcacatgcaaaggccctgaggcaggcgtgctcccagcagagggaccgcaaggcagccagcatggctggaacagagtaggcaagtagtagggcagaggatgaggctagggaggtagtggggaggtggggaagagatagctctgtagatcatgtagggctctgttggctgttgaaaagacttggctcttcctccaggtgaaatagggagccatgcagagtgttgattaggggctgcaatggtctgacctatgtttttaaaggattacgcctgctgcagttttgaaaataaactgtagagaggcaagcatgaaaagattcagcccaagtctcttccttttattccctgcaaaaaggaagcaatttaacagtgtcattttgcatttatatatgtatttttgagtcttattaggaaaaaatgtaacagagcatatcaaagagaaatcattgaattc

SEQ ID NO: 198875 - DNA, 1000 bp, Homo Sapiens
ataagaggcttaaacgagcagtcaataacaaaaaagatagaaggaaaatccccaaatgcttggaaattttaaaacatacttctaaattacctatggttctcttataaaccccacaatacatttcctatttagctctaaactaaatcaatgatctcactttttaaataaagcaaaaggtcccaagtgacatccttggggcaaaattataggaagataaatttcagttcaattgaaataagagtatcataacaatcacagccatctgaagatggaatgtcctgtctctggaaatcgtaagtttcctataggtatgtacaaacatagttttggggggaaaagatcaaccaggaggtaagtcattgaattaaatgactttaacagtttcaaatgttagagtccattgtcttaccaaatattcatctataaatcctggattgcattagtgataaactcatgccattcatctttaaaaggtcagggtacaataatccttttattgataaaattatttatcagtaggctctcagctcagaaagacatttctcttattttaccatgttttataaactacatcggccgggaacagtggctcacgcctataatcccagcactttgggaggccaaggcaggcacatcacttgaggtcaggagtttgagaccagcctggccaacatggtgaaaccccgtctcaactaaaaatacaaaaattagccaggcatggtggcacatgcctgtaattccaactactcaggagactgaggcacaagaatcgcttgaacccaggaggtggaggttgcagtgagccaagatcgtgcccctgcactccagcctcagtgatagagcgaaactcaatttcaaaattaaaaaaaaaaaacaaaacataagaatatagccatttaaaataaaataaataaataaaaacaaaacaaaaagaatatagcctttacatggtactgattaaactggtcaattttcacctacagatattacactagaattc

SEQ ID NO: 198876 - DNA, 1000 bp, Homo Sapiens
cactgatagttagggtcagggaatatcaaaactaggtgcttattccttgcctccccagagctcatgcctttcagagatgacttgaatctccatggcagcaaggccaacatggtgtagatgctggaatagaaatgaatgaggaacgtgccagatggaaggacttgagagagcattctcccaccccctgccctccactcagcctttatcccattccctgtgatctgtggggaatttgaagtttccaggagcctagaaatggaacaggagatacagccagccccaaagaatcagcagctccagggatagcaaaggtgagactcaagtccaccatagagaaatcaccaggccttaaatgagatgtgcaaacaagtgaccctgctgtagacacattagcaagggctacagcatgagccctttccgaggagaaggccagagggacctcaggccccaacacctcaagaagcagatattcctctgctcccagggcctgtctggggaagagaggggaattaacaatccatacagccctccattttaagccagaaagctgagaacactttaattgttaagaacaaatattttccccatcagtagggtgggagagcacgaggtaaagtcagagaaaataattgaccgacttacggaaaataaaggaagactaggggaggagttagttcttatatttgtttttactgtgtgtactagcctgctcaggctgccgtaacagaataccacagacttttccaaggtggcttagaaaacagaattttatcttctcacagttatagaggctcaaaattccagatcaaaatgctgtcaggattggtttctgatgaggcctttctccttggtttggagatggcgccttctgtttgtgtcctcatgtggcttctctctatgtgcacagagagacagagagagctctggtgtcccttcctcatctcataaggacacctgtcctctcagattagagccctacccttatgaccccactgaattc

SEQ ID NO: 198877 - DNA, 1000 bp, Homo Sapiens
ctgtcatcattcagttaatttccttccctagcccaatcctgtcttccagtttcctgcgtctatttcccattctcctattgcagcctgcctcatcccctttcctaatccaccttttccttcacttccattcctcatttctcccttcattcccataaaatgccccatttctccagcaaatttatccccttctcccagactcttctggttcctacactccatccccaaatctccctatttatcagtccacccaggtctgtaatctccatgcaactcttctcccctttccctgcccctccccgatccatccttatccccgcccccatcccactttcccaattcccagctcagcgccactccgactcccatcccactccccacctcccctggcccaccccccaattccctccacaccccccaccttgccatctgctcctccgtcaggactcccctcgagccctttcaggccacccgcttccccttccattcctcctggggtctggcgctccatccctaggtcgccccctccccgtcgttccctcctcagcccttcctagcactacacacgcgcgcgcgcgcacacacacacacacacacacacacacatacacacacgcacacgcactttaccttcagtttgttccattctaaccccccggccgtgtcagtgcgatcacaggagagacacggaggcccggagtggggctggggtgcgggcagccgctggggccgcgcgaggaggaggcggaaccgagctaggccgcatgaaatccccgggctagattttccccgcgccggacgcctctgccatggcggccggcactgaggagggccacggccgggccgggccgggcgtgctgcgggaagaggaaggctcgggaggtgggatgggaaggggaggccgagggacgggggtcgccgcgccgccgctgctgccagagaggagcctgcggctggcagcccggcctgggtagcacggtcctcggcgctcggctcggaattc

SEQ ID NO: 198878 - DNA, 1000 bp, Homo Sapiens
ggggataatcagttacctttctgtactgcacttcttagtgctgtagaacaaatcatattgtgagcagtgagataatagagaaggaccataatagacatgagtgagcaaagttgtgagtaatttaaaactatgaagcagcagaaattaccgataaattgagaatggggttgaaaaagaagtcaagtagtaataggagaagcaagagacagaaagagaaacaggaagagagggtagcatagtgcttagccacgttaatgggagtctgcctgtgactaaaatccccagacttgtgctgttgaggtctagagcttcaagaaatacagaataactttttgttccagtttctttatgtatggtcatattgcaatttattttcttttctttttttgagatggcgtctcacccaggctagagagcagtggcacgatcttggctcactgcaatctccgcctcctgtgttcatgcaattctcctgcctcagcctcccaagtagctgggactacaggtgtgcaccaccatgcctggctaatttttgtgggttttttttcagcagagatggggttttgccatgttggctaggctagtttcgaacccctgacttcaggttatccacctccttggcctcccaaagtgctgggcatattgcaatttttattcttgaatatctggcaaagtatttgttgtaaggataactgtattgccacaacgatccttacaacaaacatgagttagcctgaatggaactctgtctcacaactaacataaaatagccttcttcatttcctacctcatccaatataaggatttcccttatagcatccctggaaaaaaatctatacactgtctatttaaagacccaaagattgggtgttttatattataagaatgctcatttcattttaaataattttatggagtcaatcttgaggccgttatcaacttatccagcccttccattgtttttaatattcatcttgagccattcattatccttgaattc

SEQ ID NO: 198879 - DNA, 1000 bp, Homo Sapiens
aatccatgaggttttaaaataacttcaacatattattttctttttactcattttcctgcgaaatcagttgctgtctgctgctttctaaagagagttatgaatccattgctatttcaatagcccaggagaggaactgctgtgggagggaggggatatagacagcacagtcccttcaggaggggaatttgtggaggaaggggctgtgattgggaagcctctgctttagccttgatgatagaaaactcttaatatatgagaaaatcttattaacatacttttaagactaaattcaccttttaggaaaaacagaatcttgcaacacacatccacaccccacacactccctttctgccaagtcctggcatttcctaagagcaccatcaacacccctcaccctacccttggggatccaggcagggatcgcctcctgacagggtgggggagggggacgctgatttttataactgcgatgtatgttgcaacattaaacaggataatatatgaaaccatctacatatttcatgattctgttttattctgaaactgtaaaaatcactttttaaaattaagatgaatggaaaataaagaagagcgccatcttgtggggatgtctgcggcaaccatagccatctcagatcttggcggtccatcaatctcccagaacccttacacatttctatgtcatatattagctgaaaaccttagggcagctgatcaaagacctttcttcagttttttcttttacctacgatgaataattctatgggcttttattttcataaatgactaaaagctacttcctaatgatctataaaatcagtcattgagatgtgctaaaattggcatttataataaaaatgcacattattagtttctttccataccctattttgtataagactcttgagtgacaagagtgacagcatctcagtcaatcaagtgatttgagcatagagtagagggagttaaatccaggtacataaacaaggaatgagaattc

SEQ ID NO: 198880 - DNA, 1000 bp, Homo Sapiens
cggaggctgtgggctgcggttggcgacgccgcagggctgactttcatccgggcgtcctgctggaggccagaccctaccccaacctcggggtcctcagtgcggggcgcgccttggggagggaagaggccccgccatcctaaggacgcgctgaggccacgcggggccgccgggatactgcgttgcccgggagacacctgacgtgacaggaacgccgccagtctcagtccgccgtgatcccacagttccccggtcccggaagtgccctggcctcccggaagtgccggagcggctgacagagcggctgacggagccgggctcaccaggtcgctgctgcgagggagttgctgtgctggggcctgggtggcggctggaggcctgagttgggctcgcggcgggggtcggcagggggccgggtggcggaatgatggaggaggaggaactggagttcgtggaggagctggaagccgtgctgcagctcacgcccgaggtgcagctggccatcgagcaggtaagcgttccgcccctcaggaggggaaacgggagtgcgggaggggagacggcagctccgggcgctggggaggccgcggcgggtggacggagggccgggggctcgcggcagaagggaaagtggaggtggggaggtggtgcgggtgagaagcggtttctgaatcagaaggaaaggaaagagaaccctttctaggctttgattgtctttggcgagggctgggggttctggtggttttggggaaaggaattgtgcgcttagagaggacgacgctaggagaatgcaggccttgggtgccatcctcagattctggggactgtgggggcttcatgcatttaccagactcgtgccaacgccccggttttgcaagctggcacctcgtgagtggcttggaactgggggaagggaatgactttaatttctgaagcggacggcagagaagagagaaagtgttgaaaaatgacatcgttaccattcttaaaaggttgagaattc

SEQ ID NO: 198881 - DNA, 1000 bp, Homo Sapiens
acgactttacaatctggtttctgttaatcaggaaggagaggaaggaggaaaaagaggagaaggagaaggatgaagaggaggagacacaagggtggaagaagaaaaaagaggaggacagatgaggagggggaagaggatgatggaggaggaggaaaagatgcttttggtttctgtgagctgtatatgatttctcacctggctattttgaaatattgaaaatggcactaagacccacccctgcctgctcctatctccacccagaatgaaccttcagagattttcagggttgagagcccaccatccccatgctagttctaaaggaagaactacttaattaggtcctgggtgaactggtcaagtcaccttcttagttttctgtttgtgaaatggggacaaccacttctacccatcataatttttgactcctgtcagctcatgttgaaaatggattcaccatggatgagtaacccagagtgtgccggagtgaagtgcctgtggtggggaaaggacagctgagtcatcctgggaagaacctgggccaagcaaaacctcagttttcttgacctgtaaaatgggaattctaggcttccttttctagctcttctcaagggtgtgtatatgacaagcatgtaactggcccaagacacggctgctactactggtagttgttactgtgatataaatagtatgaaatataatgggtcaatagttataatcttataataatataaaataattataatattaacgataattttttgtagagacagggtgttgttctgtctctacaaaactgcaggggtgtaatcacagctcactgcagccttgaactcctgggttcaagcgattgtccccactcagcctcctaagtagctaagaccacaggtgtgagcccccgtgcccagccaatgatgattattaataatagtagcatcaaattagtgctcctggtgggagggaactactcccagaacctgaactactcccagaacctgaattc

SEQ ID NO: 198882 - DNA, 1000 bp, Homo Sapiens
attcacacacacattctagtttgactcttacagcaatcatcctgtgaagtattattgttaatatcatgttaaatgatattaatattaatattaaaatattaaaatatgaggaaacagaggctcagtatcctgagaatttctttgcagttggtgatgctaaaggggtgtttatgaggtgattgctattccttgcatttctttaccatttctgccatgttttcttcttgatggcagagcccaagtcttatgttgacctctatccccagcatgaggcatagcaggtgggagactctcagtaattgttgatttgaatttaattttcacttgtatatgttagaagttatgtctagtaccactctagggaaatgtttaaaaattgcctatgattaagtctaccaaattgtaccctcattcttttatcgcagatcagatgcttacagagagagagggagagagactgggagaaagaaagaaagggaaagagagaaatctttgagaaaagaaagacatgggaaattgctaggtaacccaaccctgtctgaagaaataattgtttctttgtgccaccaccggagaaatgcaggactgttatgtgaggaacaattttgctttttgtgtatcaggtaaggcagaaaggagcggagtaaggttcaagacaaggaggaattagaaggggccaagcgattgaaatcaacaaagggaacagaccaagaaatatgagaaatggagaggaaggaaaggctgagtgggtgtaatgttgatagcatttaaaagggagtagggaatgcaaagtgacctgctgtgaaggagccctaagatatcatctgaattatttttcctgtgagatactttctcttgaaaagaattcttgtcatccaaccctaaacaccactacagtattttttgggtgtagttgcttttaacaagttacatagctttataccagtgagtctgatggctttattattgtttgcattcttcctttccgagagtaataaca

SEQ ID NO: 198883 - DNA, 1000 bp, Homo Sapiens
actgaaattccggtaatcaaaaatgtaaagcttgacgttattcaaggacagtaatttcttggcattgtcagctgcaatattgttcctgtgatcatcatagcacaggcagatgctaatttgtctaccttcctatatcatacataggaggaaattcccaccaaattattacactttcttccgctataatattaaaaaataaagtatatctatcaagactgtggatcctgaaaatgtagttgatggtgacgatgcagcttcattgaagcaatcccccagcaaccgcagctttgcacacttgactatttttagaagtggaattagaatggatgccttgaaatacatatttttattcttatattttcctgcacttgttccataatcacttgagaatatttctctataaacctttacttttaaatgtggcaatggaaaagtgaaaatagcttttaagataaaacaattgtctctgaattttcagctgcatctaaacttccatgatgcaagctaatttcatacgtcctccagtttaggatgacaggaagagctttaccacaggtaccttgtaagaaatatgtgcattctaatggcatattgcattggtgatttccccaacagattatagcaaacagactaatttctctttaagcaaccactggatcttaaaaagtcctgagatggaagctgcgccatcaaggtttgttcaagcacccactttataatatgtgaccactgccaatttatcttgtataggttcataacaaagcagttccaaaattgtatgcctgtcatgtagtatatctttagctgaagattttaagatttcactttggttagttaacacttgaaagtaaatactcagatactaacaacaaatctaaaggatcatgaggtcactgatcccatatgagcttagggatgccagaaatgtggatggattagatcagttttctaatctgaactcccaaaatatgaggcaaaactaaaggtgaatggagaattc

SEQ ID NO: 198884 - DNA, 1000 bp, Homo Sapiens
gtacttctctgacatctttgtggcaatgtatgcatggtctgttaatgggctatccattctgttcaattagtctttttatacattataacaaatcatctcatgtatttttctttaacatgtctttgctattcttagccctttatatttctgtgttaccttatcaaattccatctaaataaatacacataataaatacatacatgcatctcttaggatattcattggaaaggacatggattttgtcatcagacatggcttcaaattgtagctccattctgtgtaccggtagttcgaacttggacaagtcacttaacctcattgaattgctgataaggatgataagttttgcaattgctgataaggatgataatctctggctgttaggattaataaaataatgcatgagattactgagtatgatacctttctctcattatgcttttagtaaatgattcccattctttgtggtctctacttacatttgactggaatttaacttcctattagagttttcgtaaatacctttatataggtaaaggcagctaggactcttctgaaatgagattcagaatataggtatactgagaacagttcgaatgggagataaacactactaccttctatctccatttttggtattctaattctttggaattcatagtatttttttcctcaaattataatttttaaaaaacattatgttgttcatagtttatattaatatttcttaaactccctaactttagatctctagccaattctttttaaagttaattaaagcaggaattaaaattttttataatacttctcatgcataaatattaaataagaaaaaatgtacttgatgtttcaactttcccaccggttcaaagatctttgggatatgtaatccatggtctgtaagaataaatgtaaacttcagtgctatataaactatagtcactttttcatttgtagactttccatctttaataacattttattgtgtaaataaaagctt

SEQ ID NO: 198885 - DNA, 1000 bp, Homo Sapiens
atcaccaggctcagagccccaatgttctagtcacgtggttgatttttatagtgaccaccccccatcctgagtcatcttatcagcctgaactcatgtgtgatccaagggacccaccaggaataataaagacattcctatcactgggaatattccaaaagttcagtgggtacctcccagtaacccaggacaaagatctgccaaattctttattatacaacattgaataattaagtatggaagaactggtaaagcagggttgaagaaggaccaagaatgagggccactccaggaaatccagcagcagagactaggggattcgccttttcttttttttcttttttcttttttttgagacagagtctcactctgtcacctgggctggagtgcagtggcgcaatctcagctcactgccacctccgcctcccaggttcaagcgattctcctgcctcagcctcccgagtagctgggactacaggtgtgtgccagtgcgcccagctaatttttgtatttttagtagagacggggtttcaccgtgttggttggccaggatggtctcaatctcttgacctcattatctgcccacctcggcctcccaaagtgctgggattataggtgtgaaccaccgtgcctggggaattggccttttctaattagctactttcatatgacccagctttattcattttttatttctaagtgtctttgctcaagagtcagatatgacaagagaagaatcagattggcgtagtgtggattacagatttaaatagggtgttgatggtgggagtgtgtgtgtagggtttggagagagctgcaatttccagcccctacaggatcatatgaggttagaggagtggcagttctttaaaggaagggtggctgggtagttttgtagaatccttgagaaatagaattactgcttgcatatttgagccattggaaacaataacagtgtcatttttggagaagaatgatgggaggcactgacctaagggaattc

SEQ ID NO: 198886 - DNA, 1000 bp, Homo Sapiens
ctttttaactaaaagaaaatctgacttacctcaaaaggtatcttggtatgagagagaatgccaactacagccacgttagaaacgaacagttatgtctggcaaggaagtgatataccaagcttaaacccacagttccacttctgctttacagctcttatactttcctgttgctactaagctcctttactcacaaaattcctctcattagtcacctgcagtgtactgaagcagcacctgtactatttatagctctaggattcccccaccctctcctgtcaataagaatcacctggggcagttaaaaaaaaaatcacaagtcaaccccctgatattagatttcaaggtgtttgaaaggaggctccagaatccgatttttttttctaatcagctgaatttatgactcacagaatctgattttaagcaagtgttcccaagtgagtcttataagccagttaagttcaagaataatgctccaagtgaaagtgagatctgtggcagatcttcacagttcctctagcctcatcagcctcaagggctaatcctcctccggtgttaggcctcagggtatttgaaaacaagagaaggcccagtttgaagaatgcagaatggcatctcgtccacacttaagttttcaataccctaaaaaatttatcgaagggagattttagtttggggaggtgctgtgaagtaagacatcaccagggggcagcatagagttgacaaattatacatgttttgggatttttgacttcacactacaacatgaaatggttgcacctacaatttccattaactcggattactcagaaaaggacaaaacccagaacacttaagacacacgtaaactttattagcatgtaattttcaatacaatggctattatattataaatacataatataaatatttataaatataaatattttctacaatggctattatactataaatagccattgtagaaaaaaatgttcccttgaagtcgcatgaacccgaattc

SEQ ID NO: 198887 - DNA, 1000 bp, Homo Sapiens
ggtgggcagatcacttgatgtcaggagtttgagaccagcctggccaagatggtgaaaccccatctctcctaaaatacacaaattagctgggtgtggtggtgtgtgcctgtaatcccagctacgcagaaggctgaggtaggagaatcacttgaacctgggaggcagaggacgcagtgagctgagatcacaccactgcatttcagtctggatgacagagcgagattccatctcaaaaaaaaaaaaagaacaaagcttccaagaagtttgagattatgttaaatgaccaaatttaagaataattggtgtttctggggaagaagagaaatctaaaagtttggaaaacatatttgagagaataattgaggaaaactttcttggccttgctagggatctagacatccaaatacaaaaagctcaaagaactcctgggaaattcatcgcaaaaacatcaccacctaggcacatagtcatcaggttatctaaaatcaagatgaaggaaagaatcttaacagctgtgaggcaaaagtatcaggtaacctataaagaaaaacctatcagattaacacagatttcgcagcagaaaccctacaagctagaagggactgcaatcctatctttagcctccttaaacaaaataattatcagccaagaattttgtatgcaacaaaactaggcttcataaatgaagaaaagatatggtatttttcagacaaacaaatgctgaaagaattcgccactaccaagccagcactacgagcaccgctaaaaggagctctaaatcttgaaacaaatcctccaaatacacccaaatcgaatatccttaaagcataaatctcacaggacctataaaacaacaacacaatgaaaaaaaaaaaaggtattcaggcaatatatagaacgatgaatagaatagtacctcatatctcaatactaatgttgaaagtaatgggccgaaatgctccacttaaaagacagagaatggcagaatggataagaattc

SEQ ID NO: 198888 - DNA, 1000 bp, Homo Sapiens
tgtatttcccttgttgttctttttaccttctattcctcttgcctctccagctcatattagcattttatttattcatttatttttttgagacagggtctcactctgtctccctggctggcgtgcagtggcgcaatctcagctcactacagcctcgacctcccaccaatcctcccacctcagcctccagagtagttgggactacagatgtgcaccatacgccagctaatttttttttcttttttaaaaaatttcatcctggttgttctaatatttatttatttacctattttgtagagacagggtcttaccatgttgcccaggtctagaactcctgggctcaagtgatcctcctgccccggtctcccaaagtgctgggattacaagtgtgagccactgtgcccagcctcatatcagcttttcatatagtgagaaattgagatagttccttttcagtttgatccagatcaagatgttctgcaaaccaagggtcttaattcatgttatgctattgggttcaggggtgatgtccctgtctattataggttttatactaaaggctatatcttccttctaaagtacacttcctccagctattggcaggggctgtggagactattaatttggatctccattgccttattgatcaagtcacagttgataagccgattcgctatacagacaaaaataattccttgattgttccatcttctccccctgtcatagaagtggtctgatgtggccctcactgagacttagggcgaagccagatatttttacaggagtaatcatgaagaggacttaaggcctcctggcaggagccaggaaaacaaatctaccaaagaccagcagggtccatagagaagtgctgacaagtagggcaccacaaattaaatacaattgttaggtagaacaaaaacggacacctgtgaatgtcacgtcccatattcagacattgaaactctccaagcatatctcgtcccctaccccccaggtggaattc

SEQ ID NO: 198889 - DNA, 1000 bp, Homo Sapiens
ggcccagtacatggactatgaaatgcaaccagcctctgctggtgactttggactgataatctttaaatatctgttttaactattatttaactggggccatggaattgcttgtgtgatgggcagaattccaaggtggctccaatacgcttgcccccggtatcactgtgcttgttatgttagtttatgtggcaaaagagattttgcaggtataattatggttatttatcagtagaccatagaagagattatcagggtgggtctaatctaaccatattacaacttagagtgttctccagctggtcatgggaaaaaagtcagaaattcgaagcaaaagaaggatgtaaatgccactgtgggctttgaagatgagggaggcgaatgcaaggagcagagatcagcctttaggagctgtgagcaactccccactgagagcaaggaaggcagggacctcagtcctaccaatcataaggaaataaactctgccaacaacttgaatgagcttgtaagtggattcttccccagagccaagctttgattttaacctcctgagattctatctagagaaaccagtagagaccctctggacttctgacttacagactgtgagatagtaaatgagtattgttttaagatgctaagtctgtagtagtttgttatgcagcagtagaaaatgaatataaggccgggtgtggtggctcatacttgcaatcctggaactttgggaggccaagatgggcagattacctggggccagatgttcaagaccagcttgggcaacatggcaaaaccttgtctctacaaaaaaaaaaaaaaaaaaaaaaaagatactagccaggcatggtggcctgtagtctcagtctcagctactggggaggctgaggtgggaggatcacttgagcccaagaggtcgaggctgcagtgagccgagatcgtgccactgcactctagcctgggcaatagagcgagaccctgtgtcaaaaaaagacagtcagacaaaaag

SEQ ID NO: 198890 - DNA, 1000 bp, Homo Sapiens
cttctactggaaaagggtggcaggaccacagtttctcctaaaaatggcagtgacgtaacttaaacacagaaaacatgaaattatgctctttcagcataatagaaaaagtctgtggcttgtaacaaactgtaatatacagcctaagggtgaagagttcagacatgagccaacaatgcaaatcacactcgaatctggtctggatcctggtggtcagtcattaagtcacttgagtaattagcaacagtttattttttgaggctttcattagttggaccaaagatatgaataaagcattcctttcctcagggaagaaaaaaaaagggaagcaaggaagggaggaagggagggaaggaggaaggaaggaaggaaggcaagaaggaaggaaagcaagaaggagggaaagaaggaaggcaggcaagaaagaagggtccgggagggaagaaggaaggaaggaaaggaagaagggagggaggaaggaaaacacatttggagacaaaagtcgagtcaaatatttagtcaccaaaatatactggagagattgattggaagacaaatgttgtttttgagctacttgtgaagaccctttctttcttcctctccctctctccctctctctctgtctctctctctttgagacagggtctcgctctgtcccccaggctggatcatggctcactgcagtctccccatcctgggctcaagccatcttcccacctcagcctcccaagtagctgggactatagacaggtgccactacacctggctagtttttgtattttttatagaaacggggtctccctgtgttgcccagcttggtctcgaactcctgggctcaagtgatcctcctgcttcagcctcccagagtgctgagccaccgtgccccgcaaaccctttctgtttcaaataaaccttgccagtttcatttacttagagaagaaaaggagtgcactttaaattcatgttaaaaccaagtcagtgagatggagtgaaggtggaattc

SEQ ID NO: 198891 - DNA, 1000 bp, Homo Sapiens
aggcggctacttttccaaaagaaatctactactgacttaaaaaaaaaaaaaaggtggtttgttacaatatacaaatagctaaactttatatagccaccaccctcttctagcactgctctaagccttttcctgctctgaaagagctactgttacctccattgtagaaaaaacagatgccagaggttgttgtggaaggaccacggaaactatgaaatttacttgtaagtttcggacttaaaggttcttcctgctctgctccatacactgcaacattttagttaacatacctcttaaaatactggtcctttctgtatttggagagactcatattgcagtttgaagttttttctggcactaagcatttggtcataagctcatttgtgttttatgacaggtttaagtacctcttcagacattgttcagttaggaatgtaaatatgagcaaacaggtatctgaaatagataacctagaaaaaaatcacttatgagaaagtcaagaaaatgtaaactctgaatttgtggctattttcagaatgtattttttggtatttaatggcattatgagtatattcattttttaaaattccttgtcttctacagatacatataaggtaatttaaaaaatgatatgatatataggttttacttcaaaataattcagaggaagaaggaatgtatataaatgaagtgggaatacaaatggaacaaaacaggatgtggccaggtggcctctccttgggcagaggaggtgaggctcacctcacaaagatctttggagagagggaggcggggatctgagcacagtgggagcccccctcttccagcctgcccaccccgcctgagggctccactcaccaccatgcttgcctgcagccccaagctcctggggggctggggctcctggaccgggctcatcagcagggttctgggcagtggccaggaattttctgtgcccattgttgtagttgctataagccgcaacaccatctgctgcagctcc

SEQ ID NO: 198892 - DNA, 1000 bp, Homo Sapiens
catcactgtcctccaaagttggagcccagctcagacagctgcatagtattttatagagaaggtgtgttgttgaaatgttgattatgcaaattgaattgtgttttaagactactgggaaaaccatttaaaggaatcctgttgtaagtcattttgaaaaatggagaattacaccacctccccaaggattttctgttttggtaaatttcatgtggcaagattacttgaagaagggttccagtgttttgctagcttataatggttactgcataaggaaggtttactcgccagaggtccgcatacattggagaactgggggaatatgtaatacttgtgcagaaatgttttgattcatgtactcagaagatgggatctggatgacacctccagcctattgattcccaagtaaggtgtgatgacaccaccaccagcgaggtgtgctatgaggaatttttgttgatgatgaaaagtgaatgctaactgattgcacaccacgtgccccataccttacatagattatcttatttaattgttgctaataatagtactacagtctgtgaatgatttacttagcaattaattcaaaagcatattccactctacaatggaatattttttgagccaagaaatgaagtacgtggccgggcgcagtggcttgcgcctgtaatcccagcactttgggagaccaaggtgggtgggtcatttgaggtcaggagttcaagaccatcctgaccaacatggtgaaaccccatctctactaaaaatacaaaattagccgggcatggtgccacatgcctgtaatcccagctacttgggaggctgaggcaggagaattgcttgaacccaggaggcagaggttgcagtgagccgagatcgcacccttgcactccagcctgggcaacaagagcgaaactccatctaaaaaaaaaaaaaaaaaaaaggaatgaagtatgtgccacaacatgggtgaatcttgaaaacattgtgctgagttgaagaattc

SEQ ID NO: 198893 - DNA, 1000 bp, Homo Sapiens
tgtgccactgctgcacagtttcaaaagagaaactttctctcctgtaagcaaggcaatgtgcccttgagcaacagaatacataatcatcacagctggaattagaacaaatagtttagcatgctgataaaagcataattattgcatgaattgaccacttggatattttagctcttagaaagtcaaactttatgattgcttaactcctatgaatagcatcaaaatgaattcccaaaaataactaaatatatatatttactacttccaattaatcttatttgtttttcacccaaatactgtcttaggttatgttggggaactgagtagcatctagctaaagaaaaacaattaacatccaacactaagtgagtaatatttaattatgcttcattagaagtcatcaaaacaatattatagtaacaagtttagtctttaacagaactagaagagcaaagacaaagtttgaatatttttttaaaaaatacaacaaactacaataagtatagatggggaaagaacactaaagccaaaaggcaaggcaggaaaataagcctgatttaacatgacaaaccttatttagcaatattttttagaaactaagccccaactctctctggaccaagagtttgctttgtgataaatacatgacgcttaattttacaagacgcttgaagtgtagccaataccacttgtttaaaaaaaaaaaaccaaacactttattttgtcaaaacataatcaacaaccacgagagaaaaagttagaaataaactgagcgcttatcagaacgaggcactttacattatatgtatatgacataagccacaaaataaaattgaaaaggaatttattttatagaagaaataatgcagcaatgtgaagttgtgtaacttgcccagagtcccatagctagtaaatgttattgccatggttctagaccaaggcttcaagactcaggatggtatgatcaattaaataaccactcatctaaacatacacacacaaa

SEQ ID NO: 198894 - DNA, 1000 bp, Homo Sapiens
attttaagtatgaggatgggctcttcgagaagaaaattcagtttgcttgctttgcagttcatgtaggtaacctcgcccgctttttttttttaataagccatgctcttataacttattgatacctacaaaattgattttcgtaatccaacattttattttagcaattagagtgggaatgtacaattctttggagagtatgattccctttttcggttgggccacagacttaaaatgatgtttggcttagcatctcaaccaaaaattaagtcatagcagtgggggagaaaaacctcactaactacatgtattttattcctgaaacagctatagatttttggtacctttttttttttttctgagacagggtctcaccttgcccaggctgggtgtagggtgcagtggtgcgatcacagttcactgcagctttgacctcccaggctcaagtgatccacccatttcagcctcatgagtacctggactacaggtgtgtgccacatccagctaatttttaatttttttgtagagacagagtctgttttactcctggactcaagctgtcttcccaccttggcttcccaaagtgccaaaattataggcctgagccatcattcctggccctatttttggtactcttaacataagtagggtttttttttttttgagtcggagtctcgctctgtcgtcaggctggagtgcagtggtgcgatcgcagctcactgcaaactctgcctcctgtgttcaagtgattgtcctgcgtcagcctactacaggcacgcaccaccactcccagttaatttttgtatttttagtagagacagggtttcaccatgttggccaggatggtctcgatttcttgacctcgtgatccacccgccttggcctcccaaagtgctgggattacaggcatgagccaccgcgcctggccaagtaggggattttttaacattaattgtgaatatttgacatcaaaatatattggatcatatgtaatagtgaattc

SEQ ID NO: 198895 - DNA, 1000 bp, Homo Sapiens
tgagtagctgggactacaggtgtgtggcaccacaccggctaatttctgtattttctgtagagatggggtttcaccatgttgcccaggctggtcttaaactcctgggctcaagcaatcagcccacctcagcctcccaaaatgctgagattacgggtgtgagccactgtgcctaccctaattcttttttgtctggcttctttccatcaacattaggtttacgagattcatttatactggatataactacaaatccattcattttcattcctgtataatgttcttttatcttaatatatctcaacttcccaatcccttctacaactaatggacatgtaatgttttcattttggggctactatagataatgctgctatgaatattcttgtgcatctctcctggtacacatatcttttgggtggatacctacaggtagaactgcttatctttaactagaaaattgtattccaaagtagttgtattaatttatattctcatcagcatggtatgagagttcctgttgctctacttagcaaccctgtcagtctgtttaattttacctgttcaggtgagtgcactgatatcataatattgttttaatttacatttcactgattactagtgtcattgatcacttttttttttttttttgagacggagtctcgctctgttgcccaggctggaatgcaatggtgtaatctcagcccactgcaacctctgcctctggggttcaagcgattctcctgcctcagcctcccaagtagctgggactacatgcacccaccaccatgcccagttaatttttgtatttttagtagagacggagtttcaccatattggccaggctggtcttgaactcctgaccttgtgacccgtccgtctcatctcggcctctcaaagtgctgggattataggcatgagccaccgcacccagccaagttatcaattttaatgaagtgcaatttaatcttttctttatatgcgtaatgtcaggaatgaattc

SEQ ID NO: 198896 - DNA, 1000 bp, Homo Sapiens
aaaaaccaaaacaacaacaacaaaaaaacccctgctacccaatgagatgctcagcaactcatgatttattaaaaaacaagccaaaggccgggggcagtggctcacgcctgtaatcccagcactttgggaggccgaggcgggtggatcacgaggtcaggagattgagaccatcctggctaacatggtgaaatcccgtctctactaaaaatacaaaaaattagccaggcatggtggcggtcgcctgtagtcccagctacttgggaggttgaggcaggagaatcacttgagcctgggaggcagaggttgcagtgagccaagatcacgccactgcactccatcctgggcaacagagcgagactctgtctcaaaaaaaaaaaaaaaaaagccaaaaccactgagcccaactgtccgtcaacagatgaatgtgtaaacaagttgtagtatgtacttaaaatggtctattattcagccataaaaagaatgaagttttgatatatgcgattacatatatgaacctggaagacattcagtgaaataagccagatacaaaaagacaaatattgtatgatttcacttatatggaatatctaggataggcaaattcacagagaaagaaagtagattagaggttaccgaggctaggggcagggggaaatggggaattattacataatggttagagttgctgtttgagataattttaaagttttggaaatagataagtggtggtggttataccacactgttagtgtaattaatgccacagaattatatactttaaaatggcaaattgttttatatataatatatattttatttatatataaattatatataatttatattttatttatatataaattatatatattttatattttatatataaattatatatattttatatttatatttatttatatataaaatatatatattatatagaatatatatattatatagaatatatatattatatagaatatatatattctataga

SEQ ID NO: 198897 - DNA, 1000 bp, Homo Sapiens
aggggggagggatagcattgggagatatacctaatgctagatgacgagttagtgggtgcagcacaccagcatggcacatgtatacatatgtaactaacttgcacattgtgcacatgtaccctaaaacttaaagtataataataaaaaataaataaataaataaataaaaaagaaataaatttgagttgcaaataaaagtggatttagaaagcagaacttcatagaatggaatataaactttgtgttcacaaaagagttgaaacttaaaaaaaaaattcttaaaattatttgttcaaagagttctctggatcaggagccaccaaatgatccccgacagcacgctctgtagttgggcacctggatccaaaacctgcatctgtcgctcatcagcaatgtgatcctaggagtatgtattacttttccactgctgcatcacaattaccacagaacttggctgtttagaacaatatatatgtattatctctctgtttctgtaatgtaattgactccgctgttcatggtctcatcaggctaggatttcatctaaggctcaggcgccactttcaagttcactggttgttcacaactcagtttcttgcagttgtaagactggggccctctgctcttagagaccacctgccattccccgtcacataaccctccccacaggacggcagtttacttcttcaaggtcaaaatatgaggatttctcctgcttcaagtctccacttgggccctcttttagagtgctcacctgattgggtgaggcccaccagagataatctccttcttggctaactcaaagtcaactgattagggaccttaataatatctataaactcccattgcctttgccatataatgtaaccaatcacaagaatggcatccatgatgctcacaggtcccacctaaacttaagggaagggaatcatatggggtgtatatacctgaaggtgagaatcttggggaacatcttagaattccacctaccttggaattc

SEQ ID NO: 198898 - DNA, 1000 bp, Homo Sapiens
attgttgaaattcccttcccagggctctcagaaccagggttggctggaggggtgaaagaggctggccctgagcccagtaataggacaccaagggggagctaaaagctgggatctggggtgaagatggggtcttccaagctgggaggcagacaccaggccagagcaaccggcctgccccagctcaggcctcttaacccatgcagggcaagagtataaacagaggccacggaccacatgcctcagtatttaaacttataaatcaagctaacataacatgaaatcaaatatgttctatcctcctagcttgacaaatactttcataacgagatggaatgccaggttcagatttagaattttcacactccttaaagttccaagtcaaaatacagcattaggggagggcccccaacctcgaggtctcccctcccccattttctttcactcccagctctgtctcacaccacgagggatcttgggtgaatgcccctcgataccccagccccccacaaacagctgccctttccccccttggccaagggtaagcacagcagcagggcagtctgcccttggctggagagatggaaggagaggccacacgggccctgaaaatgcatttggggactcttgggcaggaaacttgggagtttctggagcctcaaggagggtctagtgggacagagccacttgggcccatgagatccttgacccatggagaagggtagggctagaggagggccagggcaggccctatgaacagaagaacctagagtaactgccctgtccccagatcctgtcaccgagcaggtatacttgggagggtattggagggtggaacccaagggagcttgcccaaggcactaggaaagaaaagtgtaaaccttgttagagaatgctaaggatagctgttaaagcctcagagattttactcatttttggctgtttctaaaaatcttcccccaaaggaagatcttgctctcattgaggatctgagaaagaattc

SEQ ID NO: 198899 - DNA, 1000 bp, Homo Sapiens
aataattttcaaatactgaaagaatatctcttcagttttgtaagctgttcacagtgtaatacctacagacatgaaacatttttaagttatacctgcagtattaatgctttctccatcactttcttaagcccagaaaatcaacagtaaacccagcccttgtttgtagcatttgtcgatttccatatgggaatatcccgccatggccaatttcaagcttttcacgtgacgtcactgaagacgggttggtaaaagaggggtccagtagccaccatgagatagtgcttcccctgtgtagatagaacagatgtgagtaaccctgaagcacagataatgacaaaatatagtgagatcatgaggaaggggcaatttgtgaatattcattacctttgtttttagtataatttattcaattgtaagcttctataatttaatgtttaataaagactgtgtttaacaaccagctcacaaaggttctgaaaatgttcacaatcagttccgttaagccagtgctggtcggctgcagcgcaccactgcatattgggaattgaacgggtagagggttgtctttctcttgggacaagcacactttaaggggagcgtattcattgcaggaccaaggctcaacgtgcactgctccccacccgtcccagctcctctttatgcttgcgggggccagccactctccagtcctccccaggaatatacgtcgcaaccaggcattcttttttcattggcctcattcttcccagggccggctcagaggccccccggtctaattgccattggtttaactgctgtttaataaatcaaactatttttctgactaaatcttgctaatcagtaaatagtgatcatctgaattctccatatgctaaaaagtcatttttccaaggggtaaaattaaagtaatatttggcataaaaaaattctaatacacaggcagacacctttatgtctaatatctcaactgtagaggttagataatcacagagtgctatac

SEQ ID NO: 198900 - DNA, 1000 bp, Homo Sapiens
aaatgtccaaaaatacaattccatctctgaaatctaggaaatctctgaatttcctaccaaaatactaaatttaaaactattcttgaaggtaacaaaacagtgagaaagcctattattgttactaattaaaacaacgtttaatgccatcttccacaggttagataaaaggaacattaagaacataacacagacaagagatagataccactacacaaacaggttctttaatggtggtatagacagtgtttcagtgagaaccaaaggtaccaacatttccattctgaagcaagagactcacatttttagtttctcttctgctgtcctgaattaactgttaaaagatatgttaaaacatgcaatttaacaagcaaaatttaaataccaatgggttgaaattcaaaaagtgcaggataatttcctctttaaattactttttctgtgtgcatcttctatattgcaagcaaaagcatgtcaacaatataaactatgcattgcattgttatataattttaaaatatatattagactaaagtgatctgaccttagcacagtatcccatattaatattcttctattcagtgtattgtttccagaagattatgttgtaccagagaacaaggcatgcaggcttagattaagaatcagaacagaccttgccatcagcctcagcagaagcagcgggggagggctcctgggaggcaggtgccaaagcacttggaactttagaagactaaaggcaaaaaatccaggggggaaaaaaaatcaaggatgcaaaaatgcattcaggaacattctataaatgaatttttcccttctgtaatgaaatcgtaaaataacatgaaagatgaaaataatcatgggagattgtttattctgccttatttccttcaccattgtcacctttgttaaaagtttccttcagatgaatacataagaaaaatccaaatccaaaagcttcatttttatttttggtatttaataagattcttttctggcaaag

SEQ ID NO: 198901 - DNA, 1000 bp, Homo Sapiens
cattagcataggggctgcgtggcacagaaattgaccagagccctttaatcacggtgtgtcaacccagccaccggaacagtgacaaagttccaggcatgtggacgatatccagatgcgtggactccagggagctgactccccaggttggagctcagcagaggaggcaagaatagggagttaggagtcagttccagggatccagacctggcctggtcacttccttgcagtgtgaccttagccatgttacaatctctctaagccttttttctcacttataaaaagaggcaactgaactagagaaactccttgcgggaccacatgttactgacttttcttttcttactgtgccatatgtagccgagggactcattaaagtttccttaaatgaaatcatgctacaagcaatttattaaacacacggttgttgagtacctgctatatactaggcaggtactaggctctggaatccaaagaatgagtagcacaggtctatgtcctccaggtgtttggcatgagaaaggtgttaagaattcacacgaggaagaaatagaaatgactaggtcagagcagatgggaaaaaattctctgaaaaggtgatggcttttaaactgattttaaaggaagggtagcagttagctagagaggagggccgttgtatgcgccaaggaaagaaaaaggaatgtttggtggtggttggacagtaggattttgggggtgaatgggggcatgagactggaaaggaagcttggggctgtatgataaagggccttgaattccagattcagacattcagaccttattgtgtagtttaaagccatcgatgtctcttcttttcacctcttcctctcccagactccctcacctagggcctatattcagaggtcgaagcctatggtgtcaaagtatggaaatggagctatacaacgctaacttttaaaatcccttagtaccacatcattgatctctagactgatgggttaacatagcaggtcctgaattc

SEQ ID NO: 198902 - DNA, 1000 bp, Homo Sapiens
agaacccatcctttacttattattttcctctgacatctattactgtctcataaaatacactttgggacatatcctattaaaatttttttttgaataatcaattttggaataaatgttttggaaatccaggaaaggtagagctgagctaatgaataatttaatgcttgcttcacttttgtcctggtatgatagattctgcgggagggaggtataatagagacataagcaatctaaaatgggtaatatagaagtccaaattctccttttgctgatggagttttaattacatctggtatctacaatgactcaagtataagaagattaagtgaatgttttaaaactatggtggtaaatgtaaaggtgaatagataccccttggaaggtttggattcgcaaattgattcacattcaccttgaatagcatatattttatacattatatgtctatatacttttgtttctttttaagaatcatagaggaaaagatttcatttcatatttgttttcaatagtccatgagaatttaatgtatataatttggtgataacatcagccctctgtaaagtatagtcagcatattatttaagcacaattgtagcaaataagattcaaccttaatatgttgttatctgtaaaagaattgtattaaatctaattaaaatgaaaaactctttccatgttaatgtagcagtcattctgaaccagttgtttttcagaatgatgcctttagagaagcaatctcagatttaacacaaaagcccaaagaaatggaagacacatttagcatacttcctaaaagaggagtcacatttcgcagtgttttagaagatagacaactgaatttaagatgttaatcagtgtggagtgcattaaaatcacaaggctgtcctctacgagactaactgtattaaagagaattcaactggccaagtagaatggctgatactttaaacctgtattgactcatatttgaaatagtaagacacttgaaattgaattc

SEQ ID NO: 198903 - DNA, 1000 bp, Homo Sapiens
atttgtcataggcacatagaccaaaggaatagaatagagaacccagaaataaactcaaatacttacagccaactgatcttcaacaaagcaaacaaaaacacagtggggaaaggacacccttttcaacaaatggtgctgggataattggctagccacatgtatgagaatgaaactggatcctcatctctcacctgatagaaaaatcaactcaagttggattaacgacttaaacctaaaacctgaaactataaaaattctagaagacaacattggaaaaacccttctcgacactggcttaggccaggatttcatgatcaaaaacccaaaaacaattgcaataaaaacaaagataaatagctgggacctaattaaactaaagagcttttgcacagcaaaaggaacagtcagcagagtaaacagacaacacacagagtgggagaaaatcttcacaatctatacatctgacagtggactaatatccagaatctccaaccaacccaaacaaatcagtaagaaaagaacaatcctgtcaaaaagtgggctaaggacatgaatagacaattctcaaaagaagatatacacacggccaacaaacatatgaaaaaatactcaacatcactaaagattagggaaatgcaaatcaaaaccacaatgcgataccaccttactcctgcaagaatggtcataatcaaagaatcaaaaatggtagatgttggcatggatgcagtgagcagaaaacacttctacactactggtgggaatgtaaactagtacagccactatggaaaacagtgtggagattccttaaagagctaaaagtagaaccaccatttgatccagcaatcccactactgggtatctactcagaggaaaagaagtcatattcgaaatagatacttgcacacacgtttatagcagcacatttcacaatcgcaaaatcgtggaaccaacccacatgcccatcaatcaacaattggataaagaaactgtggtatgtgtg

SEQ ID NO: 198904 - DNA, 1000 bp, Homo Sapiens
gaatgggtgctgctgattggttgaagatgaaagtatagatgtgtaaaaaataattctcatgagctgagtctacctctgggtggggacacaggaccagttgagtaatgagtcatgaatctgggtggggtcagtgtgaaaaatatctcaaaaaacccatcttagtttctataatagtgatattacctataggatcaattgggaaagacacaaaccttgtgatctctggccatgtaactccttagcagtacaggattacagaactacacctatcttgtgacctctgaccccactactcctgagtagtaagggattacagaaactacatctatcttttagcagaattcaggcacctcccataattctaatcttgtggactttcattaattttacaaaggtggcttcagcccctgaaccagggaggtgatttgttttggggaaggactattatcatccttacttcaaagttaaactataacttaaattcctcccaaagttaacttggcttacacccaggaataaacaaggacagcttggaggtgtgaacccaaaagtatccctgagacgagtctcaatttcgaaagtttattttgccaaggttaaagatgcacccatgacacagcctcaggagatcctgatgacatgtgccctaggtaatcaggatacagcttgcttttatacattgtagggagatataatacatctatcaatacatgtaagatgtacactgatttgatctagaagggcaaaacaacccaaagaggttgaggggcttccaggtcataggtagattttaattttttctgattggcaattggttgaaagaattattatcaatagaagggaatgtctgggttatgacaacaggttgtggaaaccaaagtttttatcacacagatgaagcctccaggtagcaggcttcaaagagaatagattgtaaatgttttttatcagacttaaggtctatgttgctgttaaatgttggttggcatttcctgaattc

SEQ ID NO: 198905 - DNA, 1000 bp, Homo Sapiens
ttttttttctatgttggggttactaggacaagaggaaatatatatatatacacatgcacacaaacacacacacacatacacacatatatatatataactttataaagtatcatgtaatattttttataatttatctttaattccaataactaggttacatagattctaaagttctgaatcctataggcaagtggttcaattattttatccatgtcgtctagatacctccttatttctaaatattatttcttaattttttcaatattagatgttgttattgattgtctcacagatgccatccctaatgacgtacataccttgcccatattctcccaatatacttatgtcatattttttggttcaataatttttttacatttacagctttatggctgtggaagtattgtttacaaccaatctatgagagcactgttactgtatttcctttttagtatgactccatcatttcttccctcagaattaaaaattgctgatacttgatttttaaaaaaaattcttagttatcaatatacctttcattaattttttttcctcaagtccaacaattaaaaaatttgtcatgatattaggtaattctgtgtttagattccttttctgctggatggcttagttttgctaagtcatttaccatttgtttattcaattctcatcttccaaaatgttgacatctctagtctactgtttcctcacctgttctctttgtcctttcttgtttcctttgtcctttcagtggggttttggaaataaatagagctaaatgtctcaatttttttctgccatgttaaactagatgtctatgttatacatttttatttcagcagggcatttatttgacatacttttgtgtattctggtaacatatagaaatgtgcggtgactgaaaagataattaagtagatttgtcattcctttaaccatcttcataaaagagaatgagttaatggatcattgccctcattgatgctaaacagtagaattc

SEQ ID NO: 198906 - DNA, 1000 bp, Homo Sapiens
cctgatttgtaaggtttctgctgagatgtctgctgctaggcatgttggagttccattatatgttatttgcttctttcctcttgctacttttagaatcctctccttaactttgatctttgaaaatttggttataatatatatggaggtagtcttatttgaattgaatctgattggtgacttttgatcttcttgtagctggatgtttacctttctccatgtttgaaaagttttttgttattatttctttaaataacttttctacctctttctctctctttaatccttcttgaacaccagtaactcatatatttccttttttaatgctatcccatcaatcctgtcaaagttctttattccttttcattattttttctttattcttccttgtatgtgtattttcaaataacctaacctgtctttgcattcaggttctttattttgatagatcaattctgctgttaatgctttctattgtatttatttattatatttttcagctctataatatgttttaatttttttattattttaatttttctgttaaattaatttttctgttaaatatctctaataaatttctaggttgttcctctgtttcttcttgaagtttactgaccttctttaaaatagaaatgttgaattctttgtcaggcagtacattcttctctgtcccttcagggttagtcactggcttcatatttttttcttgtgatatcatgtttccctgtttgttcttaattcttgtggtcatatgtcaccttctttaagtgtcttcaccttaaagaaataggtatttattatagtcttttcagtatggttttgtctgagaatgttcttcaacagtaaggttatcagaaattctaagcagaccgttataatttctaagcccaagattgctgcagtgttagtgggtgccctaagaccaggactaccacagtcaatgtagccaggattggagtaccctgaactccaggactgctgcagcaccttgtaggaattc

SEQ ID NO: 198907 - DNA, 1000 bp, Homo Sapiens
cctcttgagtaactgcctggctgatttttttaatttttttttttttttttatagaaacagtgtcttactaggttactcaggctgagctcaagcaatactcccaccacagcttcccaaagtgctggtaaagtgctgggattgcaggcatgagccactgtgtccagccacagagcacttgcagtgcagctagagactaaggaatggagcttttttttttttttttttttttttgagatggagtctcactctgtcgcccagggtggaatgcaatggtgcgatcttggctcactgcaacctccacttcctgggttcaagcgattctcctgcctcagcctcccaaatagctgggattacaggtgcatgccaccatgcccagctaatttttgtatttttagtggagaaggggtttcaccacattggccaagctggtctcaaacttctgacctcaagtgatccatccgccttggtctcctaaagtgctgggattaccagcgtgagccactgcacctggcctagtaatgaagcttttaattatatttaattaatttaagtggaaagagacacaggtggttatcatattggacaacacagctctaggctttgctcttcagggtcctgagcatatacatggaaggaagtatttttaagctgctggtgcagcagggctagggcaggctacagagccagatttttctgttccagtgcttatggatgtccacagagatgctggctgtcttgggttctgcttgtcttctctgagtctttggagattgctggcctctccttttgagggctgcccaacttcctgcagccccacaccctcacttctctgttctaaccaggaacagatggcagtcactgcctgttgtctccaatccacccaccctctcagaccagttctggcaagaagttcactgactgagcatccattttccagatacataagtcaggtgtcccctgtcacctctggccagtgttccaaacttcattgttagaattc

SEQ ID NO: 198908 - DNA, 1000 bp, Homo Sapiens
ggtatccttggctttctttactgcaaagggcctggattccttaatatgaacaggaaacaggctaacctaggtacaagagtttaaaaaaaagaaaaaaggccattaagaaacaaggggcggggtaagtgaaagtctaagtcagtacaagactaatatctatattagtttcttttttgtctgatatgtagatttgccgagggagaggttaaaatccggcgtcacatttatagaggaaaactggggtttccaccccttcttggccactcttccttttcttcccttttgtgagaggggatacatgcttgctgggcggtcgccagatccacctggatgccacctggtgtgagaaagctctcctgggatgcaccacacccggcgcagggaaagcctgtgctactggggtgcggagcaatttgctgtctctctgttgccagtgaggggtggtgcctactgggcaagagtgcgtcctcggagcgtggattcatagtgaaattgaccaagcaatgtgacagtgaattggccttactttactcagggttgccactgggggccatccctttggattgggtgccctgcctattacatttttctagaaaaattcaggttcaaaagtaaaaggcaccttaaagaaagagcaagtcagcaactgtcctcggaacctactgaggaaggactgactgactcccacccttggctttagtgagccaagaaccgggagtaggtgctaggacttacttgttctgcacagaccagaagaagctgtgtttccttccagcagggatgcctcccagaggcatttgtggcaagcacttcctccatgtcacgcactgggctcgacgctgccgagggtgctgacctgaggcacacagcccctgtccttagacgcttgcagtctagtgggagaaagaaggagtaaataggcctcggtggctagggttgagggggcattgcatagcagctccattatctgtcctcatcagcaaccctccgcgtagaattc

SEQ ID NO: 198909 - DNA, 1000 bp, Homo Sapiens
tgagcaccaggctctgctcaagtgctttccatatatgatcttgttagcccccgtgcaatccccccatcaggtagggagtgtcccgtcttacaagggcccacagaggttcggcaacgtgcccacggtcacagggctttgagaaatagagccacgactggaacccaggaaccccattggtgaccactcgatggcttcccaggatgagggtggggaagtgcttctcccagaggccggggcacttttccccctttgtccctggcaccgcctacaccagctgggctctgaggaccacgggcatgtgtccatgagtctatgttgggcacagtggcctcagcctctctctaaccccaccaccggccaggccagtctgtctaggtaagaccatcccctgaggagccgaaatgtccctggaggagcagaggtcctcttagacttgtgtcccctgaagccagttccctgggtctcccagactctggaccatagccgggacagacctcactcaccctgccagtcaaaacatgccaaagttgattgtggaacctcaaaacgccaggcggggactggcggctaccagggcactggagggctgttgaggaggaagggggtcaatagagagggatccccaaggcataggtgaggctctgcggctactgctctataacccccaaccctggggaggcctgggcagggggctgaggatgtgccaaaggcgtgccccacacaaggcgaggtcagggagagagagccccggggcctgcacggcaggaccacgcccagcgttgtcgccacgctctgggccctgggccagcccccccatggcgcaggtgggcaccggagcacttcccctggtgggcctcacactcactcaagttcagggtggggcctgggtcaggggggcggagccagaccaggggcagcagcacgaagcttgcggtgagcagcaggctcagcaggttgagtagcagcaggaagcggaggaaggtgaagtaggaccgaattc

SEQ ID NO: 198910 - DNA, 1000 bp, Homo Sapiens
tttttaatttgagacggggtttcgttcttgttgcccaggctggagtgcagtggcacggtcttggctcactgaaacctctgcctcccgggttcaagcgatcctcctgcctcagcctcccaagtagctgggattacaggtctgtaccaccaagcccagctaatttttttgtatttttagtaaagatggggtttcaccatgttgaccaggctggtctggaactcttgacctcaggtgatcagcccgccttagcctcccaaagtgctgggattacaggtaagagccactgcacccggccttttttttcttttttttttttaagacagagtctcactctgtcacccaggctggagtgcaatggcttgatctcagctcactgcaacctctgcctcctgggtgcaagctattctcctgtctcagcctcttgagtagctgggactacaggtgcccaccaccaagcctggataatttttggatttttaatgagatggggtttcactgtgttgaccagtctgatctcaaactcttgacctcaagtgatcctcctgcctcagcctgccaaagtgctgagattacaggcgtgagccaccatgccccaccaggggaagctgtttttgataaagattgttggtacctatggaaattaattgtcttggtgaaaattgttattttttcttgtttatggctaattcttcttttggggggacttttagatgaggaccttgagattgaattggttgaggaagagcctccattcctgagagggcacactaagcaaagcatggacatgagccccattaaaattgtcaaggtgagaattactggacctttaacctggaaatgtcaagtggacttctttttctaaagtaatgggtcaggttattagatctgcgtaagtagaacttgggccacagaaagtattactggctgttagccagggtctataatagttttattttaaatggaggttgggttggctttattgcttttgcctgttgaattc

SEQ ID NO: 198911 - DNA, 1000 bp, Homo Sapiens
tgcctttgtttaaaatactcctcaaaggtccacaatgatacccttgtgtttggttggcaggatgagacaggagcctatctgattgacagggaccccacctactttggtcctatcctcaactacctccgccacgggaaactcatcatcactaaggagttggcagaagaaggtaagcgcactgtttgcattggggattttcaaaatgcaagtagaatctttaaagttgttttacagatttcaattttgtttgacattttcatcaggcgcatgtgcaggtatagtttcaggtttatgaaacagagcagaaactaccagtcttgtctgagggagtcatgattaaggaagcctccttaggctttgttcagcttcctgggtgagaaggaagataggtagctccgctttgcagataacttcaggagttctttccgaatctccagaattgtcacgatcctttttttacatttgtttgtgtgctagcagtgagtgtctgtagtctgaagaagcaagacatctctgacattcaattatttatagttttaattttggtttgaactcacagttgtacaaaaataataaaggcttggcctcatttcttttaagactctggcctcatgcttccctgtaaatgtttgcagctgacctaattcattctctagttcattgtcaggtgtatcattacttgcctcatctttgtggtttgtagggcattgggactataagtgggtctagtccactttctacaaggcttggcatggtcccactgaaggcattcagttgtaaaggggactgtccctaaatccagggcaccctgatctgggagctttggctctgagtaagaaagcttgtaatggctgtactagttaatgaagtgactgtgaaacaactctgtttcagctagtagaaagaggaattgctctctctctctttttttaaatgtccctttttaaacaatatttcaaacgcatacagaagtaatgggaatagtacatacagtgaattc

SEQ ID NO: 198912 - DNA, 1000 bp, Homo Sapiens
tgcccaccaccatgcctggctaattttttgtatttttagtagagatggggtttcaccgtgttagccaggatggtctcaatctcctgacctcatgatctacctgccttggcctcccaaagtgttgggattacaggcatgagtcactgtgcccagccctgtgaaggtattttttgaggagatactaacgcttaaattagcagactttgagtaaagcagatgaccttccataatgtgagtggacttcatccaatcagctttaaaaaaaaaataaataaataaaggccgacctcccccgaggaagaaagaattctgccagcagactgcctttgaactcaaactgcaccttttccctaggtctccagccagcagtctgcagtgcaaattttggagttaatggcctccacaattatgtgacccaattgcttaaaatctctcttctcacatgtatatatacacatataaacatgtacacaaccctgccccctgcgacacacacacacacacacacacacacacacataagcatcttgttggttctgtttctttgaagaaccctgactagtacaggtggcatactatttgcaaaagattgtttggtggcaaaggaacagaaagtctcttaagctaatttaagtaaaggggatacttttaaaataaacacattttttgtttgtttttttttagaccaagatctcacactgtggccaaccctggagtgcagtggcacagtcatagccgctgcagcctcgaactcctggcctcaagcagtcctccaaccccagcatcccaaagtgctgggattataggcatgagccaccttgcctggcaagaaacacttttagtattcaatattaacctcaatcccaattcattacaacatcattcgtatctgaaatatttttcaaaataaaaatcctctatatgtccatacaggttttccccagcttctgagcgtcatcatttgttctcagccagtgagagttagagcaaagggatgatc

SEQ ID NO: 198913 - DNA, 1000 bp, Homo Sapiens
atgagattaatattgtgttctatttgaggcaggatgttttctcactgaaaataaaatagacaaacagataaataaataaataaatagaaataagcaaattatctctggtatcctgtcacctacttttgagtttcttgtcatgaagaagtattctcatgaaagttcttttccagctgtgatagccagcctaagactgtagggttcagatcactccaccctactcgagacagaaatactcataaaggagtttagtcattggcaatgtcttaacctattaagattccagagtattaagcatatacaggtttattgatgattatctccagaatacatttgtaagttgtttgtctaagtcagttttctggaatttagagtgcattagcccatataaattacaatataaataattctgagacaaaagtccattttactaaaaccaatgaatgcttacagattttcactaaatggcagaaaatgatagctgttataaaaatcaataagttgaatagagaaacaaccaacatgagtaaagtattttgaaattctttctttcttttttaacacagtcaaatcaggttcaataggagattaggagggccactagatgtttttgtgaagatgggaggtttcttaacatttctaatagtttccccattttcacttaagtcatttgtagcactacacttcatgcacttcacgcatcctaatgattactattgtgtttggagaaatcacaagtgaaacaaagaatttgcaacatcgagaaatggaaagagagtaaaaatggagctatgaccctaaggaaatatttcttgagtgcattctatactgcactagtcctacaagttgttccattatcagttaagtttgggaaaatgaataccagatcccctagttggatagtcacattgcatatgtgagcatttaagaagaaagaatgccccataataaatgagcttgtttaactttcaatttcttcaacatattagacagtgaattc

SEQ ID NO: 198914 - DNA, 1000 bp, Homo Sapiens
catgtaaatcatggttttggtggggcttagcagggagctgaaatttcaccccagccccatctctctcctgtctctcaccttatggaaacagcttatggaaacaagtagtagtgctctcattcttctacaggactgagtggggagctgatgtcccatccccaaccccaaccctccagcaaagcagtcagcactcctgttactgcagcagggtcccataggaggctgagtctccacctccactgggcagcaacaactctcagagtgagtatgagatagcaggggaggggatacagtcaccactatgcttggctcctccctagcccgataggtgtcactgggaccaagcgggaaactggtaatgagactgaatgaggcagtgcaaagcagggtgagtctgcacttgtcatcccctgcgcccccaaatctggcgtctaacaaggctgaatgagttaataggaagcaggagtagttggcacttcaccccctgtcctcccctctcctggtgtcaggaggaggcccattgtgaagccgggtttacactttcaatggaggcaatgctgtagtgctagtgttgtcccacttttgcaggaaggtgtcagcctgaccaaggtgggagatgaacttcactctgccaatatgcaggggcagctggagttagcactccacttttacagaagtggtgttatgggtgaggagatgagaggtggggcccagcaaagcagaatatgcacacccacctggcactctcattacacttcaacagttggactgcttgtaaaaaggaagatcaagtaaaatcaagacactcacaatataatagctaaagtatccaggatgcattcaaatatcacttgtcctaccaagaaccaggaaaatcacaacccaaatgagaaatgacaatctccagatgccaacactaagatgaatgctatgttggaattatctgacaaagattttaaagcagccatcatcaaatgtttcaacaaacaattatgaattc

SEQ ID NO: 198915 - DNA, 1000 bp, Homo Sapiens
cattaatccagatgaacattaaatgtggggttccctattcaaaagttctttgtttcccttaaataatccttgagggcaaatgggaggtgatacaatttgcaaaggtacaactcagagactgggactacacatgacagtagagagccatgcagacttgtcctctcaacaactgacttggagatgttaatgcttgagtttgatcagtggaaaattaatggcaacatctacaaattgtggaatgccatagttaaagccacaggaagacatatatttacttaaaacagagaatttccattttaatgcagtcttttcagaccaaggaaagtaaaacatttgaaactaacacatataaatgacttgtcttctaaataatatctgacaaaaaatgagttgatcatgtttcatcagagcaaaatcataaaggaatattcagtatggcacaattatagactccatccccaaactgaggagaccttttcttggcatgcattggaatagagtttaacctaagctataaaatccccttctacagggagcaaatcagactccttgaaattgatagaaaagtggagcatttgctaactctctccccacggacctctttaggcaatttgcagccagtgttacaagagcttagttgtgtaatgaccacactggggattgggattatgcgttgatctcagacacctggaatactggttccctccctaaaggaactggctagtggggagctatctactgccctggtgagagtcagctcatcacttcttcaatgacagatcaatttataaagtgtgtgctatttttaatctaatcaatatatcagaagactcactaaggcttcttaagtcagaatccactcaattggaattcatggttattcttttctccaggagctgagctgacctttgcactgtctatgaagaatgagtttcctaaactcatcatagcaacaagatataacgggggttattaagccactaaaactttttctgaattc

SEQ ID NO: 198916 - DNA, 1000 bp, Homo Sapiens
aatgataggccgattacattgaactacttccatcgtggaaggggcagcagtttatccttgggacagacagttatttccgatatggatttgactttcctgcatgcaattcttctaccaagactgccatctttgggctcacagaatgccttatccactgccatggtattccacacagcattgcttctgatgaaggaactcacttcccagccaaagaattgcagcagtgggctcatgctcatggaattcactggtcttaccgtattccctatcatcctgaagcagctggcttgatagaatggcggaatggccttttgaagttgcagttacaatgccaactaggtgacaatactttataggactgaagtcttctccagaaggctgtatatgctctgaatcagtgtctagtatatggtactgtttctcccatagccaggattcacagatccaggaatcaaggagtggaagtggaagtggcaccactcaccatcacccctagtgacccactagcaaaatgtttgcttcttgttccagtgacattatgttctgctgcctagagttcttagttccagagggagaaatgctgccaccaggagacataatacaaaagtggcttgaggagctactttaggcaactcaagcttcggagtcaacaggttaggaagtgagttacagtgttgcctggggcgatttacccagactgtcaagatgaaatcagactactactccacaatggaggaaaggaagaatgtctgcagtttaggagatcctttaggatgtctcttagtatcaccctgccctgtaattaaggtcaatgggaaactacagcaactcaatccaggcaggactacaaatggcctagacttcagaaatgaaggtttgggtcacgccactaggtaaaaaagccacaaccagctgaggtgcttccagatagcaaagggaatacagaatgggtagtagaagaaggtagttatggttagggacaagctgccccaggaccacc

SEQ ID NO: 198917 - DNA, 1000 bp, Homo Sapiens
acatgaataaagtttattttaaaacttttctaaagtatagtttatcccagatgataatattagcataatgatttataaacatgtattataccagtggaagtttatttaaaagtaaagtaagtcagtaataattaagcattatgctcaagaaaacaacagttgttgtaataatctcctgtccaacaatgaacattttttaatggcatttcaaatcttggggatttctcatgtaattcaaaacactccatcagaattttttataagtcaatttgttttaatttttcttatgtccaagtaaactgctttccacaggtaagaatgtgctgtgtcttgaagggttttcttgtgatttgggtgctttgttctccaatttgtcaagtatgttgtaggaattatagtactttttgcctgatataaccttgtaagttttcctagttcacataatttggaacatctttacttccacaactgctactgcttcttgtccccttccctttccctttcgctttcccctttccatttccctgccccttctttccctcttcctcatcttctttctcccattatttcagtggtgacaactgtgccagattattcaggtgtcgtttttgtaaaatgttagcatgcatattgctccttgtcacacctggttacttcgtccatgttggaaacttttcgagaaactgggatgagttgatcatgtattcttcaaggtaataaaatgctagttcaattttggtcattttactgcttacctaaatattataaataccttaaaagaaaggtatggaattgtgtctcatccaacaaaaccttccttttctcttttagtccttttaaaagtttataaaataagaaaattgagacatgtgtgctctcatgacaataaatgcatcctacctggatgttagttctgtacttgtgaaggagtcaactgctagaaaaaggggttatagtaggtaatggagacatggatgtacaagaagttagcctggaattc

SEQ ID NO: 198918 - DNA, 1000 bp, Homo Sapiens
taaagtatgaatcatacaattcatatttctcataaaagcagagattgcaatgtctacctttatgcaaagtaaggtcattttgctaataattataaaatcacattatgcttctttgactaacactatagttcatatttatattaggaaaaattattgttaaattcataaagtaggattatgtttacaatccccatgaattttttaagccttatgagttgacatacattataagcacaaaaagtactgacaaagtgagcattcttttttttattggtgaaataatagaattaaaccaaacataagaaaatcaagtaaattttcacttttcgtctctaatccagcaaatcttttatataaaatgtatcatcagctttaagaaaaagataaactgaacctgaaaacattaattcaggaactgtaaaattagcgaccctttacgtccaattataaatgagaatttaaaaatgtaaagcataataaattccagagtttacagattactagatcatgaagaaccgcttaaagccaaaaagagaaaactgcaaaccacccagaaatcctagactttgagctagatgaagtaaatgagtttgtttatatatcctctcctttgggagtatgtgggaagtaggggctttggagatatttggaaggccagagagttgaactgtagcagaaaatgcagtattttaccaaaatttgttctcctcttcttctactatagagtaggtttcggaatatgactagtcacctagagagtttatttctgagcctcccttgcagataaatatagccaattgattttgctcctatcagtagaatatgaatggagaataatctactacttccaagtctgagttccagactttgggcatgtattccactaggctctctcctccttcctgctagctagaatacggctacgaccacaactctgcttcaaccttgcagttaaggaagatactcacaggtaagtggagaaacaagatagaaagaattc

SEQ ID NO: 198919 - DNA, 1000 bp, Homo Sapiens
cctttctttttgtttaatatgtattattattattaagttgacttaaggattaatatcatgaaagttattgatggcttttataatgttaatgaaattctttgctgagactttaatttgttaaaaggttgcaattgtctgattacttacaccagaacaaactaaaacttaacattgccatgttttaattgccaaaactttttgtaataaatctaggcctgaaattagttatggtgtacagactctcctgaatccagtaggttgaaccgtattacaacaaactacttatcaacactcaaaactcttgctgttgtgaatgatatgataaatatataaatagaaggcatattctaactcatttatctaatgaattagcaattaaggtgttaacatcaatccaagagcaaaaagtaaatataaaagtaaaatgtgaagacagaaattacacatgaacatatgtataatcatataaatctccaatttattcctcctcttggatcctagcatttttacttttggtcatttgttttataggttgatttggaaattaaatacattttctaaaaaggtgaattagatgtcaagtttgcatataaaataaagaacaatttttataatggtcaatcaaaaaagtctctattctaaaacttttaatattctctccaaagataatataaaatagagtagagaacttttgtttgcattcaattatttaggtttctaaaacagctacataatgtattctcaattatacgagctagtatgttttagtgaaggagaaggggcacaacgaaggaccaactttacaggggcattcggttttttgttatataatagagttgaacttccaactctacattaaagttctgcagcttattacaaatcattttattttccttatccttaatggaagaggatgaagggttttatgaggcctaacatagcagtctctacaaattggcactttgagagtgcttttgaagggagagttaatacagaattc

SEQ ID NO: 198920 - DNA, 1000 bp, Homo Sapiens
gatattgattcttccaacccatgaatatggaatatcttttcctttttttggtgtgtcctcttcaatttcttgcatcaacgtttcgtcgttttcattgtagaaatctttcatttctttggttaagtttatttctaggtattttattttatttgtaggtattgtgaatgggaccgctttcttgatttctttttcagatagtttgctattggcatatggaaatgctactgatttttgtatgctgactttgtgtcctgcaactttactggatttgtcagttctaatagtttttttgtgtgttatctttagttttttccaaatataagatcatatcatctgaaaacatggataattttacttcttcctttccaatttggatgccgtttatttatttctctgtctgattgctctagctagtaattccagtactacgttgaatgacagtggtgaaactgagcatccttgtcttgttgctgatcttagaggaaaggcttgcaattttcccttatgcagtatgataccagctctgggtctgttatatatggctttcattatgttgatgtatgttccttctatatctagttttttagttttatttttatcatgaaggaatgttgaattttattaaatgcttttccagcatcaattgaaatcatcatatggtttttgtccttcattctgttgatatgatgtgtcacattgatttgcatatgttaaaccatccttgcatccctggaataaatcctactaggtcatgatgaataatctttctaatttattgttgatttcagtttgctagtattttgttgaggatttttgcatcagtgttaatcaggggtattggcctgtagttttcttttttcttttttttttgtgtctttggttttagtatcagggtaatactggcctcagagaatgagtctggaagtattctctcctcgatttttgagaatagtttgagtagggttagtattagttcttgtttaaatgtttggtagaattc

SEQ ID NO: 198921 - DNA, 1000 bp, Homo Sapiens
cctgccagctgcaggtgctgcgactccatgcttctcaatggtgctctaattcttaaagagttgcaggtttctgggaaagaatgactctctggtggaggagtttctgcacagttttttgttttatgagcctgtgtatttttgttgaggaatggccaagttgttctttcctttcgaattacacaatggcctattttgcagaaatctggccctacctactggtcaccaatggctttgagcagcacagaaatcaactggtcggctcggggcggtggctcacgcgtgtaatcccggcgctttgggaggtcgaggtaggcggatcacgaggtcaggagattgaaaccatcttggcccacatggtgaaaccccgtctatactaaaaaaaatacaaaagttagctgggtgtggtggcgcgcgcctgtaattccagctactctggagaattgcttgaacccaggaggcggagattgcagtgaccttagattgcgccactgcactccagcctgggcgacagagcgagactctgtctcaaaaaaaaaaaaaatcaactggtcatcatgccccggtctgatggtttagaatcagcattgacgcttttactttttgccttctaaaatcattcttttttttctttttcttttttgagatagagtctcgctctgtcacccaggctggagtgcaatggtgccatcttggctcactgtaacctctgcctcctgggttcaagcgattctcctgcctcagcctcccgagcaactgtgattacaggtgtgtgctaccatgctcagctaatttttgtatttctaatagacagggtgttaccatgttggccaggctggtcatgaactcccgacttcaggtgatgcaactgcctcggccttccagagtgctgggattacaggcgtgagccactgcgcccggctattctttttttcttttcttttttttgtacactcaagctgatgcaaattgtagatcttggcttcaatccatctgtgaattc

SEQ ID NO: 198922 - DNA, 1000 bp, Homo Sapiens
acaggactctgttcttttttttttttttttgagacagggtctcactccgttgcccaggctggaatgcagtgatgtgatctcggcttatcgcaacctctgccttccaggttcaagtgattctcatgcttcagcctcctgagtagctgggattacaggtgtgtcccaccacacccagctaattttttgtatttatagtagagacatggttttgccatgttggtcaggctggtcttgaactcctgacctcaactgatccgaccacctcagcctcccaaagtgctgggattacaggcatgagccaccggtctggactccattcttattctttttcttttttttctttttttttgagacagagtctcactcagccacccaggctggagtgtagtggtgcgatcttggctcactgcaacctccgtcttccaggtttaagcaattctcccgtctcagcctcctgagtagctgggattacaggcacctgccatcatgcccggctaatttttgtattttaatagagacagggtttcaccatgttggccaggctggtcttgaactcctgacctcaggtggtgatccgcccacctcggcctcccaaagtgttaggattacaggtgtgagagaccactcctggctcttattcttttctattgggttttcttttctttattaacccagtaatgtttcaaccttggtttggcaacttcattgggaaagggaagaacccagccctctgaagcgcaggtgagtagaggtcagtgccttcgatggtagacagggttatggtctcaagactgatcttgggcatacgagagaaaatgaagaaaggcgtgctgcagaggcccacaatggatggacacaaactttagatattatgaaaaagccatgattgattggatgtggagggagctgaggtgttaataaaaatgccaaggttctcagaaaaggtaactcaagcagtgatgacagaagcagaaattcagaggcattaaggaaagaattc

SEQ ID NO: 198923 - DNA, 1000 bp, Homo Sapiens
cacctcggcctcccaaagtgctgggcttacaggcgtgagtaccacacccagcctgttttagtttttcttggagaacctcgatttaggctgggcaaggtggctcatgcctgtaatcccagcactttcagaggctgagatgggcggatcacctgaggtcaggaatttgagaccagcctggttaacatggtgaaaccccatctctactaaaagtacaaaattagcctggtgtggtggcgcatgcctgtaatcccagctactctggaggctgaggcaggagaatcgcttgaaccccagaggcagaggttgcagtgagctgagattgtgccgctgcactccaacctgggcaacagggagactccacctcaaaataaataaataaataaaaatacaaaattagtctgggcgcagtggctcacacttgtaatgccagcactttgggaggccaaggcaggtggatcacctgaggtcaggagttcgagaccagcctgaccaacatggtgaaactccatctctactaaaaatacaaaaaataggccaggcatggtggcgtgcgcctgtaatctcagctactcaggagaacgaggcagaacaatcacttgaatctgggaggcagaggttgcagtgagccgagatggcaccactgcactccagcctgggctgcagagtgaaacttcgtctcaaaaaagaaaaaaaagttggcataaggcgaagcatgtccgtttgttcaagatggactctgaaacattgattttatttgggaaatgtgtttactgtcttttttgaatcccatctagtgtgttactgaaatttgttcagagtgaagtctcctttgacctttgaccctccccccatttcctggccagatgtctcaggattagcggggaggtggcatggtaatggaaacacttcaccctgagctttgtcctctgctatgctggctgagaaacttgcttgtatcttgctgattatcacgtagggctgaggcgtctggagagaattc

SEQ ID NO: 198924 - DNA, 1000 bp, Homo Sapiens
agaatctcaacagtagattccacagctcctgtcacccgtagccacccggaccagaccctgaaagcagcagctacactcctgcaagtgctgtccccggaaactagattttactgtcgctgttgccgctacccaccaccacaatggattctccatcactctcaatgctatgacttactaggaccagctcatgattcagtctaaaagaagcatacccatctgtaaaacttacgtgatatgcctgccctcaagccagataaggctagagaaagctagtattgggagtttttagttgattctataagaagaagcctggctgggcgcagtggctcacgcctgtaaacccagcactttgggaggccgaggcgggtggatcacgaggtcaagagttcgagaccagcctgaccaacatagtgaaaccctatctctactaaaaatacaaaaattagctaggcgtagtggcgcacacctgtaatcccagctatttgggaggctggggcaggagaatcgcttgaacccgggaggcagaggttgcagtgagccaagattgcaccactgcattccagcctgggcgacagggcgagactctgtctcaaaaaaaaaaaagaagcaggctctgcctcctacaagtctgaaaagatcgggaattttctaacacaggagagggaaaaaacgctggggagcccctcaaaagtgaagatggtgcacgtctaccgtaacatactggttaaagtgagaaatgtatgctaaccataaaacttttccagtcgtatgtttctatgacagaatttgtatgtaagatgtggacactaggcaaaaaagaaaataatttgtatgtttttcaaaaagcttatattgacacctggaattactaaatgcaaaactcaaaaaagactcagattatttagttcaacttggccattttatggataagaatacaaacgcccagaaagtgacatgaaaagcatataaccaagtaatagcagagccaaagtttgaattc

SEQ ID NO: 198925 - DNA, 1000 bp, Homo Sapiens
cagactactgacagaggttgctgtaacagtaccacattgcgtattagtgattctatatgctcagcagtctaagaccttatctaaaaaaatcaaaatccattttccacagaacacagtatagaggttttcttttaatatgtagtatgttggttcattatttttaaaaaatttttcaacggtttgccagtgaaaaatatgttaattttaaaccaagaaggaaaccatctgcaaattgtatacattaataaactcctatttcttaggactgaatagcacccaagcccaaatgctttaattcaaaaacatcttccaagtactagagaacaaatgagatatttaaataagatgacatagcagtgaagaatataggttcagaattaaaatctatgctcagtacattaggttataaatgtagatgatgacttaattttaaaacaatttatactcatttgatcttagccttaagcaaatttggagttttggttaaatggttgtaggttttggcttgaacaaaaacagacaagatctcacacacaatattaaatgaactaagtaatagcctacactttcattaaccacaaaaatctatacatgcaggcattaacctacatgagatctatcctaaatgaatacactaaacactttcctttttgcaaagcttatacttggaatccgcatgatccttcttatacaactactgaaacaaaagaccacctcaattccaagaatatcctttgacacaaaaaggcataaaaaaccctagtgaactggggttgaacatcccttactatgagttaatccacgatactcctccttcctaatggagtaaagcttcctctcaagtccactgagctgtggttatcaataatccactccttccttcaacaactacttgagctgtaagtcacaccagataaaagaacaaaggttcttttatcactctcttcccttactttccaagacacttgaggtgtcccctctaaataaagtaacagaattc

SEQ ID NO: 198926 - DNA, 1000 bp, Homo Sapiens
catttcagattaggttttcatgtacctaaagtacaaaaatgggaaaaactagtcattgctattaaaaggaggtgattttccttagggaatagagaaaaagagcatgagacatgcctctggaatactgggccccttcaggttttttatctgggcacaggtcatgtgggtgtgtccatttgtgaaaattcactgtgctgtacacatggaatgtgggcactcttctgcatttcatatttcaataacaagaagaaggtggtagaggaagaggagaaggggagggaggagaaagaaggggaagaggaagaagggaaagaggaagaggaggaggaagacaaagaggaggaggaagagaagaggaagaggagaaagaggaggagagggaggagggggaggaggagaaagaagaaaaaggaagaggaggaggaagagaaggagaaagcaatggtggcatgtgccaaggccaggaaatgagcaaagctctgcaacgtgtgaggagcaggaaagtgttccctatggctggtatacagtactcaaaggggagagtgtcgggagatgaggctggagtggtgaggggaagctgcattgggaatggtcaaggggtttaaacttgaccttgagggcaacagaatgctattaagggctttcacacaaaagggcaacatgttctcatttgtgtttcagaaggatctccaagggtgtggggctggaatgaagtggagggggctggagtgaggacaagaagacaagttagagaccaatacagactctgggcaggacatgagtggcctggattaagacagtggtagtgggaattggagcggttactagagtcaagagaaggtgaggaggcaggacctgtgggacatggtgactgagtggagactgggggaggatgagaaaagtcaaggtttctcaggttctggcctgagtgactgttggtgctgttaattccctgacatgggggacacttggttaggggtcagcttagagaaaagataat

SEQ ID NO: 198927 - DNA, 1000 bp, Homo Sapiens
gagagtcagaaaactaaggacctccctgccacttaactctggcatccactggctatgtgaccttgagctagttacacaaattccctgagtctcaacttcctcaactgtaaaatggtggaggcgaggagggaaattggactaactcagtatcttccaacacgtggtactcacatcaactggcaacatgccagatgaatctggttaggggttgcaaactttttcttaaagggccaggtattttaggattagcaggccaaaaggcaaaatcaaggatatgatgtaaatatttatataaccacttaaaatgtaaccacttaaaaatgtaaagttttttttattttttatttttttttttttatttttttgtgagacatagtcttgctctgtcgcccaggctggagtgcagtggcacaatctcggttcactgcaacctctgcctcccaggttcaagcgattctcctgtctcactctcccgagtagctgggattgcaggcatgcaccaacacacccagctaatgtttgtatttttagtagagacgggggtttcaccatgttgaccaggctggtcttgaactcctgacctcaggtgacccacccgcctcggcctcccaaagtgctgggattacaggtgtaaaccactgcgcccagcagtaaaattatttttaactgcaggctttacaaaaataggtgagggactgcattttgcctataggatgtagtttgctaacccctgatttaggtggcgcatgaaccatttttattcaaatgcttaaatatttatttttatgtatgtttaaaaaatcctgactttccatttatattgctaatataaagttttccttttaattagcatatttatgttaaaacaaaaagggagttgatgatttttttaagtattttaagtaaataatagtgctcgtagtatatggattgagtgaaattatcacagtcgtaggcaaatgactgaagtttaggaaacactggactagatgaagaattc

SEQ ID NO: 198928 - DNA, 1000 bp, Homo Sapiens
atggcgtgggttccaggggacggtgcctcatcctccagtctctgtctctgccttcccatggccacctccatgtgactgtgttcaaattccccacctcgtataaggacccttgtcactgcgattaaggaccccctactccagggtggcctcatcttaactcattatatctgcaaagaccctatttctagaaaaattgcagtcacaggtactgggagtcaggacttgaacctgtcttttgtggggacacaattcacccataatagatggtcacccgctcagctggctgctgtgattttggggggctggacgagcaggccttctgtctaggaaatcaaacctttcttgtataatgggaataaactaattaaaatgcacacaaagatctcgttcacattagcaaaaagaactctctccagatatctaggagaaaacccaggaaaacacgtgtgagctctttacggggaagacgggaaggcctgagagacgtgtgtgcgtggagagggtgtcgggtccacagaggggaagacccagtgcgtgtgcacgttggccccatgaatccgcagcttcatgcagtggtaggtcagtttcatggtggcaagattcaccttcagacgccacaaggtcctggggaagaagaggtcctgtctcccgacaagggcgggaagcagtcccaggagccaccagaggccttgtcttgctgctgactggcagaaatggccaggttggccacgcctgactcagaccaggctcgccccagggctgggtgggagtcagtgtccctgagcagtgagccctgagcagcactgtgggtctcaaagcatggaaggagtgggtgctggagaggcaagccagccagcccacgcctgggagcccacccaggggacagccacaggtagctgcaaataatcttgtccgggtggagacccaggcattcccacatggccacggggaagagtgggggttgggaggccatggtgagagggagggacacgtgaggatc

SEQ ID NO: 198929 - DNA, 1000 bp, Homo Sapiens
tctaggatctggttatttgaaaagatcaacaaaataaatagaccactagccatactaataaagaataaaagagagaagaatcaaatagacataataaaaaatgataaaagggatatcaccaccaatccaacagaaatacaaactaccatcagagaatactataaacacctctacataaataaactagaaaatctagaagaaatggatacattcctggacacatacaccctcccaagactaaaccaggaagaaattgaatccctgaatagaccaacaacaagttctgaaatcaaggcagtaattaataggctaccaccaacaacaacaaaaagtccagggccaggcagattcacagccgaattctaccagaggtacaaagaggagctactaccattccttctgaaactattccaaacaattggaaaagagggaatccttcctaacttatgttatgaggccaatatcatccggatatcaaaaccaggcagagattcaacaaaaaaggaaaatgttaggccaatatccctcatgtacatcgatgtgaaaatcctcgataaaatactggcaaactgaatccagcagcacatcaaaaagcttatgcaccatgatcaagtcagctgcatcctgggatgcaaggctggttcaacatatgcaaatcaataaatgtaatccatcacataaacaggtccaatggcaaaaaccatatgattatctcaatagatgcagaaaaggcattcgacaaaattaaacagtccttcatgctaaaaactctcaataaactaggtattgatggaacagatctcaaaataataagagctgtttatgacaaacctgcaggcaatatcatgggcaaaaactggaagcattccctttgaaaactggcacaagataaggatgccctctctcaccacttgtattcaacatagtattggaagttctggccagggcaatcaggcaagagaaagaaataaagggtattcaagtgagaaaagaggaattc

SEQ ID NO: 198930 - DNA, 1000 bp, Homo Sapiens
ccttttccaatctaattctcaagatatgctaatatcccctttatcatcggttttccataaaattacacgttttgaaattcaatacaaagctatttgcatttttatcttgtacctccttctaggaaaatgccttcaaaaaagtattgcattaacaggatgagctctgcggtcaggcaaacttgccttatactcctggctctgctgtgtgagtgattgtgactgggagaagattacttcagatccctcatctggaaaatggggataacggtaccaacttataaggtgattgtgatgattagcatagtgcctcaccacacagtaagtaatctagtaggttaattattactgtaattagcactagtaatagttctatttgttctaaatttacctgtttcaaagtgaaaaatgttgcttctagttccagaagactaaatttgataactagattaggccaatactaaaaagtattaaaaataaacaagagctacaataacctccaaagtaaagactgcagtggctgaaaatcattgtggaaatgtttcctaataatatattttgttagtgaaaaacaagcaccaagggctgggcacagtggctcacatctgtaaactcagtgttttgtggggccgaggcaggaggatggcttgaggccaggagtttgagaccagcctaggtagcatagccagaccctgtctcttaaaaaaaaaaaaaaaagaaaaaaagtatttttttaattagtcaggtgtggtggcatatgcctgtagtcccagctagttgggaggctgaggcagaaggatcatttgagcctggaggtcaaggctgcagtaagctaggatgatgccactgcatgccagcttggatgacagagcaagactttgtctcaaaaaaaaaaaaaccaccaaaaatacattagtcaatatatataacaatggtaactatggaaaactcttatgaaaactggttaattcttggaatttcaaatatcagaagctgagaattc

SEQ ID NO: 198931 - DNA, 1000 bp, Homo Sapiens
tgacctccagcaaactccaacagaccttcagctgagggacctgactcttagaaggaaaactaacaaacagaaaggaataacatcaacatcaacaaaaaggacatccacaccaaaaccccatctgtaggtcaccagcctcaaagaccaaaggtagataaaaccacgaagatggggagaaaccagagcagaatagtggaatttactggaaaccagtgcacctcttctcttccagaggatagcagcttctcaccagcaatggaacaaagctggacggagaatgattttgatgagctgacagaagtaggcttcagaaggttggtaataaacttctctgagctaaaggaggatgttcgaacccttcataaagaagctaaaaaccttgaaaaaagattacatgaaaggaaaactagaacaaacagtgtaaagaagatgataaacaacctgatggagctgaaaaccatggcacgagaactacatgatgcatgcacaagcttcaatagctgatttgatcaagtggaagaaaggatatcagtgattgaagatcacattaatgaaataaagtgagaggagaagtttagagaaaaaagagtgaaaggaaatgaacgaagcctccaaaaaacagggactacgtgaaaagaccaaaatctatgtttgattggtatacctgaaagtgacagggagaatggaaccaagtaggaaaacactcttcaggatattatccaggagaacttccccaacctagcaaggcaggccaacatttaaattcgagaaatacagagaacaacacaaagataatcctcgagaacagcaaccccaatacacatacttgtcagatgctccaaggttgaaatgaaggaaaaaagttaagggcagccagagataaaggtctggttacccacaaagggaagcccatcagactaacagcagatctctcggcagaaactctacaagccagaagagagtaggggccaatattcaacattcttcaagaaaagaattc

SEQ ID NO: 198932 - DNA, 1000 bp, Homo Sapiens
tggcctcaggcaagtaacccaaagtcctcaaacctgtctagccggggtaagaatgacatctacctctcagggttattgtacagtttataaggcaatattgaatggtcattgtttcaaatgattcatgaggacctgtgttccttgtactagtctttctgtttttgtgtgtgcttgggtatttccacaataaaaatcttttcataaaatatatggtctataaagcacctagcacatagtagagaatacccttctccccttactttccctctgtaccaatcttcactctcttcctcctcctcagagtgcatctggtattcattcctgcccttcagttaagtgtgtcacagacagggagtattcgaaggctcactgggagccaacaacgtctgcctccaccctcagctacttcttgttgaggctcccaggggagatccagcaatgtgaatgccatcaggcaaaggaggccttgtttcctgagcctcaaagtccagaccccagggtaggcaccccgtgagctcagccccactgtaggatctatagggctcctttgtccaaggtgagagaccctgattttttctttggattcatatcctaattttgcatttgtagatactttgattcttgtaatgagaaaaagtaaatggaagggaaagaggtaacatttcctcagagcctaagacagagctagtctcaactactcactccaggatgccacagagatgtcccctctccctcaaaaggggaaggtgcctggctcttattagggaccaggcctcttaagggagaagccagaaaatggcccagcgtgggagccacaaagaggaaaacagagaactcttcaaaaggtttagtctcccctttcctcactcctcttcgttatggtccaagaaattcttgactccctcttcctgggaagaagcagaacacaagctgtgggagtggggtggggggatgcaggggagaagagggaattgggggtgttggatagaggcatgaattc

SEQ ID NO: 198933 - DNA, 1000 bp, Homo Sapiens
taaaataaaataaaataaaataaaataaaataaaagagggaaggattacggaattgtatatgctgtggttaaggagatctagtctgaccgtggtactgacctgaccctcccaaggtcacagggccagttaagagcagagcagggacagaggccagggctaactcccaggccactcctcagcaggagcacagccgtcccaatggcctggggctcctaggggagagccactaaagacgtaaacccaaaccaggcttgctccaggaagaagggtcaggtcaaagctgctcctaaccccacgcttccattcgggccacaagagagcacttagccactccccaattgtgtccggagtcctcctgtacagccgagccctttaactgtttagagaagcctgtctctggaacccaggccctggcaagcaccagatcctcaaaagtgaacccctagtccagagctgacgaaattttcccggctcaactggacctcaggatcagatgatgaaactgctcggatggcgactttgtcccactgccctcacccaccaagagggggcagcctgaacccgaccacctaacttggtcattaaggaccaaaaatagccagaaagccatcctcgtgggcaagccaggttggagattcgctcagccggaagattgggtacatgtaccttcagaggggagatggaccggcgggggcccggggacgcagctcctgaaaagcaaagtccagaccccagagccccatagagccgccccaagagccgcccctcggattggccacctactgtctgcgttctgcgtccgtgtccgcgcggggaatccgggagcctggctcagccttcggcgcggcgacccacgctctgggcacccttctgcggctctagcatcccgcaccctccaggcggacaggccgcgccttgacctctcccctcgccagcgcggcaccacggccaggtgcagcctccacccagccgtccgggcgtgtgccggtgcccgggagc

SEQ ID NO: 198934 - DNA, 1000 bp, Homo Sapiens
cctgagggaatggtgatggtgaggaaaacttcctcaaggaggaggtcattaacctgggacacaaagagtgtgttggcacagaaaagaaaaagagctttgtaggcaggagcaactgcctgtatgaacattcaagaaaaggagcatactaccctcagagcctccagaaagcttaatagggctgaaaagaagatgtattagtctgttcttacactgcttataaagacatacctgagactgggcaatttataaaggaaagaggtttaacggactcacagttccacatggctggggaggcctcacagtcacggtggaaggcaaagaaaaagcaaagccgtgtcttacgtgatggtaggcaggagagtgtgcacagggaactcccatttataaagcaatcagatctcgtgaaacttattcactaccactagaacagtatggtggaaaacaccctcattatttaacgatctccacctggccctgcccttgacatgtggggattattacaactcaaggtgaggtttgggtggagacacagccaaaccatatcagaagacaattgtataagaggagcaaaaagtaaattgcagtcaattcaagcaaagtcttaaaagaaatattaggaatttttgactttatcctaaagataaggggaatattttaaagcaatttagtagagagcctttataatcacaatgatggttttaaagaggtcctatggacctctttaaagaatcagtggtgacctgaaaggcaacattagatgcaggaggccagttcgaaggatattatattttcattatattgtgacagacagaagatgatggagacatgtatttgcgtgttgccactagagatggagagaagaagacgggtttgagagagattttagaggtagagttggcaggactgggtgactgtgtgagatgataaaaggaaggtaatattaagaatgaatatacagtctcatgaatgtccatgagaaatgaataaggagcaagaattc

SEQ ID NO: 198935 - DNA, 1000 bp, Homo Sapiens
cttcctggacttctttaacattttaaaaagaaaggcttgcctgggtgtggtggcaaagtactgtaattccagtactttgagaggcctaggcaggtgaattacttgaggccaggagtttgagactagcttggccaacatggtgaaaccctgtctctactaaatacacaaaaattagccaggtggggtggcaggcacctgtagtcccagctactcagggggctgaggcaagagaatcgcttgaacccaggaggaagaggttgcagtgagccaagatggtgcccgtgcattccagcctgggcgataaagcaagactccatttcaaaaaaagaaaaataaataagaaggaagcctttttccttttaatcattatttcttacatgtccacttggcccttggagaaacccaggtcgtggaatttaagcacttttgccttcactggtcccgtccataaatagataaataaataaataaataaataaataaataaataaataaatgcctgtataaaaaatgtgggcagagaaactcctagggtctctggtgggaaaacatgccccatctccatgtagctaagcctctgacagagttaagttgccttacggggtgattgtttggctagatgctgaggaattacaaaccttcaaaggccttgtttgcaggctggggtaccacttctcctcaaggcatctttgaaatgcaaacttgttctctcagcagactccacacatctcagcctttaagataaatgcttcaaatgggcagcaaacccacttgagtttggtgcctggctttccaacagattaattatatcgactgctggctgtttgtttgtcttcgtggccatctctcccatgttgggtcacatttgctttttccaaccatcacagcaactggggctctgccttgaaataaacatcgactcaacacactggtgcatgagaggtgattggaacctgtctgattttacaggagtggcccttgtggggcgaggatggaattc

SEQ ID NO: 198936 - DNA, 1000 bp, Homo Sapiens
aatgagcagtaggtgtagggacggaacaatttcgtgacctcgaatctcttgcacttctatacctctctgtctccgtgtccataacacttgctggtcacccttcaaaagtctccagtccctgatgtccattcctaaagttactagtttataagcgtctcgaggtgggactcattctcagtacatactcttaaggtgcttgatatgtttgttactgagtccagctgttttcaggacaacccttgtgtcgaattttttaaaaaaccaaaaactctaaaacccataattctcatgtgggaatgctacttccagaatgcacactagtccctgacaggttaaggtcttctgcctagttttaagaatattattattttaatttttaagttccgggatacgtgtgcgggacgtgcaggtttattacaaaggtaaaacgtgtgctatggtggtttgcacacccatcacctaggtattaagctccacatgcattagctatttatcctgatgctctccctccgcccaaccccctgaacattatttttatatcacacattttggtactccttaacaacagatcctgtattttctatctgtttatattatagcccttttcacgttgagtcataactatccctaaactgtggtctccttcaagccaggaggctgtttttttcttcattagcgctggttctccacacacaatgaagtcttccaaatcctggccctgcttatgagcttggcaagttagttaacctactgaagcctcagtttctccatctacaaaatggagaccagaggtagtacctgcctttagatttgtacagataccagatgtgatcatgtcagtaaaatgcttaatatggtacctacaaatagtggttcataaaagttattaatttttattaacatttgctgttaaaatgattccatcttcagatgaaatactatttgttttagataatctaaacagaactttgcagtgttattgtctgctagaatcacagat

SEQ ID NO: 198937 - DNA, 1000 bp, Homo Sapiens
ttctttgtgttgggtttgaacttcctcctttagctcggagaaattcgatcatctgtagccttcttctctcaacttgtcaaagtcattctccatccagctttgttccattgctggtgaggagctgcattcctttggaggaggagagatgctctgatttttagaattttcagtttttctgctctgttttttcccctctttgtggttttatctacctttggttttgatgatggtgatgtacagatggggttttggtgtggatgtcctctctgtttgttagttttccttctaacagtcaggaccctcagctgcaggtctgttagagttttctggaggtccactccagaccctttttgcctgggtatcagcagtggaggctgcagaacagcaaatattggtgaacagcaaatgttgctgcctgatcgttcctctggaagtttcatctcagagggatacccggccgtgtgaggtgtcaatctgcccctactggggggtgcctcccagttaggctacttgggggtcagggaaccacttgaggaggcagtctgtccgttctcagatctcaagctccgtgctgggagaaccactgctgtcttccaagctgtcagacagggacatttaagtctgcagaggtttctgctgccttttgtttggctatgccctgcccccagaggtggagtctacagaggcaggcaggcctccttgagctgcggtgagctccacccagttcgagctttgcagccgctttgtttacctactcaagcctccgcaatggtgggcgcccctcccccagcctcgctgccacgttgcagtttgatctcagactgctgtgctagcaatcagtgaggctccgtgggtgtaggaccctgtgagccatgcgcgggatataatctcctggtgtgctgtttgctaagactgtcggaaaagtgcagtattagggtgggagtgacccaattttccaggtgctgtttgtccccacttcccttggctaggaaagggaatt

SEQ ID NO: 198938 - DNA, 1000 bp, Homo Sapiens
acaggaaacccaggcgtggctggttagggtggaacagagcactcgcttctagccacacagtgttgcatgtggggtctttaagagtgggggctctggagccagagagctgacttcaaatcctggccccaccatttattatgttggttgtgtgaccctgtacaattacttgacttctctgtgctttcatttccttctccataaaatgtgaatgataagagatcctacctcttagggctcttaagaggattaaacaggataatacaggcaaggtgcctagtgcagtgcctggtatgggttaatgcagttattattattgtcacggttgctattactattatttggggctgttttcagagttccaggtgagggctgaattaaattaagatcactgtcagaaatctcacccccattgttcaaggaattacacctcacctgtattcagcatcatcttgcaaactcagttcaagagaaagaaagaaatcagaaagatttttaggccaatggaagtcccaaccccaaatgactacatacatacatttctgtaaaaatggagcaacagctgtttgaaacagcaggtatactggagaaaagactaggagttagaagatctgatttagagttcttttgtctacttgctgtaggccctttaacaagtcaattagcccctctgggcttcagttttctcatcaataaaaagaggatatagcagagagtgcaaatgcccaccaacattctgtttcctttttcatagcgcaaagttgtccttagatgtggctgcccagacagggactacatttcccagctccctttgcatctaggtgggaccaagtgacttgtgttcaccaatggcatatgagcagactattcctggccaaggtatttaagaagtgactgtgcagtctccacttgccttttgcaagtctgttgtctgtatgtagaagacttcaaagccctagaggatggcagagccaccagctggacaaaaactgggcccagaatt

SEQ ID NO: 198939 - DNA, 1000 bp, Homo Sapiens
tttgcaacattattctcgcttgatttttttctttacttctctgactggtctttcttaaacctgtctttgagtgtatactcttacatttgatgttcctctggattatctcttcacccctcttctttctcatgatgctcttgcacattatttttaaaaatattacccactcttgatagtgtatctgcactgagacacgtactggaagctatatattgtttgacatctcaatctaaaacaactcatctttcttacttatgactagagttcctcctcttcatttatattcttttcttggtgaacatcagtgtctaccaatttctaaatgcaaaggagaaagatacaattttaagcgaaatggtggtgatatgcacaacttgcagaaggttacataaaacttgggttttcagagatgattttttcttttctttttaggatatgttcaaggaatgagtgatttactttcccctcttttatatgtgatggaaaatgaagtggatgccttttggtgctttgcctcttacatggaccaaatggtaagaacagagattccttccattaaactgatttttaaaattttagttgtataattttatagtataaggttgatttttatatttagccaactatgatggaacttaaaaaaattacctcatgccttttgttactttttctttttagtagcctttcaagggcttagaaatactggtggtatttttaatacaggaaatagtttgtgcctgtagtataggaataatcaggatttaatatcagtaaatgcttattttctactaaagagccatgtgtcattacagaatattgataaaatagatgaattcaattttgtggaatagttgaactttaatatcatctgtttcagagataaagcttagtcatgccaagtaatatccttaccttttgtgaagattttgaattttgtcattatagtaactgatttttctccagatgtgtttgaactatttgtaactctgacactttctta

SEQ ID NO: 198940 - DNA, 1000 bp, Homo Sapiens
gtaatagttggggacttcacctcactctcagcattggacagatcatctagacagataatcaacagaaaaaacccattagatttaaactgcacattagatcaaactaacagaacagacatttataaaacatttcacccagcagctgcagaatacacattcttttcatcagtacatggaatattcaccaggattaaccataccttaggacacaaaaaagtctcaaaaattttaaaaaatcaaaatcataccaaatatcttatctgaccacaatggaataaaactaaacatcaataacaagaggaaaattcaaacctatacatggaaatttaaaaacatgctcctgaatgaccaatgggtgaaaaaaagaaaaaaaaaaactaagaatgaagttaaaaaattccttgaaacaatggaaaacagaaacataacataccaaaacctattgaagacaccaaaagcagtattaaggggtaagtttacagcaataactaactacatcaaaaatctagaaagatttcaaataaagaacctaatgatacatctcaagtaattagaaaggcaagaacaagccaaatccgaaattagtagaaggaaaaaaattaagatcagagcagaaataaatgcaactgagaattaaaaagagaacaaaacaaaaaattgtttttttgaaaagataaacaaaatctacaattagtgaaacaaagtaaaaaaaaaaaaaacaggcaagaagaatcaaataaagaagatccaaaacaaaaatatagacatcacaacagataccacagaatataaagactcattagaaactactatgaacagctatacaccaaaaaattagaaaatgcagtgcaaatagacaagttcttagacacatacaacctaccaggattgaaccaggaagaaatagaaaacctgaatagaccaataacaagtaacaagtttgaatcagtgattaaaagtcttccaacaaagaaagttccaggatcgatggcttcataga

SEQ ID NO: 198941 - DNA, 1000 bp, Homo Sapiens
ggactgtttgggtgtctctggggactgaaatggggcccctggaagtcagagtgttccttgggcctgtaggacactggtggggtgcgagtggtgaaaggtcttttgctgcctgctgagaatgggcagtagaattggagaagcctcagaagggtgacatccacagccggctttgcttagcgaggagggtctgcaggcccaaggttaaggtgggcactgctcttgtggccatgtgtgcaggtcatggctcctgggagcagtgtctccccatcaccaggcagaggctggttccaggtgagcacagattcatcccagggtcttgctctgaaattcacatacagccggagttgaaagcagcttgagcatctatgggcgagatggtgagatgaacgccctccccaccccagagcactgggtcccaccctggattcatgtgagaatctcctgcagagtgcatacaaattacccatgtccaagccccaccctcagaaactgatgtagttggctggggggtccaggtatttgtaggctttggccaatggttctttccctggatttaagggattaaaactgagagatggttgtcaacctgtctctaggtagttgggctaatcatatgtgatattgcgagcttttagggcccatttagagccatccatttattcatctaatcagatgatgtttactgagcacctgctatgtgccagataccattctaggcactgaagatacaatgatgaataaaagacataaaacgcttgctctcctagaagctgaccttctaggtggcaggagagaaaaagtaaataaatgcacaaatatagagtgcatcttgtaatgtaagtgcagtggagaaaaattaagccctcttagacattactggtggggacgtgacttggtgcaaccatgttggaaaacagcccggctttatctctgatagttaagcacatatacaccccatggtccagcaattctactctggagtatggaccttggaggaatt

SEQ ID NO: 198942 - DNA, 1000 bp, Homo Sapiens
ggagaatatcttaaacctgggaggcggaggttgcagtgagctgagattgtgccattggactccagctctgggtgacagacagagactccatctcaaaaacaacaacaaaaccaaacaaaacaaaaaataaaaataaaaatgaatgactttgtgtctgtttacagaatcctttaataaaatcaaacagtctctcaggtttttagaggggatttctaggtatggctaccatatcagttgcaaataatatattttctctttccccatgcatatatttttattgctttatgctacactccaaatctcatgttggaatttggtccccaatgtcagaggtggggcttagtgaaagatgcttaggtcatgggggtagactccttatgaatggcttgttgcaatcctcataggaatgagtgagttcttactctcttagtttccacaagagctccttgttgaaaagagcctggcacctgcttcccctccccgttgcttctccttgcaccatgtggtctctgtacacatgtttcccttctgccatgagtggaagcagcctgaagcccccaccagaaataaacactggcaccacacttcttgtgcagccagcagaactgtgagccaaataaacctcttttctttataaattgcccagccttaagtattcctctacagcaacataaataggcaaagacactttatatctgaaattagctcaagtttccaaattaatgatatacaataacagagatagtgaaaatcttagtttagatcctgcttaaaaaaatatctatttagataaaaaacattgaagcagatgattttagagttagggatatttagttcatgaaagttgagtataagtaacttacttgctaatatttttggaaggatgatatttgctttactttttgatgcctgtgctctttttagtgcttgctggatttgccaatgttttggagacatttgcagcagaaaaaaaccatatttcatatactccctgaggagg

SEQ ID NO: 198943 - DNA, 1000 bp, Homo Sapiens
gcctcagcctcctgaatctgggaccacagatgtgtgccaccatgcccagctaatttttcatatatttctttttttggtagagacggggtttcaccatgttgcccaggctgggctcgaactcctaagctcaagcgatctacctgcctccgcctccaagtgctgattacagacatgagccactgtgcctggtccaatcataacagtacctacatgtgttagttttcatttactgcctaacaaatgaccactgacttagtggcttagaaaacactcatttatgagttcacagttctgtaggtcagcagtccaggtcagcttgattgagttttctacaaagggtctcacaaggccaaaaacaaggtgttggccaggctgggctcttatctggaggttctggagacaagtctacttccaggctcattaaggttgttggcagaatcagttctgtgtgatcgtaggacttgaggtcctccatccttgctggctgccatccaggtcactctcagctcctagaagccacgctccagtccttgtacacagttgccaccatcttcaagccaaaagcagagtgctattcttgtgtctgacatttctctgacttccttttccccaagcccaagaaaactctgcttttaaagggcttaggtgattaaattagactcactgggacagcctgctaaccaactaaagggtaactgattagtaacctcaattatatctccaaaatcccttttatcgtgtagcctgtaatatgatctagatgtgatatttcattaccttcgtagtactgggcattaagatgggaaattttgctgggtgcccaccgcactatctcagagggttgttgtgaaaatgcaattgcacatctcttagtatgcagtatttataagttagctgtgtttttttttaacagcggttgtgtgtattatggaagttgtttggatttatcaaggattttttaaagggattcctcagctgggcacgatggctcatgcctgta

SEQ ID NO: 198944 - DNA, 1000 bp, Homo Sapiens
gtgatatttttagacacaccctgggccagaaggaacctgaagggaaggatcaagtccaggaagaattcaccacttgctgactaaagagcccttagaccctgaataatcaccagcagcaaccaagtaacacacactgtgggcctcagctaagactcagacatgcagacttcaggtgtgacccggcatattcacagctgcggtggctacgaggaaagactccttctgcttgagaaaaggggagggaaaaataaaggggattttgtcttgcagattaggtaccacctcaaacatagttgggaggagcaccaagtgggttcgtagggtccctgattccagagaacactggacggcacctctggaactaccctaagccagaagggaactcactgccctgaagggtgggtcccaggaatggcgacattcatgaaaagctgagcccttgggccttaagtgaacagtgacaacattgtggcagtactccctgtgggcctgtgtggaggtggacacagggggtgactccactgcctggggagaggaaagggatgggtgggaaggactgtgtcttttgatttcagtaccagcttaaacatagttgaatacagtgccagggaaatttctaaggtttccgattgcaggccctgacttccaggcactctgaacctgtccggagcctggagcccagaggaattcaccaccccgaagggaaatacacaagaatgactagcttcagccactcttgaaataatgactatagcctgagtgccttaagagaacacagcttgcagccaggtaatagttacagcaggacatgggcaagacacggtgctttgctggcttcagatctgacgaagtacagtcccaacgatggcggcgacaggagtgcttgtatcacccctctccaagctgcaggcagcttagccagagagagagagagactgcactcattttggagaaagtaagggaagaaaacaagagtctctacctggtaatccagagaatt

SEQ ID NO: 198945 - DNA, 1000 bp, Homo Sapiens
taagcgacctgcttttgcgatccccatgctgtggcagtggcagtattctccttacttgtgtttttccctgtccatctttggtttccagagcagtatgaattggctaccaacaaaattcttcatctctttaaaagctttcactttttttgcgcctgccaaaggagatacttagattttgatcactgttaattttatctagactattgataaagaatgcctggcacatgcaccatttaattcagattcagtgattggtatagatactattacttattgcctggtttttaaaaattgctccaattgatgcaagaataaaagcagaatagttggaagataactagctgttaacactagaaacagttttctaatcttcagagaaaaattaccaagataaagggggaaagaagaagcaataatgaaaattacttttccgcaccccctcccccgccatttctttttttttctagaagtttggcaacattcataattagatgcacgtagcactgttttgtgcataatagcatggtttatttacatacatttacatatatgcattttaactgatctctgctcatttctggtttagatatttgtatactcctctttgagacatcagttttccttcttttaggcccttagcatccaaaggcactaactttgttggctcttagtgctgagtctagtaccatgatctgagtctagcactgtggagcaactttagtgatacttgatgcgttgtatcttatttttttaaaagagaatttaccaacccagaattttctagataatccttttaaagatagttattcttaggacttaagggtggggttggggctggggagttgtcaactaaaacaagttgagtatgtgctgtgtgccagggacttttgcatttattctctcattgaagactcatcataaacactcaaggtaggagttattccagttttacctattaggaaactaaggcacagagttgttaagtaacttgtcaagaagc

SEQ ID NO: 198946 - DNA, 1000 bp, Homo Sapiens
tcccaattcaccaccacagagagaggcttcctgggccatgctctcagacctgatcatccccactgattctctatctcaacttgtttgctgtttcctaagcatttctctctgtctataattattttattactagattacagcctctgtaccccaagttcacttatgtatcccaatgaccagtgcgacaggaactcaataaattatgtttacaaatgaatacaactctatgaagacaggtttttttttttaacctagaattccagaacactataaataaaaagaccttagagtcatctaatcctagaaactgaggctcaaaaaattaagggacccctctgagttcataagctggtttaggacagggtccagcctggaatccaggtgtcttgacttttgtcctgtgatgacttcctcaggctcttcagttgtcagctaaggaaactgactctggctaatttaatcaacaaagggattcttagaagggttttaagttgttcccagaattaaggagactgccaccccaggctttaaaaagggcaggctctggatatttaggtaacaagtgttaatgagccattgtaagggcaccagagtcaggatgaattcactctggtcctttttcttcattgtgtcactccactcgacagtcacattcccaggagaaaaaaaaatatgagagtctcagtttgggtctcattctcactctttagatagtcaaatattggtcctgccaatactgttgtgcgatagtgactgagtgatttcccaaatggaaatggatgtgctgttaccataagaagagaagctggatgtcgggaagacaaaaacaacagatgtccacactacatcataacacatagccggcaggagctgtgcttgatgccgaaacattgacctcccaataagccaagtctccaggttggtattctatgttttgtgaagttattaggcaatggcttcctttcctgttggttatgcaaatgttcccgtgtgagaattc

SEQ ID NO: 198947 - DNA, 1000 bp, Homo Sapiens
cagccataaaaaggaatgtagttctgttaaatgctacaacaccagtgaagcttgaaaacatgctaaaagtaaaagaagcagacacaaaaggccacatagtgtatggttttatttatttgaaatatccagaataggcaaattcatagagatagatagcagatttgtgatttccaggggttaattggggaagtagttggaaatgatagcttaagagggtacaaggtttctttttcatgcaatgaaatagttctggaactaaataataatgatagctgcataatattatgaatgttcttaatgctactgaattgtatgctttaaaataatggaacttgtaagtttcatgttatgtgtagtttttctacaataaaaaattatacaaaattcaattaataggcactttccttgttccccaagatcattttttgtctctgagaaagttttctgtagtgttaactgaaatgggtcagttcttccttgtgggaggcaacccaagactctgattgcattgtgtaaagttggtcagctgttttacaaggcaaacacctggcaccaaaccctgagctctttaaagaactgctagctaagcctcttccccagggtaaattcaaggagaagtgctatgagtctgagcttgccagattcgtgtgggccacacccagaagttaataagttgttccaaactctacatgccccatcttaatcactagttctgctcccagtttgtaggttcccataatcatgtggctgctcgaatgagaacagcaaaaaccacttacaatttggagatgagacagagtccagaaagggaagaaaagtcatgaaaatataaatttagcttgaggtgtaccatgaacagaaggcagagacctagaattaggccttgttctaaatttcaaaattgtcaatatagtggtgtctctgaaacagtcattcgggtgaggaaaactctcaagtaggggctagactccatttccatcagtacagggaactgatcaaa

SEQ ID NO: 198948 - DNA, 1000 bp, Homo Sapiens
tcactgctctcagaaaaataagtcagtttcatagactaagaaattgaaaaattcagatttccatcctaaatataccatcccattagttaaaaaaaatctaattttgtttttaaactttatatttttggtgaaaattcatatggataatttcttcataaaagaaaaaatattttcaaaactttaaaggtttactaaattctgggtggcaaaatatactaaccatggccttgattccttcaggaaaaagaaaccgattataaagtgcatccactgtatcattgggttcaacatcacatgatctctgaagaaggatgggtcctgtatccaagccatcatcagcccagaaaacagaaaacccagctttcttatctcccataattagagtcctgtgaaaagaagaatttcaatttaaaatgttggttaactgtatcataaagtgatgaattagtgatattaaagtataagatagttataatggaaaagtagacaatgaatgaagctaccatgagaaattaacagtagaactgggagacgtcagggctcataaaaagcagtgcctaatggtactgctattttatataatacatcctcatatcttgtctttcttgttaatgtacagtaatgacttgcagtgaatttaaaaaggcattagagtctatcgttactaccactcattgactcccagggatcagttttctacttcaagatcaagtaatttgcccacctgggtccaattcctacatcgtatttgaccctgtattaggcggaataagaacagaagataaaataggatactctgtgaaggacagaatgtgaaactaatgtgaaggacagagctgattattaattcaagctaatacagagggagtatgatggtaggtcagccatgtaataatgtaaatattttttacttttgagctacaaatcaagacctaaatcaatccatcaatcactaactcttcagaaatactaagaaattgactggcattgctatcaagat

SEQ ID NO: 198949 - DNA, 1000 bp, Homo Sapiens
tctgtctatatttgttgtctgctctctagccatgccagatgacttgcacttccatgaatgcactgtgctttttttcacttgtatgcttttgtatacattgccattctctaaaatgtccactctggtatgttcttcccctttttttgcccggttaacttctgtttcagtttcctgtgagtttccagttaacttctgtttcgttccagtttccttttctaagctcttttaagaagttaaatctctgtataagtagtcatcagttattgagagcttatgatgtaataggtcctgtgcttagcacttcatataccttgcctggctagtaagtaggtgctgaatacatagctcctattagcataatgatgatgagggaactgaggtagcaaaaagcacctaaacattgcatacaatgtatcttcccacctgtggttacacatttcccataaggtagcattctggacgcatggcactgggaaggagcactgaatttaggagtcatgctgaattgggttcacatatggtcttgggcaacttttttttttttttttttgagacagaatctctctcttattgcccaggctggagtgcaatagtgcgacctcagctcgctgcaagctccgccccctgggttcaagcgattctgcttcttcagcctcccgagtagctgggattacaggcacccgctaccatgcccggctaatttttgtattttagtagagatggactttcaccatgttggccaggctgacctcaagtgatcgcccaccccggcctcccaaagtactgggattacaggcgtgagccacaacgcccggcccttgggcaagtctttgaaatgtgtttctaatcttaacaactcctagagataggtgtgcagtttctgtacagtgtgctgggattggaaaccaagtctgtttggttctaagccctgtggtgtttccacacagccattttgacctccatctccctgaatcttgtttcaagtagtttcagcagaatt

SEQ ID NO: 198950 - DNA, 1000 bp, Homo Sapiens
ccaattaaaaagaagaattttctccctaatattttgggtaaagcaccaaaataccacttacgaaaattgagagaaaataaagtttacattactggggaagtagagaaatactgcaaaggcatatatttgaaagacaacttgccgggcgcagtggctcatgccagtaatcccagcactttgggaggctgaagcagatggatcacgaggtcaggagttcaagaccagcctggccaagatggcgaaaccccgtctctactaaaaatagaaaaattagcagggcttggtggcagatgcctgtaatcccagctgctcgggaggctgaggcagagaactgcttgaacctgggaggcggaggttgcagtgagccgagatcgcgccactgcacaccagcctgggtgacagagccagactctctctcaaaaaaaaaaaaaaagatgtcttgttacagctgaatttaaatataagtttgccaatactgactctgaaacagactttatagttgctgcagatatacatagacctggtactaattagaggatggtatttccaaaaactatcccatcatctccttacatttgtagcaaattcaccaccaagtatatacagagagataaaaataagcattttagagcacaaaattactgctggtctatagcatactagaagaggaacaatagtattttgctctttgccataaaagatgctgtattctcaattgctgctcagctatttgccttgttctctgcccatgtctttgtaatagcaatcctttgtactccaacccttctccccatcccaagactgtttaggccaggctttcctttttattactatttttaaccccaagtaattcttacgaaaataatttcattcacactcatggtttcagttgcctccaatgtcagtaactccaaggtccaacccttcaaatctgactgcacagaaaatacatgttcaaaggtagctgacaagctggctgtgttaattctggctctaccat

SEQ ID NO: 198951 - DNA, 1000 bp, Homo Sapiens
ccactgcactctagcctgggcgacagagggagactccgtctcaaaaaaaaaaaagagagagaacctgcccctgctacaacaatcagtgtcccccttatagacctttggtgccctcaaaggattctccagttatgtgtgcagagacactcagtccccagtagaagcagagaacaggaccagaatgatgtactcagatccacagagaccacagtacaacagcaacatgatggagaggcacagctccccacagggttcttcacccccacacctctccccgccctctctctcacctccacaccatgacaggtctcactctgtcatccaggctggagtgcggtggcacgatctcggctcactgcaaccttcgccttccgggctcaagtgatcctcttccacctgtctcccaagtagctgggaccacaggcatgcaccaccacacccaggtaattttttgtatttttggtagagacagagttttgacatgttgcccagactggtctcaaactcctgagctcaagcgatccacccccaccccccttggtctcccaaagtgctgggattacaggtgtgagccacctcacccagctcccatattcttaaaaaaaaaaatactataagatattcacacaccaccccatatactgtgcagtcaggaagagaggttctgaaaacaggaagtcaggaggcacatcctgaggtccccaagagtttcctggcactgaccttggtgacagaagtagtgtgttttgagggtgggggaagccacaggacagtctggcacacaaggaagacaactcatggcagaataataataattattataataacagtatcatacatcaaggacaaacccagctgccccaagcctactgcaaaatctgtatgtacagtatagtctatgtgggtggggtacagggctgcctgcctgcaccctcaaggccttactcataccagcttcctgaggaggggccggcccctcctcttgcccctgttgaagctt

SEQ ID NO: 198952 - DNA, 1000 bp, Homo Sapiens
caggctcaaacaagaaactaagatttggcagcatttgaaaacagttaacaaaaaataaaaaaaggaaggaaaaaaaaaagacaatttagctcagctctggaatcaagggaaacttcactctatataaagatgccacaggtccaggaaatagcttcccaccgcctggctaagggctgaataactggctgcccagccaataacaatacagactcacacagcacaccctttcttgtggagagcgcggagtgggttcccggctatctcctttcagaatttcacaggctattcacggaaggcatgcagatctactttgtaagaattagttcttaaaaaaaaaagatctgaagacgacttccagggaggccaaggagcttaatttagccagccaacgcccttttctattcattgttctatacttctttgttaggattttttccctccctcttactctttttcccttcctggttaacttctctgcagccaggctccgccactgcccacttctcaccgccagagacactatagcccccttccctgctgtaatgaggccctccccaaggcctcatgtgggcccatcaccccacatcccctttatctccacctagaacctgcgaggtggtcccagggcctcctgaatctgcagacgtgtcccctaggttgctgcggaagccactttccacctgcaggtcaccgtcagccccaggcacccctgctggagggagggaagcccgaatgcagctctatgttccaggacctgcaacctctgagcctcagccttcctatctgcaaaacgacgctactgtcccattttctcaagtccttgccagctccaaacaagattcccatgttccagagggagatgccaggagaaaactttcgtacattttaaaacagaagttactggagagagggggcaggggatgtttttaaccctttaaaggcgtagccactcaaatgatccattcccagagatctcctccatcgcccaggccggctcttg

SEQ ID NO: 198953 - DNA, 1000 bp, Homo Sapiens
ttcttttaagaaatgtctgttcagatcttttgcccattatttaatccgattattagatttttttcctgttaagttgtttgagctccttatatattctggttgtaaatatcttgtcagatggatagttttcaaatgttttctcccatctgtgggttgtctcttcactttttttttattgttccccttgttgggcagaagctttttaacttgatgtgatcccatttgtctatttttattttagttgtctgcgtttgtggggtattactcaagaaatatttgtccagtccagtgtcctagagagtttccccaatgctttcttttagtaatttcatagtttgaggtctcagatttaagtctttaatccattttgatttgatttttaatgtggtaagagatagagatctagtttcatttttctgcgtatggatatccagttttcccagcaccatttattgaagagactgttccttccccaatgtatgttcttggcacctttgtcaaaaatgagttcactgtaggtgtatggagttgtttctgggttctctgttctgttccattggtcttacgtgtctgtttttatgccagtaccatgctattttggttactaaagctctgtagtataatttgaaggcaggtaatatgattcctccaattttgttctttttgctcagcatagcttggactacgctgggttgtttttgttgttttttgtttgtttgttttttcttttttgtggttccatataaattttaggattgtttatttctacgaagaatgttattggtattttgatatggattgcattgaatctgtaaattgctttcagtagtatggacattttaacaatattgattcttccaatccatgaacatggaatatcttttcagttttttatgtcttctcaattgctttcatcaatgttttataatgctcattgtagagatcttttacttctttaattaattcctaagtatttttttgtagcggttactttcttcat

SEQ ID NO: 198954 - DNA, 1000 bp, Homo Sapiens
tagtggcagcagaaaacttcagtttaaagcccatggattttcctatttgctgctctaagagcccataaacatatgtatctttggaaaactatcatgtgttttcaacttcctgaagaattcttgtaaaatataactgaaccacattaccctttgtcctgagcttttattccactaatggacaaattgggagaaggctgagaacaaatgtgctattaattacccagatggctttttaatagaaacttggattattctttagccactaaacattgtccagaaatttcttaataatgcttgtgtgcaggcattccttccaggagaataaagatctcattgaccggcaggctcggttatgtcaggttagcttaggagacggtagacaaagagtgggtattgtatagaccagagagaatgacatgccatatctgagctgcccagtctccccagcaatgacagattttctaattcactgcagattctcacaaaactgggtggtcagctttggagagaatcaacagtgggtctattgattctgggtgggagcaacataattctgaattaacctgaattgattcaatacaacagcaagtcttggtatcggattaaaattaggattaatacattaaatgttaggtcagaatgttaagtcccagcactgaaagactcacatgaaataagtcaaagctaatgcaggcaggtaggatagccagaagataatttgtacttttaggctctagaaatacatcactcagaattcactggcacgaatgatgcctgttgtgatccaatgcttcatgttacggtttttgctgcttaggtcataaacagtcattttgaaactgtgcctcttttcttacgtttatcatatacatggggcagggtgggggtgggcaggagctttcatcttacacactaatggctgagagacagcctggctcattatttgttcctacttttgtaaaattatcttgccaggggcaaaatctgctgcttcaagctt

SEQ ID NO: 198955 - DNA, 1000 bp, Homo Sapiens
ggcatggtggggcacgcctgtaatcccagctactcaggaggctggagaaggagaatcacttgaacccaggaggcggaggttgcagtgggctgagatcacgccactgcactccagcctgggcaacagaacaagactccaactcgggaaaaaaaaaatctatatgtatttttttttttttttgagacggagtcttgctctgtcgcccaagctggagtgcagtggtgcaatctcggctcactgcaagctccccctcccaggttcatgccgttctcctgcctcagcctcctcagtagctgggattacaggcacctgccaccacgcccagctaatttttttgtattttttagtacagacggggtttcaccgtgatagccaggatggtctcgatctcctgacctcgtgatccgcatgcctcggcctcccaaagtgctgggattacaggcgtgagccaccgcgcccagcctatatgtgatttttaaaatacttacatagaggacctcaataataaacacttgctaccttgttctattgtattgattttaactcatgatgtaatgacatcatttaaagatgaaggggacaagaagtgctaattcttcagaaaactactggagaacttcagaaagtatatcaaaatatcaaaatttctgatattgcacttgagtatgactgaattttaataagaattatttcttttgaagaaagtcacttttctggcttttataaaacttttcagagggtttgtatatgaaacatgctggagcgaaatatcagccctggtgtttagagaaaacatttgtacccctccacccaacatgtccagtttttgaaagacaaagagtgccattaaaggtgaccttcccttctgggggtcttgtggaatggaggaatgcagaaggaggaggctggaccctctacctcttagaatctatcctgtgcccaaagctccaaaaatgcccacctatggcatggcagcaagtgtccaccgtgggaggaattc

SEQ ID NO: 198956 - DNA, 1000 bp, Homo Sapiens
cataataattggatatattgggttaaatacaacattttattccaattgttttcacgtttccttttgccttttttaaatgtgcctgtttgaaaatacaaaacgtatacctggcaaacattacttttctactggaaaatgcttagctgaagcatgctataagtgaataagtagtactagcaataataatatctatggcaggcagaattctaagatggccttcaggattcacttttgttgcatcttttcctctttgagtgtgagtgggcctcctgagcatgaagggttttcacaccctcaaatagaatactaaccaggagactttgagtaaatcagaatggggattactctatatggctctgacctaatcaggtgtgccctttaaaggaaggtaaagaatcagacagctactccatcgtggcctcaaagaagaagcagtaaatgactattgagatgggggcaaacacttgaaggaatgggtaagagcccaggctcctgggaagaaaaaagtaatgtttgaggaaagcatagaaatgctacaaagtgagggctcaaggcaccaaaaacccactatgcctacttcgtcatgactatgtggcaatacaagccactgttggaatcattctaacacgtctgcctttccaagagagcaatatcatgcagattgccacagtttatgattgactttaagataaaatgttacattgaaaggtttgaaaaaaagccagaaaaagagcatggtacagttgttactgaaacagaaatcatgtttgcaaactgaagagactatctagtctttcctggtattatttgagttgtgtgtgtgtgtgtgtgtgtgtgtgtgtgttcatttaagtctctaaaagctggcagtagataagctgaaataactatcattttgagagatataaatgattatttgctgtcaatctcaactaaaaaaataatacttctaaaacatgtaggatttttttagaccgtacaaccaagataaagtgaattc

SEQ ID NO: 198957 - DNA, 1000 bp, Homo Sapiens
gtaggtttatggttggaagtgtcactgctgaaaagaactggaacataaaagtaaaatcttacaggtgaaatctcattggtaggtttatatatactacactgtatgtatattcgcatgtcctcagtgctgaccttattggtagactgaattgactatattcagtatgagatttcaaaggcactgatgaaatcactcctacctgctagctgacacgaaaattccactcttggttttttttttgtttaagtttaagcttaagatgcaaacactgattaagaataatacttgaggttattagttatgtttacctcagtgcatatgaatttcactttttttctgagagcatgttttttgttgtttttttgtttgtttgtttttaattttttttctttttttttgagacggagtcttgctctatcgcccaggctggagtgcagtggcgggatctcggctcactgcaagctccgcctcccgggttcacgccattctcctggctcagcctctcgagtagctgggactacaggcaccagccaccacgcccagctaattttttaaatatttttagtagagacggggtttcaccgtgttagccaggatggtctcgacctgacttcatgatccgcccgcctcggcctcccaaagtgctgggattacaggcgtgagccaccacgcccagccttctgagagcgtgttttaaaacgggaagcacaaggaccttatgtacctgaaggagtgttccacaaaaatggcaaattacagagggaggaggagaaaggatagtagtgggaaggcaaggagtgtccaatttattttctgctcacatttctgtcttggacctacactgtttactttgttacttctttattgttagcattatgagttttggtacatattttcatagtactttggtatgtttgaaaacatcctatatctataaattatgatacttttaagtgaccagtgttaaagcatttttaatgctgcatgttctgaagaattc

SEQ ID NO: 198958 - DNA, 1000 bp, Homo Sapiens
cagcctgggcaacaagagcgaaaccccgcctcaaaaacaaaacaaaacaaaacaaatctgcctttagacattgctacaaagtaaaacaatctcaagttcaataactctccccaatcatataaagaatgggatttccatgccggttaatctttaagtcattaaacagtgatttcctaacctaaggtccaagtgctactaataattatttaaatgaagcttaaaaagaagaaactgcactactgataaatttgtctgtgaccaggaatagaaagcaagaagcgcactggtacttcaaagaaaccagtggcgtctaccttattcccgcagtatagactagttcaggcaaccatgagactgagttgcctcagagataatttagctcccctctttcccctttttcctctttcttcgctcaagagttgctacccagggttcaatacagacctccatttcctttcctcttttcttcacccttttctcctatattttcagttccttttctaggagtttaggttaattccaagcattcttgagctctttcccacaacccatactgctcaacacaaacgtgatagggtggatgacaaaggtcacatgtctccctgtaaccaaataaaggaagaagtcacgagtccactatttttctccagtgaggttttgctgttaacacttacctataacaaatggatttttaagagactttttggagccaaagccaggaatcagtcaggtttgagtcccacactctaacatatacacttatcctaatagctacctccctaaacttttctgttccttctttcatagcagcttttctcccttcataccaccatggcttctgtttaatattgagttgtgaagaaatgtggtaaaattcctagtttgatttgccagaattagcaggacattaggtatagtttctctttcatcttaacttttttttttttttttttgagacggagtcttgttcttgtcacccaggctggagtgcaatggcacg

SEQ ID NO: 198959 - DNA, 1000 bp, Homo Sapiens
aggaagactttaacatcccactgacaataatagatcaatgagacagaaaattaacaaggatattcagaaatcgaactcagcactggatcaagtggacctaatagacatcgacagaactttccacgccaaatcaacagaatatatattcttctcagtgtcacatagcacttattctaaaatcaatcacataattgcactcctcagcaaatgcaaaagaatggaaatcataacaaacagtctctcagaccacagtgcaatcaaattagaactcaggattaagaaactcactcaaaactgcacaactacatggaaatggaacaacctgcttctgaacgattcctgtgtaaataatgaaattaagatggaaatgaagaagttatttgaaaccaataagaacaaagaaaaaatataccagaatctctgggacatagctaaagcagtgttaagagggacatttatagtgctaaatgcccacatcagaaagatggaaagatctgaaatcaacatcctaacatcacaattaaaagaactagagaagcaagagcaaacaaattcaaaagctagcagaaggcaagaaaagactaagatcagaccagaaatgaagaagatagagacatgaaaaacccttcaaaaaatcaatgaatccaggcattgggttttggaaaaaattaacaaaatagatagaccactggctagactataaagaataaaggagagaagaatcaaatagacacaatgaaaactgataaaggggatatcaccctgatcacatagaaatacaaactaccatcagagaatactttaaacacctctatgcaaataaactagaaaatctagaagaaatggataaattcctggacacatacaccctcccaagactataccaggaagaaatcaaatccttaatagaccaataacaagttctgaaattgaggcagtaattaaaaacctaccaagcaaaaaaaaaaaaaaaagcccaggaccagatggattcatagct

SEQ ID NO: 198960 - DNA, 1000 bp, Homo Sapiens
ttaaatataaaaaataaagtatgtaaaacatgaaagttttcatgcaggagttggcaaaagacaggtcacagctggcaagctaggaatgatttttatttttttaaattgatttcattttaatttattttatttttggagacaatataataagtctcactctatcccccaggctggagtgcagtggtgcaatcttggctcactgcaacctcagcctccctggttcaggcgattctcctgcctcagcctcccaagtagctgggattacaggtgtgcaccaccatgcctggctaatttttgtgtttttagtagagacgaggtttcgccatgttggccaggctggcctctaactcctgacttcaagtaatccacccgtgtcagcctcccaaagtgctggaattacaggcgtgagccacggcgcctggcaagctcggaatgatttttagatttttaaaaggttttagaaacgaaggatatatgacagagactgatgtggcctgcaaaacctaaaatatttctatctggtccttcacaaaaaagctcccagaaaatcactataaagttaactctatataattgttacataggaaggtagactatttccagcagctggaaacctacatgctgttccctgatcacaactcccactaccctagaagtgatcacttggctagtttttgtggtaatcattttcgttttcatgtagtttaaactatccatgtatgaatccataaacaaaatagtttagttttgccagtaggtaaactcagtgtttaaatcttaggtatttttatttttggctgttctatcaattattaagagcggtgtgtatattcgtatttcttgctgtgattgtgggagttggctgtttcttcttatatttatattaaattttgttttatgtattatgactcttcatctctttaaagctctttgctttattttttaattttaatttttatttttgagacaggttctcgctctgttgcccaggctggaattc

SEQ ID NO: 198961 - DNA, 1000 bp, Homo Sapiens
ccactgtgatatttaaagtaatatctctctataagactacaaataacatcgaagggtgtacaccccctgtgacactaggagtaacatccccctacaatacttggaacaatatcacacggtgtacacccctgtaatgttaggagtaacatccccccctgaatattactaataatatcacaaggtatacaggcattgtgacattagtcataatatcctgctagcatattttcaataatatcacagaaggagcacacctgtgacattaagagtaacatccccctagaatagtaagaataatatcacagggggtacaccccctgtgacattaggggaatcatctcgctagaacatgatgaagaatgtcacagggtgttatcctctgtgccaataggagtatagacccctgggaaattatgaatactatcaaagggtgtacacccctgtgacattaggaataacgtatttctagaatatcacgaataatatcacaatgtgtacatcccctgtgtcattaaaagtaaaattgccccaggatattacgaaatagaacacagggagtacaccccatgtgacattagaagtaacatcccccaaggatatagcgaataatatcagagaacgtacctgcattgggacatcagtagtaacatctcttcaggaaacacgaataataccaaagggtgtacacgcattgtgaaattagaagtgaactcccgctaggatattatgaattttctgacagggtctacttgccctgtgacattagcagtcatgttttcctagactattacgaggactgtgaaagagtgtacaggacctgtgaattacgagtaacatttctatagaatatcgcacgtaacatcactctgtgtacaccccgtgtgacatcaggggtaacatcccacaaaattataacgaaaagtttcacaaggtgtacaccctccgtgacatgaaaagtaacatttccgtagaatacgacctctagaatcccctagaattc

SEQ ID NO: 198962 - DNA, 1000 bp, Homo Sapiens
aatctctactccaaccccgaccagcttccagatgctttgctgatgtgctgtgttcactgttaacgcgactccccatcttgtcaacccccattcctctcccctctgtttatccagaatgcattcttctctcagggcacctgcaagacccgctcctgcccaagagttcctcccatgatctcgtgcacaggcccattttaccctttgctgaactctcataacacaacatgtctttactactcgttttggcacttaaatgctggcagtgaggtttaaagtgccgcagcaaatatacaacgcaatatgaaggggaaaaactctttatgtaacaaaatttcctctgcattgactcctatgaacaatatttacacatgtgaattattattatttcaaactttaggactaaacaggcacgtgatatgataaatgaggagagtccacgaatccctgtgtcatgcggcagtccctgtggtgagtgaccgactctgttggaatgacatgagaatctacagcacagaaaattaaaaatttgaaaaaggactcatatttgataggtttcttttaaaaatattaattttaatcacatgttaggttattgagagaatttgaaagagttcactgaaccagataagaaaacacagtgttagatcgctgcccaccgtggtgtgatttgccattttaacccagacagataaaaaagtaacataaccaagagatgtagaaggaaacctgtggtcggaacatttggaatgacttctcagacatttgggtttgtagcaaaaccagaattatctaagaaaacttattttgcaacattctgccaaatcccaaatgccagagaatcttggcagactccttgataattcagtctagctctcaaaatcattttccagagaccaagttttgtgatgctatatgcaagaggagtgttgaaaggaagcaaaactgctcagataccatccttttttagaaaaatgccagcaaccaaatatgctttgaattc

SEQ ID NO: 198963 - DNA, 1000 bp, Homo Sapiens
cagaaacaattttttaagctattaccactcagtggcgctagcaaaatcaacctagaataggaagaattttttctttatcccatgaatgaaacttcaggaccttcttccttgtttgtttagaggactttagtagttgagtaagagcaggtggagcttcctgggtcttgatgatagatgcagacttgatagaacagaagacaagactgaaaatttgatggacgtccgggagggaacattttgtgttgaggtttcttctgaaggtaatttaaagaaaacattaaatttcctataattttctcaaatacatattagcatatagatcagtccaaaaatttccttcagcagtatgatcatgcaataccacactatcagcgctctagagctctatgactgtctccgggaagccaccacgaaagggaacagaaccttggacctcaggaggatgaggtggcagaatgtgagctgtgaaaaagtgtggctgatgaagattcaggacaaaacataaagggtggctcgatgttggaagggcattgccaaagtttcacagcattcaaggggctaggatggaaataagggtggctaatgataaaaattggtcatgaccatcatagaactggggccacttattcatcaggtacaggctcacctataccccagactgtaaggctaaccttattcttatccaggagaaataaagtagggggccatgactcaacatcaagctagatttgctcattacttcttgtgtggcagttagcagacacaccctgacaaattccttaaccatctatgtctattatacttcataatagtatactcataataatatacccttaaaactgactttctctagaaggttcacccaacgtacaaagttcttcccctggaatacagatctcaacacatgatccagattagagatacatgatgtagaaaatgtctacttattgaagggaattctgacaattggcttttaggagcctctcctactgcagaattc

SEQ ID NO: 198964 - DNA, 1000 bp, Homo Sapiens
agaaggaaaatttcctttcactgttgagaaaattaagtggtgatctttcaaacattataagatggaaaggatgtaatggaacaaaactcccaatggcctttgaaagtctaaattggaaaatgcattctcaatgtaattttaattaaagcaattgaatttaagcagttgagataaacaagaaattggaagccttaaaccttaatttatcactttgatggggtagattatggaaattgtattttaaatataggtctctgttggtttgagctacaagaactccatcagatagtatgctgcaaggcacactcctggtctttcatttaattgtcttcttgcctagttgattaaataaagattagcatttattatcttcacagcattttacaagcttcaccaaatgaagctaaacagcctttctatgaggtgggcaagcccattgctttactcttgtttatagatacataaatcagagaagactcaaggtctcaagtattacagtaaaaaggaaaagtagaaagtcacacatcttaaccttacctaggtttttgaatcatgtctagtatgttcaatctattgttcacaaaaactttagatcatttcacagtcgttggcttatatgatacttttgacgaaattaatccttgttaaatttctctcttttcaacagctcacagaaggaagggattcttttgtttcttattcttagtttcctattgctaccataacaagttaccacaaagagtgacttaaaaaacacaaatttattatcttacagttctggaaggcagaatcctaaaaccaaggtatcaggaatgtctccttctgaaggctttaaggcagaacctgtttgctgtggtttgaatgtgtcccctccaaaattcaggtgttgcttatgtgacagtacagctgacccttgaacaacatggatttgaactgtgcagatgtacttatacacagattttcttctgctactgccacccctgaaacagccagaccaacc

SEQ ID NO: 198965 - DNA, 1000 bp, Homo Sapiens
aataattagctgagtgtggtagtgcatgcctgtaatcccaactactagggaagctgaggcaggataattgcttgaacccaggtggcggaggttgcagtgaacctacatggcaccactgcactctggcctgggcaacagatcaagaccctgtctcaaaaaactaactaactaaataaaataccatctcaggaaactgtggctcagaagtgtaagaaccttgtcctcagtcaagcagttagtaaatgaaagaactgatattggaacttagctcttaaccattatacaaaactgtttcattttaatgactcagcttcctacatgcactcagggatttctgacttgagggatttaaaaattcttggagcacttactcatttatttataggcaatgctaaatctttgcagtatgatcattaacaatttggtagattatgtgtggcaaagattattaaaatattttttctctcctctcagttctgttacctatacatgcttggctggcctcactgcgcaaatagtgtctgctcaaagaaagaaaattaaatttaatgattagtctcagctaaacatgattaagaacataaaatattctatcacatcatcatgcattctgagtcaactatagatagttttgtattgccttttactccgatcattcagggtacaatttcctgtggtggtgtggataatgacaaggtaacagcctaccctttgtgttggagccttctgcctgttgtgtcagcctcatttcctccacaggaagacacaccgtggcaccggggagcctgggcaggcctcaggaatcagtatctcaaatgagtgtgcataatttgtgaagctgagatgccagaggaaccatcttcaggattgcttcatcagtcccaacatacagagcctgaaactaggttaatgaattccagcagggctaagtgggaaaagagaagtcaacttgtgaacaagtttagaatcaaaaggagagaaggtgagccaagaggaattc

SEQ ID NO: 198966 - DNA, 1000 bp, Homo Sapiens
aacatccgaaaatccgaacattttattcattccttttccccccgtctttcactgttgaaaaaaagtcttgtgttgtacttttccacaatcctcgtgaatcctgaacttccataaaaactgtagcgccctcttccttatgtcactcgttaaaatcccatcgctaatagatctctgggaataggccaggatcaggtgagaatggaggatgcagcgtgtaataaactgtaacagctgacaagtcatagtaacacaatattttcttgaatcgcacctgaaaaaagaaaacatttcaatgaatataactcatacataagtaactaaatagaaaaaaggcattgaaaataataccgcgcaagttgttctgcttaaaaaatattgaaatactttttattacccagtaactaacagtataacaagtttcatgaaaaagggtcaatgtgtaaaaatagtttgaagtttggtctgacttttgtctatttaaaatgaatcaacaaagctttttacttttagaagaagatgaaaccaaaggtcagttttatcaaaatgaaattggctcagaggcctcaagttaaaaatataaaaacatattgaaacacaggtttcaatataacacaggcttcaatgtaaagaaatggaattcccttcaccagcatttataagcatctatataccccttgtgtttcacctgaggcaccatttccaacaatttaagaacatcaagaaatggctctagttgacttgaactgtagtgcattcattctgtaactaaactgctttaacgttaatgactaatttattccctatcagaaatattatttcatgatatttgtcttattgaccatttatgccttttacttataaaatataagaaaaatcattataactattttttacctagtgacatatacatgctaaatggttagaaggtcttttacaatgttgttcattttatatgcctgattttttttgtttgttttttttttgttgttgttgttgtttt

SEQ ID NO: 198967 - DNA, 1000 bp, Homo Sapiens
tctgccacaggcgcctgctaccatgcccggctaacttttgtatttttagtagagacagggtttcaccatgttggccaggctggttgtgaactcctgacctcacgtgatccacccaccttggcctccccaagtgttgagattacagacgtgagccaccgcgcccggcctataacagacttttaaaaaacataacatcagctggacgtcaggagatcgagaccatacaaaccaacatggtgaaatcccatctctactaaaaatacaaattagctgggtgtggtggcatgtgcctttaatcccaggtactcgggaggctgaggcaggagaattgcttgaaccagggagttggaggttacagtgagccaagatcgcgccactgcactccagcctggcgatggagtgagaccgcgtctcaaaaaacaaaaccaaaaacaaaaatataacatcatcacacttaaaaaaaacccactgatttttttctttttatttttatgatttcttattattggctatctagtcatgtttgaattctcaaattgcctcataatttttttagttgtttagtctaatcaagatctaaataagatccatacaattggtaattgatatctcattttaagtcttttattctgtatatctgctgcctttcttttttcccttataatttatgtaataaagaaaccaggtcatttagcctgtaggatctcccactaaagtttactgattgcatccctatgatgtcatttgacatgtacttctgacccctgcagtccctataaattggaagttagagctagaaacttaatgagatttagattcaagtattttggcaagaatactgcatagtgatgtgtttttccatcaggaggcataaaatgtttggttagtgctctttttatgagataagcagccattgatcatcattgcctacgtgcattaattcattaattaattcattgcaaaatggcagcattctgcctttatgcattacctggaattc

SEQ ID NO: 198968 - DNA, 1000 bp, Homo Sapiens
tctatggttttgctttacatggtttcagttacttgtggtcaaccacattccaaaaatattacatgcaataaaatatttgaaaaaaaagagaccacattcatgtaacttttattatggtatgttaatagtaattattgttaagcttttagtgtccctaatttacaaattaaactttatcataggtaggatgtataggaagaaaacacagtatatacggtttggtagtatcgtggtttctggcattcactggaagtcttggaagaatcccccatggataagggggtactgctgtattctcattaagaatatttgctctgagtggccctggtgtttcagacaggcagaagagccctgagatcacactgaaagagaatccatacttctgagggctatttcatgcaggaaagagcactagagtaggagaccagagacttggatttgagcccagctcttctacttatcagaggcgtggtctcgggcttgtcattgctttctagacctcagttttctcttctgcacattgaagacacaaaaaacacttctttttttttattttgagagaaaactggaatttcaataagatactataaggggtttcactacaactgtgtccagcctccttaattcctttgccaactgactcttcttatggaggtagtgttactctaaatggccctgggttatccagcacagtcttggatcaagctggtagttttagcacaattatgaatagcaccactctttactctcaaaaatgttgcaatttagataatttatatatgatctataagctagatcatatataattttatatgatttatatatggtaacttatatgatcactatcatgacaggacacatggcttcttcttaaggagagagttactagctatcttttgtcgttatatgttaacatttggcttattttgtggctaaagcttcattaggtctgagagctgactctcagtctagatccttctgattgcaagcaacagaattc

SEQ ID NO: 198969 - DNA, 1000 bp, Homo Sapiens
agagtttgtttctctggtgaacagcccccaccctacagtaatctagggcccccaccatgaatcacatcattagcataaactcaggcatggtcaaaggggctctttatggataacaaaagacagtcctaccactcaggagtctccaaggattttagaaggtctgtaccaggaaccaggacaagaaccaaatatatatatttttgttacatcacaggataccccttggtctttgaccatgaattctttatagcaaaaggatcatctgtctgagcaacattttgaggaaggagtgtggtataggaataggaggcttttaactcattttttttccaattcatttgactatcgatattggtattatattttttaccaacaatgcaagtgtaaaacaatattacattatggtagatgtaactaaaaaataaagtcgaaagatgctggcatattactagagtcccattcagttcttaataattagttcagtctattatcatatttcatgaaaatgtctcctgggatgaggccactccagtttgcaggctttcatttgatcctgcctagttccaatagcaggagcggtgtcagcaatagatggtttcacccttcgaggcatgagatataactgagtaaaagataataacatcttttgctctgagcctctttcaaggtgttaaagtactattgagtttccgtcattacagaacccatttatttgttgcattatcctcatctactatttctccttctctccatttatacaaatttttccacctttggaagggacattaggttcagccactgtgctggtctaattgcaggcagcaatactaatctagcaagtacctctccatcagcccactaccattcacatagggagcgttacatagttatagaaatgggctatttttaccattagacattataattgtgttcacggtcaatcccagtatttctagatgaggtgaaggcacaatctgacccatcaggcctgtaggaattc

SEQ ID NO: 198970 - DNA, 1000 bp, Homo Sapiens
gtggggcagggaggctgctagttctacattggatgtttcattaatggctatataaacaaattctgaacttgttttaatttgctcagtggggaagaaaaaagtgccactctcttgtaattcccaactaggtgctttttttcaatgatcagatgttatttcaatgttcagcaaacatatttgatttccttcccttaacatttgtttgacttgttctccaatggggactgggtgctttagagaagctctgagaggtcaggctttactgcggcttccttcagcacctccctgggcttctggcccactacttgggatcttctttcagcagcacttgctgcagccgtggcacacatgaactattttctctccaggtccctgtgagtcttgggggtgtaaatcaatgcaagctggagataggacagacctaatagattatttagttctcctacaggctgaaaaacagggagcctgaagcaatgtgaaaaatactccagggagatgatcctctaagaaagaatgactcacctctgaccacagtcttccatttgtctcttttgggaagctctaactgtacctgacaggtgggaacactcacagaaatgagctgtttgtggcccattctcttctaaagacaatagtctctataatggcaacccttcaggtacttccaaaaagtgaaaaatggaggtaacagacagagatatgctcttttcaatactgtactgacattatggccaggctaaggaaaggtactcgggggaactgttgcttactcagatatatacacaaggctcaaagacagctcacacccatcaacttaaagaacagggtacacaacaggcctaaaaaaattatggttttctaaaagctcaactttggcaaactggtcctagttacactgtaaagctttagtgtcagacctagcacaaaagttgatccagtgcagctctggcaaggtttgaccttgtgcacaccaaaaccaggcctggctcactgtgaattc

SEQ ID NO: 198971 - DNA, 1000 bp, Homo Sapiens
cactgtaagatggcaagctaggtccccttatacatatttatccattaaatgtttatagctaccctccagtatatctattattatgcctattatgcaaatgagaaaacagaggctcagaaaggttaagcaacttacacaagatcttgaagtcagcaaataatgtagcagcttctcaaattcaaaacatctgactccatgttaggtgatataccctaacaccattatatctttcctagtataaggatggactcaatctctgagacctcttttaagtctcagattctgtaggtctttatttatgagtatgaagttattcaagtaatctcatctatctggaatacaggcaaaaaccaggaaataatttaaaaaaccagtgaaaaaggtggtgggggcatgtgtattgatgcaaatgagaagacagataaacagcgaaagttggggtaaaaaacaccaccactgagggaatcaccttctaaaaataatgatagatggtggaccttgatgaatggagaaaatcagagactcccagagttggaaagcctaaagttgattatctagttcatcctcccaaacagtgcaggggctccttaatataagaggtcttcaaaatgtttgtgaaaaatgtgtattttgaaaaaactatgcatggatttcaattatttttgcaccaaaataaacttacaccaacttgttataacatgtctgaagaggctctagttggaagcacaaagaaagataagacatccatttgaaaagatcccctttaagagcaagacgaattctgctaacattgaagcaagaacaaacatcaaatttatggtgaagcttgggtggaagaattgtgaaatcactggtgttttacaaaaagtttatggggacaatggcccaaggaaatcagcagtttacaaatggataacttgttttaagaagggacaacatgatgttgaagatgaagcctgcaccagcagaccatctacatcaatttacaaggaaagaattc

SEQ ID NO: 198972 - DNA, 1000 bp, Homo Sapiens
tttggctgccttgcagaccacctgcctctcaggtcagtcacacctgtgggaaccaacagcatcactccccaaggtgactagtatccttgagataaaggcatgtttgtagaacttaaaacttctttcttttcccaagagaaatggagaaacttcatcaagccaagatggagaactgggtcacgccccaatgatgccaagcagaggctgccacttggctctgtgagcgaagcagactactaaatttcagatataagaaataatctgctccctgcattcgcctgatcactttattagctgaaaagataaatttaaaccacagactcatagcaaaaagaaataagtccacattcacctcctaattaaactgagagaagccagctacatccaaggacactcggcccactcaattaattaacatctattacaatcagaaaacaatctaattcaattaaaatgtttccacaaaaggagtttaatgactttccccaaaataaagtacattcaactgaagcatttattatgcaaggcagtgtcatgaggggagctgaaatgagggctctgatgtgggcagcaggctccgaggaagggtgagggcctgggccagccccttgctgagggagggagggggtgcttcgggacacagacaccctctaaagagcacaccggcccagagctagaggggccctcaacagctgctttcatcctcaccccccacttcccatcgcagccctgtcccttgtcagtttaccactgtgcctgactctcccccaataaagggtccaggttgtgtagggaggaaggcaggcttggattcagaggcatggacccatttctgcctctgatgtgctatgtcaccatcggcaggtaggaggtgttcagagaaacgactgttaaccaggctttctgaaattcagccaggagatatttggaaagctggagaaattgccactcaaaagctgcaagcagttttctgattcttacgaggccgagatttgaattc

SEQ ID NO: 198973 - DNA, 1000 bp, Homo Sapiens
actttcaattccaaatgggcttatatgaccaaagagatgcaggatctaaccaacatgtaccaacaggaaccatgagcatgtgtatggaactgggtcctgagagtgctggacaagaattaagtttgtgtttatataggacagcagtacccatttatagtattggcttagggttatgttaactcttccacactgcgtcataatccgaagagatctagaccatctaaacatcccacataatgtcacaatgacctaccacattgatgacatcatgctagctggataaggtgaataataagcagctagcatactgtacactggaggatgggaaataatccttaagacccagcaagctgttacctcagtgaaacttttagggcccagtaggctgcttgaatgccaagatatccccttcacagtaaaggacaaattattgcatctcacccactcatttcaccaaaattattctgccaccagggaagcacaccaagctgtgtaggcttctgtgggaattcagaagttggcagtactgttctgactcgtaaactgggtgagatagaaatctgccagttttcagtgggatccatagcatgtaaaagttctctagcaggtatggtgtatttagccctgttgcatggaccaattcaggatattctatgggacaagagtaaatgtgataagaagccatgaaagttgaaggcaagctccaatgggagaatcacaaggtcgactcctggcattctgtggcaaggctgggccatctgcagtgcaaaatcccaaaaacaactctatccatgctaatgtgccttggtaagaactgattatggacatcaagtgaccatgtagccagagaggcccatcatgagctgggcaaaggcaggtggtcaggctcccatgtcatatctgattctttaccaatgtcccttcctcagctcacaattatggccacttgggaggctctcatgtctagcttatggaggacaaaaaagcctgagctgaattc

SEQ ID NO: 198974 - DNA, 1000 bp, Homo Sapiens
aagagaagaacctctcttgtctcttttcttataaggccactaatcccatcatggggaccacaccttcatgacctcatttatatctaattacctcccaaaagcctcacttccaaataccatcacattgggcgttaaggcttcaacatgtacattttgggggacacaaacatttagtccataacatgtctccccaaacttctagcagagggagggcaggcaatacatgtttgttgatgcttctaacggaagacgagattctgcatagactcacagacagcagagacttgcctcttatacacacctatattgccttggctagttagtgcccagaacatagtagacgtttgataatcacttttggtgaatgaattagtaaaacaactgctgctctttggcattgatggcatttgaagaaaaggtttaactaggtctccatctaagtctcaaagttttattcacattttagtatttttattttgacctctccacctcactcaaaagatcagtacatgctcccaaatctatcttataaaagaagaattctgttattttgttatttttcctgcagttaaaaaaattaacattagaagggagaagacaaacaaaaaggagtaagttcacattatcagtgggatcttggattccatggtgtaggtaaatttgtagggctgtttcacaggatgaataaccagcctagtctcttgtctgtaagcttgaccaaggcttacttttccaagatgttaaagttcactcaaaccgtatttcctcctacaggcttaaacaaatgaaaaaacatatttccaatgatttcttggtatgacactaaatgcataggcaacaaaaagcaaaagtagacaaatggaattatatcaaacttaaaaacttttgtgcaccaaaagatacaatcaatatagtgaaaaggcaacttatggaattgaagaaaatatgctcatataatacatctgagaagggactaatatctagaatatataaagaattc

SEQ ID NO: 198975 - DNA, 1000 bp, Homo Sapiens
tcatcagaacgaatataacaaaacaattcagctttacatttctttttcttttttttttttgagatggagtcttgctctgttgcccaggctggagtgtgcagtggcgcgatctcagctcactgcaaccactgcctcctgggttcaagcgattctcctgccttagcccctcgagtagctgggattccaggcatgtaccaccacgcctggccaatttttgtattttgagtagagatggggtttcaccatgttggccaggctggtctcaaacccctgacctcaagtgatccatccgcctcagcctcccaaagtgctgggattacaggtgtgagccaccacgcccagcccaatccagctttatatttcttagaagagacacagaggcttaatgtaaaaggatggaaacagatataccatgcgtacattaaccagagggaaacttgtacgatcaagctgaccttaacacaagaaacattaccagagacaaaaagggacagtttacgataatgaaagtcaatccaccaggataatgtaactcttctaaacgtacgtgcatagcttcaatatatataaaagaaatattgatagaactaaaaggaaaaaatagacaaattcataatcagagtgggagatttttacacacctctgtcagtaacggatagaagacacagaaaaatcctggggttgaagatgtgaatgacataattaacaaacttaacctaattcacaagtttctataaactgtactcagcaactgcagaaggcagctatgctccagggacacatggaacatataatgatacaaacatattaagatattaagatacaatgatattatgcagaatatgttgtttgactacaacagaattcagctataaaccattaataaaagaacaagtagaaaatccccaaatatttgggaatgttggatgaggaaatctattatcatgcatctccatccagctcacagtactaaattgatttattcattcaacaagaattc

SEQ ID NO: 198976 - DNA, 1000 bp, Homo Sapiens
agccacagcgcctgggtgtttcagcatattttcaaggtgacccactcacccattcttccatgtagtcactacctccacccctcagaataattctttaccatgccttcaatttcttcctcaaggatgtaggagtaatcatcaccatacattaatctggccacctgagccactggtttcatgtgtttttagtagacaagaaacctgtaaaaacattctcccattctctcctggaatctgcctcagggcaggtgctctgttcacagagacccaccacctgtggccaacggcttacagagggaaggctgggtgccaccagcactatgaaaactgtgagttttctcttctattttaaaatgctggctagtgcaaaattaatccagatatacttaatgtgtgtatgatacgagtccaccagcagggaagctctggaaagctgtaaacccttgcttttcctctgcaagcagccaaacagcatggccaattgtgggccttgttgggtcacatgactcagggctggtctagagggctacttctagtctctcgatctattctatgatgttctaataacaaaacacagagggctgcagaccacctcagaatgttctcaactctcgtgtaggatggtgaacagaagtcgggagacaccagattgagacacattgtgtttgaccaaacttgctcggtgggctttgattatggtagcaatttaaaaaaataacagcctatgaggccgggaacggtggctcatgcttctaatcccagcactttgggaggccgcggcgggcggatcatgaggtcaggagttcaagaccagcctggccaatatggtgaaaccccgtctctactaaaagtacaaaaattagctgggtgtggtggcacacgcctgtagtcccagccactggggaggctgaggcagaagaattgcttgaacctgggagggggaggttgcagtgagctgagatcatgccactgcactccagcctgggcgacagagcaagac

SEQ ID NO: 198977 - DNA, 1000 bp, Homo Sapiens
gacactcccaggacccttgggagtggtggttctctgcagctacagactgatattacaaagatagggcaacctcatagggaaacctcatgggtttccgagccttgaatgtgcctcatagttttatttcttctaagatatgtttctactggattgagttattgtcagtcttcacaatttctcttcattcaatggaaaatttgaaaaagaattaggtgtttggtctgagactgggaagtggacaggcctggccctgacatttatgggatctactcaagggtatagaaggagacacacactatgagcagtgaaaccctgaagccaagccaaccaattcctgtttacaacttgcgcagacctcccaactctgcttatatcacccgttccaggttagaaggccagattcaaacagaattcctgcagaaattcctatagattctctcaaatcctcagccagaatatggcagcattgagagagctgatccccttttgcccacaccccagacttcagctggcagctgtcccttctgtttccttcctgggttctatcttgtactacaagggacctcacaaacatgtatgtggacaccccagccattgagctctgtattcatctcactaggagccaatcttaggccaccgttccttgggttttggaataggcatatcagctttgggatctgctctttggaagtagagctttgtgaagagcctgcacatgcccagaagtgaagccagggctgttttgggcaaagaattctgaggatccagggcccagaccatgaaaggcatggtaagttctctgagtgaacaaagatctctttggccccaccactctgccctgtggagaagagctcagctagagagtacagtgaggctgtcagaagtataaggcccaggacaacgggatgtttaatgccagacatagaggtaattgtctgcaaaagtggaaaattttctaatttaccaattgacctattattcaataattaacaaggaattc

SEQ ID NO: 198978 - DNA, 1000 bp, Homo Sapiens
tcagaagtagaaaactatcactctgattcagaaacattaagacaagaaagcatttgtgcaagcaattgttattgctaaatgcagagctaaatggaagtttaagaaagttctctgataaaatacatctgtcactaattactcttacatttaaaaacctaaattgctttggataaataatttgatgccaaaaggtccataatgcattattcaacgcaaatcgaataatacgctttcatcatcatctagttgaagtcttactgaagttactttcctaatacttaagtggcataatttgtacaatgattactgaaggcttcccccaaaataaatatctcacatcagagtaagttgaatggtcggtaaatcacattacttaagtaaatatgaaacaagctattactgtgcacccctactatgcaagccctggcaaagaattacaaacacaaaaatcttacagctagaagagagacatctagtgtgtgttggagaactttatatattgtgcttcaggcataattaatacagcaaaatcactgcagtcgttttgcatactgtggtgggagatttttgacaaatatctttcaccctcaattcatttcaaaatttcttcccggctgtgtgacatttttgcctaattagataccttcttcttaacataagcctaacccaatgaagttttctccgtgatgcaaagttttaaagtttcatggtcacctttgcaacctaattagtaaacatttaacctactgtcatcataaccactgctcacaattctttccattcaggcagcagcaggactcccgagtcaaactgttgcagtcagtgttttagtttcctgaatatcagcccctcgtagtaagccaaatgccacacaaatacaaacacgaggaataaatcggcacactgcccattatccaggagacaaacggatccactgctattttaaattcaccaagtaggctattagttgccacagattcccatatatgtaggtgaattc

SEQ ID NO: 198979 - DNA, 1000 bp, Homo Sapiens
ttatactttaaatatttgcaatttattatgtcaattatagctcaataaaactctaatatattttttaagttatttggagtccagttggtttcttatccctgcctttgtgtgttctcccccggccactgcactattcctctttcctaggaaaagctcatcactttctgggttatatttgcttcaggtttctttccatccttggctctctgattttttatagtaaagtttatgtaacatacaatttataattttaacaatgtttaggtgtgcagttcagtggaactaagcacatttacattgttttgcaaccatcaccaccattcatctccagaactttgtcatcttcctgagcagaaactctgtctctgttaaacaattcccatttccctctttccccagccctgggcaaccaccattctactttttgtctccattaatttgactgctctaggtaactcatagaaattgactcatataatatttgtccttttttggctggcttatttcacttagcataatgtcctcaagattcatccatgttgtagcatgcgtcagaattcccttcctttttatggctgaacaatgttccactgtatgcaaaccacacgttgtttatccgttcatccattgatggacacttggatggcttctactttttggctactgtgtctgatgggttttttaagttatggttttgtagcttatctggcttattcttctttttaaggtggaaacagtggtattttgcaacctcctattccctgacaagaattagaagtcctctatatattgagttataatctcattttttaatctggcacaaaatcctagaattgaaaatatatccatggcctatcaaagaacaataacaaatcattaaaaaaatccataagtaataaagcctctgatttctaaaagagtttatgtttttcaatgtctgtgatgagatacctgcagcacaaataggtatgcagtcacagctgggtagaaactagaattc

SEQ ID NO: 198980 - DNA, 1000 bp, Homo Sapiens
ttttggctactcaggaccccttgtaattccatataaatgttagaatccgcttgtcaattttcacaaataagccagctgaggttttgatagaaattgcattgaatctgtagaagagttaggggattattgccatcttaacaatgtcaatacatttttcagttccagaatttctgcttggttcctatgatgatttctatctcttccttgatattttctatttgttcacacatcattcttttggtttgctttagctctttgcgcatatttaagacttttgatttatagtctttgtctagtaagttcaatgtctgtgcttcctcagcaaaagtttgtgttaatttcttctgtaaatgaaccatacttccttgtttctttacgtgcttcgtacctttttgtttaaaacagcatctttaactctggaaatcagattcttccccctactcaggatttattttcattgcttgctatgggttgtatctattcacttgcttagtgacttttctaaactatctttgtaaagcctatattctttgtcatatgtgatctctgaggtctctgttcctttagcttgtaatcaactagtgtcttgacagagattcccttgaacaccagaagccaaaaatagaaaagaaaagtgggggaaaaaaactctcctagtcgttgcaatggggctctgcattgggatcctccttcaatacttagccatgtcatttacaacactgccttagccttcacttcctgctggttccaagtctaaagaccagtcagagctgaaagataaggtcttctcagatcttttgtgagcatttatcctgtcctggacatgcaggtggctttctaaattcacagtggacacagttcaatgccctcatttcccaataaaactctctcccaacttttcctcccagcttttggtgatcagttgtttaccttaattgtaatcttttggcccaggcagtagaggattgttcatttttctagcaatgttttccaggaattc

SEQ ID NO: 198981 - DNA, 1000 bp, Homo Sapiens
ctgggtgggcacaatctaatcagctgccagtgaggctagaatataaagcaggcagaaaaatgtgaaaagaggagactggcctagcctccgaggctacatctttctcccgtgctggatgcttcctgttctcaacattggactctacattcttcagttttgggactcggactggctctctttgctcctcagcttgcagacagcctattgtgggaccttgtgatcatgtcagttaatatttaataaacttccctttatatacatatatatgtgtgtgtgtttatatatataatttaataggatttatataaatatataaatcctattagttctgtccctccagagaacgctgactaatacggtctcccaaaatagtgccagggtttctctgccagtaaaatgtgacagcagcttggtctgtgtttgcattccagagactggggcgtgaagggtaaaaagtaccccctgtgatgaaaagaattatttttcttgcaaactgggacatatgttgataaagaaaagaccaggttcttgcttaggtttgggggtgaaaggaaaaaagcctagaaaagaagacccatcctcttcttttaccacaagtaaagctcccgatcttactgagaaggagcttaccaaaaaaggaaacatggcttgcagagccactgtggaatgaaacctgcaggggacaaaatagtgaagtgtgatgtgagcaagctgcttaaagtcccatcagtagcaccccaccctgccagggagctcacagcatccactcacagctgatctcactgaccacagccagccagggagattaaatgacttgctcagattcacattctgacccacagactgtggtcacagttcactgtggtttgtaccataggtgattattccaggaaagaacatttggggaccctttatagaacagttctcgagacagcagtgagagaggagaaaggaagaaaatggtcagtcaggtagttagggtgggtccttggttgaattc

SEQ ID NO: 198982 - DNA, 1000 bp, Homo Sapiens
atttatcaaccaccgtgaaggatggttttcagtcgtgtcatttgctttctttccctgaaaggtccccagtcccaagcggaagttggaagaaccagttctggagttcaggcctccccgaggagcaatcactcaaccactgaaaaagctgaaaatcaatgtttttaaggttcacaagtgtgccgtgtgtggcttcaccaccgaaaacctgctgcaattccacgaacacatccctcagcacaaatcggatggttcttcctaccagtgccgggagtgtggcctctgctacacgtctcacgtctctctgtccaggcacctcttcatcgtacacaagttaaaggaacctcagccagtgtccaagcaaaatggggctggggaagataaccaacaggagaacaaacccagccacgaggatgaatcccctgatggcgccgtgtcagacagaaagtgcaaagtgtgcgcaaaaacttttgaaactgaagctgccttaaatactcacatgcggacacacggcatggccttcatcaaatccaaaaggatgagctcagccgagaaatagccacagatgctccatgaggaaaatccctgtccacattggaataaaaaagacatttttgttacaaagtttgcagtataatagagttaacagtactgtctaggctgttgcaatatattctctttcaatgtaccttccttcacctcgtcgtatatatcctcgataagtattaaaacagtatttgagtttaaaagagtttgtatatatttaaatgaataactttttatactctttgttacatgtttgtatcagtatttagtggaaaaccatttgagttgttttgggttagaatttttctttttgtactgtttctttaaaacagagttcttagtaacaggggcagttcctgaattcaaataaaccattttgtatgtttggattttgaatgggttaactaattacaggctaaaataatgccttttttagtgtttttaatttttagaattc

SEQ ID NO: 198983 - DNA, 1000 bp, Homo Sapiens
acaccatatcttccagcagtaataaagaagtcaggtgggaatatgtaacatcttgagtgctcatccaggtaggtactaaggtatgatcaactctatggaagatcgattaggaaactccctgaaagagagttcagcctgaagagagaaccaaaggccaacatcttggagctggctacaggacagtaggatgtaagctcgaggggaggagagggttaggcgcagtggctcacgcctgtagtcccaaccatttgggaggctgaggcaggcagatcgcttgagcccgggggttcaagaccagcctgggcaacatggcgaaaccccatctctacaaaaaaatacaaaaaaaatgtagctgcgtgtggtggcatgcacctgtagtcacagccaccacagaggttgaggtgggaggactgcttgagcctgggaggtggaggctgcagcgaaccgagattgtgccactgcactccaggatgggcgacagagtgagacccggacagagtgagaccctgtctcattcattcattcataaataagaagagggggaaaacgggtgcccagattgctctcaggctcctcctccctttcagctggtacttaaccactcttaacttcagcctgctcatgaatgaaatgggaatgacaattcctaactcaggcagtttttgcaaagaccagagaaaatcatgtattaatactagtacccagcaccattccaaacatacaatacaaatgccccataaatgacagccaaggtaactgttctttgcttcctctcttaggagacgtgtgaggttctctgttgctccttttgactcccaactcctgctacaatgactgatttgacactgattacctcacagtacacactgggtgctggccaactgcagcatgctacgtattccacgcctcctcattattcatacagtgtggaggtcccacgggatctgggtagagatgatcaaactgggactcttactcacaatgaagctcatcagaattc

SEQ ID NO: 198984 - DNA, 1000 bp, Homo Sapiens
tagtagaaacccaaaagcaatcactttacaatctggaaactggttagagttaaactcccatcaggtttcacagcagttcttttttggccctcataacaattgctttttacagaaagcacaacatggtaccaccacagccaagtactcataatgggagattgtctatttgtgctttttagactttttgatgcaggcatttcaggctatgaactttcctcttagcaccacctttgctgtatcccagaagttttgatagattgtgtcactattattgttcagttcaaataatttttaaattccatgttgatttcattgtgggcccaataatcattcaggagcaggttatttattttccatgtatttacgtggttttgagtgatgctttttggagttgatttccaactttattctactgtgatcaagaaagtacttgatataatttaaatttttaaaaaatttattgagacttgttttgtggcctatcatatggtctatcttggaaaatgttccatgtgctgatgaatagaatgtatattctgcagttgttgggtacaatattctgttaagtccatttgttctagggtatactttaaatccattgtttctttattgaccttctgccttgatgacctatctattgctgtcagtggagagttgaagtcccccactgttattgtgttgttgtccatcttatttcttaggtctagtagtagttgtttaataaatttgggagctccagtgttaggtgcatatatatttaggattgtgatattttcctgttggacaagtccttttatcattacatgatgtttttctttgtcttttttaactattgttgctttaaagtttgttttgtcttgtataagaagagctattcctcctcacttttggtgtccatttgcatgttatatcctttttcacccctttaccttaagtttatgtgagtcttaatgtgctaggtgagtctcttgaatatagcagacacttggttggtgaattc

SEQ ID NO: 198985 - DNA, 1000 bp, Homo Sapiens
gattccctggaaagtagactctgagtcagagattagagtgtaggatgtttattgagaagtgttattgggatcaatatctgagaaagagagaaggaaatatgactggccatagggagaaattgagctgcaatacagttccagagaaagcctcagtggaccccataggcagccctggagctgggctgtctcttcatacttgcccagagttggggtgagggggcctgacctttatacctggaagaggtatatgccctggaagaggacataaccttgagcaaggtggctctgctcacctgtggcaattctcaaagaggaatgagagctgagggctgtcggctcatggcacccccaacaggtggggagaagtccttcattcccgaaggtgatgtggtggggtatgtcacagcacctgccccagagggcttctcagttggccactttgttggaaatagaaatctttgaatgtctctgttccccaaacaaaaatctcatgcctaattgtcagtctgtgctgaagcccactctggaagttgaatgtttctcccctgtcagccaaggatctatttttttcgaggtggagtctcgctctgttacccatgctggagtgcagtggcgctatctcagctcactgcaacctccgcctcccgggttcaagcaattctcctgccttagcttcctgagtagctgggattacaggctcatgccaatttaatttttgtatttttagtagagtcggggtttcgctatgttggccaggctggtcttgaacttctgacctcaggtgatccacccgcctcagcctcccaaagtgctgggattacaggcatgagccaccacacccggccagtgaagggtcttttacgcatgtcacatctgtcctaactctgggccttcacccacgctgcctccgacccgctgtcccctcccagctgtctttcagtccaaatcctgcttctctttctggtctcagcccacggtgttctttctctcctctgaattc

SEQ ID NO: 198986 - DNA, 1000 bp, Homo Sapiens
atttagtgggtctgggtggggcctgagaatgtacatttctgacgagttcccccgtgaagctatgcggctgatccagggaccacactttgagaacagctgttcaaaccagagcaagggttaagccacctgaggttaggaacggccttattcaccttctgtgtcccattgggttaattgagaacttggcacattggagaactcaagagatgcagcaggtttttttttctttttttggatttaaatctgaagctgtctcttgctacagaggggaatgattccagtttgggtaggcaaagttaagcctatcttctttattggcagaactgcttctcagctcatgcctgagctttcctcttttggatttggggaacaagcatcctgcttcccaggtgttcatttagtaacagtgaagttcttctacagactgactgcagagtgccaagtgatgactgttgactagtgatcaggctgctccatccctcaagtactccgcctatactgcagagagaaggctgttgtgggcatggatcgccacacgtagggggatgatggtgaaagataagtagccatgcccatggccgaaaactttggtctattagggtcatagggatgacatgattgctcttaggagtctgtcttagactttcagtttttcctaattttgtttagtgatccattttaaaccttcttttaggaaaaccattttggttagtgtcttacaccctgaagagatggggggatggaaaggtaacaggctagggagtaaaggtcccatggtgttgcattgttagtttctttcctcatgcatctatgattagtgataactggaaacattcaaaacctgttcgtttaaaagtagaaggcaagcagccattaacagctacctttttaaacaatgaaaaaaatccagaactttacctaccactaccctcccccctcccacatacccacagaatcctgaccagagaaactgttccccatacactgtccttaagaattc

SEQ ID NO: 198987 - DNA, 1000 bp, Homo Sapiens
aagtattttcacagaaacattcagaataatatttgaccaaatatcaaggcactgtggcccagctacattgacacacaaaattaatcatcacatcttctatctaaattatgtagatttccttaacattatcagccccacccccacaccatacatgctatactcattctagcctttctttgtctcccagtaaaaaccactttcttatctgccaaaaatgtcttcaaaattctctcctgatgattaccagactgtactgtgtgttgtaatcatcagaactagcaaagtatagagaggcccgaccttgtgggagtaacacagggcctgggtatctgcattttaccaagtttcataaatgattctgatacataccaaagtctgagaaacatttctttagtcaaaggtatatcctacattcaagtggcccctcgacattccctttatttaaaaagttatacttgcatgatctcatcccaatccaaaagtaatttttccttttgtaaactccaacactttgaatacatctcacacgatttcaaatttccttttatatccccttaaaatagttttctaagtgtgttctatttatatgcatttctgtacaatgtgttttgagggtagtgacctcaaaacatatgcagcatacagcatacagcataatctaatacatgaaaagattctcagccctggattcactttagaatcacttggtggatttttgaaaatccctatgctcaggtttcatttccagagcttctgatttaattaccaggggtggacattgggcaccagtatgttttagaagttctccaggtgattccagtgtattctcaaccaggactgagaatcacagttactgtgaaaagagatgagaggaaggaatctttgtccttttggtatcatggtatatctccggtacccagggcagtgccagatgtgtagtaggtcaaatatttgattgaatgggtcaaatatttgatcattttcttttctgtatgaattc

SEQ ID NO: 198988 - DNA, 1000 bp, Homo Sapiens
gacacgcacctgcaggcagccgccctggccacgctccctccctaccttccgagtcctgggacagacacagtagagcacagcgggccagcctgctctcttctctgtctactttttgcagaagagtcaacagatacaacaggcccagggaggtgcccctgggggccccagtccccatcactccaaggggcagtcctgcaagtgacaaggtgggcccaatccctgtggaacaggtctctgaggaccacagagtggggccccagggaaagctgggagccgagctagaggcaggcagcaagtaagggccaagctgtgcccctgcccggaagaccttcctgcccccagaacccgaccctccgcagatagccctccctgggcagcagccccccagcttccaaggcccgtgcctcaccagacgccatgctctcacggacttgtttgctgctctgtaccctgcagatctgccccagaggagcaggtgaaaagccgcgcctgccgaggtgctgtggcggtggagttttgggcagaggagtggggggaagagtttctcacttttaagattctccaaatccaagatgaagtcatgctgtgctttggaatggtagatgctcatttatgtaaaatcataataaatgttacacaaactgttagaataaaaaaatactttttttgaggggggaggaggtccccagcctgccgctggatagtgagagggggttagcaccattagggcgtagggcgtagggcgtagggggcaggagctccgccacagcccatggtgggcactgaggtctgttggtcggtctgtgcatcctggcacggtcagtggcaggcaacccgctgatggcctcgggagcgggcgccgtggctgggcggagagcacgagcggcagcagtgggtgcggacagtgggcagctggcagcagcccactaggtgcagcgtctcgcagaacctgaaggacaggtggtcccgcttatagcctggagtggggggagtgggggga

SEQ ID NO: 198989 - DNA, 1000 bp, Homo Sapiens
ttttttttctttcaacttacacctaaataaacagtaataaatatcttagaagctattgctatatcacatttaaatggctttccttcaacatcgttcacctcaaaatcaaaaggtggaaatgcattttaatccatattttctttgaaaggtcaaaggaggtgaagaaggaaaggagatagactgaagaaagatgcataattgaagacaaaaagttaattaaacaagaaggtttcaacttgtaggttagtttaaggcagtgtttttcaagctgcaggctgcgatccatttacttatgtatgtgtgtatgtatgtatgtatgtatgtatttatttttgagacaaggtctcactctgtcacccaggctggagtgcagtggtgcaatctctgcttactgcaacctctgcctccgaggttcaagccattctcatgcctcagcctcccaagaagctgggattacaggtgtactgggccatgatgtaaaatgatgcctttgttcttgtggcttgcagtgggaaaagttacagcctttactatagagttttctttatttttcctttcagtttttacttgaacttaattgtatgaaatggattgtgggccaagcgtggtggctcatgcctgtaatcccagcactttgggaggccaaggcaggtggatcacctgaggtcaggagttcgagaccagcctagccaacatagtgaaacctcgtctctattaaaaatacaaaaattagctgggcatggtggtgcatgcctgtaatcccagctactcgggaggctgaggcaggagaatcacttgaactctggaggaggaggttgcagtgagccgagatcacaccactgcactccagcctgagtgacagagtgagactccattgaaagaaagaaagaaagaaagaaagaaagaaagaaagaaagaaagaaagaaagaaagagaaagggattgtgaatctgtttgctattgttcttgatgtcacttccttctctatgactgagaattc

SEQ ID NO: 198990 - DNA, 1000 bp, Homo Sapiens
ttgagtgggtagggagaaaagtgaggcatcttaaggcctggtggagggtgactgatttcatcctgtctttgttatgtatctgagaagcaggtttataaccagtaactgtcagtgttcaatatttaacaaactccagttacacaggtaagaggtcagcagtagcttataggtctcacttatattatccacgtgcccaactgcagccatcgtgggctagtgctaaaactttcttttgaattttcatttttctaataattgcaatcagtgagaggagaagaaaaagttcaagggaatgatctgacctttcaccatcctacacaggagatgactgatgacatggattcatacactaatgtatatcgtgtattctccaaagaccctcaaaaatcacaagaagttttgaaaaattctgagatcataaactggaaacagaaactccaaatccaaggtaacaagtctgaagaaatgggcaagcagctgtgcttctcaaattgtgtcttcaactaacagcattagcatcacctgagagctcattagaaatgtaaattccttgaaattctcagagctgggagaggtggagcaatctgtggtgtgccaaggactatagctgattgtggtgtaaactcaactttgagaactactaagcactgaggcattaatcaggtgtgagcagtgtaagtagagaactgcatgtctgacaatattgctttcttggctttctctcaggttttcaagaaagtttaggtgaggggataagagcagctgcattttcaaattcagtgaaggtagagcattcgagagcactcctctttgttacggaagatatcctgaagctctatgccaccaataaaagcaagcttggaagctgggctgagacaggccacccagatgacgaattggagaggtacaaaaaacatgtgctgatcatttataattgctattccttgtacatttttgtaattcacataaatcagttttggaatgaagagaggatgaattc

SEQ ID NO: 198991 - DNA, 1000 bp, Homo Sapiens
ttctgtaaacatctttcccttctctattgtctttcattcacttcatgtcatcttttaataagcagaagttcttaataatgtcctgtttacctttgatggctaatgcctttgtgtgttaatttttgttgttgttgtttacaccaggtcttaaagatagtctctgtgtccttctaaaagcttcatttcactaactttcagatttacatttgtagagtccatctctaattgatttttgttatcatgtaagataggggtcagatacatttttttccctacatcgatacgcaattggcccagaaccatttagtaaagggccttctctccacttcagtatcttgttcacaaatcaggttaatatacattaagatatatatttgtagatttctggactttttctcacaagtcaacttgttttttgctgtactattgatagggattatgttgaatttatatgcaaatttgaagaactgacatctttgctatgttttttaatctatggttgtgatatatatagcctttatttagacctaatcttactgctatcttaatttctcttaatagtgtttaaatttttacagaggtcttagatatctttatttttaggtataaatttggatgctactgtacatattattgaactctaaattttattttctatttgttgatagtatatagaaataaactttttgtaaattttgcttgtatccagcaatttttctaaatttattatactgtttctagagcttcttttagacttcctctgtagacaatcgtttcatcactaaataatgatggctttacctacttctttccaattcatctgcctttccttttccttgccctagtccacttgctaggacctccaacattatgaagaaatggagacagtgatgcttccttttcttgttccaaatctcagggaaaagtataaggtttgtcatagatttttttggtagatagccttcattaaaaaatttccttctaatcctagtttgctaaa

SEQ ID NO: 198992 - DNA, 1000 bp, Homo Sapiens
gagaattgcttgaacccgggaggcagaggttgcagtgagctgagagtgtgccactgcactccagcctgtgcaacagtgcgagactcagtctcaaaaaaaataataattttatgtatatatatatattcttatggcgaaataaatcttatatatgtaacatatttgttaaaactactaatatatgtcttatttattactagttagataatgtgatgtaagactttaataaatacttttgttgcagagataggaaacattttcaaatttatccttttcatggagatagatttcatggagtagttttcagtgagagttttgagattaatctgaggttgtgtattctgtccatgataaactacatcacacccctctcacacagatttgcaccaggtgggaaaataattcacatctaactcccttgtttccatttatttttaatgctttcaatactacctaatattttcaaaatgttgtatgtaaatgaaaagtaaacccttacttgcctcactctatcttctcaattcatatttttaaggtgtattgaaaataataaatttataccaaattatggtaattttgcaaatttgcacctggttgcaaaaaagcacaagaaaaaaaaatgcacaaagacacaaatagagggtaataattaaattcttaccaagtgtgatgttcttgtagaggagccactatacttcataaaattttacatttgcatatattataaatgcacaatatgttgttataattttagctttaaataataataccttattaagaaagttaagagaggaaaaacatatgtacttatttatgaataattatatatgtataaaaatggcacatgtatatgtacacatatatgcacacagagttatgtttattttaggcacttttcattcatttttgtaaatctgaattttcttttggtgtctattcacttcagtaaagaatgaatgtcttcagtgtttccgtatttcagttctgcagtgatgaattc

SEQ ID NO: 198993 - DNA, 1000 bp, Homo Sapiens
cgccactgcactccagcctgggcgacagagggagactccatctcaaaaaccaaaaaaaaaaaaaaaaaaaaaaaaaaaaaagaaagaaagaaaatagagatggctttgttcaatccaccactacttttagaaaagcaatttggattatttcctattcaaatcttttgaggtttccaaaatacttcagtattttgttctagatgaagtttcattgtcctaagtagcactgggctctaaataggaaagagattagacaatatgtcaaattaataccttttgcatccagaacatcttaccagaataagaagtctgtgggattggtttatatagggccccaaaataagaacagttttgaagtgtgcactatattaagcaatcattactagtaaactttttgaggctaaataaactttaagacttttttttgttttttttttttttgagatggagtctcgctctgttgcccaggctggagtgcagtggtgtgatctcggctcactgcagcctcagcctcccaggttccagccattctcctgcctcagcctccctggtagctgggattacaggcacatgccaccacacctggctaatttttacattttcagtagagacggggttttaccatgttggccaggctggtctcgaactcctggtctcaggtgatccacctgccttggcctcccaatgtgataggattacaggtgtgagccaccatgcctggcctaactttaagacttcttagactttttaagactatatatactttaaggtggctaatatcacataagggaaaagtaaattggcagatcaatttggtctgcaaattttaaacatctattaggaaggatgataacgtgttcggttaaagacgactttgtggcttattattgacagcttgtgaaaattgtctaaacatgggatcccacttcaatgcttttaaacagtttattgaggtataatttacataccataaaatccactcgtgttaagtgtagaattc

SEQ ID NO: 198994 - DNA, 1000 bp, Homo Sapiens
atcgtatccatttttctattgctgcatgacaaacttagcagcataaaacaacacacatttattatctcacagttctgtggattgccagtctgaatatggtttagctggatcctgtgcttggagcatcacaggctgcaatcaaggtattgcccatgctgcattctcatctggtggcttgacagaggaagaatctgcttactcaaggttagtattatacttaccctcagcaataaaatacctaagaatgctttaactccgattatccttcctaacaagttataagcttttaatgtccaatattttggctccattttgttttttaaatcacccaagttgacattaataccatttatttacaaactgtttagatttatccatatgtgccatattctttgctcactattccgtcttgcacctcagaccttttgtcctggattattttccttctttctgaagtatattttttagaagttccttcattgaacatctgctcatagttaactctaattttttgttggataacatctttatttttccttctttcttgaaaaataatttctccaagaaaaataatttttccaggttgataattatttcctctcagtattttaaagacataattctgcagtctctggcttcatcattgctattgaaaaaatcagctgttgctctaataaatgttccttagtgggtaatcactctttctggatgcctttaggactttttcattaacttggatcttactcagtttgactattcttgtgtacttgtgaatttccttttaatttatcattcttgggattaattttgcttcctgaatcagaagattaatggttcccatcaattctagaaaattgtcaagctctgttgctttaaaaatttcttctcattgtttctattctctcttctggaactcagcattgaccttctcatcctattctccatgtctcttaatttttctttacttttaacctctgatttttttttctgtgatgaattc

SEQ ID NO: 198995 - DNA, 1000 bp, Homo Sapiens
ggctctacaatctttaatttaaaaataaggagggtaaaaatttaatgaaggtaatggagattctggcacccaaggacatgcaagcacgtttcaaccctcccttaacacacgtgtgtgtgtgtgtgtgtgtgtgtgtatttatgagagagagaaaaagggagagagaactactgtataaaagctgaggaaacaggagtaagaaagatgcctgtttctaccagggctctgtctcctggggaacataaacatgtaagtgtgaaagtacaaaatcacacactaaatgttaccatgagcaacaaagcaaggcatctgaactccatctaagtggttcagaggattatggagaacaaaccagagatacaggatgttttttgttttgttttatttttttttctttaaaaagctattaaaacttaaatggacagaaattgaaataaaacaaatactgctgtttttcaaagtggattataaatttaccaaatttaatacaacagactttattaagaatgtagaacatagtgataaaaagaacttagttctaaaggagtttataaattaaagttggatataaaaataactagattttcaatataaagcagaattaaatgaattctgtcatagaaattgaaacaagaaactacagaaaataaacaagacagttgtaagacttcaggaaaagggaatttgcatcgagctgaattggatgtctgtgagtgggtgtgttgggaagcatggaaatgcttgctatgctcaggcagtgagaactagtccagcatgcttggaccatagactacactgtgagatgtgggaaaacgaggcctgggagatagtatggagtcagattgggactcatgcctagaattttcggttaaatccatagactgtgggaagcaattaaatatatttggtgagcatgctgaaaaggccaaagaaggaggatcaagagtcagccaagtaaatgttccattcactttgaaataacttcaaaagagttgaattc

SEQ ID NO: 198996 - DNA, 1000 bp, Homo Sapiens
tattttatttatccagtcatcagtttatttatcaaatgccccaatgcaggggcatttggtttgtttacacattttggtgactgaatagtgttgtcatgaacatccttatataagtttttgggtggatgtatgcttttctcttgagtggaattgctggttcatatgttacctatatttttaatcttttgtgggacagccagactgttttcaggcacacatgaagactggctgcactggtatacattactattaggaatgtatgagagttccaatttctccacgtccttgccaacacgtttccttttttttttctttatagatatcctggtgggcacagtatctctttgtggttttgatttgcatttctccaaatggctaatgatgttgagcatttttttttgttttgttttaagatagggtctcactctgttgctcaggctggaatatagtggcgtgatcagactcactgcagccttgacctcctgggctcgggtgatcccctcacctcagcctcctggatagctgggactacaggtgcgcaccaggatgcctggctaatttttgtattttttgtagaggcagggtttcaccatgttgccctggctggtcttcaactcctgagctcaaacagtctgcctgatctgtgtacctcagcctcctgagctgctggaattacaggcgtgagccactgttccctgcctgagcatcttttcatgtaccttagtggacatttttctttggagaagtgtctatgatcctttgcccatttgtaaactgggttatctgtgttttaattattgagatacaagagttatctgtattctgcatataagttccttattagaaaggaataatggtttgcaaatattttctcccgttttgtgggttttttgcttttttgatggtgtcctttgaagcataaaaatttttaattttggtgaagtccatacctattttttctttcattactggtgctttttggtgtcctatctaggaattc

SEQ ID NO: 198997 - DNA, 1000 bp, Homo Sapiens
atcaattccctctaaaaaaaaaaatcacaatagctatcagaaaaaaaggtagttacaagacaaggaaggccatcacagacaaaatgttgcatcctcccaaactcttaccagaatggttcaaacccaaaacaacaaactgcaaggtacacctcaacagcacacgaggcagtgaatttcttgcacagctcagaaaacagctcttaagcatgggcaggcttctccaaggctggatgtgtatgtattagtccttcacttgagccacgactttagaccacagagaatccagcagaggctgaccccagaccttcacccaccggggccagaagcatgcctgctggtgtcctccagtccctctctgagaggcttgatagtcttttccctctcatgcttccggtgaggtcagaagagtttggtagacctttagaagcagaggtccaaatcaactctaccaaaaatatcaatgaggccaggcatggtggctcatgcctataatcccagcactttgggagcagaggtgggggaatcgcttgagctcaggagttaaagatcagcctgggcaatataatgagatcccatctaaaaattttaaaaattaaaaaaaaatcaatgggaagataaacacttatttttaaaagggagtcctggctccaaccatttaaaataagagataagacattatattcatgtactgcagctgattaaagagctttttatgtcagatgtcagtttcttaaggaaaagaatgctacagttagacctcacagggtttcccaatctttcttaggattggtcactttggggaactatgttttctcaaagagctgaggattttactgacacatagttttgccaccctgtcttggctatggcaccttgattttaccatgggggtacctctcttcccttgctccattcatgctgttcagatggtgttgaccccacttctagttctgtggatatgggggaagactcaggtttggccagtcagagcactgaattc

SEQ ID NO: 198998 - DNA, 1000 bp, Homo Sapiens
ggcaggagtattgcttgaacccgggaggcagaagttgcgatgagcccaggtcacaccactgcactccagcctgggtgacagagcaagactctgtctcaaaaaacaaaaaacaaaaaaaaagaaagaaagaaagaaagaaagagtcagaaacagtcagatataatcctaaatggtctgtgtctgtgtctaaatggactccagctctacaaacaggcctttgtttgtttgagagcaaattcccactgggctgaggcaaccggattttcctagcatccttcgtggtgtgttatcaaaggtagagcaggtaggcagggtggggccaaggaggtgagctctgggtccccccatgttatctcagcctccaggaatggcaggaggctgcagggcctggggctggcacagactcagcatcctgctctctactgtgcagacaccacggggctcaacctggagtttgtgtgaggtggttgtgagcttgacaaagccatcaccttgcctttcctaagtactgactctactcctgtcgccttccaggactgcagtgccaagtgtattatgcatgtattttaaaacatttgactaaatctaggagttacaaagtatagctttatgacatggctatactctgtaatggtgaagtctgggcttttagtggtaatttttcatccctcgtccctctcccactcacccaccctttcaagtcctcaatgtctatcagtccacaatctatgtccatgtgtacatattatttagctcttgtttatcatagagaacaggcagtatttgactttctgattctgagttacttcatttaagataatggctggtagttccatccattttgctgcaaaagacatgattttattttttttatggctgagtagtattccattgtatgtgtgcatatataccacattttcttttacttcctgtattttatgatgctttgacaaatcctgctgatcctggagagatggctcctcccagggctagtgaattc

SEQ ID NO: 198999 - DNA, 1000 bp, Homo Sapiens
atggtgtatataagacttacaatctctgtagaactatgtgtcacacaaggattgttttgagacaatcagtgtttgcagatacgtgcatgtattagttatctattgctttgtaacaaatcactataaatttagcagcttaaaacaacacatattaatgatatcccagtttctgtgggtaaggagtgtagacacaatttagttgggtcctctgctccggggtcacaaggcttcaatcaaagtgtcaaatgggctgcattctcatctggaggcttgcctggggaagaatccaagctcattcaggttgttggcagaatttatttcctggcagctgtaggatttagggacccagcttcttactgactactggctggaggctactcaggtcttagaggccacacacagcttcccgccatgtggctctcttcacaggccctctcacacacggctgtgtgctttttcaaagccaacaagagacactctcttctgtctgctaagacagagtcttctataacataacatgatcataggagtgacaccccattacttttgccatattctattggttagatgcacaggatctgccatgatcaagggagaggattatacaggggggctactataaaggggttatattcattgcaagtcaccttaggatgtgtttgccacaatgtgttttctaatgtcctgtaaggatgaaaaaaagtcttgtaaaagttctcacttgcttcacctagagaagcaagttggcagacacgattttcagagattcatccagggccttatgtttctccggctacaaggttccacaccaggaactctgcagaaactggcattgttgtttgccaaagatctttatagcctttctaagtatctaatcaaatcactcaagatgggaacctgtcactttctgctttctgtctagttagaagattctaggtgtactactcatgcccttagagaagacatttcacaatgtttaaaggttgtaggctgtgaattc

SEQ ID NO: 199000 - DNA, 1000 bp, Homo Sapiens
atattgaatatacaccacatgtaaggcatagtataaggtcctgaggaaacagaaataaatgaggctctcaaaaatgtagtaagggaaatgaaatgcaaactactcatcatgttgcttctcatcaattctgtaacattttttgcacttttttacattttaaattcaagatgatatgctgtagtttagttggtagttagtgtttcctctttctttgttgtatataaaataacgatacagattataattgatagtatcttaaagccaacaaaacaggaaagcagattgctatgagaacagcatatataccataatataggatcaaaaagcaaggagagattacttcttcttgataatataggggaagacttcatggaggaagaatttatttgagatgccaaaaaacgtaaagaattttaatttaaaaattgaagctagaataaagaccacagtaggtcaattggttcctaaactttctatcaccaaggggcaatttttaaattacctattccctcctccaccccatgttgttgtttaaaagatttgtcattataagtaaatttgcatttatcaagaggtacttcacttttcaatttgatagaaaaacccatgcattactgttaatcagagtttctaatcagatgagataatcagtatttcacagtgagttagcatttttggccaaaagtcaagaaacttcatattttagttagtctatgagattattattctaggtgactgtttaattcctattaggatttttgaaatattgacaataattaattctagatgggaaccaccatactacatgagaagtgcatcgtaagaaaatatgtagacaggggacctacaagttgtgattatgaatacacttacccagcgctttcagcaaatgaggaaaaatgagagagatggtaggaaagtatgagggccagctcatagagggtcttgaatgtcacacttaagaatttagactttcaccgtaaccatgactgtagaattc

SEQ ID NO: 199001 - DNA, 1000 bp, Homo Sapiens
aatagcctgtgagatccccagaagtccagagaccacactttaaagaacaactggcttagttctttacgtatgtttcctttggctcccagaccacatagatcaagggggatcaaacagaggcaaatgactgagatttttagcttggttactaaataaaagcagtgtcattacttaaggtaatgaaacaggatgcggaatagtgtgctggaaggagaaagtgaattctgagcttcagggggcttgaggaacatagaggttataggaatcttgattagtgcagctcagaagtttttcttatggttaagaaacctcaccatactagtggttgttgagagagaagagggcagaagggaccttgtgcagcaccagcatttaagggtccaggaggaagagaagaggatgatagtacaaggacatcaggaaagaattagaagaaggtcggtattgtccagtgcttcagagaagtcagatagaatggggactgaggtttgaccattggatttgataataagattactggtcacctttgccagagcagtagggggtgaaatccagattatggaagagtgaagagtgcagagacagttatttatactattcttagagaagttttggggtaaagggaaagagagatatttgggcaattaagtatgagagagaggctgtactgagggcagaagatacttgagtaaattcctaggctgagaggaagaagccagtagagaagatattgatgaccactttgatctgaaagaaaagaaaactgatgaaacaagttggtattacagatgtggtacagttagctttgtagtataatctatacttctagagaagtgagaagctgatgaaaactggattccctggccagaaaaatgcacagacctgtgatatttggcatactttttttagtgaacacgggaattccttactaatttttttctgtttaattattgcttagtttgatgtgtcttgctttaaatccatttatttcaacaagctt

SEQ ID NO: 199002 - DNA, 1000 bp, Homo Sapiens
agttctccaaaggacatcattcaggcatcacttgacagcagaaccaacctgtgttgttcctttagtagtagtacagtccatccccgggagtgtgttccaagtaccccttcaccaccccctaagctggacaaacatactcttaagagcaatactccacctggtgcgagaataaagtagaatcatcctcaaattcaactcttaaaatggcaaaagtctgtgacctggctgtgatgtcctgtgtcaaactgtccctcctacgccaatatctccctagcgacagtctctgcctcctgacctaaatgacataagctatcagtgtgaaccactaagcaattcccaactatctgcctcaagaagctgcatatcagagatgaactcagaaaacagcttgcactcatgttttatgactttcagagaacactgacatttcagaatgaaattcaccacggaaaagtcatatgctgacctccctagtatattaaccccatgtacatctcatcttctcaaataaaaaaatccatgtcagatgaccaggttcaggtattttaaagtttacagcacaagaatatttgcttaaatgtgcttctcctaggtcctggcactacctcactcccatccagcacatgtgctcactccaaaaatggcaagccgatccaatcaatcagctcttgaagtttcaatttaagctccattctttaatattatttctaaagcatataatagataatattaatctggttttataaagaaggaggaaaagggagaatggagagacaggaaaaaaaaaaaaaaaaccttatcacttcaataactagaaaagcatacctgaagccaaaatagacctgccagtctggaacttcccctcagaggatacactcctttcttcggagtctgcagaaaataagatgcactttggcaccattcttcaagctcgctttaaaatttctccttcaactataatcaagtcatctagacagtctaagttttacattttgaattc

SEQ ID NO: 199003 - DNA, 1000 bp, Homo Sapiens
gacctcaaaaaaaaaaaaaaaaaaaagaaaaaagaaaaaaaaaaggtggagaagcagggtgtagggtaggtagggtagtatgctttcggtagagctgttacagagaatgaaatggaaaaggaagcaagagataaccagtgagtcaacaacaccaacgactgaaaagcaaaaaggaatggagatgagaaaaggcacgtcgcgttcaacaggtccaaggtccaagagtacctgaaacttgtcactcttccactgtttcttggctcagggaatggtaccactgccaagttttgctggttagaaatatagaaggtattcatgatatctgcctcccttatgttcattatccaaatcatcacataggcaacagccaaaggaaaaagcacgtcaagtagagagaatcacatatgcaatgtttctatgttgaaagacaacatggtgggttctggagattaaagacctgttagtttgaaatagaagaaggggatagttcatgaaaggtcttacaggacacattaaggattttgttttttgtcccgagagcaatgaaagccattgacttcaggtctgaagcaaggcaagagagatggtcagatccaggttttttcgttttcgttttttttttttttttgagacagagtctcattctgtcgcccaggctggagtgcagtggcgtgatcttggctcgctgcaacctccgtctcccagattcaagcgattctctaccacagcctcccgagtagctggactacaaggacgtgccaccatgcccagctaatttttgtatttttagtagagacaaagtttcaccatgttggctaggctggtctcaaactcctgacctcaggtgatctgcctgcctcggcctcccaaagtgctgggattacaggcatgagccactgtacccggccaaggttttgaaaagagctttctagctgtagaatggaaaacctatatgagattataaagagattatgctaaaagaaattggtgatagtggtag

SEQ ID NO: 199004 - DNA, 1000 bp, Homo Sapiens
ccaagggctggaactggggaccccgagagcctgtttgatgcttttcctcagtgtggccaagttggtacctaagctccaagacaaagtgccctttcttcttccctcttcttttctcaagcagaaggagtctatccttgttgccaccatagctgtgaatatgttggctcacatctgaagccagtacatctcagtgtcttacccaaggtccatagtgtgtactacctggttaatgctgctaattatttggggcccaaagactctttagtctgcaggtgataaatcctgccacgactgagtccttcccttcaagactgtgggttcccttctggcccaacatgtgtctagaaatgttatccaggagctgggatgagggaggtgcggtgtcagcaattcaagactctttcctaccctcttcagtaactctttcagtgatatgaatttaaaaccaggtactgtgattgctcacatgattttttggttcttatgaaggtgcttttatgtgtagataattgttcaatttggtgttcctgcaaggaggataatcggtgaaggattctatttgtctatcttgctccactttcctcaatattttttcatgttctgaaaacttgttatatgccaggtatactattcggtgttctatatatgtaactccagtattaagacacttactgtggaggaataagtccatttcaaatgattttactcttagcctataaaccacacccatgaaattctgagaaatacgaatttaggacttttacttaagttcaagtattatattctaactctcacagagtccatagaactaagaaatgagtgcaaaggtatcagaaacttggaggtagcttctctagtcctttcaacttatctctagttctgttcaggggaccttttatcctggacagtgggaccacattacatggtcacctccatggctggctaagagtatcttccagggtgctgtccacatttgagctgtgtccactccttttatctc

SEQ ID NO: 199005 - DNA, 1000 bp, Homo Sapiens
tgaaaaaatattcatatcacactcccatctttacacaccttaaaccttacctaacaaaaaacgacttgtttaactaactgtggtcatcttgtttaacaataaacctttactttagcatcactctacaaaataggacaattaaaaacactgtcacaaaaaagcagttgtacctttgtcaaacgggtttccttgtttctctttaatcctaaaatgcccctggcttccaagagccctgaaagtgacaaacactctgactggtccacagccgccacctgctgtttgcgacagactttactgtaggcttcatataactggtaggaaacaagggagaacaaacgctgcttaaaagtcacattgcttatagcctttaatcatttaagaaacctgagtctgggtttgcaaaaacttatctgaataccctatttcttcctcttttcaataaaatctttgaacaggcttctgtagatattcccgaaaacctatacagtaatgtaggaaaggggctttatatatttcctagagagatgcagaaatgaaggggaggatagggaaaggattaatgataaactctcaaccacaatccaagggaaataggtgccttttatatagtaccagtattaattcttactgttaaaatccattttaaatttattatcagctgaagtatcataggccttttggaaaatacctgctctgcaaagcagattctgatctctacctccgttccatctgctccatcccaacttaccttccccagagtgacctctttgattttcaactgcctgatcaagagcatcaaagagcaaaccaagatcttctgctgaagagggaaggaatcttgtgctccttcttggctcaaggtcatcctgttaccatcaacttctgagatgacttgggatatgtgaataagaccaaccctcttgggaatcagaggctcagaaggtgatttacctataaagtaaataagccaagcttgagtattctatagtgtcacctaaat

SEQ ID NO: 199006 - DNA, 1000 bp, Homo Sapiens
attcatctcagatgatctactatcagaatgtttaaagaatgcttacaactggacaaccaaaagacaaacagcacaattaaaaataggcaaaggatttgaatagacatttctccaaaaatgacatgcaaatggtgagcaaacacatgaaaagatgttaaacatcattagttatcagggaagggcaaatcaaaaccacaatgaggtatcatctcactagtgaagtggtgtaaatacccaagtttcactgtttcacaccagggaaattgaggatgtggacacataagaagttagtttaagagtggagatttaataggcgaaagaaaaaaagaatagctctggctgggcgcagtggctcacgcctgtaatcccagcactttgggaggctgaggcgggaggatcacgaggtcaggagatcgagaccaacctggataacacggtgaaaccccgtctctactaaaaatacaaaaaaattagctgggcatggtggtgggcgcctgtagtcccagctactccggaggctgaggcaggagaatggcgtgaccccgggaggcggagcttgcagtgagccgagatcgcgcccctgcactgcagtctgcgggacacagcacgactccgtctcaaaaaaaaaaaaaggaaaaagagaataactccctctcctgcagagagacaggggctcccaagtgggtcttccggttgcgtggtgaaatgcacgaagttttatagatgagcttgggtaggcggtgtccgatttacataaggcttaaagattggtctgaacaggtgagccatttacatacagcatgaagaaactggctgccccagcctaatcttttattatgcaaatggattctctacctggctggctccacgttgcctgcttctgtactgtacacgtggttgacaaagataaaggaagagggagcccccacgttgaacatgtcgggcccccaggtaaccttttcctattggcacagctgccggcattcacccgtgcaagctt

SEQ ID NO: 199007 - DNA, 1000 bp, Homo Sapiens
ctggggccatgctggctgcttctgcccagatgcttccaggaagcagattcaacattgacatcattacccgagtcagggtcagtgaaggctgattgtattggtgaccctcttccgcctgcaaatatctcaacagcttccctaagaacaggaacagcctttcgggtggtaactaacagcgtggctaagggctttgattccctaggagacaagtactactgtaagtcattattggacattcatgtgaatcaatttcagagagcaaatatggaccagacagacagcacatattctgaacagcagagaaagggaaagagggcccctgattgtaggaggggtcccattggggtaaggcttgtctctctatctgcagctgtatagagctccacatgggcccagggtgggcctgagcaccttccataagaaagaaaggtagcccacaactcccatcggcttcagggagagaagagatactagctcactgctactgatttgagtatctagggcttcccataatgaaaacgaaaccaaagaaaagccaggcccaaatcttggcatgtattttccactagagggcagcttaaactttcaaaataaaataaatcttgcacactttgtaaagtactatatataaaatttgtatgtacacatcatgtaaaactaatgttcatattctagtctttgcaagcctgtacaagcaggtcaagtgttcaattccatatgtctgaatgtatgtatcctaggaaactagtctaggatacaactgaaaaattctgaagaaagttaagaagagaagtgccaatgcccagtgatctgccctctcagtccaagtcctgccctgcacgacccagtgtttatgtttttatcaggcctatggagagaacacaggtcagtgtgtctgcttctagctatgatgaggaactgaagttaaatttaccttcccactataaggaactagaaaaccagacaaaatatatgaaacaacagtttttaaacaatgatc

SEQ ID NO: 199008 - DNA, 1000 bp, Homo Sapiens
gctttggttttcttaatctcaagaaaagagaagcaatggaaatacagaatgattaactggggaagaggacttttgtaagtgtgactagaacaatggtaatgtatgggccaatgggaagatttataagtcagattatttttgaaaactatttttaaaagcaagaagactacactttccctaccaaaacagaagtaacatggacacacttaagttttggctcaataaatatcaatgttatttaacttagatcattgaaagaatactcatgtaaagataatgtttattatcatgctcttaacagtcattatctttaattttttaaatgagaagcattaatactagaagagaatttctggttatccggtcaccatattcactttccaccccacattcttcagctaaacgcaaagagaagcagtgaaacagccttacccgcttctctcttattaaagaatcactgatgtttttactcaatgaaaggtaaagtaatacccttagccatttattaaacaattcaaccaagagacctcaaagtgtgattgatgataagaataatcaatgccttttcccttccaacatacttgagcagtcatgacaacctaaaaatatcattggttgctttcccattaaaaccaacgttccctgtgggtcttaattctttattttcactcatttggtgctttccaagtcatcttttctttaaagtgcccttcctccaaactttaaaaagtacttccttgacaaaatttctattcattataaaacatttcaatattttaagcttaaattttgcttttgctgaaagcctaccatttggcgtgttaagtatgaaatatagtgcagacttttatcttggttttaagtggggctcaataaaaaacaccagccacttttgtaataatggcatcacagtgtcatcatgtatgcaagcaataaaactctttagggtatggttttatactgaaaatttaatatgaaggccccttcccacaagaatata

SEQ ID NO: 199009 - DNA, 1000 bp, Homo Sapiens
ggccattacataatggtaaagggatcaattcaacaagaagagctaactatcctaaatgcaggagcacccagattcataaagcaagttcttagagacctacaaagagacttagactcccacacaataataatgggagactttaacacctcactgtcaacattagacagatcaacgagagagaaagttaacaaggatatccaggaattgaactcagctctgcaccaagcagacctaatagacatctacagcactctccaccccaaatcaacagaatatacattcttctcagcaccatatcgcacttactccaaaattgaccacatagttgggagtaaagcactcctcagcaaatgtaaaagaacagaaattagaacaaagtgtctctcagaccacagtgcaatcaaactagaactcaggattaagaaactcactcaaaactgctcaactacatggaaattgaacaacctgtcctgaatggcccctgggtaccataatgaaatgaaggcagaaataaagatgtttcttgaaaccagtgagaacaaagacacaacataaccagactctgggacacatttaaagcaatctatagagggaaatttatagcactaaatgcccacaagagaaagcaggaaagatctaaaattgacaccctaacatcacaagtaaaagaactagagaagcaagaccaaacacattcaaaagctagcagaaggcaagaaataactaagatcagagcagaactgaaggagatagagacacaaaaaacccttcaaaaaaatcaatgtatctaggagctggttttttgaaaagatcaacaaaattgatagaccactagcaagactaataaagaagaaaagagagaagtatcaaatagatacaataaaaaatgataaaggggttattaccactgatcccacagaaatacaaactaccatcggagaatactataaacacctctgcgcaaataaagtagaaaatctagaagaaatggataaattcc

SEQ ID NO: 199010 - DNA, 1000 bp, Homo Sapiens
tgaactcctgacctcaagtgatccgcccaccttggcctcctaatgtgctgggagtacagtcgtgagctaccactcacagctgttataatctaatattttttacctgataaatttttatattgcctacatttatgaatgttatgtttttattatgtatggatacttttataaaatgtccttgttttaccacttcatgcccatcatcatgacaaaattctaaggtctggtaacattaagtatagtcaaggtttggaagaaataagaactctcagtgctactgctgagagagcatattggtaaaaattatatataggagtttggtagtattctctaaagctgaaaatatgtatgctctaaccttctacttttaggtttgttcttcacagaaacttttgaactcatgtgcaacaatattcattgtggtttattttctaatcatacaaaattgtaaatcgtgtaaatgcctacaaagaggagaatggattacacactgtggtatatttatatgctgcaatgctatgtagcagttaaaatgaataaggttgatttaaattatcgacatggtgtgtgcctgtagtcccagctgcttgggaggctgaagcgggaggattgcttgaatctgggcggtcgaggctgcaatgaattgagatcgcaccactgcactgcagcctgaatggcagagtgaaactctgtctcaaaaaataataataataataaattatccacatagttagatctgaagaacatatgggcaatatggtactttatagataaacattaaagtcatttgacagtatagcatagtgtttatgaacatatttaatacatgtaaaagtgtagaaatattaactgaaatgataatgtgaaattcatgatagtatttgcctctggggagagagtgagaacaaaggaagtgtcaactttatcttaaaagtttatcattcatgaataagaagaaatatctgaaacataagtatattttggaatattcctagaattc

SEQ ID NO: 199011 - DNA, 1000 bp, Homo Sapiens
aacttttactatttaactagaaaatgcaagaacatttaacaactttaatgacccttttctgtctgcattttgtagtctgattttttaatactgtgattctacatatatttttacattccacactatattattgttgttgctttgaagcacatttcaggaaactacagcacataagcctactctagctcttagtttgtatattacctgtgaactaagaatattatttttaaagttaaaaaaagaatgaacaatatacaacagatcctaaaagatctgttgacccattaccaaaaatgttgattccctgctttaactatcaataaaaatttagatttaccaatgggtttaccttgtcagagttcttctgtaccttttgcacttctagattccacctcaggtaatgttctttttgcctaaacaagtccctttagcacaacttttaggcagatctgttggcaatatctactctcattcgtggtggatacttttgcttcatataaaattctagcttgtcagttatattcttttagttcttgtcatcatttcttctttcaatcaactgtatctattattattagtattttgagaataatggctttgtttcacttctggttacttctatgatttttctctttgtctttggttttttgacattacaatatgctataggtagtttttctttttttcttgtatttattctgtttgatattgacagagtttccagaaacaggaatttcatatcttgaaaaaatttcagaaaagtgtcagccaaaatttctcaaaatattctttcttatccattttatttcctacttttttctggaattcaattatttatatgtgagagtgttttaccaggtttcctatacctcttatcatcctttttattattctattcaagagtcttctcgagctttaattagtttaatttccaatgaccagttctgtaatccttttttctcctatatctaacatgctattaatcgtatctattgaattc

SEQ ID NO: 199012 - DNA, 1000 bp, Homo Sapiens
tggtctcttactagtgcagtagcaaagaaggaagagagaatcgcacctttctctatgacctttgtatgctcagtgttccaactgctggtaactctggcagaattggtgtcctggaatataaccaagcagattagaactcccttcaccagttgagtagtgaagataggagtctgtaaagaggcagatgaggccttggtatgcagattagatgttgtgggcttaactattttcttatatcatttatcagtgtctttaatgtagacaaaagtacaaactgaaagaaaattggcttataatcatagctgagataaactttttgaggtcaacgaacatgttcctctgtggagtctacttcttgtccaagggtttgctgtggtttatctgttctttcttctgcaacatttccctgtaaatacaagatcattccaacatgaataataataacaaagaactttatcatcatctatcacaaaatcctctcttaaccccatataccaccccacttctctatgccctatttagagcaaaatgtcttgaaattgttgtctctagtcttgtttctattctttcatttcctcttctctcttcaactccatcccattctggaaaaagccctgagattcctcagcactcccctaacagagctgttacttttactagtggcctccatttagacaaatccaatcttcacctctcttaactcctagcatcattcagcaaagttgactactccctccttcttgaagcacgttcttctcttgagtttggtgacatcacactctcttagttttcttcccatttgaatggctacttctcagttttctggattaatttctcctctgctcaatatctagacattgaagttcttcaagactctctcctggaccttcctctcttgtcaggctgtactctttctccaggtgatgaattttgatcctatagctgtaaataccttctgtctctgaaaggctttaaaatctttatttccagacttgaattc

SEQ ID NO: 199013 - DNA, 1000 bp, Homo Sapiens
ctggcagatgaagcatttcacatatatagtgtatgattttcacattttttttagtaggattagagtgaaatatatctgtgcatttgtgtatttacatgtgccaaaagcagagtggaaagatataatataaaatttaatttcatttatttgtgattttgtatttacaagtgatccattttgtggggtaccagaaaggctttaagaataatataaaaagtcaaaaagatttaagaataagatatgtaggctgggtgtggtggcttacgcctgtaatcccagcactttgggaggccgaggcaggtggatcacctgaggtcaggggtttgagaccagcctggccaacgtggtgaaacctcatctctactaaaaatacaaaaaattagccaggcatggtggtgggcacctgtaatcccagctactcaggaggctgtggcaggagaattgcttgaacccaggaggcagaggttgcagtgagccacggttgcaccattgcactccagccttggcaacaagaatgaaactccatctcaaaaaaataaaaaataaaaaataagatatgtaaatgtgtgtgcacacatgtgtaggtgtatctctgcatgtttggtataaagattttttcacccaaaggagcttcacttgtttcagtttctggaattgcctttgaagctgactccttggttttgggatgctcaccacaatggatatcttattcatttatatacaaggctagtaatattcacccattaatcttgaagaaagctgtacagctcaccttaagtttgcatgctcatgctacacactgagatttttgtattctgctcagtaacgcaaattgagctttcctttagccagcctgcacgcctttgaagaaggtgaagaaatggctttcttaaattttagtgatttagattagaccgtttagcaactatagggaagcacagtaaactatcgtgattgcctcattgcatggtgaggtctgtgtttaactctatgagaattc

SEQ ID NO: 199014 - DNA, 1000 bp, Homo Sapiens
aagcccagacccctccaatacccccacacacacacaccctagaggatattctgagaaaagaggggctgcatttgtgtgttttcacgctactgtaaagatactacccaagactgggtaatttatgaagaaaagaggattaattgactcacagttccgcgtggcctcaggaaacttacaatcgtggtggaaggcaaaggggaagcaaggacctttttcacatggtggtaggagagagaagtacagacaggggaaatgtcagacgcttataaaaccatcaaatgtcttcagaactcactcactatcacaagaacagcatgggggaaactgcccatgtgatccaatcaccttccaccaggtctccctctcaacacctggggattacaattcgggttgagatttaggtgggaacacaaagcctaaccatatcagggggcaagggttggcagtgacttgtgatgaagagagttgaggttggggactggaagggcataaaggtgataaagccccagttgaaggaaaggcacattatattatttatgccagaagaaggttttcaagatcagtccagaaccaggacttggcagaaatagttagaagcccctaatttctgtgttgggtttcaccatcattcacaatttttaaccacatgaggtaattggactatgcctcagttaacttttacttacttaactcaaaacctgagctaggccagacacggtggctcacgcctgtaatcccagcagtttgggaggccaaggcaggcagatcacctgaagccaggtattcaagaccagcctggcctacatggcgaaactccatctctactaaaaatacaaaaaattaaccaggcacggttgcgcttgcctgtagtcccagctattcgggaggtggaggcaagagaattcgcttgaacctgggaggcggaggttgcagtgagcagagatcgtgccattgcactccagcctgggcgacagagcaagactccgtctcaaaaaaaaaa

SEQ ID NO: 199015 - DNA, 1000 bp, Homo Sapiens
aaaaaaaaattctcaaaggaagtaaaaatatgtatttaaattaatggaaatgaaactataatatattaaaataagtgagatatagctaaagcagtactgatacagaaatttatagaactaactgcatatgctaaaaaatgagaaaacatctgaaatcaataatctaagctcccacctcagggacctataaaaagaaaagcaaataaactcaaagcaagcagaaagaagataataaagataagagcagaaattaataaaattaaaaacagaaaaatgacacagaaaatcagtgaaacaactggttgtttgaacagatcaataaaattgacaaacttctattaatactgacaaataaagaaaaaaagacataaattactaacatgaggaatgaaacaggatatcactaaaaatcctgcatacatcaaagagttaatagaaaacactacacacaaatttgacaacttacagaaaatggattatttcctcaataaaatatgaactaccccaactcattcaatatgaaatagaatatttgaatacccctgtaactaataaggaaattgatttcataattttaaaaccctaaaaaagaaatcacctggcctaggtggttttagaagagaattttactaataaaggaagaattaataccaattctatacaatttcttccagaaaataggagttctcagttcattttatgaagccactgttagtgtgatatcaaaaccagacaagggcaaaacaaaaaaggaaatgacagaataagattttgcataaatatagatttaacaagctaaatctaacaaaatattagcaaatagaattcagctctaaataaaaagaattatacaccatgaccaagtgaagtctatttcaggaattcaaggttagtttaatattcaaaaagtaattgatgaaatccttcatattagcaagcttaagaagaaaaatcacaagatcctattaattggcacagaaattggtattcgacagaattc

SEQ ID NO: 199016 - DNA, 1000 bp, Homo Sapiens
aataaactggctactaacagatttttcagatattagttcaatataatttatttattgataaaagagtcataatggacactaacatacatgtactacatggtaatccaaatgtttattgaaagaattccctctattcctgaggaaagagaaagggaaatagatgaatatttgaactcaagaagcttagtctattatcgtcaccttttttccattttaatcactcagtattctttcaagtccctttttcccttatgtctagccactattctgctttttttccaactacctcaattcctttgcatttccttctttcacacctcaggaaacaaaccacacctccatctctgaatacacttctactttcattcaatcctactttttctcttatctcttatgcttcaatatgataccacacactccaaggacctcgtccatcttctccacacaggctctcttttataggactcaggttcctctcccacccagaccctccctctgcatttattctccattcctttctccttccctggttattgtttcttttcctaaactctgatccaaatcttgagtatgcaatatggaaagaaataattccttcccaggaaaattatatcatgttcaggaatatgaatgagtgagaaagtatacataagagtgttattagcacatggtctgtgtttccaggcaaggtattatataactgaagcagattaagggaataagtaagaaaatgtgtggaagaactgaagagatatgagaaaaaatagtaagaacgaatatccttttcatatttcattccccataatctaaggcaaactagtgcttgtgggccaaatctggcctgcttacctatttttttttaatagacttattggaacacagtcagtctcgtctgtttacacgttggccatggcagcttttgcactataacagcaatgacagtagtgacagagacagcatagctcacagatatttatctgaccctttatagataaagctt

SEQ ID NO: 199017 - DNA, 1000 bp, Homo Sapiens
gattacaggcctgagctactgtgcccgaccaatcttgctggtctttatcttcctaatgtgtatatgctgtttagctttcaaattctaacacaggttcttccttttatatgaataaccttaatagagaatgccttgtatcgccatctcttaatgttcctataaacttgattttccagttaaattgcagctccctggtgagggaacatgtctttaaacctttgtgtgtgcctcattgtacctgcataattatgtaaagttctttttgtggtggtggtggtgtttttttagacggagtctcattgtgtcacctaggctagactgcagtggtgtgcatgatttttgctcactgcaatctcactcccaggttcaagcgattctcctgcctcagcctcccgaatagctaggattataggtgtgcatcccacacccagctaatttttgtatttttagtagatacaggggttcaccatgttggccaggctggcctcgaactcctgacctcaagtggtctgcctgcctcagccttccaaagtgctgggattacaggcctgagctaccacgcccaaccatgaaaagtttttaatgagaaacgctggtttggtctttatttatgctcttgaacaagtcacttagagtcttatttttctcacttgcaaaatggggacatcagtgcaagtttacaggactgttggattgaacattgtggccacctcataaactgtaaagtgttccataaatatgagttgttatgttcgttataaggggtatttaaaaagtggttgattactgtcagcatagggataaaaagcagatcacatgggagacagtaacagctcctgtctaggaccaaagcagccagaaattagagaaaaggttgagtaaataattactccacatctatacatggcatattacacagccttcagagtcatatccttaggtgctgatagaaagatctctgagatacattaagtgaaaaaagctaagtgcagagaagctt

SEQ ID NO: 199018 - DNA, 1000 bp, Homo Sapiens
accaagcacagtaattttggaaggttttgtactagaaattggattcctgaagaaaagataacctcattttttagtcagtacagctaactcatgaaaaatgacttagtttccatatactacttttcaatgtaaaagaaaatttttaaaatatttatgacttcaacaaatcttggtcagaagagtttttatcataattcttgagtcaacaaacagtagaatctgaaagttatgacaagatagtgcactgcagaataaagagccctattgtatgaatccatttcagactacagaatcttgggtaagtcaatttacctctctgggtctcagttttgccctttaaaaaaattcagttcaaatgagaacacatggacacagggagggaacatcacacaccggggcctgttggggggttgggaggaaggagagggagagcattagaacaaataactaatgcatgcggggcttaaaacctagatgacaggttgataggtgcagcaaaccaccatggcacatgtaaacctatgaaacaaacctgcacattctgcacatgtatcccagaacttaaagtaaaataaaattttttaaaaaattcagttcagtagctttcatttttgtttaacagaggcaccttttttctaacaatttatcacctggaaattcaatatttttaaaactgataaaatgtagagcccttctaggcaggttgctcagatcccacccactcagcactcagcatgctcctcagtccccaaatccccacctcagacaccccatgaaatatgtctgaggaacagaatataaaaaccagaaatgaactctttcaagtctcttccagctctaaaagtctaggatttcattattttatactccatatcattagccattagagaaatgtaaattaaaacctcaatgaaatatcactatatacctatcaaaataactttttaaaaaaatgttaataacaccaagtgctggtaaggacacaaagtatctagaattc

SEQ ID NO: 199019 - DNA, 1000 bp, Homo Sapiens
atgacagtgctttttcatctccaaaaggaacataatatctacattcaagagtgttatgaggatctcacaagatatgtaaaaacagctgccacgggctacatatgtgttcagtatttttttttttttttgagacggtctcgctctgtcacccaggctggagtgcagtggcgcaatctcggctcactgcaagctctgcctcctgggttcacgccattctcatgcctcagcctaccaagcagctgggaccacgggggcccgccatgatgcccagctaatttttgtatttttagtagagacagggtttcaccatgctagccaggatggtctcgatctcctgacgtcgtgatccacccacctcggcctcccaaagtgctgggattacaggcgtgagccgccgcgcccggcctatgttcccagttttaaacaatatgtaatatacttttacaatacgctcaattgatcctcaaaactctgaggggcatattttctcagccctcttatgttttagaaaacagagactaaaggggttaaaaggccaatatgtcatggtcacaatgccaacaggcaatgagagggcctagaactcagatgtgtgaacccaaagacccgtgctacccacataaaaaatgacactcaagcaatcctcgtttttttatgggcagatggctcatattatgtttaccaacataaagtgacttaaaaggtttaactgacattaacacctgttggaaattaacatatttgtggatgcagtttgtcatgacatttatttccacaagtggtttttagcctaataagagtcaaaatagtacatttaatgtctctattgattagaattcttacttctttctccctttaaaacaaaacaaatgaaaatagccagtaaactcaaagaatgactatttagatttgggctgcaattttgtgaaaatcctaatattacataggtagaaaaattctcacacaactcaaagttatcttcatatcaggtccagaattc

SEQ ID NO: 199020 - DNA, 1000 bp, Homo Sapiens
tgttggcgagagtagtcggatccatggccaaatcgtgcatctgtatctagagacaactttttattctcgctccagtaaggatcatctcgccttgaagagaaatatttgcttatttacataaattagttctacagtaatcaaacgacatttacttggagtcatacataccacatgttagaactgtggacataacagggctagtaaactcaagacataacacatcaggagtacaaactagcaaagacttaattgttgaattacataaagtcaaatagtgtgagaggaatttaacaggagagaaaatagttgaaaaactgcctgtcttttccattaaatggaaaagacatttagcattcaggagaaatgataccattaaatggaaaagacaaataaaatacctgaaaccactttataataaaattctaaccagttcacacaacctcttcagttatccttaactttggaaacgttagagtggtaagtcagaagcacagttcattcattccacctatttctctacacaatcaactcagtttcatagaatttatgttaagaagattaaatgggcatacttatgtttttaaatctatatgaagtatgaatccaaacacacaatagaatctatctttcaatctcaagtttatgacttccatttctatactacctgcactacctttttaagaatgttcaaaatctgtttaattattattgaagcctactatgacaatgtatttccagtcataatgaaaaacatttggcatcagaaaggtagacagggaaagaaacacagactgttcccacttgctagtgcactgggtctaccccagtactgtaatccttcccatccctgttgatcatgacttttattccagtgatgggagcctgtactttctaattctctagtcttagcctaaagggaataaaacagcaaggttaactgttaaggaataaaatgagtaactacctatgatctacatcacgtgggcgtttcaaggaattc

SEQ ID NO: 199021 - DNA, 1000 bp, Homo Sapiens
aaagtataaaatgtctaggattacatttacatttaacacaaatgctaaagggataaagaataattcttaactgattagctagcactttctgcagatgtctagcttctagaatgagtaaacagaaatgttaggagatgagaaaacatcacagaggcactgattaaaaaaaagaaaaaaagagcagtaaataaacatagggagaagcagtcacaagaacttccacaactaaaggaaatgggaattggggtaggccatggttgctaatacacagcacaggagaccaagaatatttctatagtgagtcatcggcttttgtatacctaattgattccttgtttcataacttccagatatctgaatttctacacattcaacttactatatagaatcatattcatgttgaaatggcatcaactttgcatgaaattttagtttgaaaaagcaaatgaataaaattatgatgtcaaatgcagtaagaaattgcaacaatggtctttgtgtttttgctctcactgcccactccaatgctgctgtgttcaaataaattatttcagcaaataaaatatttagagctataaaggaatatggtaaagacaaagataaaataccatttgtaatatgactactattaaagctctggcttgcagattgctggcaaatagtctattttccagcttgtcaaaacaacccattctctgagcatgttcagagcttgcagaggtcttcatttataccagaatgggaattggagaaagaaaaacattttgaaaatgatctgcagaatacattgttttgtaaaatatctaatcaaatgagagcagcctgtcaaagtcaagaaatgttacttactcggctacaataggtatgatgcagaactggccacccactcaccagctgcagaaaatgaatttaaagtaagctggtcatttgtcctcagacaaagtacaactgccaaatattttatcccaatttgtcatccctgctctattccagtgaattc

SEQ ID NO: 199022 - DNA, 1000 bp, Homo Sapiens
accaaaaaaaaaaaaaaaaaaaaaggaaagaaagaaaagaaaaaacactcattctacatgtatcttagtattttattttctaaaaaataaataaataaatagctggtaattaaaacacaaaagtgattatgaggaacatggtgaatggcttttttttttttttttctgaggtggagtcttgctctgttgctcaggctggagagcagtggcaccatctcagctcactgcaacctccaccttccaggttcaagtgattctcctgcctcagcctcccgagtagctgggattataggtgcgcaccatcatgcccaactaattttgtatttttggtagagatggggtttcaccatgttggccaggctggtcttgaactcctgaactcaagtgatctgcccgccttggcctcccaaagtgctggcattacaggtgtgagccaccatgcccggtcaaatggttaacttctacatctcccccaatcccataaattcaagatataaaatcaatgaaataatccaaaaaatcacattataaagttaatctttctttttgtctccccaccatacaaatgttttaattggggattgcattactaaccaagaagttggcaacaccaaaacaagatatgatcaacttaatagatacaaaaaactatttcaaatagtgaaaatttatactcaaaataagtattgcacataaaaatgaagttcaactaactcataaagttagctcaagataatgttctatctataaaaaaactaacaatttacttatatacttaaaacgagtttttcagtggaatcatttagatgacactggcttattggttcagtaaagtttgatctttcatttttttactctcagaaattttccaagaaatcaggcatttaagtcattctacttaaatcagctttgtttatattctatttcattttataagcaattctttagtctttatgtcactaatggcatactgaaatggaggactatcattttagaattc

SEQ ID NO: 199023 - DNA, 1000 bp, Homo Sapiens
ctattcttggcccagggtatatactgtgttgaaccagacaaataagggccctgtccacatttttgtggtgcctgtgatagtttcctcttcttttcctgggatgccaagggagcttgttgagtgaggtcctggcttgattagagaagtagactgtcttcagtggcatacaatctgggggagggcagggcactaactgctctagccgcaggccgctaacctggcgacaggggtagaagatgttctctagggtgtccacacatcctggtttgcctgggatagtcctgtttaatacctattgtcctggcttaactaaatagtgtcccctttagctctccaagatgtcgcagtttagacaatagatttacaagcactctggggatcaccctccaccccccagtcccagaatgggagagtagtgctacgaatggtgctaatacaggacttgtcacctcattggcttttccatggtgctcatgagacaagcaggagtaggattagtctgccttgttctctgagtcctggcaaagaaactccatccctttatggagttcctgcccgagactgctgccgcctggctcctggtgggctgctcactctctcaggcatggaggtcagggagagccgggggctgttcacctctaatggttcttccctgcagggtctaggaaggcttggggataatccagttgggactctctccctggatgtagacaaaagtgctggcaaggtaagtttctgcattttcagagaatggggctgtgattcagagaatggctgaggctccaggtggagtaactttgaaatcccttgtggagttacctcgagcctcctgggtctgtttacgatgatgcattctgaaggaaaccttcaagcatcagggaattgattccaggttcacattatgctgggtaggttgtattgccaaagctggagacagcagtgaccatgactggacagttttctttcccctgagctgggaaagacaaaatgtgctgaattc

SEQ ID NO: 199024 - DNA, 1000 bp, Homo Sapiens
ttataagacttttgaattgtattgctaaaataccctccagaaatttactaacaattgcattcccaatagcattacacaagaatggccatttctatgaaaacaataaatatgtgcctttttaaagcctaaaacctcactgtccttgaggagtgtcctcagatgcagtataaacatcaaaggagccctattattgagggagcaatttggaagcgaatggaactgttgaccatgaagggttgtcaaattttgcaataatttggtggatgaaactcgctggagaccctgctttccagacactttctaggaaaaaaaaaaaaaaaaaaagacagtatacacttcccagagtaaccagaatttttgtgggttttgctttcctacatagtttgaaagttctagcaaatatttactttctttccaaggtatatttctaagtgggctaagaaacaaaatgagaaactgttaatatatggatacttcaatagtgtgaggatgaatacaccatatatatgaaaacatacatatatatttgtataaatagtatatgtgtgtatgtatattatatatggtaaatctaagaggcagtatgataagggaagaatgctgaactggtaatcaaaaaaactagacccagctctttactaactctgtaaactttcaaaaattactttatctttcgggattagtaaaataaagcagtcaagcaataggacactttccagcttttaataagaaatgaatcagacaatgcattttagaagatgattagagctaggaatttctcaagaggacacaaaaagtttcaattatttaatctgtgatttttgaaaattatgtcttaagaaattgtcacttctaggtgagctgacacaagccatatgtgatggctgacaaggagcaagaacactgggttcaactctgtggtcccacagtattggccttacccagtcatggctgaaaactcttcctagtgagaatcttgctgggaagactgcatgaattc

SEQ ID NO: 199025 - DNA, 1000 bp, Homo Sapiens
attaatttaaatcattagtattcagtgaatggtacaaattattagaatacgattcaaaatcaagaggaattcatgctgttttccagtttgtccctcaattcacaagacctctcttattcatcaactaattagatttaacatttttccattgtgaatgctaaagccatcggccaaattaaatgaaaacaagtcccttgttgggtgcttccagaaaagtaaggccatacatagattgtgaagattgagtatgcaggatggtgtcatttaatggcatgggccttttattctgaaatggagctcttcataatcattgaaacgtggagggtagcaggccttggggtttgccttgccctgctactcccctaacagcggcagcctgtcagctgtatgctaacgaggtgaacaattaaaccgagtcctatctggctggccccacaggctctaggctcagacaaagaactgtttatacacctgttgtatgtgtagacagagccatttgaatgtggagctgcggattaaagggaagacatgggagcccaggagagcaagggttaaagagaactataagaactgtgaaagtcaaattctccagaaaatatatgagggccatttgcaaggagaatcaagttacaaagaaaaagttcctgctaacttcattgacatgaaaaactccagacttcaagccttcgtctagtctgaggccatttttttaaaggcttatatttttgctatgtgtgccagttaaattttttcttttgtaagctaattatgtttaagttcgtgtgagaaaatacttagtttgtattgttctatagtgtaaaaatatttcctggtgtttctgttgcaaaacaaatctagcacccattctgattttccttaagggaaaagtaaaatttctaagatttattatttaggtaatgatcagacactttttaatagttgagctttaaaaaaatcaaataattatttatactgatgaagtaaaaggaaatcagaattc

SEQ ID NO: 199026 - DNA, 1000 bp, Homo Sapiens
cggcaggcatttggttaatgtgataacaatctgctttaattataacctagagcaggcctgtcttactggctaaaaataacctgttacaaaacggtatctgcttggggagtctagagctaagggagaaggcacagactcccctacaattctgttacccacagtaaacatatactcttctctggaatgggacctcctttccctccccagcatttggctctttacccttctttgctcccatcagctaataatccatctgggatttctacaaacaggctctggctggacaggactgcatcccaagaagagaccttcacctcggtgacctcatactggaagtggacgatgtgaggttttccatcattcacagggaggtcctgggtcacagtgagcttctcgtcctgggaaggaaagcagggcagaggaccaggtcactactgcttctggccatatcatccactccctaatctaggcgatgctgggagtccccttaggccagtgtcagggtagcgtgggatagaggccatgctgaaaacgcagagcttcatgatggctaaaaggagctgtcactcaccaggcactaagaccagttgatggtggtaaaagctagcaaaacagaaagggaaatatttacctaaattgtccactaggtgccaagtacaaagtgctgtcccatatattacctttatcatcatgacaagcacttgagatggtaattaacaactccactttaagtctgagaataatgaagcaactgacccaaggctccaaagacagtgaatggcagagatgagattcaaacccaggtctccctgactcgaaagcccacgctttcccccaacaccatgttcttttccttccctgtcagaaagggaaataccaaaaacaaatgagggtatgtatgagggtttggctggagccccagtcagccaaagtctgattccaagtggactgcagggtccgtgttatctcccttgggcacaatctcaaaagcccagaattc

SEQ ID NO: 199027 - DNA, 1000 bp, Homo Sapiens
ggagcaacgtatcgatgagggtagatttgtcacaacaaaacaggagcccaagccgagagctttatcacatatactcatcaaatcattctggctactgcaggacacttgtcctgaaagcatctctgggaacatccagctgcgaaggactccaaggccttaattttcagagaggtctctctttagtgggtctacaagtgaatgcctccagctcgattgagtggagagggctcctttgtggccatagcagcgttggaattggggatacagtgggcaggccagatgtaaaagccacttgccatttggccaccctgaaaatcttcctttctgcatgggaatgcaggccctgaaataataagatttatgtgtatcttcaaaagcaaggagaacttatatcataggtaatctcaacattttgatgtttcataagaaagctgaagaacttcagtgattaggataaatcatcttagacctattcagtgtttaaagaagttttacaaaaagcacatacacatgtactcatggagaagaacaccgctttaaaggagtaactagttgcaacttgttatgttatttccaatcttgatctatgtgcctatggttttagatcgttgcggtcaacatgttgaatatttcatgagtgaccccagacaaaccacttcacctccactcatctattttcttatcagcaaatggagataattgcttttgtttcacagggctgttatgaaaatcaagtgaagtaagataatacaaaaacaattcgtaaactctaaagtatacaattatgagacatttagtgacacgtaattgcttctgttatgtttttctatgtatcacttgtaacagttgcatattactctgagttgctgtcatagtttgtttaaccattatctacttgttactcatccttgctttttgctatcataaataaagttggttataaacatctctgcatggtttgcattttttctcttttgaaatatttctttaggaggaattc

SEQ ID NO: 199028 - DNA, 1000 bp, Homo Sapiens
aggatctcatgtgtgggagcggtcgcagggctgtggggaggctgcagtgagggactgtctgagagccgctgccagggctctgacagcgtgatcagaggaaggccataaaggtttgtggggatccctgtggtgatactgtctgcttgtagcatggtgcctggccaatcgcaggtgctccatagataatggggaagatgaagatggtgctggaataagttttctcaaacttcagcgtggttggtgaaaaagagttaagaggaagagagaaaattgtgagtgacgtgctgacgaaaggagctgagagatcacgtagaaaagacatcgtcctgttaggtgaaataacagagcattaactattaaagaatgaaaacactgaagtgatggaaagccctgagtgtgtggtgggcaccttccctgcgcggcggtgggatccgaggggatcattgtcatgctcaggatcctgcctttgccttcaagggggttaccctctatttggggaaataggacaggaactcctgataaatgactacatttttttttttgggacattgtctcgctctctctcccaggctggagtacaatggtgtgatctcagctcactgcagtctctgcctcccgggttcaagcaattcttctacttcagcctccctggtagctgggattataggcacttgccaccatgcccggctaatttttgtatttttagtagagacggggtttcaccacagcccaaggccaaaggccaaggccaaagaagagctgccatgggatgaggttgataaactggcctattacttgtacagacagtaagtgtgagttcagaagagcacaggtcccttccagtgcagacatcagggcagcctcacccagaaggtttccgttaggccttcgaagatgggcagaggatatgaagtgagcccctccaaatgtggttcaaaggtccctaaaataatgttgaagcttggttccaagttcacacagtttagtcatttttgaattc

SEQ ID NO: 199029 - DNA, 1000 bp, Homo Sapiens
agcaagaggatataacaatcataggaaaaatggtggatagaagacaggactaacacgcagctcccactggatggatagaacagtgtctggagacacacattatgaacttttgctccaagaaccactgtaggaacatactggaaaaactggaagaattcacagaccctttgaaagaagtggcttgtcactgcagatgccaaaaaccagccaaaaaaccctgaagacaaaagacgtaagctcttgggatctctatggccccactcatcacctgagaaacctgagtactcatcctggccaactcagggcaagattatatcccccttctactactgcagctgtactctcttggaagcaccacctcctgacaggaggccaatcaactcaagccattacagcaactcataacagaacaccctgctctaaagaaggagaaaacaatagataactccactgcctgcaacgccctggctaatcagaggtcctgagtccatccacatgacaacttgactgctagcataaccagcattcaagaaaaccagcacaccaaaaaataactacaaccaaggactcccatagagtcccttttactctcctgccacctccaccagagcaggtgctggaatccatggctgggagacctgaagatagatcaaatcacaggacacttttcagacattcctcagcaccagcctggcacccagtagccctactgggtggctggattcagaagaacaataacaatcactgtggtctagctctcaggaagccccatctcgaagagaagggggagagcaccaaatcaagggattactccatgggacaacagaatctgaacagcagcccttgagtccaaaatctttcccaaatgagaaggaactaaaaaagtaattctagtaatactattaaatgaggttctataacacccccaaaagatcacactagctctccagcaatggatccaaaccaagatgaaatctctgaactgacagatgaagaattc

SEQ ID NO: 199030 - DNA, 1000 bp, Homo Sapiens
aatactgaagaactgcgcacactctgcagacgcctccaggtgcccccttcagtagtttaaacccctccagagactaaatactccctgtttttagtgttctttgtcatggcaaatctcatttgaagaatttgctttgactgcagcactaaaattaaattcctttttgtattaaaggttatagtattgccgtgaagagctgtggattatcttttctgtcatcttttcatttgaaaaatattctgaagaatgttctgtcacttcagaattattctcagtattgtgtgtttctttcagcgatgaggagttttcattcatttaacgttggaagaatggtgttggttttgagattgaatcttttctaaacaaaatctgaaagatatggtactataggaaaactaataaaaaatttaatagcaaggcttaaatattttatttaaggctatttcatttatatcagcgtcacatcaaatatctcaataggataaactgttcttgaggcattcttggttggtattaggagtacattggaatagtacagtttagacacagaactggataaattacttaaaattctgtgaaataatctttgtgattttttttttagaaacaagaaagcaatgtaattgaaaactcatttttaagttgtgtctattatactgtgtttctttcttcttaataagatatgctttcatggctctgctagacctgaattttttcttttaatgcttctaatgctgccttgggtttctttttctttttctttttacctttcacatcatcaaaataagggtgaaacatgatgatatgaaagaatgagtatttagcttcttgtcaaaaaacaatacacttatagaacatgtattggttgcaaatatatgctgctcaggtttgttaagaaacctgttaaaggaacaaaataatttagcaagaatttcattcccatatagaatcacagttgctgagcgttgctgcattttagttatctgctccaatagaattc

SEQ ID NO: 199031 - DNA, 1000 bp, Homo Sapiens
agggcaggatccctgagtagcttttctttgccaagaaactaacccagggattccattttggaactcagggagggaacagaacgtcctggcagttgtatgggcccggtggggtgagatggacagaaagcttcagaagacaagctgggccaccagggagaagttggcggtctaaggaaggccaacagtgcaacatgaagtgggacaggcaccagaggcagccctgagagctgagtgtgctctcaagagccccagcagaggggaaagtgacagagtaaatggttggagctgccatgggaggctgatgagggtcagagacttaagagacctgtactcagtcgctatctctgcccaagtgagtacccacatgccccttcctgaatcttctcctgtactggctgatttccagagaagaatacaaactcgaaacgccaagccagactcccactgctgttcaggacctagacgtgagaagtggtatcacatactctggcttcaggacacccaggtttgaatcctggctctgccatctgtgccactgtgtgaccctgggctaacagtacccaccacaatgggataatatgaggattcagtgagatagtgcgagtaaagtgaatagcacatagtaggtggtcagtaaattgcggttataagaactgctatccagtgtttgctgccttagtctaaccaaagaggtcaggtctagcttcctccaggtgagggaagcacagagccctcgcctcccaggtttggagttcccatcagcagggtccagccaccatgcattggaccccaaagggttacaagccctggagacagtggcctgaggttcccagtgaaaaaccaaagcataaaaataattcgatgagtaagaataaaattccctcttctgaggttcccggggccaggcccctccctgcggcaggcacttcccctttcccttgctcatggaggagccaggccgggctgactcagagcaggagcgcacagtagtcctcccagc

SEQ ID NO: 199032 - DNA, 1000 bp, Homo Sapiens
ttttaattttttgaacagacactgtctctctgtgttgtgcagggatccctcccaaagtgctgggattacaggtgtgagccactgtacccatcaaggaactctattaaaatccagtcattttacataaggcttacgagatcagttctcttttcccatttctctcaccctttggctgtgatctgcccaaagctgtgacctgcagtgtggggagagtttatagatgagttgtttctgagcataagcaagttcaaatgagggaatggctcagtgggcacctgctgatacaagtcagaaaaggaaatataggtcatggtggctggggagtttcatggatggatccagaagctggctttggtggtagaccctttattgggcaatacccttttaagttccagatgttccaagaggtctggtttccaaatgaggccagggttgcccatgtgtaagtaggatacctggctgttgctttctagatagatcctttttgcctattaatcctgtctctccatagagagtctccttgacctttgagacctggctgaaagcttggttcttattgggctatgaagggaaagactagtgggcaaatgtagattgaactgtgaagtagacctaattatcatctcttcctgtccctgtgacattcctatttataactgataatatgtcttttttcactccaaaatatgagtgcctgacataagatgaatattttttggagagtgggtgttctatattttagacataagctaaagggatgaaattttgaatgtagacattggctggctattaggaaggtttttttttttttgttttttgtttttcgcctgaagtaaaaggcattctagccttcctcaggaccaccccatgacttgagcttttggagacaattcttcacacaacatatatttcagaggcctggctatgctgattataccacttaggcctactcatgctcagtttagaaactggtttctgttgtcacaataatagtgaattc

SEQ ID NO: 199033 - DNA, 1000 bp, Homo Sapiens
ttgagttttttctttcttgtatattctggctattaatcccttgtcagatgaatagtttgtaaatattttctcccattctgcagactgtctcttcactcatttcatcgtgtcctttgttgtgtagaagctttttagtttaatataatcctgtttttgcttttgcttttgttgcctgtacttttgaggtctccataaactttttgcccagaccaatgtcctgaagcatttctgctacgttttcttctagtagttttatagttttgggtcttacagttaagtctttaatccattttgggttgatttttgtatatggtgagagctaaggggtctagttttatttttctgaataatggatatcaagttttccgagcagcatttattgaagagactgtccctatccccagtgaatattcttggttcctttgtcaaaaaacagttggctataaatatatggatttctttctgggttctctattctgttccattggtctatgggtctgttttttatgccagtagcatgcagttatggttactatagctttgtcttatattttgaagtctagtagtgtgattcctttttgtccaggattgttttggctatctggggtcttttgtggttccatatgaattttaggattttttttctatttctgtgaagaataccgttggtattttggtagggattgcattgaatctgtagatcacttttggtagtatggtcattttcacaatattcgtccaatccatgaacatggtatatctttccattttttccctatactctttcttacatcagtgttttttatttttcctcatggagatcttttacctccttcataaaagataaatttctcctaagaatttattcttagggcattaatttgtggctatcgtaaatgagattgccttcttgatttctttttctgctattttattgttggtatatagacacactactgatttttatgttgattttgtatcctgcaagtttattgaattc

SEQ ID NO: 199034 - DNA, 1000 bp, Homo Sapiens
tgtagcttttaagcctcgagatccagtaacatatgaagccaactccacttctggactgtctagttctagctacatgcaacaataaatcctctattatgcctcagctgggtttctgtctcttaaacccaatagactccagtcaaatgcagtacaacttctaagctttaaccactctccaaaaaccacctattagcagtccccaaatgtctgtttcctgatgagcttctttacccaaagtcactttcaacaacttactgaaatgattccaaaaatacttaaagaagtcaaggccctttctcactagtcatgggcatctttctccagcatgtcagtgttgatctctcatttctttgtgaaaaacctctcctcccacagctcctggggcagagttctgccccagttctcctgctcctccggcacttggtcttcttcccacaccctgattcaagtgtttcccaaggagttgtctttggccttcttcccttttcttctaccctctctcccttggcaagctctttcaatctaatgtttccagtaatgacctcaaaataaaagactcctaaatctatacccacgatacactattctataatctatgcccttcgatctctatcctggactccactcctgaatttccagatgcctccacccatatcccacctgaactccacatgtatgttaaaaacagcatttaattatcttctcttctaaaaaaatttctctttctgcattattgctaattttcgtcaaagcaccaccagactcctggtaatcttaaaattcattgttaatgatgttacccctatcatcccagccaagacattctcttgattctatttccataacatcttttgaataggtgccctcctccctatccctgcctcccatctgccctaatttggattctcataattctcacctagacgattgccagtggcattttcatttctccctgaactctctcaatttcaaactctctgctatgagactacatttattg

SEQ ID NO: 199035 - DNA, 1000 bp, Homo Sapiens
tttaatccagtgaacatattgctaatgactgaaacatctaacagcatcatcttttctaacagcagcaaaatgccaaggaattgattttaattaggttttagaaaaagaattatgtgaaactcaaatatgtcattcaatttatgtcaaggagactctcaaaaaggattacgtggttagctggactttgggatggaggcagatctttgtttggaattctccaatttatttggaaagctctcatacacatactgctgatgagtatctcacttcactgcattctccaacaggtttctttctctctctcccttcttccatagcagtaataaccatgacggcagatcattgggatgtctcagtatcaagaaaaattatcatttttccaaatctttctttatgtaaccacagggggttctggctttaatttagtaaggcagtgcagaattttgaattgagaacttatttaatgagggttagaataaaaaaccttctaagcaagcaaaaaatagaagggaaaccagggaaatgctaccgttaaaaatggggcattttgagatggtgaaattgggaagtggggggcagaattagatatatgttaatcctttaaaattttagcaatccacatgcttaattacttcatatggcctttcaacacatgccagcaatggcatttcttgtgtattgagaccacttttgttgcattgggacctgtgaggttaataccaggggtatccactgagtaagatccataaaagctttctgggcttcttaaaggaaaatgtcctaaagcaacattacatcaaaggataagtaacacatgacataagtgtttttcaatattccttttaaaactaattccactttcataaacaatgtattctaaaaacaaaacaaaacacaaaaaacctttaaagaaattctgactccagggagagatttgagcctctaaatttcctgaaaccctttggaaacaattcatattttttaaaacccttaggaattc

SEQ ID NO: 199036 - DNA, 1000 bp, Homo Sapiens
aagacttgaacaagagcaggaccggacaagaatcctgtcaattcagagaaaaataatcacagtttattaggaaactgaatttcacaaaagagagagcataaagatgggctttcgtgaatgggcaagatttgattaacccgatgaggaaaggggcattcaaggaagaagccatggcatgggcaaaaacttagagataataaaatgcatggcacgttctagaatcctgaattgtacagtttggctgaggtgtgcagatggtaaaatagtgggaaaaagctggaaggaaaatgtacagagaagagctacaagggtaatagtgaagtgtttgtactcccttagtggaaacaccgaggggactttaggtcgtgatgtttaggttatttgggagcaaagggagaagacttcctccccttggccctcacagcctgcccgaagagtgcaaagcctcacgcttttgcaaaacaggccgcacctagcccagattctggagctgattcagtccatgcctctcgacccacagtttgtcctgagccctgacaaaggtctggccccctcctgcactcggaacgcggaggacccgcagctcgtggattcgcgcctcagtgcccaagctggtgttgatgggggttgcggtttcctgccactcactccccatgggtcctgtggggggcgtggggatgcggggagagggtttcagaataggatcccggactgggagggaagggacaccatctgggcacacccagtaggtacgaccggaggtgaaaaaagagtgggtcccatcccctgatggccccgctcgctatccactttaagtttatgttatggatattttcaaacatattcaaaagtagagagaaaagtagaatcataacccaagtccacaccgcccagcttcaacagttatcccctccaagcccatcttgtttcagctaaccctctcccaccacccattttaaagcgggatgtgggtgtcctgagggaggtggaggctccccag

SEQ ID NO: 199037 - DNA, 1000 bp, Homo Sapiens
aagatgatgggaggggggtggaggtttgaagagggcggggaaggcttgaaatagggaggtgggtgaaagtgacacatctcaaggactgatttattcattcatggacttaatagatatcaccgtgtactatgtgccaggcatgtctctaggccctggggttaatctgtgaaccaaccaaccaaccaaaaagtctgtccttatggagcttacattctagatgagagaagcatagtagatgaattagtatatgaagtatgcatgtgctataatataaccaacaaaatcagtatgtaaagtatgtagatgctataagttgatgtaatgaaatcaatatgtaaagtccgtgtctgctgttagatgacgtaataaaatcaatatttaaagtacacatacactctaaaaggtaatgtgcagtgaagaaaagggaagcagaggagggtgtgggtttggtattttaagtggcatggtcagggcaggcctcgctgggaagtgacaaatgggctaagacctggaggtgatgagggatgaagggcagccgtctggggagactggtggtcatggttttctgaaagtatccatctgccctgtgtggctttgtccagaagggctgtctgtctggacgggagtagaggatgagaagaaggtagcgataaagggccacagactccagagcccggggccttggcctggatgctgtcggatggcagcagggggaggagtggagagaaagcagaagcatggccaggaagctgggaggcatgagcctgggaagagggggaccagcctgagccctgggtggggaaagggatcccctgggagctcacgggggtgcattttgctatctcagccgttttatttgcctgcaacaggggaatattgaggcaggccaggcagcctgccccttctccagcatcctcactttgctgtgcccttttggtttttacattgcctgctctgtcttctacctcatggtcaaactgtggctctctctcctgaattc

SEQ ID NO: 199038 - DNA, 1000 bp, Homo Sapiens
taacaaacttgtgtgtgacttgtgccctccacgtgggtcggtgcagttcagggggaaacgccggctgccttcgctgtggtatggaagagtttctggggctagttggagaaaccgcttcgcagacacaccccaggttctccttttccctgcagaaagggacaaaaagtcctttcagcaaccgagcagtgctggccaaagtgtctttgcacagagaaggtgctttttacagagctgagcagaagcccgggtctgagaaacttgggcctggagcgtgcaaacttgccccggtcgagaaggcttcccagacagctctgagaggccgccatgtctgggctgcaggtctgtgatagggataatggagaggaactgacatctcatttcccttttggtcttttgtcttttggcagtttatagttaaaaatgagccaccaagcagcccacacactttatttatatggtttaggtgcccaaggaggctccagcagcctccaagagcctttctctcccaccctggctagccagaggcccagctgtggatgagcacagtgcactgtgggggccgctccccggggggaggctccttaccctgcacaagaggcggccaccggaggcttagcagtcacgtgtgtttgccactcgggctgtttcttccttcctgcacagcctggttggctgaagaggttccaccgataggtttccacctggattggcccaaaggaagcagagcagagaagcccttcactgggctgggctcagcctgggtgacctggagaccgcccctagggcatcgtgtggacgggtgacttgtgttggttctttcctgggcaggcagttttctctcttggccccagatcctgatcttttggattagtttcttctgcacacctgtataggacactcagattctctgtatggattctaggtaggcgcccaaagccaaaagcatgcctgaggctaatgcccagggaggtggccattgaagtgtctgcttctagaattc

SEQ ID NO: 199039 - DNA, 1000 bp, Homo Sapiens
aagtttttaaagggtgtttttaatatacaaaaatattactttatagagtatatttatgaaatccaaacattgtcgattaaaaaaaacaagaacaaaaagtaggtctttgaagagtttagttgaattcacacgattccacaaatcaactaagggaagttagaaattttttcagctacaaccataaccttttgaagtcaatgtcacagaacacaaacatgtcctttcataaaacctgccttaaagacactgtcatggcataatcatagcgtggcagactattaatctgatcacattttctagtcttctccacaaagtccaatttcccattgtttaatagtcagtggctcttctctgacctttctataacattttccatttccttagtttaagccagcacctcagacactactgtgagaggacaattttcaagtattatgttggggtttctatatgcagccttcatattaatgtatactggtgtcaactggtataatgtaaagaatcctggcatagaaattcaaaggcctgggaccaaattctgcttctgttcacttgctggctttgtgattttaaataagtgacaatatccatgcccctcatctttctcacctttaaaactgagaagataatgtatcactaaaaccaatcaattagttacaattattgaaatgtgcagcataatccacataaaattagtatcttgtacaaatacacatttctaccctaaattctctgtgaaagaaaattaaactgttattcagggccaaaactgactagaggaattgtacttcctatgtaagcaacgttatttctctctaggataagtggctctttatttaagcaaaactattaacggtagttttagatttgaaaaggaaatgtaaaaatgataatctgcaaggggaaaaacgaaataaagagaaataaatttgtacaatacactacattaagaggaatttggaggttctccaacagcttaagagagagacacagggaattc

SEQ ID NO: 199040 - DNA, 1000 bp, Homo Sapiens
caaagcagaactgtgcttggagtgatagaggaaaatcaaggaggcccgtgtagctgagtggagagagtgaggaagagaatgtagaagaaatgagtagaaaggggctactccctccccaccaggtggaccccacctttgtcttcccaggaggaaggttgagcataccagaggggctcacatccttctgcatggctggtcatttgtctctagttcttgggctcccccagcctgcctcatctcactggttacctccaagcatatcttcctaaattatagctgactgtgtttaacagaaatgtcatcttcctagaagctgccataacaagtacatagtaatttcaggaagactcaaggattcaagtccattttctcaaagatcatctgaaagtcttgctttccaccggtcatctactttcccacgatccagtgaaatttgtacatcttccaacagttgctacctcttggctaaaggcagctggctaataagcctccatctaacaagccctattatttcatgaccagttagcactaaatgtccctaagaaacctcaaactgactatctttggccaaacacaagtggggaaggggaatggaaggggaaatactcattagccttcagggcagagtgcaggtgttttgacctcaccttgactgaacctgcatcggaagaactctccttctcaccaggtctgaaatctttggttctcggcaggctagaaataaaaaagacaatgctgcatgatccttttccatattcactgttcatatcattcagttcagattcatacctgacccccacttctggacaccaggtgcccattccccaggctctcagaggcaagacatgtcagccaagcttgaacatctcactttacaaaagagcttggtgcatttcatcttgattgacagcaccctctgaagaatccaagaagagcagatgcctctgaaaggctgccccacctgagtgatttgggacaatggcatcgtagattaggatcc

SEQ ID NO: 199041 - DNA, 1000 bp, Homo Sapiens
aattgcagggcagatattccaggaaatcaacatctttttttagccctagagcagacagcccagtaatggccatggctggacaagtatgcctgacctgcattctaacccaaaggggcattgttgaaaagtgagaaggatttttcagttcaaggtctgagcctggatgctctgcccttctaacagagactgtcagcatggaggcgaattttgaaactaagttttgtgatgtgtgcactttccactaaaaactggaccaagcccaagactcatttctcagggtttcctatccaagcacaagatgaggaatggtctttggtcattaccacttggtttggaatagcccagaggtgaaagagttgctattagatttcattaatctgaagaacactgtttaggttaaaatgtcttcttgctgttataattggagagggtgacattggtgtttagcaccagccaaaatatataaactcaagattaaggagaaaaaagttatgagttgaacctgtgagtttaaaaaaactgcaaatattttatttattttttatgtatattttatttatttatttatttttgagacagagtctcactctgtcacccaggctggagtgcagtggcatgatctcagctcactgcaacctctgcctcctgggtttaagcaattctcctgcctcagcctcccgagtagctgagattacagtcacccaccacaacgcccagctaatttttgtatttttagtagagatgaggtttaaccatcttggccaggctagtcacaaactcctgacctcaggcgatctgcccacctcgtcctcccaaaatgctgggattacaggtgtgagccaccacgccaggcccgcaaatgttttatgatgacaaaaaaaggtttagtactgctaacttaactgatgcttctaggtagttgatgatcatcattctcttgctttatttccaagtctatgtaataaaaacaaaaataaataaaattttcatattaaagctt

SEQ ID NO: 199042 - DNA, 1000 bp, Homo Sapiens
agcctgcagccctgagataacatggagtagttccgcctgccagcctacactgtccatctgagacctctcatgactggagggaaaggttccttaattaagccacttgttttcagatttgtgttacttgggaaaactgatggtgtgaacctgaacaggctggaagaagcagacatttctgaataacaccctcgtaggttcagattctgattccagtcatctaaatggcacctaggaattccaactttactttctgatgtatgtggtcctaagataaccttcatttaaacaaacaaaccaaatttaatgaatgtcgaaaataaaaaactctctcaaatttgtggatgtggagcaattgatgtgtttgctatagtaggcaggataagtattctttctctttctcttcctctgtcttcgtacaacacatggggagagaagatggctattcacagttaacaaaatccaaatctatgatatctatgttatggtataagactgatggagaaaacattgtatatttaatttagcaacccttaagtagtgcttactatatgacagggacagttccaagaacttaacaagcatccatccatttaaatatcataaaaactctacaaggtaggagctaccattatcccaaattgtagatgtggaaactgaggcgcggagatgttaaataactaggtcatacagctatttagacactgtactatatcttgaatttttaaccattgtagatttatcatttgtgtttcaactactcatcagtgaccataaaaaatcagtaatagtcaattaaaatgagaacaaagatattgctgccatatgctctgagatataaacatctgtagaaataaaaatattataatgagggcatctagcacgaatgaatcttatgggttgtgatgttggttttgataaagcaagtaacttagctagcctagctaatctccaaacatctgtttcttagtttaacttctggattttataaatttgggaattc

SEQ ID NO: 199043 - DNA, 1000 bp, Homo Sapiens
tcagaacagctggccagaccctgcactcgcttgcccatgcaccccctcccattggcagctgagcacacagtcacagcagccacaggatccgggctggtgtgcaaaccaggcatggtatggcgggccgagtggatgtagtgcctcctgcggcaggcccagggctgagtgaggccctgggtgggaatgttgccttctgtggaggtccccagctggcagagtgactgagagagatcctgcgtcaattcaaagtcagttcttgaccatcctggccaacatagtgaaaccccatatctactaaaaatacaaaaattagccgggtgtgatggtggacacctgtagtcccagctactcaggagggtgaggcaggagaatcgcttgaacctgggaggcggaggttgcagtgagccgagaccacacctctgcactccagcctggtgacagtgcgagactccatctcaaaaaaaaaaaaaaagtcagttcttcaaagacaaaggatgttctgcttacacaggtcatcagagacaatttaattcaacctccaaatattacaaaagagaagcccaaggctcagcaagcatgatttttccaaaataatgaagatgttggtggcagagccaaggtttgacccaaggtcccaattcctaactcaggttccttacggaacactacactgccacaggcccatattaacacacgtgtcaagtgactttagttactacttaaaatctgtaaaatgatgttaatgagtcagccacatatacacttaactatatctaccattttgcagggttagccatctgaaagccccttttcaaaggctacacagctttctttacttttcctatagatatcatcattccatgaacttattctactgagccttttaaatatgactccctcatcatgcccaatttattatgtcccaggaatatcagtttaaggtcattgtactgatcatgtttttacttggtaagactctgaatgtgaaggtggggaattc

SEQ ID NO: 199044 - DNA, 1000 bp, Homo Sapiens
ggacattgtaaacattaaccctgcagtagaagacagagcaaagcatgatttctcttttctctggcctgatttaattctaaggtcagacgttcagcttgatcataacctgtttataattatgactcagaccatttttccactcttggatcattggccattaatgatgaggggtctcaaacaacatgtctcagtgacacagtaaagcagaaattggctgaaagcaaagctgtttttatttctagcttcagtcagcacataatgcttaaaacctaaagaggaaagtaaaagcgtgttacaatctctcaaactttatcaagacagggcttagaacctgacatcctccgctatggtcattccattttgaaatgtagaaaatccaacttgtggatggtttgtctgtaaatgagctgaatgtgtgtgcgtgttcattatcaagcacgatatgctcacaaatgcacagtactttaagccttgtgcaagaaagatgctttcagtaaacatatttaaaaggttttattttccttactaatggtacatgcccctgcaagttcatggagaagagaaaaacaagtgtgggtgagctgatggaggcttcatcttaggtgaggaggcaggagagacaccctcccttcacttgtgccatccccacgctttgtccttaagctgtagtggtcccaggagataacctgtttacagcagcccattcagtattgaaaaatgaactccctcctgcagaatgttagaagaaacaacctcaaagacctcaggccacctgtggtcattagtatgtggcagcaagattgaacctgcctgcctcctacctgtgtgagcctgtggtgtgggtgtggtaccaaggccctggctctgggcagtctgttggctcctggtgttcactaaggcgtggggtgacaggccatctggcctcgctctgccagtctgcagttctccccagcactgcattcatttttagtggtttctgatagtcacactgaattccgcg

SEQ ID NO: 199045 - DNA, 1000 bp, Homo Sapiens
ttatctcgagtcctaattgaaggggcttcttccatctcagttttttttttcccaagtaaataccacccagaaagctaggagatcaagaaagtgtgcaagatgggtggggataggctatatgattttaaaaaggtaaaagaacaggcttgcttggggctaaaagaataattttggctattccaaattaggattccatatgtaaatacgaacatagataaatacatattttatatatacattcatatatacatttatatttctctctccccctcctatctaactatccattcatccatgtcatttgctcctatatctgagagcatagggtgtgtaaattttaaaattttaaacagttaccttagtgctcgggcaaatggagtcagttttctctatattcacagcaatttgtatctttctaaggcacaaaggtcactgaatcttcattaagaccctataaggtagggagagtggaaatcattttcctgatgtgaaggtaactaatatgcccaggtcaccttgggaggctgaccctcccctcacccaggaatcggactaggctgaacaagattggatgctcttcccagccccttggtggtctggatcatagaggagggtcacgaataccctttgtcccattcctgcagatgctctcctaagtgggcggtgggcttgtcaccctgaagcctttcaggctctcctgtgagtgaagacccctgtgtggatactctgaagaaatctgtcaggagaaggttgctgaaatcccagtgtggatactgggtgtgccagtgatgtgtccaccatttggtcgcttcaagagatgttggttcagctgcttgggagggatgggaatgatatctggggatgcagggccagaggcccagattgtttctgagacatggcttgatggttgtgattaactggggagactgaggtggaacagcttcataagagataaaggggttgatgtgttagagacgcgggaaggcccaaccatgaattc

SEQ ID NO: 199046 - DNA, 1000 bp, Homo Sapiens
ctacctagagttagcctagacgccacaggttaagggctcagttccacaagattaccacacccccgacacacatacacacacacacacacacacacacacacacgctctctctctctctctctatctctccagatgccaatcacaagtcataggtcccaaggttacccacacttctgtccaacttggctgcaaatcaggagttcccatgacctcccttacattcagaaatttgctagaatggctcagagaactcaggggaacacttatttactgtggctggtgtgttataaagcatatggtaaaggatacagttgaacagccagatgaagaggtgcatagtgcacggtgtgggggcggtgcagagcttccatgccctctccatgagtgccaccatcccagcaacactgtgtgtccaccaccctggaagctctctgagtcccatagttgaatgtttttttggagactctattatgtaggcatgactagttaaatcattggccatcagcaattaagtccatctccatccccgccttactgtctccttactgtcttggaggtcagagggcaggaatgaaagttccaatgctctaatcccatggttggtttgtctcgcaaccagctcctatcctccaagagtcacctcagtagcataagcccaggtatgtttgaaaggggtttgctatgaataacaaaagatgctcctcttacccctatcaagaaattccaaagacttaggagctctgtgccaggcactgggagcagagaccaaatatgcatttctcattatgtcacagcaagtcacttgcccctaatgcactgccatcctcttaaaacagacagacttaaaagatgcaatgaggctccaagatgaaggaacaggcccagagtagcccaataggttggtgatggggctgggccagatcctgtctagggttctttttgtgcctctctgcttccctcagtgtctacttgctgacagctcttaatagtgtatgaattc

SEQ ID NO: 199047 - DNA, 1000 bp, Homo Sapiens
tttgggagtgttccctcctcctctattgtatggaatagtttgagtaggaatgggtattagttctttaaatgtttgataaaatccagcagtgaagccattaggttttagccttttctttgctgggagactattaaagtttagatcttattacttgttactagactattcaggttttgaatttcttcatggctcatctttttatgttgtatgtatctaggaatttatacatttcttctaggttttctaatttattgacatttacttgttcatttttatgatcctctaaattttctgcacctgtctttctttctccactttcccttaaggccagtaactcttagatttgcccttttgaggctattttatagatctcgtaggtgtgcctcattttttaaaattcttttttgtctcttctaactgtattttcaaatagtctgtcttcaagctcactaattcttctgcttgatcaattctgcttttgagactgatgcattcttcaatatgtcaactgaatttttcagctccagaatttctgcttgattaaaaaatttcaatctgttaaatttatctgataagatttagaattctttcactgttattttgaattcctttgagttcccttaatatagctattttgaattctcagtctgaaaggtcacatatctgtgtcactccaggattggtccttggtgtcttatttagctcatttggtaaggtcacattttcctggatggtccatgatgcttatggatgtgcatcatttatctgggcactgaagagtcagttgtttgttgtagtcttcacagcctgggcttgtttgtacccatccttcttgggaagcctttctaagtatttaaagggaattgaatattttgatctaactctttggtcactgcagctgtatctgcattaagaggcaccctgagcccagtaatgctgtgactcttacagacttagggggtaccaactttgtgttcttgggtaagatctaggagaattc

SEQ ID NO: 199048 - DNA, 1000 bp, Homo Sapiens
tatctgacatagactaaacacttgatacatatttattgaatggatgattgagtaatatcatatagaaaggtgctttgaaatatgaaaggaaattaaatcttgggacccccaaactcattaagccaaagggaaatgtcaagctcgagaactgggtcgcgcaaacctgcctccccatttttggttcctaaataatgtggctgcaagattaaaagctacatgcctcccccatattttgcccacaaggaaatgcctagtgagctgcaagatctttaaggtgtttctgttaaaatttcaccatggcaatgtaaattgatagcttacctttacaggtgcagtcacccccccgcccaccagacacaaatgagtatctgattgttcccctgccctgttttgtctgtgttgtcttatgtaaaatgcagattccctgcatttttcctctgccctatttgtctatgtcatcttatgttaaaaaaaaaaaaaatgcagattcactgagccaaaggcatgaatgagtatttttccctaacccctcttacatgaaaattgtgtacttttaaatatctcaccctttcccctttaaaattggagccctcaaaatcatcttcggagaaaggcgtagacctgtctccccggcgtggtgtccttaactttggcaaataaacctcctaaaatgattgagacttgtctcatcatttttctcgattgacagagcttaagggcaaaatgtggtcttttaataaagtatctttaagcatttatgctcctgtaaaagatccctccattgatatatctgttggattttgtgagagagcagaggcaaagtcatgttttcactctctgctgactttaacagaaagcctccattaaaaaaaagtgtataggccaggcatggtggctcacacctgtaatcccagcactttgggaggccaaagcaggtggattacctgaggtcaggagttcaagacaagcctggccaacatagcgagaccctgtctctacc

SEQ ID NO: 199049 - DNA, 1000 bp, Homo Sapiens
gagtctctctctgttgccagactggagtgcagtggcgcaatcttggctcactgcaacctctgcctcccgggttcaagcaattctcctgcctcagcctcccgagtagctgggactacaggcacatgccaccacgctcagctaatttttgtatttttactagagacggggtttcaccttgttggccacgatggtctggatctcttgtactcgtgatcctcctgcctcagcctcccaaagtgctaggactatagacatgagccactgcgcccagcctcattttttttttttttttttttgagacagggtctcactctaccaggctgaagtgcagtggtgcaatcatggctcactgcagcctcgacctccctggctcaagcgatcctgccgtctcagccccactagtaggtgggactgcaggtgcgcaccaccacgcccggctaatttgtgtattttttgtagagatggggtttcaccatgttgcccaggctggtctaccaaattctttatacatttttatcctaagcctgaagaacacatatgcctctgcttcatcacttttggcctcagaagtttctaaacctaagccatttaccagcctgggaaagggaagaggaaaatgactcctcccttcatctcttagtgggtttgtaatgcttattttcactttctagtttactaagaagacagacttgcaattgattctgctttaaatttaggtccttttggtaaggaatttttttttttctagcagtttgtaagtggcaattctccctgttttaacaaaattaattagcagggcaataatgtcctttttacagggaagaggcatcctgttcttacagaagttagctggttaactgggagtagagaagaagggttggggagtcctgtaaactcaaagaagtttaggaaacaggcacattaatgggatcccaagtttcagctacgtgcttataactggctataagtttctggttccagttgtcatcagtgagaattc

SEQ ID NO: 199050 - DNA, 1000 bp, Homo Sapiens
agagtgaggtgaagaggaattgtataaaaatggtcagtggaataacaaaattaaaaacactgagcaagatcacagaaaaaatactgtgtaacttattaatgtatttggtgtaaatgtcaaaatagatgaaggactaaagggtggttccatgtttatagtcatgacgaactgggaaaatcgggataataagaatagcagtgagaaagttgggaatgagacctggttagaggaggagagggcaacattttaacttactaagtatttttattatactctaatttccctttccaaagttttagaaatatctgcaaaggtgtatgtacataatgaatgtatatttcatgaaaaaaaattctacacagtcattggatttaaaaaatattgatatgccaacctaatgagacagtgtatcatctacaatttatttgggtgttattggtaacatcatagccaaaatatcaattaactatttacaattgaagaaaagtcctctctgatacatttgttgaaactttaactattttgaaggtggtagtagtgatgatgatgataatgtgtgaggtttttttttgttttgttttgttttttaagaaatcttgatgtgatagcagtgtccgcagggaatcatattagttgtttggtgtttgaaaggcaactcctttttcctgaactactcaaacagcaaaatgaacacaatatactctgcagttactgctatgccctcaagcttgggttggaagttgaaatgaaaaacttctcactgcagttctttttaattaggactgcagaaaacctgtggatagacaacgtctctctctcttgaaagtgagttcatagaatacgatgcaagaagtaaaaaaataaataaataaataaataaaataagcttactatttctcaagaccatataaaatatatttattctatcataatatgtttgatagtctccctatatcttatttctggctttgaagaagcaaagaaaatgtctcattgaatt

SEQ ID NO: 199051 - DNA, 1000 bp, Homo Sapiens
ataaattcatccaggcctttcaaggagctggaccctggacagctacatctccattcctctaggtgtgtgacctgtcagccccactactctgcctgtgtgcctcacgctgtttgcactggcctcttaggatccctctgtgaatggcagaaaacgtggccacctctaatctcagattataccctttccagtgcccagtagaaacacatagttctaactacagatgtcctggagagactccaatgggctaagctttggtcattgattacctttgctagtcagctgtggccatggaacacagaagtcacttgacctgtaataagcaaatagagtacaactactacattatcaatagctttaaaaatgtttttcacacccataattccaattttagaaatctaccactagtaagttgctgagtgattcagtgaatgatttatcacatcatatcaggtgttttagtgggaatgggaagaagtgggaagctagtaacgttcaacaataggaaaatagctaaataaattactgtgcattcatgggattgtaagttatacaaccattaaaacatcttcacaaaatgtgggaaaatgctcacaatgaaatgttaaatgtatataatgttgtatatgctgtattatgctttttatataacaataaaaatactagagggaattactagaaattctagtaataacactagttatttctagattttaggatcacttttgttttgttctttacaagttttttgaagattttaaataatgaacaatgaccttataggaattttactgtaataaaaaagtgaactaatatgaaatgctcaaaaaagacattataatctagtagggacgataaacctgttgtaagtaatagtaaccaatgcaggctagtatgttatttgtgttatagattatatagtaagaacttaaggatgaatttcctagtaattagactgttttacacatggaatgtcctgttcaagaactattttcctatcact

SEQ ID NO: 199052 - DNA, 1000 bp, Homo Sapiens
ttttgaaactattctacaagtcaggtaaagaaggaacccttatgaagccagcataaccctaataccaaaaccaggaaaggacataaccagagaagaaaactacagaccaggccaggcacagtggctcacgcctgtaatcccagcactttgggaggccaaggcgggtggatcacgaggtcaggagattgagaccatcctggctaaaacagtgaaaccccgtctccactaaaaaatacaaaaaaaattagccgggcatggtagcagttgcctgtagtcccagctactcaggaggctgaggcaggagaatggcgtgaacccaggaggtggagcttgcagtgagccgagatagcgccactgcactccagtctaggcgacagagcgagactccgtctcaaaaaaaaaaacaaaaaaaaaaacaactacagaccaatattcttgatgactattgatattaaaatctttaacaaaatactagctaactgaatccaacaacatataaaaaagataatccaccatgatcgagtgcatttcatagcagggatgcaggaatggtttaacatacataagtcaataaatgtaatacaccacataaacagaattgaaaacaaaaatcacgtgattatctcaatagatgcagaaaaagcattcgacaaaatccagcatcacttcatgattaaaactctcagcaaatcggcatacaagggatgtaccctgtgtaataaaagccatctatgacaaacctacagccaacataatactgaatggggaaaagttgaaagcattccctctgagaactggaacaagacaaggatgcccactctcaccactactcttcaacacagtactggaagtcctagccataacaatcagacaagagaaagaaataaggggcatccaaatcggtaaagaggaagtcaaactgtcactgtttactgaggatataatcatttactttgaaaacactaaggactcctctggaaagctcctagaactaataaaa

SEQ ID NO: 199053 - DNA, 1000 bp, Homo Sapiens
ttcacttgcagcccaggatggagtgcaatggtacaatctgggctgactgcaacctctgcctcctgggttcaagcgattctcctgcctcagcctcctgagtagctggggttacaggcatgtaccaccacgcctggctgatttttttggattattagtagagacagggtttcaccatgttggccaggctagttttgaactcctgatctcaggcgatcctcccgcctcagcctcccaaagtgctaggattacaggcgtgagccaccgtgcccggcttttgagacacttgtctacagaaaagttcgtggtgcaatcttggctcactgcatccccaatggcccaggctcaagtgatcttcccacctcagcttccagagtagttgggattacaagaacatgccaccacacccagctatttttttgtcaagatggggtttcgcaggccgggcgtggtgactcctgcctataatcccagctctttgggaggccgaggcaggctggagtccgagaccagcctagccaacatggtgaaaacccagctctactaaaaataaaattagctgggtacgtggagtgcgcctataatcccagctagtcaggaggctgaggcaggataatcgattgaacctggagggtggaagttgcactgggcaacagggcaacactccgtctccaaaaaaaaaaaaaaaaaaaaaaaaaagggagtttcaccacattgcccaggctggtctcaagcaatctgcccgcctcagtctcccagagtgctgtgattaaaggcaggtgggagccaccgtgccggcctgtataatgcgtttcaaggctgggcagtaagccagtgaatcattaattcccaaaactgaagtataaattttttgaagaaaaacaagtttttttaaaatgttttcccccctgaagctaagaactacacatcgtaatacattatgcgtatctattatcgcactttccatcaagtttttgtctcatgtttgtctcccctagcctgt

SEQ ID NO: 199054 - DNA, 1000 bp, Homo Sapiens
ttttcttacccttcattgagttatcagttggacacctactgtatgctagatgctgaggacacagagacacaaactgtttcaaggaatagtgtattgtctttagggaagagaaaggtgcaactagttgtaatagggtaagataattgtacagagggcagtcagagcacagaggggccatcttattcctgctagcagtcagggaaagctgcttgcttttattgtgtgtgtattatcttttttggacttcaagctccttgaaagcatgaaacgaaagtataaatatgagcagaaattttttttagagaggggttcagctaggttttatattacttgtaattgcgagtaataaatgaagtcaatattttcttacggagcacattgtattttgatttttaaaaatagataagttcagatagtgaaaaatcaaaatggcataaaaagctatacactgaaaagtctcactgctcatagccccaccccactcccacctccacccctcacataccctgttggaagccacttttattattttcctgtatctttccagtatttttttttgatggagatacaaacaaatagaagtaaagattctttttgtttttccaggaaaattcccagatgtttcaaggtagaccttgcaagaatatgtatcctaatgaatattttcctcatggaataacaaatggagctagttggtataatgtgccaggtaaagattcttttatatcaaggccttacaacttgatggcctttctgctttcctagatggtgcttcttgttattatcttttagttttgaggaataataattatttttaaaacatggtttaaatagtttaaaatatttaaataatcttttcaactacttttatgtttgatgtacgttgagggttgagtaagaataatgcactaaaacttgattaaatggttacattttacttctggctattagaaagaatcttacatgtgctaatagaagagtgtaagctatatttgaattc

SEQ ID NO: 199055 - DNA, 1000 bp, Homo Sapiens
gtcaccaattttatatatcacatgggcagagagaaactaatcagcttcattttcaacttctgtgactccagaggagtcactttgcatcttgtgacaaaggaaggttttacaaggtttcatgtccgggtgcaccatgccagagttgtggctgtatttaagttcaagggaaatctgtagaaggatgtccttgagttttggctcttggaagtgattagtagacttagtgttttcagatatagcagcctgcaagctcctgccattgcagtatccattctgaatgatcatatggttatcttctgcctgtaaggggtagtaatgtaccaggtggggtgatgtccaaacactgtatgagcataaacttcacgcaaagccaaattctcaggtgaaatcctgaaaaagttttcatatagtgctttattgcataaacacttctatccaggcttttaatgcacttgtagactgtaccaaattcaccaaccccaattttttctacctccgagcattcttttttatagtaggaagccatgttggtttctcatagaacacatgtctcagcaggcagcccttgttcttccttgccttcctctggaccagcttcctcaagatcatctcgaattttcctcttgacactggattgaaggaataattttctataggactttggggtgaagggattagtattgaccagagccagtgaggtcatctcatccttgggaggagtggatgtgagcatcaaatgcttagagcctctggaaggaggctttgctgttggagaaataacgtctggctcagcgggcttttgggagtagaggggctggcaccatgtggctgcttgttcctgttgcctggttggcctggtgtctcaggatatttgagaaggtgtgacactggagtcctcaaaatctgatctggatcttctttttctttttcccgaggtgcgttgagttcatgcacgttactgagaggagtcctgggcaatgtaagcattgcctctgaattc

SEQ ID NO: 199056 - DNA, 1000 bp, Homo Sapiens
gcctgctggaatctgaaggcgtttggacgagttacattcctccctggacctcagtctcccgtttcattcataaagagagaatgacatctgacacgtaggagtaacagggtgtgcctggcaggggaggtcaaggggatgggaacacacttaaatatcgacatgtgtagaggagggggaaatgacttccttccaccccgctaagtttttggctgggatacaaattaagttgacataacacagataaacaagagaaaaccattttaattacacatatatgcatgagaattctacaaaatacaagacttcagtaagggtcagagaattgaaccttatatactgagctacagaacagaggcttgggacttccagggtcgggggatggaggtggcaacacaggttgatggtaggatgagggaaggaaatgtatggtgaataaaggttgtcttgttatgcagataaaaagtccctcaggtcataaaagttatctgggagcaaccctcttcctgatagagatacttcactaagctaatgtagatttcctttatagatgaaaaatttcttttacaaaaggacggctttttcagagctactagctagtcctagtgcagacaccttcttgaataactagaccaaaatacgccaagaagtgtatttggaggtggcacattttggtctcctatggtcatgttttgcggtggtgtgtcctgagccccatcaaatgcatcatgtgaccttgacgttttcaggccccctgccccagtccagacccttcccaccagccttgctggaatggagctctgaggctgggctcccggagacatggctgtaaccagattggagaccaaaagctggaggcgagccctccgacccagcctaccttttgggggcttcacacagtgactgccaggccctcccatgaggagaggagtcctccctctgtggaaggtgccaccactgtgccttgctggtgcttgctttgtgataggcaggtgtggaattc

SEQ ID NO: 199057 - DNA, 1000 bp, Homo Sapiens
catgcctaagttaaaaaaaaaacatagtactaaaaggcttaacaaaaacaggcagtcccccatcttaccctctcaactgtgctcttttgaagcaaatactttttaattttttagctgtttgaatatttacctccatacatataaacaacatgcttgcaccctaattcctaacttattatagacattatctattgacgtcctgttttggtacctgatgacctaactcttaccctcccctctgaagccctttgcctgtactccatcctttcaacagttccactgcattaattgaaaaatctaaatgtgttatgatggaggacagagctcacagctgaaccaagtggtgttccgtgtcctcacacaactatgtacatattgatacttttgtcaaatacctatccataacttttctaaatatcttcaaattacctacaaattatcgatcaggtatctttgggctttgtgtctttttcttgtcgatctctctccctcctgcagaattccatcctgtctctctaactcagactttcctctgccgctcacctgtgtcagatcccgtttcctggatcctgggaaaagtccctggttttggtgaagaacaactccttctatctcctccccacaagaggttcacaggaggcactttttttccagcccttacatgcctaaaaggagggtctcactctgtcacctaggctggagtgtagtggtgtgatcatggttcactgcagcctcaacctcctgggctcaaatgatcctcttacttcagcctcctgagtagctgggactacagatgcacaacaccacacttggctaatttttgtatttttttgtagagacagggttttgccatgtttcccaggctggtctcgaacggggctcaagcgatcctcctgtcttggcttcccaaagtgctgggattacaggcgtgaaccaccatgcccagccaaaagaacttttttctactctacttgacgtagttgggctggatacggaattc

SEQ ID NO: 199058 - DNA, 1000 bp, Homo Sapiens
tgttttgaacttctcataaatttatcctgaaggcaagcccacaatattaaatcatcatgtgtagaggaagctgtcctgttgattttgaattttttaaatataagaatcatgctgttcaggcaaaagccccaggaaaactgatcaatttaaagatgttttatcttgaaaattctttggaaagcccttttgttttaaggcttttgttcctctaagattagataaatgattttcagaaatctaagatacctcaataaattagtaaatctgttctctttcctttgggtaaatactgctttctccccattttactgatgaagaaattaagatgaagaaaacttacattaatatgaaggtaatatatctaataagtagtaaggaatgtctaaaaaattgatttactaccctctcaaagtccattccaaaattacagagacttttttgcaagagaaaaacaggatttggatacaaacagaattgaatttagatcccagctctgatacttattaactccaaagaagttatgaactgagtttgctcatatgtaaatagagataattaacgcctactgaacaatttccttgtgaagctgaatgtgataaacatatgcaatctgctgaatgcagcttattaaatagcagctgtaatttttttaaactatgctgcttctccataaataggcatatagcctcctccagtgaatctctgaagagggcaattttcatgtgaatataaaggtccaggatacctgtgaacaaagctgtattattttttataatctgacacctttttaaaaagttttattctatttttaattgatatatgcccttttgatatacctgtaagttggtgtcttaaagacagggataaaaaataatggtgtctttagagtaatttagcatgagaagttgattatttcctattttatttctacagttgttctccacatggatgcccaacagtggaaaccaaagaccacttcctctaggctgtaatttttgtc

SEQ ID NO: 199059 - DNA, 1000 bp, Homo Sapiens
aagacaaaaagtaagaccattactggcagttttagctctcgggacaagaactgcattgctaatttggaacagtaagaattaatcagtaggagaaacttgacgttcctgccggctacatcaagctccccaaatattttaagtattacttgttcagtcagctggccagtgagaggtagggagggagacaaagttttgtgtttggtaacttgccagcactcagatgttggctaaccttttgagaagcagaaagtttctttttcataaaaacatttagcagtggtcagactgatgaacatatttggagacactaaaatgatgtaataatggcaacaatgttatttttacagcattagaagaaaggaggacaactaccagctgccaaacccattggtcacattgatccctaataaatcctggatgagcctgcccaatattagtcataggatttaagcctgtgaatctgttaggacttaagatacattgctttcagttgggagagtaagagaaaatctcctggcatatggttcaatgaagggtaatttagtatactttcttaatgctttgaaaagctatactgaggcaacatttttttttttttaatggatgtcctgtagtctcaaaagaaaatggcaacttcacatcagggaaacatgggggagatatatttaagggaagacataaaagacacaaaagagactctgtaaagcctttcaggttttttttagaaaccctaaaacaaatgataaaaaccaaaaacatgggatataactttcacatacgccaaattcacatttactgaaggtggacaaagatatcacacttccaagagggcacttggctttttctaatatatttgaagcaattactcctcacagctctagtagcagtaaatactagtaatattcctgttttacagatgagaaagctaccatttactataacctaacaatttaatatggtcagcaagtccatacagctggagaactgtacacctggaatt

SEQ ID NO: 199060 - DNA, 1000 bp, Homo Sapiens
aggagttcatttattccacagggcaataacgtagtactttgtgtttagggttcaacattctctggctaaatgaattttgaaataagttataatcttctaattttttgacccaaaataatcaatgcctatccttggaactttgaacaattacagcattttcttgtgatgtatatatacatctatacaagaacaatggacttggagtcagaaggtctgtgtgaaacctgggctccactgtgcaccacctctggccatattactttctctgtacattaatctccataaaatgagaatatttacacctacctgtgaagatgttcatgactatgaggcataagtaaattagaaaaagacgtattttattgtgctagaagcatgcctcgcactcattcatgaatccaacaaacttttactaggttattttcaacagatgccaatatcctcatttcccaccagaagagctaataaagatctgtttcctttctgttttttttttttttttttttcctttgagatagggcctcgctctgtcacccaggcggagtacagtgacaatcacagctcaccgcaggcctcaatctcccagactcaggtgatcctcctgcctcagcctcccaagaagctgggactactggcatacgtcaccatgcccggctaattttttattttttattttttatttttttgtagagatggggtttcgccatgttacccaggttggaagatccatttcctttctgctaggtgatggaaatgctgtctttgactagtaagtgaaagaaaggaatacctacagaaatattcaaatattcaattaaaatatttgaattacatattaaataatctcaaggccataaaattctatttttaaaatgtctttattctatttatcacataaggcacaaacgttaggtatttataaccttgctaaaagcaccaatgaaaatgggatttggaaaagaatagagaaattaacaaaattgctaattataataaatat

SEQ ID NO: 199061 - DNA, 1000 bp, Homo Sapiens
taattattgggctattatagttctgagagctgagttgttgatccttctgggtttggttttatggtttttttggtggggttttttgtttgttttttgcttatcacagctactttgaaaacgaacactcatttttttagtactttttaaatgaaatacttagtacctaaggatacaatcatgtacgtttatcaagagacctgtggaagtagtcacctgctgggttcttatagccaagtgcaactagatcctcttataaatattttatctcttaatttgagcttgactttgaactgcttaccctaacagtgaccacttcttttttttttttgagatggagtcttgctctgtcacctaggctggagtgcagtggcgcgatcttggctcactgcagcctttgcctcccaggttcaagcgattctccttcctcagcctcccgagtagctgggattacaggcacccgctaccacgcccagctaatttttgtatttttaatagagatggggtttcactgtgttggccaggctggtgttgaacttctgacctcgtgatccgcctgccttggcctcccaaagtgctgggatcataggtgtgagccactgcgcctggccaaaagtgaccacttcttagtttatctgtttggaaacagatcatacccatttacagcaaaactattacaaattagaaaacatattcttgatttccacgtctcttggaaaattggtatcaagtattgtcttccaccacacacgtgggcatctgcccttcaagtgcctcttatagatgctcagagacctgatagtgaaaaggcaggagtcttgagaatggacttgaaattattcacagtgaagctggcggctctccactgtcattttgagggtcctttcaggcataccctgcaagttccctgtctacctgaaataggtagcaaggggacctaaagccccagagccccagaacagattttctatctaccatggccaggtggtttaactaggaattc

SEQ ID NO: 199062 - DNA, 1000 bp, Homo Sapiens
aaaaacttggcgtagaaaccaagtcagtaaaaaggcagagatctgggaagtttccacttcagtccctggctaaagacattattctcttagctatcctttcagctccttagagcttctgtttatccaggcacaaaatgtggtaaatgctgatgtgtaaactctccgagacccccaccccggttaaaacactgctgtgctgggtatactgtgtcaccttaggattatggtaagccctgcagcatgcccgtgagttaagtaagtgtttatagaaatgtgaacaaagctgtactttagaaggtcaaattgacttgctcaaggacaatgcgtttctcaagggctctgattctcctccctcagaaccaattgtctttctcctattcacgtctctgtcatcctctggcaccttttctgccagttctaccctgctctgcccttcagagggaatatattggcaggctctgaatttgtgagggtttgttttctggttaagtaacaattacctctcttctttttaattggacatatcataattgcacatatttataggatacatagttatgttttgatacatataatatatagtgatcagactggcgtttaaccatttcagggtcagaagaaacctaaaaaccatctggtttaggcactaacatgatttttgaacgtcctttttagtagcctgacacataaccctccatgtaacgccatgaacgacagaaatttaaccaatacctaaggcggcccatttcatgtttaaacagttaattttctcctttgttgaaaccaaaaggcatattcctgtaaattctaccctttgaaactacataggataccgagacataagaactcttcaagtgtttgacaataagacgtggattcttcccaccaccatcaaaatattccactgccttttcttccttaggctgagtaattgagttctttcaactgttcctcataaaacatggttctaagtagccttactgtcctttgaatggaattc

SEQ ID NO: 199063 - DNA, 1000 bp, Homo Sapiens
cacactgaagctcttaggccattctcctgactacttaaatccctttattgagatactctacaccgcatccctgtgtctaagaactgtctacttaaaactcaataattcaaagataattctattctttgatgaatgtcctgacgaaagactttttgaaaaagacaatgccatggtgagaaactgtaatcaagaaatgtggtgtaccagcctgggcaacgtggtaagaccccaactctacaaaaaattttaaaaattagctggcacagtggtatgcatctgtagtcccagctacttgggaggctgacgtgggagaatcacttgagcccaggagtttgcggctatagtgagccatgatcatgccactgcactcctgcctgggtgaaagacggagaccctgttgaaaggaaggaagaaaggaaagaaaggaaggggagggaaggggaggggaggggagaaaaagaaagaaagatgtgaagagaggtagaggactttaggaaccagcccaattcaaaatcgagccctacctctgccatgtactgtgtacatgaacttggccaagtcactgaatccctcggaaattcagtttcctcagcagcaaaattggggtaataatactgactgtagtgaggtgtgagaattaggaataatgcccaaagtatatttagagaatgctcacagcagtgtctcatagaactttccgtaatgatgaaaattccgtattttgtccagttttacataggtggctactgactacttgtaatgtggctaatgtgaccgaggaattaatttttaaatttaagtttacatttaaatagtccaatgtggctactgtattagacatcacaggtctaggctatggtaggtcctcaaaagatgacagtcattgatacgattaataatgggaagtttggatttcctgcccaaggatggtctaaaacaaagaacaaaacaaaacaaaacaaaacaaaacaaaacaacaactccagcaaatcaagaattc

SEQ ID NO: 199064 - DNA, 1000 bp, Homo Sapiens
caataaaaaggaatgagatcttgtcatttgcaacaacacaggtggaactggaggtcattatgttaagtgaaataaaccaggtgaaataagacaaactttccttgttttcacttatgtttgggagctaaaaattaaaacaactgaattcatggagatagagagtagatcgatggttaccagaggctggtaagggtagtggggaagtgtgtgtcattaataagtacaaacatatagttagatagaatgaataagacctagcatttgataccataacagaatgactacagtcaacaatttattgtacatttttaaataacagagtataattggatagtttgtgacattaagagaggataaatgcttcaggtggtggacatcccatttaccctgatgtgattattatgcattatatacctgtatcaaaatatatcatgtacccataaacatatacacctactgtgtgcccacaaaaattaaatataaaaaaatgcaaaatctaaggctcaagaaagttatgtgatcttcccaaggtcacacagttggtaaaatgtactatggaacttgaaacctaagcctttaatcttcaaatcttatgcttttgcgttcttaccgtattagtcaatttaatttttacttatttatttatttgtaaaagacagggtcttgctatgttgcccacactgttcttgaactcctgggctcaagtgatcctcctgcctcagcctcccaaagtgctggaattacagatgtgagcccaccatgtccagcctcaatttaaataagaaagttctattcacaaaagactatattcccagaatacaatttcatctaaaaatttatgtaaacgttaaaatttttcaaagaatacaacaacaaatgccactcaaaaaggcactggtgaacttcagtttaagcctcagctatttacatgaagcttactttgataagtcaaagaacagaaatagaaactctaaaatcaaaagtacctatacttgaattc

SEQ ID NO: 199065 - DNA, 1000 bp, Homo Sapiens
atcaccctagaagaacagtcagagtcctatttttcacaaaaattctcatgtgagattgatgaatcagaacacagtgacagatatgagattgagttgaaggaagggtcagttcacttatgtgagcattgcatacatattgctacccttccagaacactaaagacttaaagttatccttcctgatgagctcaatggatagctatcaatagaaaccatatatctaaatataccgcataatttaaaattgggctaaaagagtacaaatagctctacattgtttatatgattctattcagaaaaatcaattaactgaagggaaattgtcataaatggattaagattttccttgttttgtaaaatatactaaggtaaaagaaatcagtagataattcagagaaataaatatattagaggcatactctgtaatatttctgtatctctttactgataatttacaatggaaatagctgaaaccatatgatatcatctaaactcattttatgggaagcagtgtgtactagctagccataaatatactaccatccaaaaatataatttgcttaagaaaagttgcggactgacaaaacttggacaaagatatttctaatcagctggtattactgatgccttccgtaaaaatgagatagaacttgcctatgatgacgacaagttctgtgatgtgaactgtgctttctcagtactgtctgaaactaacgaaagcatttgattttcatggggaggaaactggtgatgccagcccccagtgaccttgtgctctgctgcagctcacctctggatgatgaactccctggcgccatcccacaggtgcccgtgcacgatccactcgtccaccgtctgcaggtaaggccgcaccgtttccacccagagagagaaaaggagggagacctgaggcagagagtgtgcacggtcagctctcagggttccctggtcactaggataaaaggaggtttaaacatttctgaaatgcctttaaaaaagtg

SEQ ID NO: 199066 - DNA, 1000 bp, Homo Sapiens
acctgccctgcagatcacctcctgccctgtggcttggttcctaacagcccatagaccagtacgggtccatggcccagaggctggggacccctacattaaagaaccgtgagactggaggcagaaatacccatgtgtcttagacaagtgggatagtgtctgacctacagagatggcagtgaggatggagagtagttgatgaattcaagaggtattaagaaaaagagtcaacagcacttggtcattgattagacgttataaaacgttggtctttatcataatgtttctaaaatgaagaatagaacactccagaatagaacattctgcattcttagtacaaaacaaacttgaataagttaaatagctttcatatgctatcacaatgacagaagaaataacaggatttttgccaatatgtcaacagtatacacagcagacacaccagaatgatctgtttcccttttttctagattttagcataatccatcgtggtcactgttgttccaaatctagccccagcactcactattctattcacttgagaaaatgtcaagatgcttctgtttcctcgtttgtaataacatctactgtgcaggatgtgtcaggctggagagagaggaagctaggaaaactctggccctctggagcatcaggaggcgggacacttggcccatcagtggctttctcatggtggacaccataaacaagagcagaggtgaaacactctcctgtgatgcttcataggcagggcacgggcatgcaggagcagaagacaggtggcttctgatgactatatccaacagactgatttgtcagtgacgtatgtgagacccttgggcactccaagtaacatcagggctaggagggtgcctctccatagcctagcacttttgcactgaaatggtgagggcaaaatcaggaaaactggattctgatggtattatgactatttataaccaaaggctggtgaggcctggggaaaattaggtaaacagctgaattc

SEQ ID NO: 199067 - DNA, 1000 bp, Homo Sapiens
gttttcttgagacagagtcttgctctatcgcccaggctggagtgcagtggggtaatctcagctcagtgcaacctccacctcccaggttcatgagattctcctgcctcagcctccccaatactgggattacaggcacaccttcacacctggctaatttttgtatttttagtagagacggggtttcattatgttggccaggctggtctcaaagtcctgacctcagatgatccagtcgcctcagcctctcagagtgctaggattacaagcttgagccattgcacccggcctattcctaatctttcacatgaacctgctgcagtggtgataagattgctgtcaccttctcggtggtcatcacagatgatatggatggagacccccaacgagtcttgctggcagggacctcagtcccctcctctgggcactaatgatctctcattagatctcaccacattatccagcagacccccgacaggcagccccatgctaccctgctgtgatatgacagcctttctaacccacctgctgattgccccatcagtcttacctctgcaggccagagccaatacttgggcccgcttgtgagtggggtcctactagtgtatctctcagagatcatgaatttgaggaggctgacttgtttcctgtgcaactggttatactgccacaccttactgctctccattagcactggggcaggtcagcaagtgcaatcactggccatccaataagaaaacacacagctcgcttacccccctcttagacaccccgcaaattacatgagcaaccctctcgccctccacacccacctcaaaagcatggaaacatccaaacccccttagactctgctcccctttgggaaagagagagagggtaacatgtatttattcacaaagaaagaagatctcctcttatgtgtcgttcatcaaagcctgacaaaccagtgccccttcttgcacctagaaatagactgagagttgtgcttggccttggagaattc

SEQ ID NO: 199068 - DNA, 1000 bp, Homo Sapiens
cctttggcctccttattacctgttgtatcacctttggatgaccaaatgactcatgttctattacttttctgaatatgtaagtctaaattttaccatgataattcccagattccaacctaccactcaaccacctcaaggactcagcttcatataggacaatttgttcctatcagtaataaaatagtttttaaaaagattcttagtgtcaatactcatttaattatttaaattctacaattatggtattattccataacaaaatcaatagtatctgggggaaaaacacccaaggctctaaaaaaactaagaaagagatgatttttagtacaagtattgcctaaagctgtaactggactatatttaagaatactttttaatatcaaatattaagatcaaagtgttttttctggtttatctactattttctctgtcccctcagatattcagctaatcaaagttttaatgtagtaatgtgaaattaatgtagagactatgtttcaagtcatgaattggttccagtagatttcaatgtaataacttaatcagttttattaaactaattttaaaaagaagttggaaaatgtatgtggtataagtagaatcagcattaatttacatgtgagctaggaaagcttatattgaggatagataacagatattaattaataaattttaaaaacctaatagctaaaagtcatgtattctaaagaggtactttttatcttagtgctacaatcaatattcaaagtatgatgttttgggaatctagattttaaagaaataaaaaggaaaaataagccacatagcacttattgtattttatataaggcttaaataaaaattagaaaatttaatttaaaaataaagcattcatttttttctgaacattaaacataattaacacataaaatatttaaaagaaaaaaatgtatatctgctaaattaaaggcaaaagattttccaactttttcaacagaaatataaaatcactaatgaattc

SEQ ID NO: 199069 - DNA, 1000 bp, Homo Sapiens
ttctatttaagtatgctgggttttatgtgaaaatgccatgataaataaacataagaataaaaagaataagagctatcattttgtcagtcatatcatgtactaactcgtcatctgattacttaatctaattctgatttttcttaatttatgcatgtggaaactgagcctcagagacattatctaatttggcaaaacacacgtacacacacacacacacacacacacacacacacaaataaattaattaagaaaatacaaaccttcaaaacttatagctattaagttatagagatggaatccaaaccaacatctgagtatgtcactgacttaccacaataaagttggggtaagattgcgaggttatcaactgcaagtaaggctgtaaagacatatctaacctgtcaactgattttacgacctccagccacaagtagtgacaaagccaggctagatgctgagtttttctttattgtttccagccaaaaacagaggccaaatccacaactgtccctgattaataaatgagaagcaaagggagcaatctggtaccactgtgagaaactagcttatgactcatgtatctggaagtagaacatgatgtttccttatgctctcaggaggaccttgcctttatttgccctacagcactttcccctctgtttcatttaaactctagaaatgctggatatggtcagcgtaagttgtatttgtaatttcttaaagaagtacaaaagttagacaattaccaaggtggtaggaaaagtaccactccagctggttacaagtatacatatctcctatagatccagaaataattgctcaacatcccttcttcattagactgcaaggtccttaagggcagcagtaataataattaacagttgttcatttagtgttttctcaagataagctatcatacttgagtcctcacaacaactgtagaggtagaatgtattatcatagacttttcaagctgttccaaatgcaaaacagggaattc

SEQ ID NO: 199070 - DNA, 1000 bp, Homo Sapiens
aagatacaggcatttgccatgactactgaccagaaagaacttcttgaactacttggaacaggcagtgccatgtgtgaatcctccatgaacctcacatgtacaaacctagatttcaacttgcccacttcgggccactcagtcctgagccaaagcctccagcccagtccagcccgcagcaaggccttacctgctgcagtggactcctcagagttggcccccgagctggttcctgtcgccttctcactgtgactatggctgaggctctggccctggtgcaggaggagtccccagaggagccacagggcaagacggacgcatacatccatgactctaggtctcagtcaacatgcgtctgatgtggacacctcgggatcccagaggcaaagccaggagcccgggagtgcagccgacggtctccaggcaagatgccctcgcggctccgcagctgtccagccacccgcgagcctgccccctccaacagccaaaggtcaagtgctccaagtttgggtgcgggaggagggctggctcctcaggtccaacagtgggtccgccggggctgcggcggcctgagctcgtgccgcttccggagacttcgggcagggtggctgcggggctgctgtcagctccgcagattactacacccctgcggaagggggcggccggagtctccgcgggcacagaagtggaggaggaagagaagagaagagaagagaggcgagaagggggcacctgacctcgccctgccgaagagcggcgagcagcagaagctggggagggcgtgcgacccgcagggtcctgagggcgcgggcgtctccgggatcctgggcctcctaggccgaggtcagcgcccccgcccagtcccgtgcccaggcggctggcggtgcccaggtccagcaggcggacgcacaccggccaggcccaggacagcggcttccaggcgggcgggcggcgcggggcgggcccggggcgggcgggggcgtgctctcccgcgggcccgccc

SEQ ID NO: 199071 - DNA, 1000 bp, Homo Sapiens
tttccactttaaaaaattaaaaaaaatagtacaaaacagtacaaacctttatcccgttcttgttgctgcattgtacttttcaacttatcactaagatcatttattatgttttcttttctcattttctctcttgttaaaacagtgttaaaattggtctggaacaagagaataattatttaaatttatctacatgtacttagcagctaggacttagaaaatacacttgcaaatattcttttctgtggcacatttgtacatggagatgatggggtatgattcatgaaatgttttaaaaatgaaaatgtaacatactgtggcaaaggttctactttcttggttccaatttaagtctcttgaaagcaaatcctattttcttattattgtccatatatttactgtcagagattttgaaattttgaagaattagaagcatcaataacttagagtgctgttagacacttacttttttcctggagtaatcatcctgcctctgaaaccttccttttgtctttagcatttgatcaccaccctaacattttagatatgactctatcttccttatttctcttatttggatatctgcaatggtcactggaatgctgatttatattggctagacttattactcccccacttttataaactctactatgaagctcacatatccaactgcctgcatggatctcatgagacaatctggcaattttaactgcacagtttctttaataaagatgactgaatctgtataaaaattttgcttaggccggacttggtggctcatgcctgtaatctcagcactttgggagactgaggtgggaggactgcttgagcccaggagtttgagaccagcctgagcaacacaagatcgagtctctacaaaaattatctgggtgtggtggcacatgcctgtagtcccagccattcgggaggctaaggagggaggactgcttgagcccaggagttccaggttatagcatgccatgattgcaccactgaattc

SEQ ID NO: 199072 - DNA, 1000 bp, Homo Sapiens
acccccatctttttatacaataaccttggcgatgagaattcaacataggtactgggggagtcgcaaacattcagaacataacaccttgcttgctactggctgaaggtaaccctcagtttctggccatgtgtttctctccttagggaagttcacaacgtggcagctggttgagtcagagctggtaagagggcaagagagagtgtgagcaagatggatatctccagctttagaaccgaattttggagcagacaggcattacttttgccatgtattactttttagaagcaagtgactagttgtagcccaagggggttacaacgggagaggatttcacagtgaatacaaggaagtgaatgttgggagtcatttcaaagaccttcagaataacctatttatttctgattttccatctacaacttggatttcaaggcataaatactaatttcagaattttcatgaaaatagaatgataggtacattcttacaacagtgtaggggattcataagtgatgttgaaatatacgtttgacaaatttgttttctaaagccaaaataaagttaatagaaaattttggccgtatatgaaggctaaaactgaaatgtgatacatgcctgcttgattttttttgctactgacaatatattataattaaaaactggtatctattataattaatagcaggcatctatcttcctgatcttaagtaaaatgtttgatcattaaatatgatatttgatatagttttatagtatatagcaattacataaggaaatttcagcctacttttagatttttgaagagtttttaagttacatttgtgttttgaaatatagcaaattttttatctacatgtagataaaaatgataacaatatcattttttctgtaatttataaatatggcagattgcatcagtagattagtccacttgagaaacaaatcttagaatttcaaaatctacatcagtggagctctttgacattgcattatccttgaattc

SEQ ID NO: 199073 - DNA, 1000 bp, Homo Sapiens
ttacaagaaaaggaattgagtggtaattaaatgccaattaaagggttttatatgtaagcaaagtacattggttaaataataatgtttaaaactaaagcgatgaactaaatgattcaaggtaatgtgatgagaattgttctattcttacactgattatcatgatgcattagtcttgcttgatattcaacagattaaacaagtcttaggttattagggtttctcaattttagctccattgacatcttgagcttaataatacttttttgtagggggtgggggatgtcctatgtgttgtagaatgtttagtagcatcatggtcctttacccattagatgcagtagtactttctcaattgtgacaaataaaaatgtatccagacattgccaaatgtcctctgtgggggtggggatggtgaagcaaaaccccctccagttgaggatactaggctgtctcctaatattttgtttttgttgtgtttttcttgaagattactttattttcatacttatgtgaagttgaatttttagagctcataataacatctgagggctccactgaccaaatgtattactaagaattaactgctacagtggtaagaacactgaatttggtacccaaagacttcagctcagagtaagtgtcccccaccattacatgaccttagatgagcaatattaacatctttgaatataagttttctcatctatataacaaggataagagaatagtctctagtttcatgtaggattctaagacttctcaagtaaaaacaaaccaatactttgcaatatgacttttcacccttagtcacaaagatattttgagatcatccagaaccctccttgaccaattatctatttttcaaattcaaatacatttgttgagtgctttctacatgccagacactttttctaggcactagagacaaattagtgagcaaaatagactaattcatgttatgttctagtgagcagtgtgtggacacaaaaaagtagaattc

SEQ ID NO: 199074 - DNA, 1000 bp, Homo Sapiens
gcaggtacatgatggcccatctctctccctggcctgagctacgctgtgccagactttcatcaagctgcagaggcagcaatctccctgatcagtgcaggctgggcccctctcagagttccctgctttaatctttctctagaacttggggatccaagcagcagaaaataaagaactttccatacctattccagtccccacagctgtcctgactcaaaactaaaacccccatctatgcctcatagagaaatggctccagaaccaccaccatccctgattttgtcattcctggataccaccatactcccacccaccactggtagacagagctctaggcttccagaaagaccccctcttaccctgttcctgggtttgtcctacccaagcccattcctgtccgattgccatgtgtcaccccacaggagacaggaggcagctgtcagtcgggcacaccatcaccagctggtggccctgggggtggggggcaggtgaatggcagggcctgtctggccagtggggcacctggcactggtgaaggagaccacagactgtcgttggacaagactggtgaacggttggcagaccccagccagcggggctcaacagtgcattactaagcagagggcacagccagtgtggctacagcagtgaactgcgggcgggggggtaggccatggagctgtgctgggagcttcgaaaagtgggtaagaggactgaaagcaactttaaatagcctcagggtgggaactaagtgcccaggatgggatgtatgcattaagtgctaagaagtgggtgtgcattaagtggggtgggggtggggggtcatgggaagactttgggacaggcaaacagagtcaaaatgcaaggggtttgatggagggaaagattccagaacactcagatgtggccatttgtcccctccagagtgcccacacgctatgatgtccaagacagccaaggagactgagggaaggcaaagctgctgggagggcaaaggaagctt

SEQ ID NO: 199075 - DNA, 1000 bp, Homo Sapiens
ctctggctgtaaagaatggtagctaaatgtgccctgagctctcgctatagtttatcatttacattttctgtatcttgttaactctcagcctctttcttatttataagtcctcttgcctagtattactgttgtcactgctgctacagaattttgctgatgttagaaatcaccactgttaggcctggtaaagactataggttgaatttccaacagttcagatagacatcttatcaaagtgatagaattatatccaaaatgtttgctgaaatatgtgggttacaacaagggacagagttttcagttcaaggaagaactgtttacgtcacttagttatgaggagtttgacagtatcagtcccaaataagattatggggcactcaaggagttgatgactgtccaggtgattgcccacaataagctgggtaactggtgcaatactatcgcaggcctgaaggttttcttcacatctgttcacaagatttcacagggtcgatcaacaaagtgactggtggttcattttcggatagtgcttagatggctttgcattttggttcttattgctatagttttgcacagtctctcattatgacgtatctgcaccaatataagctttgcaaatggtttccttgccttctaaccgaccctaatcaaattcatggtttgcatggttgaccacgttatcttttaaaaatatattatcttattaattcaataactcaggatttacttaactttaatgaatacctatgatgtgccagacaaactgtgacaagtctagtgggagacagacttgtacacagaaaattataagacaatgtgctgtgtgttttatctgagatacaaccactccttgattaaaactcttccatggttccctattgttaataagaaaatagtttaagttcttccctgaaataaaagatcctccacaatttgaatccactttaccggcacagcctcatggctaggcccttcccccacgtgcactcaatgtgtcaac

SEQ ID NO: 199076 - DNA, 1000 bp, Homo Sapiens
cctcagggagcaagcactaaaccctttgcctgtaaatgtttttgacaacccttcctccaccccttctaactagaagctttagtactgggcctgttccaactcaggtgaaatacagacgaacctttcagctaggctttcaaggagctgccctgtaattacaaaacaagtaattataattctttgcatatgagattctttctgctcctactggtactaggaatgcaggttgttgttttcaaggtgactactcaactggagagcagaggataggacagggctaagttaaaatgtcacaaagctcacttttcttatcaagatccagccattttgtttaaataagaatgccctaggttgcttaataagccattgcttaatttccagagtgccacaagatatagactctgacagtttttgccaactttgttgttgcttttatggtggggcagaattccagagttccttactctacctgcttttgttcatgtcaccccattcaatgcctttggtatgtgaataaggagcagactcctccacccctgacagacacagtctgcaggtgagctctggagttcataactttatggcattacttttccaagttccccctctcactatctccctgatatctccagttcctcagagtttccgttttctatcctccaaccagaaagctggggctcaaatcaaagcaaagagcaacgattgacttcaccctcttgaattttgatgcagtgggtagggacttcaccagaccactggatttcctgcacctgacttgaggcagggggtgggggtggggctatgggacaatagaaagggaaaaaggtactcttggaataaacagatgagattataagcagatgagatgaggtcaaagaataatttcatttaatattaaaagatatataaccttggctgggcacggtggctcacgcctgtaatcccagcatttgggaggcagaggcaggtggatcacctgaggtcaggagttccagaccag

SEQ ID NO: 199077 - DNA, 1000 bp, Homo Sapiens
gcttgccaatattcgacaatcaaagagtaaaccaggaatagatttttagaaatctcagtgtgatttacattgttacccctatatcacaatgcatatcaattagctagatttgaagatccaaggagagaaaaagcttattcatgacctagctagacaggtataacaatttacgttaaaattgaagatttttataatacaaatcaatgatcgtacacatttttcaacatgaattaacatgcagcagcccagcactgtgtaaagtggctgcaaaacctatgaaaaaaaatacaacaaacgctttgttgatttggataaacttagagttgattttcgatttatatgatgcccctctgaatttgacgttgataataagaagttttcacaagtgttagtggacttattaacctgcatggatattttgacagtgctgcacttcttctgagtcaaatcaattattcttaaaagagtaatttttctcaatacagatacaaatactggagaaaaactgtttggtactccatttattggaaaacaatgtttaaaacagtgtgaatctacttttttaactgcaatttttatgaatctaaatacagatcaaatattttttatcaaaacttcacgagttgagatgtacttaaaattgtaaaatacacaatggatttcaaggatttcatataaaaaagtgcaaactatctctaataattttacattgattacatgttgacacagtatttctgatatactgggttaaaaaaatgtacaatcaaaagtaatttcacctgtttctttttgcttttttaatatggctactaaaatattttaaattacatatgtgacttgaattatttctcttttatataacactgctaatgtagggaatctaagatactacctgctccaaaattctataatactagcataaagagataataaattaactttattgaactataagaactcaattttatagtcgggcgtggtggcatgtgtctgtaatccc

SEQ ID NO: 199078 - DNA, 1000 bp, Homo Sapiens
agcaaagaattcagacatccttcaacattcaacaaatatttactaaatgctttttgtatgtcaagcactattctaggtattatggaataaaagacaaaaatccctgcccttgtggaactttatattccattgagaagatacatataaaaaacaaagtacataaacaaaatatatagtatcctaaatgatcactgcaatggaaaaaaagcagagaaggagcataatggtataaagaaggggattttgaaattttagatggaaggaggtgacaaaatgcgtatacggatatctaaaggaaaagccctctgggcagggagaacagaaagtgcaaacactctcagaaagggacagagatggtattagcaaggaagccagtgagactagacttgagtaagttaaaaaaaaaaaaaaaagagagagagacttaatgggaccaataatgtagggccttgcagaacattttatgattgtcatttactaggggtaaggtgaatgccattggagagtttactattttgtttttatttttttgaaacagggtctcaaatgttgcccagattggtctcaaactcctaggctcaagcaatcctcatgtctcagccacccaaagcactgagattacaggtgtgagccacagcgcctggcaaaagagtctggaacagagtgatgcaacacactgaaacagggtcacattctggctgacatgttgagaacagactgaaggagagcagacaacaagcaaggagactaggtaagaggctatgcattttcacagctgaactctctaatccatctcctttccattctagcacttcctatggcttcatctaatggcaattcgtaacaatgagaagttagaaataacgtgattattgatatcatgttcagacttcacaactgtattttgattaggacaacaattgagtatgcaacttgtataagttgttcatataacattgttttaaattatcttcatgtgagacagttaacattggaattc

SEQ ID NO: 199079 - DNA, 1000 bp, Homo Sapiens
agatctcatggtaagtgttcttaccaaaacaaacaaaatacaacatgcacaagaacacaatgaaatttttggaggtgatatttagtactttggtcgtggcaacagtatcatgagtgtatgcataggcccaaacacatcaagatgtatatgttaaatgtgtgcaactttttgtatatcaattatacctcaataaagctagaaaaattagcaaataacaagatcactctcatatgtaggacagtttcttcacataaagggaaagggacttgaatgttcatttcttacttttccttcatgtgaactctatgctccaaatgccttaaaatctccagaaaatatctggctttttcatacatttgaactcttgtgtgtgttatttccctggaccaggatgctcatgtctctatccttatgtgcgtactctttcccatttgcacctgggactcagctcaaatgttgcatcttgtgcaaaacattttctgaatttctcccctcagtcttgtttgcactctccgaattttgtagaggcttccacttagcacttttcactttgctgcaatttctttacgtgtccctctccactgtgggattgagggcttctggtaggcagagattatattttattcatgcatccctagaccttatcacaaggcctggtgccaggggtgggctagggttggctcattaaagactcatgcgtgccagatgttaaaatttaaggaattttgcaagtaggttgctaaatacagcaattattaaaattaaattacataaaactgttactaagtggatgatattaaaaaaaaaagtctcaaaactcaccactacatcattattttctgccctttgctattatctgtgttcttgaagtcatttatatctgcattgtctgtagtagagaggtactaagttgtgatatgcctcaggcacctcttctcaactccatgtccagtgctcaagccacactggtatcttaaaattggccacagcgaaagaattc

SEQ ID NO: 199080 - DNA, 1000 bp, Homo Sapiens
caagacgggctggaaaggagaaagaagggagccaaagagaacagtgcgggggctacagcaataagtagatcgtgggaaagtcatagggtctgagaattaggtaatgggcatgcaaaatacaggagtggagaaacagattagagattggatacacagatagaaccactgaatgattgaatgtggggcccaatcaggagaaaggaaagatgactctaaggattctagcctgagtaactgggaagatacctaggaagccttcagaaatagaggactaaagaaagggagagaggttacacctggagttatatatatggaaattaatcatataagatgttagtcgaagccttaagaatgaatgaaattgccatacaagaggggtgtagagggaagaaaaaagaaggttaaggacagtatttaggatgcagagggaagaaaaggggcaagaaggaagcaatcagaaaggcaaggaaagaaggtacattttcattgaagaaataggagtgcaggggccgggcacggtggctcatgcctgtaatcccaacactttgggaggccaagacaggtggatcacctgaagtcaggagttcgagaccagcctggccaacatggtaaaaccctgtctctactaaaaatacagaaattagccaggtgtggtggcacgtgcctatagtcccagctactcgggaggctgaggcaggagaatcgcttggacctgggaagcagaggttgcagtgagccgagatcgcaccactgtactctagcctgggcaacagagtgagactctgtctcaaaaaaaaaaaaaaagaaagaaagaaaagacataggagtgcagaagaacaaggaatggtgagtggtcagtagtgttgaggattacaaagaagttggagagagtggcatacaaaaaggctctgaatctaggaatcaggagattatggttggtgatattcaagggagcagattaagtgaattgtggaggcggaagccatattacagagaattc

SEQ ID NO: 199081 - DNA, 1000 bp, Homo Sapiens
tgctctgaaggtatggactcctcttccacttgaatgctgtccgtagatcctggcttggaactcctaggctgcacaccctctttttgtttatttctgcctggagttcattgagtttattctaaaggtttagaatcctcaattttttagtctctctaaatagatacttaaccaatgtttaagaaaagagttgcagttctaaacatcaaatcttaacaatagctgatttttgcttctgctgcaggtacctataaaagcagagggaagaaaattgatattgccttagagacccatccacagcccagctcttgacctgttggtttcacagctcagagtttctgattaaagttaggacctttggaagtagaaagcagttcagccttccggacaaagagcctcaaaacgcaccttgccaagctgttgatgttacagagccatctcccagaatgtgggacacagagggaggtgcttaatctcacattcagctgccagaagttttctgagcttggtgtatgtgttctcttaaaaacatgagctcagtagtctctgcagaaaacaaatcaaagcaaatactttaagaccactatactcagagtgtacatttcatcttctggaatagtctgctgacccttttctttcctttgacctctgcagagggtgcatgagaagagagcttgataggtgagaaaaaaggagacttattgctctgggactcctcatctccttttgctctcccactgaagtagaataaatcaaagtactcctgttggatgtaaataaaaattccttttaaaaaacttttattttaggtttgggtgtacatgtgcaggtttgctatataggtaaacttgtgtcatgggtgtttgttgtacagattatttcatacgcaggtaattaccctggtactcaataaccatttttttctgtttctctccctcttcccaccctccatcctcaagtaggccccagcatctgttgttcccttctttgcattcatgaattc

SEQ ID NO: 199082 - DNA, 1000 bp, Homo Sapiens
tacagacaagaaaaaaaaaaaggccccaagaacttaaaatcctttgcaaaatcacatagaaaggttaagtggtgaacccagtgttcaaacctaggtcttctgacttcaagcacaaagctctctcactacattcagatcacttaaaaacacaacattttattgtgcctatcgttaataagactgtattgcacacttaagaatttgttaaagagggtagaattcatgctaagtattcttactaaaataataaaagttgtatgtatgtagaaaaaagtattgcttaatctaattaaactaaacagcttctgcacaacaaaagaaactagcatcagagtgaacaggcaacctacagaatgggagaaaatttttgcaatctacccatatgacaaaggcctagtatccagaatctataaggaacttaaatttacaagaaacaaccccatcaaaaagtgggcaaaggagatgaacaaacacttctcaagacatttatgcggccaacaaacatgaaaaaaagttcaacatcactgatcattagagaaatgcaaatcaaaaccacaatgagataccatctcccaccagtcagaatggcgattaaaaagtcaagaaacaatagatgctggtgaggctgcagagaaacaggaatgcttttacactgttggtgggaatgtaaattagttcaaccattgtggaagacagtgtggcgattcctcaaggatctagaaccataaatgccatttgacccagcaatcccattactggtatatacccaaaggattataaatcattctgctatagagatgcatgcacacgtatgtttattgcagcactatttacgatagcaaagacttggaaccaacccaaatgcccattgatgatagactggataaagaaaatgtggtacatatataccatggaatactatgcaaccataaaaaaggatgagttcatgtcctcctagtttttccaaaacaaactaatgaaatgtgaaaagggtgaattc

SEQ ID NO: 199083 - DNA, 1000 bp, Homo Sapiens
tgaatgtcagaatcaaattcaagctcatttaattctaatcaactgctgcttacaaaaaggctaaaccaggctgggcgcggttgctcacgcctgtaatctcaacactttgggaggctgaggcgggcagatcatgaggtcaggagatcgagaccagcctggctaacacggtgagaccctgtctctattaaaaaaacaaaaaattagccggatgtggtggcaggcgcctgtagtcccagctactcaggaggcaagggtgggagaatggcatgaacccgggaggtggagattgcagtgagccaagatagtgccactgcactccaacctgggcgacagagcgagactccgtctcaaaaaaaaaaaaaaaaaaactttgggaggccaaagtgggcagatcacaaggtcaggagatcgagaccatcctggctaacatggtgaaaccccgtctctactaaaaaaaaattagccaggtgtggtggcaggcacctatagtcccagctacttgggaggctgaggtaggagaatggcatgaacctgggaggtagaacttgcagtgagcccagattgcgccactgcactccagcctgggcgacagagcaagactccatctcaaaaaaaaaaaaaaaggctaaaccaacatgaagtatcaccaagcaccagctctccaaggtagcagcccgagctctgctcacgccgccagcgggctggccctcctccctcatcagcgatgctgagcattccctgcctctgcagaacatgcgatcacgctggctgcagcaaggcaggaggagcaggcggaaatgccgaggaactccttggttctctcacccccgaactcttcccagcctgccaggctctgggcctgagggatcattcacccaccaatcccaccccgtgacttagtcatgggggaagtgaggcctggagagaggggacttgtcccagcagggattagggctttcctccctgctctgtggcagatgctcctgcactgaattccgcg

SEQ ID NO: 199084 - DNA, 1000 bp, Homo Sapiens
tgctgtggaactgtctttcagtgtctgtgaatttgcctactagtgcctttagcagggagggtggggtgctctcccatgtttgaaataaagaccttagtctttagtttcaatttaacctgcagtttaacatttcacgcagtataatgcagccataaaaaagaatgagatcatgtctttttcagggacatggatgaagctggaagccatccttctcagcaaactaacacaggaacagaaaaccaaataccacatgttctcactcataagtgggagttgaacaatgagaatacatggacacagggaggggaccatcacacaccagggcctgtcagggggtgggggacaaggggagggagggcattaggacaaatacctaatgcatgtggggcttcaaacctaggtgacaggttgataggtgcagcaaaccagcatggcacatgtatacttatgtaacaaacctcaggttctgcacatgtatcccagaacttaaagtaaaaaaaaaaaaaaatccacgtggtataacagaaggatcactttacacagcggtccctgatgtctgatgtgggaccagcaacaactttgaggaaggttttggtgacaatcagctatcttgaggtggctatttctagactgattacttccttccctcgcatcctcccttccttccttccttccttccttccttccttccttccttccttccttccttccttccttccttccttctgatgtagccagtctaaattattaaaagataaaaagactcccttaagcccttttgcccccatcgggctgctttggatgcagctccaccatttactgccttagtgttaccatgggtgggttcctcagtctcatcacatgaaaaagagacaatagtaggatgtaccatgtagggtttttccgagtattaaatgaggtaatgcctataaagcacacagtacctgccacaaagaagccattgagcaatgtcagctaggcagcaataacattaaagctt

SEQ ID NO: 199085 - DNA, 1000 bp, Homo Sapiens
aggggtgcaggatcctgttctgagctgggtcaaacaaagcagggccgggccttcctgccatccccaggtctcagatggaattacactagaggccctccgctgggaagcacttgaggtagggcaggaggggggctgtgacccctgccctttccccgccagagacctcaggctctcagcacattccacaggctcctgagtccccgaggcctgggccagcttgggcaagccaagatcagatgtctctgtgttcgggaaggtctccgtgtgggaaagcccttgggggatcccgggtgaggagtgttgccccatccagagaatgaatgagttcctttaagtgccaccgccagcaagcccagaggcacacagtccgagtgcacccgcttagcctttacattcctctccaccgacaaaaggaaggggaaactcaatcagcaggacttcagaaagggccttgtgtttatagctttgtcaagtaaatttggacgcagctggagcacaggccctgtttgtttgcacataataatcttgtttatcactttaaaaaattcagtaatatctcagcagtcaggcttctggttgtgaaatcacattgtatgggatttataccaaattatgtatttgctaaacattcactgcacacgtgtacagcggagtacgaaaaggaacgttgtccacaggggatttatggatacaacagcaaacattttataaactatgcacatgcattacacacatgcacacacatatgcacacacatgtgcaaacatagccacttttttgtcaagagttaccctttggggctccttaaaccagaatgggagtttgaaagagagatcatactccagctgaagtttgttgacccttttctaaaattaaaaagatcaaatttagtatttgctggatatgcagggagatgagactcttttaatctcaaaataaacagattctttcaagaacgaagctgtggcctctgtcttttgagcgcttatgaccacagcac

SEQ ID NO: 199086 - DNA, 1000 bp, Homo Sapiens
ttttgagtttcacgtcatttctgagctagaggacattctcctagctgtagtctttagctgtgtgacctcatacaagtttgatacttcacttctccactcttcttttctccatctgtaaaaaaaaatgcaaagctatcccacagaattattcttagtattactttttgtagttcgtgtttataaaaatgtatcagtatatttaccagtctctttgataaacattgttacttacatcccactcttctccattgttttcttgtgactgaggtatatcatttagtgttctcttgggaagaatctgtgagttttgcctttgaatgatattttcattggttattaactcttaagcagacagttcatttacctcaactgttagaagatgtttatttgctgtattctgctgatgccgatgagaaatctgtcagcagactatcattcatgtataagcaatccattttttctctaagattaaagtgagacaattggaattaacataattttaaggttcctgtcttatttgtctggaggacagatatattaactttagacttgttaataaaataattttaagaaagccactgaaattacagaatatataactatcaaaccagtagagggggagagaagtggtagatacagagaaaaaaaaaaacagagtaaatggaagcacaaaagatgataaaaataattctaaatatgtcagtaatcactaagtggcgtaaactcaccagatacacactggagactacaaaattgttactttcttaaatccatctgttgggttccaagatagccaaataggaacagctccagtctacagctcccagcatgagcgacgcagaagacgcgtgatttctgcatttccaactgaggtaccgggttcatctcactggggagtgtcggacagtgggggcaggacagcaggtgcagcccacggagtgtgagtcaaagcagggtgaggcatcacctcactcgggaagtgcaaggggtcagggaattc

SEQ ID NO: 199087 - DNA, 1000 bp, Homo Sapiens
ggctgctgcttattccaagtttcaaggtctctgcttcgtccctcccttctccctaccccaccaccccaccaaaatcatagtatatatccatgtcacagatagagtcttgatgtgttgtttctctaatcagtgataagtttttaaatctccccaacctattctttccttaaaaactagctgtttggttaaaattattaacttgcaatgcagcactccctacaagccaggaccaagataagcttgatgtctctgctcattgggacactgagttcatcagaatttaaacaaatcaacatggcttataaaatggagctatcaagtagttttcccacattatgccaaagaatcctgaaaaggtcatccaagccagttccagagccacacacaggccttcccagaaataggcatgcttgtcttgttttaaaaacttttcagtgaataaagattgcaagtccccagacaactatactgctacctggcaggtcagccaggaaattcttctgaacaaaagatgcaccatttgcctgtggcttccttccccaatttcagagtgagaacagctaatcactgtctgaatggaattctctcaggcacttggaaagctatgtaaatcccccaagaggcatatggttccactagggactgaaaactaaacaggctctctaggcttagggaagaatagaccagaaagagagactgtatgaaatcattccatgaaggatataggcgctcagagtctgttacggtgtaaattggcacaaccctctggagggccattgtgacatatgtattaaaagtcccaaaatgtgcattcctgttaatggagcagtctaccttgatgcataaatgttaagtcaattatcagagaggtgtgcagtggcttttgtatgagaatattcatagcaacaatatttataacagaataaagaaaaatacaaatgccctaaaattcaggaaggcaaattggttttaccatcttataatgcctatgattgaattc

SEQ ID NO: 199088 - DNA, 1000 bp, Homo Sapiens
caaattccaaccaatgatgtttatagcttattgatggcagaattttcaggctggccagaggcttgttttgacatttactgacttgtactttcagaaagatcaagaggagccaggcgtagtggctcacgcctgtaatcctagcactttgggaggatgaggtgggtgggtcaccttagatcaggagttccagcccagcctggtcaacatgttgaaaccccatccctactaaaaatacaaaaattaactgggcatggtagcaggtgcgtctaatcccagctacttgggaggccgaggcaagagaatggcttgagcccgagaagcgttggttgcagtaagccgagatcgcgccagtatactccagcctgggtgacggagcaagactccatctcaaaaaaacaaagaccaagggagaatttgttagggccagttggccctgattttcagttaggataatgagtggtgtgagcccaggcaaagtgaccatatccctgagtgtgtaattgatgagtgtccagggcctgccagttcagcttggggatgggggcagaaagttcctgctgctaagcccctctggaaggtcattacgttcaggttagggatcatgatgttattctctatttttcctgtcacctcactcttatcaagacttctgtgtgcggtaacacaggggaacacaggcttagagaagctggatctggaaggggcctgtgtttatccattgggcctgccaaccataggcatcagaattatctggcatactggctcaaaatacagattcttgattccaactcttgacctgctcaactggcttctctgaaccaagttattcctcaagttattcttacgtacactaaaattagatatccactcttttcatccagcttatttattttctataggaagaaaatgaaacccagagaagtaaagtgacttccctaacatcacacagctagtttgcaagaggagatgattccactgtgctgtcaggagtgctgaattc

SEQ ID NO: 199089 - DNA, 1000 bp, Homo Sapiens
cctttgttcacttgtggtctgataacaaataagatctaggtaccgtggaaagtgggtgggatttgaattaggtagaattctggttctaccacttactatatggatggtcttggaaaagttatttaacaactgtaagctcagcattcacatctgtaaaatggaagataatttttaactttggagggtacttgtgaaaaatagaaattgggcctaggtgcagtggctcacagctataatcccagcacttagagaagctgagacaagaggatcacttgatcccaggggtttgagaccagctgagacccatctctgaaaaagtaaataaataatagatagatagatagatagatagatagatagatagatagatagatagatatagatagaccccatctctgaaagagagaaagaaaaagagaaagagacaaagagaaaaggaaggaaggaaggaaggaaagagagaaaaggaaggaaaagagagaaagaaaagaaaagaaagaaattgtccatgaagttagataatacatagctcagtgcctaagatgatgtgtagataatacatacaagttttcattgtttgccggatgcagtggctcacgtgtgtaatcccagcactttgagaggccaaggcaggtagatcacctgcagtcaatagtttgagaccagcctggccaacatagtgaaaccccatctctacggtagaatttaattatcttttcccactgtagtttttctaaatcatagctagaattctgttccccctaaaagctgtagattcacaacaattacatgcttcatttttgctcacagggcatttgataccttagctaaagcacttaataccacagacagctcctcttctccaagcttggcagatgggatagacaccagtggaggagggagcatccacgtcatcagcagagaccagtcgacacccatcattgaggttgaaggccccctcctttcagacacacacgtcacatttaaggtgagtgaattc

SEQ ID NO: 199090 - DNA, 1000 bp, Homo Sapiens
tttctactggcagatagattgcttctaggttccttgtttgagaaggactagaaaatgtgtatgtgtccattcatgtatacccatatacatatattgatatttatttatttatctgttaacctacctatctatgtttattaaaagctatgagctaataccaagatttaaaaattcaatccagtaccacaggatacaattacatattcatttgctcaagcctagaaggcaccaaaagtagtttcaggattgctgaaaaccattatgagaagagattcttttaactagagtttaatatttgtttgcagttctttctctgaggtaaaatttacatacagtgaaattcacaaatctctagtatccagttcaatgcattctgacaagaatatgaggatttttaagttccttagttggcattaatgtgtaatttgaggtgactagccatacactactcagtggtacctccttaaattataaattgaaatcaacatggtaagagatcttgcagcagtgctttaaaggggacagatttctactgttttcagtttctagtattccatctaaagttgctgatgacgcaagtttaaaccattgacttagcagcagtaacccctaagcatgttttttcccattaatagctattttttcctctttgaagaggtattgcagaagcttttctatttcttaaaattgaatttaccatttacagaatgacttctttgacacttatggcctgataattttagagtgctatcagagaagagaactcaaggggtgagaagctgaaatgcccactctagtgtttttacactattatctgcagcgtttgagcaactattcctctctccgtattccttttgaagacttcgagacttctgacactactgctcccaagttactcacaaagttatttcagctcccaaagcttgagttttttcttctgtttccttgaggatatattaaaaaaactactttgaaggaattctaaccaagctgagaattc

SEQ ID NO: 199091 - DNA, 1000 bp, Homo Sapiens
taaaaacagacaagaggaactaagagaaagaaaacagtgtgagagaacaagacaaaatcttcaaaagttataataaagatcattaaagagattaggagaaaataatgcatccataatacaagaataggaagctataagaaagaacattttgggaaaattaaaaatttagtagaagtgttagaaaaccaatcagaaatattctcccataaagctaaatttaataaacgaagagacgagagagagagagagagagaaaggaaaaaaggttaaaccaggaggtctagcaaccacctaacaggaatcccaggaagaacaaactaagaaaatgggtatgaagaaataattacagaaataataaaaaaaattccttagaattgaagcttataaaattccagatagaaaaggcccactgaggctgggcgctgtggctcacaccagttaacccaatactttggaagaccaaggtgggaggatggcttgagcccaggagtttgagaccagcctgggcaatatggtgaaactgtttctactaaaaacacaaaaaccagccaggcgtggtggcgcgtgcctgtagtcccagtagttactcaggaggttgaggtgggagagtcacttgagcttgggagtttgaggtcgcagtgagctgggattacgcctctgcactctagccagggcaactgagcaaggccctgtcaaaaaagagaaagaaagaaaagaaagaaagaaagagcccaccaagtgactgaataatgaatggaaaacagacataaataaagaaggaaaattatctccaccctagaatttgatatctagccaatactatctatcaaagggagggtagaattttcagaggtatatagtctcaaaaacttgcctccctcacaccctttaagaaggtaataaaagacaaacttcactaatatcagagtataaaccgtggaagaggaaaatgcaagacccacaaaaccaaaaactagcacgggggaggcaaagggaattc

SEQ ID NO: 199092 - DNA, 1000 bp, Homo Sapiens
ttggtttggtcacaagtttaaaaggaaactcaagcttgaaagaagtcaacatcagaatgacaaagagacatttactatgtaccgcattgtatccgtttgcttaacaatctttttaaagaagtttctataacccacttccttctactcccccagtcttgctccattaatattagactcaattacttggcaaaagtaagaaaaaaggagaagaaggcttcctcttctcactcacaaatgattcatagttactctttgcactccgatccccttcctcccacaccaaactaccaaaatccttggagcaggtcagagcatgaggtgcaattatcatgcagctgcagagttttgcagcctaatacatactgaattactgctccttcatcttctttctgactctatgtcctctctgatgtggactaccggacaggctgacctgcctcccactcagcagagggagagaatgtgaagcctaatgggatgtgtcttttatacaacacatgaaaagcatataaatacacacattattccatttcaaccttgtatgccattgatatacaatgcttcataacacgagtcagtgatgtcttttaaaaagtaagattcaagaatgccattctgatttgtataattcagaagattataaaaacagctatccagcacattctcccacttaaatagcactattagtagggaaaataataagacagagaaacagttcaagggagccattgtgaaaaaataagaaaatacacagacaaatttatttgaaaaggaccctggtccaatctgttctactatttatgaagtagttaaagaaaatgagaaatgaagtacaactcaataccctgaggatataatattaaacttcctgtaaccccagaaccatttctccaaacaaaatcttcctcaacatataaagcaagtcagaggcagggtggaagctgaggtacaagttttggagttccaccagcaatggccccgagttaactccatagaattc

SEQ ID NO: 199093 - DNA, 1000 bp, Homo Sapiens
aagctgtgctgtgtatgcttcatcaggctgcctccgcacagcagatggaacagaatttttccatgtggggtaggattgtcagataaaatacaggatgcctagttaaatttgaatttcagataccaaaaaaaatttttggtataagtatatctcaaatacacttactgcatgggacacacttatactaaaaaatggtgttgcttactgaaattcaaatgtaactcagtatcttgcatttttatttgctaagcctagtgaccctaatttagaggagaaaccgtaatttaatggtcactgaagcccctagagtgacagaggtttcccaagatcacacggggagttagtggcaaatccaggattggacccagtcttcctgttccccagtcccaaccctcttggggtggttgtgaagccctctgaagtccctggagcaggcatggtggtaagaacagctgctttctctctgcagaggctgtccacatggcccatcctctccccagctgtcccactgggcaaaaccaagaagtgaatccctgcatggaagagatgagaagagcgaggtcacagcaatttagagaagatggtgttgattgagatttccagacagggagcacgggctgctcaggaagcagctaattaagcaggagactccaattaagaagcaatttgggtctttgcagcaagacccagcagccacccaagtgtagcagagaaaaccacaggctcgggttcttgctccccacattagctgactgtgagatctcaggccagctattgagcctccctggacatctgttttttttgactatgaaatgaggggtcatgctgcttaatattgaaggaccctgctgacttcaaagtgggcaattccagggagtgggaggattctttccctccaatgctggaacattttccactgcattctagtgtctttatcaccctctttgcattccactgaaggccaattattctctcagttgtagtggatttgaattccgcg

SEQ ID NO: 199094 - DNA, 1000 bp, Homo Sapiens
ttggaaaatattggtttaacaagacaacaataataatgataacaagtataatagcaattaataatttagcggctactcttttccagaccttgggctaaatggtttacatacatgacctaatttaatcccctcaacaacactgtcagttaggtgctgttattcccattttgtagataatgaaagatgaggaagctcagaaaggtaggtaatttgtcaaaggtcacatgaaggtcatgtttgatgactcttagaactttttatggagtagaaacttcccatgatctgaaagaaaatgaatgagatccactctttgtataaatgtttctctgccttttagttaagaattgctgatatcattgcttgtattatattcaggggctacttcagagacagagctgctctatatgaccagaaacttgggctacagacaggttcctcaccctcccaccacctacccacctccattcctgctgatggactgtcaggagcagtgcattgtcctcattagagtcactctgacaataaccaacagtagttattggacatttaccatgcactcagctgagtgctggagtgggaatggcaagttgagaagagattcagaataactgtaaaatagggctgcaacctttgaagaatttatgtatttgttaaggagaccagactagtttacacactcaaaatagtcactagacaaactaaggccatttaaaattatgtgctaaattacacagaacagatctgacacagaagttgagagaaaaggaaaaaaccagaggaggctgaatggaaaagacaactcttgcatgcctcagaagtgggcgtaggctttgcaaaattggagctcagaggagagggcactctaggtaaagaaaacacccaggcaaagatatggcaagggaataatcatggaacagagagacacattgggggtggaaaagaagtttggatccatagaccaagaagcactgaacagaataagattgtgttgaattccgcg

SEQ ID NO: 199095 - DNA, 1000 bp, Homo Sapiens
acccgagaggtggaggttgcggtgagctgagatcacaccattgcattccagcctgggcaacaagagcaaaactctgtctcaaaaaaaaaaaaggcaattaaggtacagttaaatgctgcagactaaaatattaaacatattcttttttacgatttcctcattttttccaattaactttttttgaatttagttttaaaagttctgttgacggctgggtgcagtggctcactcctgtaatcccagcactttgggaggccgagaggggcagatcacgaggtcaggtgttccagaccagcctgaccaacatggtgaaactccgtctttactaaaaatacaaaaattagccaggtgtggtggcatgcatctgtaagcccagctactcaaaaggctgaggcaggaaaattgcttgaacctgggaggcggaggttgcagtgagctgagatcacgccaccgcactccagcctgagtgacagagtgagactctgtctcaaaaaaaaaaaaaaaattcttctgacaaactacatttctccactttgctaaacaagaggacttgtactgaactacgtctgcatggatcttagataaataagagacaaggcttcaagagaataaaaagttggtggtgttctccagtgctgacttgaataactgtcccttggagctctctctagtggagggtgtggttgtttgagttcaatgacgtcatgccattgatgtcattgaccacaatgctttgtgtgaaccctgaaatacagaggtactaacatcaggtagcacagtaggcagctgcaccaaggggagttaagcatgccttctatgatacttcaacagctaacagcaatgaaaattattgattattggtgtttatcatgtatgagtttaattaattgaatgcatttaaaatgcatttagtttttacagcaaacttataaagaaattgaggcttgaagatgtgaggcaatttacccaaggtcatataactagtaagttggagagacca

SEQ ID NO: 199096 - DNA, 1000 bp, Homo Sapiens
gtccgggagaagcagctgctcacccctcaccttcaggagctcccaggttggcctacaatcaacccaaaacaccaggcctcaggcaaagtcatgtcagccttgataccatcaacctcctagcaacaagcggaatggagacatcccctgggtggctggaaagtcaccttgagatgacagagtgttatgcccaggcccagtctctccctggaacaaagcattcctggtcacacagctgccacctccccttggttaccttctgcttctcctctggtcatctgcctcctgcactagctctagaatagttttacttccttggatgtggggtaatttctctgcagtgacgacaaaggagtacaggcctcacagcagccacaggctgtccacagagctaacaataggccacttgtctattctgtgcacattttttagggatcccaagttgttatttctttctgatttaactataagtcattttattattatttcatatgatatgtgctccaaatgctaaaaattacataaaattttaatgctttacatgggcaagatctaattccctggtcagatattaaaaccaattgctcaataaaaaattatattaaggagaacaatgaagataattcagcaaacccatgagaaaaaaaagaacatcttaaaattttaaattttaaaaaaacaacctcagaactatcctaggactaaggcaaaaacacacaagacctctataggataaatggcagcggtttttaattgtaccccaaaaacattttggatcatgcctcacaaaaatatgcttctgtggaggttgccagtgacttcatggccactccagcaatagctgtttctgacattagtcttaggggttagtggaaagggctgataactcctccatcgctgaaatgccctcttcccctggcctccatcccccacactcagcaagtttcacactgacctctctggctacttactttttcttttctctgaatgctggaattccgcg

SEQ ID NO: 199097 - DNA, 1000 bp, Homo Sapiens
gaggctctgatcagttctaattcattccatcatcccaagctgttggcttgctagtgggtttgaaaacgccgccggcattccaaaatatgaggataaaagctttacctcccatgggagcacctcagctcccgagcctggatcccatgtccaacacaggctttgccccctttcccctggttctgtgccatcatcatcatcctgatttcctctgccttctcccttatcagaccaggcttagggtcatccgctgcagcttctacaggcagaagacaagactagacttgttctccaggggaagggcccaaggaatagagaagccccacagagcttctacaggacttggcttccaataagagggaagcagcatgctgtcaaagcccaggattttaatcagaaacacagattcactgctgactaaagctctttctgcaaggccctaatcagggccgtctctatgaaccatttgtattacctataaaattgttactttccatcccatagggagggctcttagaaggaatcaaggagaatacaaatgtaaaacatttaacaatttctgggcacacagtcagtgctcaataaatgcatacaatttttttcctcctggtataaaaagagaccctgagaccctattaaaaaccacccagggagtttcccagaggcgagggcagctgacacggtggacataataacctgttccactgtgcaggcagccgctctgcaagatgcactcgcatgcatgaccgcatcctcacggtcacctccctggtggtggccagtgccagtgctgtccacattcacaccagtgagaaaacggagggccagatcggttagcgtgtggcctacagccggtcacatcaacccccaggcctactctgttaaatgagaattgagccccaaagcagtggcctacgggccaataagcttagtacatttggctgatatgctgtgtagtaaacgtcagggaaaattcacatttaaaaaaaaaatgaattccgcg

SEQ ID NO: 199098 - DNA, 1000 bp, Homo Sapiens
tgatagcaacaagaaatagaaggatcacctagccaaatggtatgtgcctcaaaggaaggaaggtttttatagacaggcagactagtaacattttaacactataatgggggactagaagaatgctgactttgcgctctttcctcctcccaacacacatgtacttacgtagcaggtacttacgaaaacagagtttcactgacttttccaagtaagtgtagattcaacagttacacatatgaacttaaggtttaaatcaatatttagatgactatttttagatttcagccttaagagaattacttccttccaaaagaatataagtaaaaaattcaacaggccaaactaacacaggttagttttctagaatacacctaatatgccaaaactaaggaacaaagggagaaaaactactctgttagcaagtatgtagtactgcatttaagtaatgtctttaaaagttaggttattttcttcataattttgattaccttgagaagcagtttgaaattaaggaaaaggactcatcattttagaggtcttttttttaaagttgtgatactttttaaaatatcctagtcaatctgattagtaaaatttttagctaagatatgtgatgagtagtatctctgacatatgacttatgttctatcaggccaaggataaacacattctctgaaatctacattattatttgcaaagttaattattgttcagcaactgtatcaaagacaatttagccctcatattaaaatcagttgagtgcaaaatttttattttaaacaggctgaattttgcccttcttaaaaaaagattgaggaaagattatgtgcaattcattctggtttttacaatgtggtgatgccagagtaaatgtagtatgaagttaatgcactttaaaagctgaagggagaaaattttcagttttaaaataagttgctatggttacaaaatgtttacctttataagcaataattatgtgagatgtccaaggaattccgcg

SEQ ID NO: 199099 - DNA, 1000 bp, Homo Sapiens
gtcaggcagtagacctgggcaggagcctgaaggaacctgggaaactgaggccctgagagcggaagcgatgtgcccccagcccacagcgagcatcagagcaggtgtcgggacccagctctgatgaccctgctcgggctccgtgggtctagagttaaatatagggggcggcagccagcacttttaaaatgacgtagaatagagcagatgagatatgagtgcttcacaccctgtaaagagaagaactgcttcaccaaaccacagtacatggggcgtgtgcacctatgcgtgggcacgctagctctggcttttggtagaaagtgtttctcactgtgggtggagggaagcaggcctgtcggggcgcgctgggcagcacatgccctgtgtgaagggggcgcctacacttggctccagcaaggccgccttctgggcgcgtggcccgggatggccagatgttctcattcctcaacacaaactctctcagtgttaagaggtggcgacttgctcaggcttctaaaggacaggtgtttgggagcctcttgccggaagcctgcggtgggggccctctgtccctgctcctcgccggcccccatccccaagggtgcagcagaagccaggtcttccctgtccctgtccgggctgtctctgttccttctattttgctgattttcagaaaaactagatccggcacctttgtggtgcacagtccccaccagcgggaaccagtaggtgacaggctccattcaacaggacaggcaggttagggacacccctggctggcagcagccgttcctgctcctacccagccccggttactccttctgggacctcaggcaagtgacttcgcctcccctcactggtctcccctgtgaacaggggctccagctgttcttcctgcacaggccatcgagccagtaaaatgaacttggcacccagcgcatccatacggagggtcttggagaacaacttctctccggaccttagagtttctaaggtgattcta

SEQ ID NO: 199100 - DNA, 1000 bp, Homo Sapiens
agcaaaaatgaagcatgtaattgttgtgaatctacagcttttagggggaacagaattctagctatgatttagaaaaactacagtgggaaaagataattaaattctaccgtagagatggggtttcactatgttggccaggctggtctcaaactattgactgcaggtgatctacctgccttggcctctcaaagtgctgggattacacacgtgagccactgcatccggcaaacaatgaaaacttgtatgtattatctacacatcatcttaggcactgagctatgtattatctaacttcatggacaatttctttcttttcttttctttctctcttttccttccttttctctctttccttccttccttccttccttttctctttgtctctttctctttttctttctctctttcagagatggggtctatctatatctatctatctatctatctatctatctatctatctatctatctatctatctattatttatttactttttcagagatgggtctcagctggtctcaaacccctgggatcaagtgatcctcttgtctcagcttctctaagtgctgggattatagctgtgagccactgcacctaggcccaatttctatttttcacaagtaccctccaaagttaaaaattatcttccattttacagatgtgaatgctgagcttacagttgttaaataacttttccaagaccatccatatagtaagtggtagaaccagaattctacctaattcaaatcccacccactttccacggtacctagatcttatttgttatcagaccacaagtgaacaaaggactggaacacttgtatagtctccagctttgtatctggctggtctggcatgttaggagcagagcacaagagccaaactgcagagaagaaacatccttagtagcagttatcggcatctggcattagctcatactatcactatctatcagccactatcactctagttaccctggtggatttaagctctgaattc

SEQ ID NO: 199101 - DNA, 1000 bp, Homo Sapiens
ggtttcatccatgttttaattgactggagttttaaacaaaataaatacagataccatagtgtgtaattttagagatttttttaagtacaaaaatgtatttgggccccaaaatgtatttggactatgtgctgcaattgatctttcaccatatgagaaatccaggccccagctgattttttggagttaagaatgattttttacatttttaaagggttgcagaaaaggaagaagaatcagcagagagcatttgtggccagcaaagcttaaaatatttcctaaccgatcctttgcaaaaaaagttcacccactcctgtagtcagcagctcccctactgtgcgcagtcagtgtgccatctcagactagcaaaggtgagtaaaaccatccctgcccctaatcaatttacaatctgcatcctcagggcaagagcctagtaagcaaaaggcaaaataagatggcgccagataagggcttcaaaggaagagagaccaggtttggtggggaaatagggggtggcttcttagcaggttttctttagatgaaccttgaagataaaaagagattttgatgaataagggtgggtgagatgcagagggggtcagcgctgtgtcctggaaccagtgagtgattccatttcagaagcacccggggaggctaaagggtagattctaaggccagaaagagaggagaaggtcgtaggctggagaccatgatgaggagtgtatacagagggagagaggagagattcctgcacttagaggccaaaaggacaacaatttgcacttttactttggtgtcggaaagaaccgtagtctcatatggttacacggaagtgttttatgataatcagtgaaaaatgaggaaaatagtctctcttaggctgagcacctaggaaatgagtggctcttggctgtaagtcaatgaacagcattaatatatgcagttaccaagtcatcattaacacataaagcactgcagggtttcaatcgattcatcagaattc

SEQ ID NO: 199102 - DNA, 1000 bp, Homo Sapiens
aaaaaaaaaaaaaaattgaagaaagtaagcttagtgtagaccaagtagaagtctatggattgtggactctgtgagggcagagaccatagctgttatctgtaccagtatccctagcaactagttcagtgtcttgcttatacaggtgctcaataaatatttgttctatgtgtgaccaaataaatgaaagattctaaattttctggtagtaggaaatatctccatatagatagaaaagtgcaaaaatcataaatctgatgaatttccacaaagggaacacctcatagacctagtgcccaggtaaagaaatacagtcattccagtccccagtacccctcatgcccgtcacaggcattgcttctccgagagtaagctccagcctgactcccagtgccacggttctgttttacccattttttaaccatgtataagcatgtcctcttttgtgcctttccctgttcatttataacatagggagattcatcgtgttgggagtagcagtggttcatttctgcccagtgcagtattctgctgtgtgaatataccgcaatgtatccattctactattgatggatacttgggttgttcccgcttgggactattagaagtagtgctgctgtgaatatttttgtacctgtcttttggtgggtgggtgtatgcattcctgtcaggtatgtactgaggggtagaatacctggatgataaagcatgtgactgttcagctttagtagaaactgctaaacaatcgtccacatttatacttgcactagcagagcttctgttgcagcacctccctgaatgcctgtttaggtctttttcattttaggcactctagtgggtgactagtggtaccatattgatcttttaatttacattttcctcatgactgaggaagttgagcatttttcatttgtttatttggatatgctcttttgtgaagcgtctattctagtcttctgctcatttcctactgagttgtctcttttgcttactgaattccgcg

SEQ ID NO: 199103 - DNA, 1000 bp, Homo Sapiens
tatgtgtttttttttccccattactgtaaaatcagtgcctagaacagtacctggtatacaatggatgttcaatatatatgtgttgaataattgttcttagctttctttataaaatctagtagaaattatgatatgctagagttggatgtgactttaaaaaccctctatttcttgccaggcatggtggctaacacctgtaattccagcacttttgagaggccaagatggggggatagcttaaggcccagagtttgagaccagcctggataacacagtgagacactgtatctacaaaaattttaaaaattagccaggtgtggtggtacacacctatagtcccagctacttgggaggctgaagtgggaggatcgcttgagcatgggaggttgaggccacagtgagccatgaacaggccactgcactccagcctgagtgacagaggagaccctgtctctttatttaaaaaaaaaaaaaagtcctttaaaactgtctttgtcagcacacactacagatttctgggtgagatgagatagctgtttttacaaccatcaccaagaattcctctccatccatttccatgatcattggtcagtgtgttgtgctgtcttcctactgacctaacctgccatagattgtccaccttgaatcatctagcaggccactgacaaatgggcaaatgaggaaaagtgatttgtccggtcatcactgagacagtggcagaactgggactcacttctaatcacctaacttacaatacagtattcctccttccttatgtcacgatgccactcaaaaatttgcagtgctgagttgctagcttctattatttttaatgaagtgggttatttcctttgacatgagatgaagtcttcagaaatagtggagacctagaaagaaagttatactcacaaagcttcctcaactcaaaaacccaaaatactacatataatccataaaattccttatgaattgtgaaattctttatggattttggatttat

SEQ ID NO: 199104 - DNA, 1000 bp, Homo Sapiens
atatggctcttaccataataaacaattaagcaagaaaatacagattatgatgtgttataaagggcgcaaatagggtaataatatggccaggcgtggtggctcacgcctgtaatccagcattttggaaggcagaggcaggcggatcactcgaagtcaggagttcgagacaagcctggccaacgtggcaaaaccccatctctattaaaaatacaaaaattagccagacatggtggcaggggcctgtaatctcagctacttgggaggctgaggcatgagaatcgcttgaacttggaaggtggaggttgcagtgagccaagattgcaccactgcactccagcctgggtgacagaccaagactctgtctaaattaaaaatatgtgtgtgtgtgtgtgtgtgtgtgtgtgtgtgtgtgtgtgtgtgtgtgtaaaataatgagtgagggtagaatctgggctgagagaagacctaatttaggtaggttggtcaaaaagcccttctgaggaggtgccatttcaggtggcagctaatggaggaaaaggaaccagccaggcaaagaatagagacgagaacctccaggaaggggaatagcaaatgcaaaagctcgaaagcagaaaagagcttaggctattggtgaaattgaaagaccagtatcattggagccaggaccaggggaacgtgcctgagagtggttgatgagctagggagggcttgctattagtttgttcttcctatgcagtcttacctgatggataaaaagtaaactcatttttaagatcacagtttgaaatttcagaaagattacgggattctcggtgattcttggcaatgattaagacattttcttattataaactacttttgctcttagccggaagttccaagtagtcttaaatgaatttctcccttggtaagcacactcactcacacctcttggccgtcacatggtcaggccaataagttattgtttaagaatactgtggccacgactctgaattccgcg

SEQ ID NO: 199105 - DNA, 1000 bp, Homo Sapiens
gctaatttttgaaattttagtagagacaggatttcaccatattggtcaggttggtgttgaactcctgacctcaggtcattacctgcctcagccttccaaagtgctgggattacaggtgtgagccactgctctcggctgtatttgtgtatttttaaatgtttgtttttaaatgttcaatgcacattcggacattaaatataggaataaaaataattggatttgttttaaaactcttaagtagcatagttttacatttaataggaatagtttgcaatgaaatgattggaaagatctagattgtagtttgtttctagttgccaggtgctttattgatttttgtcagtgacccattcaataaaaacacgaagggaaatctgagtggttattaattaggtataagttgcaaatgaacagagcaacaaaaggtaaggaccaagcactcattggaaatcagtgtgtttttagcctgtgtgtcttattttttggtgcatttctcttgtgtgtccagattgtctctctataggtgttcctgtcccaggttaacacttgtacttgggcagtagatattttccctctttcctgctgtagcacttctatctcttgcatcttcactttacctcttctgctagatcacttttatcagtattcattcaaacattgatagaatttttccagtcttacaaaataatctgtcctgaccccacagtccctcagctactgccacatactactgtactcgttggatgtaaaacttctcaaaagatgcgtgcatccttgctgctcttaattcctctgcttacattctgtctttcaccctgtccagtcaggctttgtcctccaccagaaaccactctccacaggtcaccagtgatctccataatgctaaatcccttgtcaattctaagtcctcattttgagccatctccagcatttgttgcaattgatcttcacctcttcaggtgctttttcacctgtctttgggcacgccactcttgaattc

SEQ ID NO: 199106 - DNA, 1000 bp, Homo Sapiens
gcctgtaatcctaacactttgggaggccgaggcgggcagatcacaaggtcaggacatcaagaccatcctggctaacacggtgaaaccccgtctttactaaaaatacaaaaaattagcccggcatggtggtgggcgcctgtactcccagctactcgggaggctgaggcaggcgaatagcgtgaacccaggaggcggagcttgcagtgagccgagatcgctccactgcactccagcctgggcgacagagtgagactccgtctcaaaaaaaaaacaaaaaacaacgacaaaaaaattgtatgtcactgtattagtctgttctcacactattataaagaactacccaagactgggtaatttatgaagaaaagaggtttaattgactcacagttctgcaggctgtacaggaagcatggctgggaggcctcaggaaacttacaatcatgatggagaagccgaaaaagtgaagggggaagtgctacatacttttaaacaaccagatttcatgagaacttactaattgtcatgagaacagcaagaagaaaatccactcccatgatccaatcacctcctatcaggtccccgccaacattggggattacaattcaacatgagatttgggtggggacacagaaccaaaccatatcagtcacaaagcagtattttggattatcccaatttcgttttttttttaagtatatgtatgttcatacagttgcacaagaaaatgtctgaaaggacataagccaaaatgtacatggagtttgcagctgagtgacagaattttgggtgatttttattttttgtttgacttttcaatattttccatgttttctacaaatgcttttataattatgtaatgcttttgtaatcaaaaaagacatcgttgtattcaaaataccattttagcctcactgtcactgcttaggaagcaatttcttcccttttcagccactagtaccataattagagcatatgactatcttaaaatatggatgaattc

SEQ ID NO: 199107 - DNA, 1000 bp, Homo Sapiens
aatttccatcaaaaatagaatatatttttaaaattatgatatactcacagatgaaaatgttatacaggaatgagacaagtgcaaataacaaatggttgaatctcaccaacaaggttgacacacaagataatatgccatgcaattccatttacagaaaattctgacaggtaaactataatgtgcagatatgcataccgaggtgataaaactatacagaagagcaaaaaagggacccgtgaaagttaggataatgggtatttgtgagggagaaggagatgtgattgggtaggagcatgactgggtacataattggacaggcccagtgcaaaatgaatatataagattccttgttcataaattattaggaattttaaaacagtttcagtagaacactaaccaaggtgtgaggtctgctaagcacaggatcctgtctcatgtccatgaagccctcctggctcagtacactcaaaggacctccaccgtgctggcgatgttacaaaagtctttgaaaataattcaataagctctgcttcattttgtgtctttttctgtatatatatgataaagcatgataaagaaaggacattttttaaaggaccaaaacaaaacaaaatacaggagccatattttattccaatccaaggagttttggaggctaatgcagatcaaattatgcggggaaaaaaaagaaggaagaaaggaaggaatgaaggaaggaaggagagagagagagaaaaaagaaagaaagagaggaaggagggaaggaatgaaggaaggaaagaaagaaaaagatcctagggcattggaaggttggggtactgtcatagctctcatttatgactttaggcaagtcgcttgaccttttagaatcttggtttctcaatctgccaaatgtacattcacctccctacttcacaaagttataagaatcaaattatatcagtagcactttagaaagaacaaatgtcataccctataagatagtggcactggagaattc

SEQ ID NO: 199108 - DNA, 1000 bp, Homo Sapiens
aatgggaagctgtggaagctatagaaggggtctaagagggaagcgacataatcacattgcattgtacaaaggcctctctggctacagagggcgcagcagcttagaggggcccgagtcggggcaggcagaccagtcatgaggctgctgtggtcccagctcggggtggcggtggcttgactctgcatgtgctgtggggatgcagagcagcaggcagctttgcagaattgtcaggttgatgataaatcgtaggtggggcaagggatatacaaggagtcctagaaatgtccaggttttttccttgagtgactgggcagattgtgaagcatttcctgagatggggaatattggaggggaggaggttttggggacagtggaggaggatgtggcttggtcatggttgggttgagtttgagatccccatggaagcagtaggaaataaatcaggagaacccaaagacaatgggcttgaatgcctgccctaggggcaagacgggtacacaaatgaggggagtggccagtgggtacaatagacagtggtggagactgtggaaaagggggagtgtatgtcttttgtgaaggaggcagccgccagctaaagctgatttaggataaacgcccagcagtactggccttccaagtgttcaagagagggtggaagtctggatttcgatatgaaatctgctgttttttttaaaaaaagttatcttatttttaaatatttatttatttatttatttgaggctgggctgtgagactggctaagttttgtatttttggtagagatagggtttccccatgttgcacaggctggtcttgaagtcctgggctcaagcgatcctcctacctgctgcctcccaaagtgcttggattacaggcatgagccaccatgcctcgcctgaaaactgctgattaaaaaaatatattttttaaatggaaggatacatgcagaaaaacataaatgttaagcacacagcttgaagggtgatcacgaagtgaattc

SEQ ID NO: 199109 - DNA, 1000 bp, Homo Sapiens
agaatatatttgttttaaaatttcagctttgattactgacagagaatatgaatgatggtattttaatgctttctgtcatttaaaaaaaattgtattacagttttagagtctaagtgattgttgctcctggcattaacattgacacacttataaatagattttgacattcattgagattacttgcttgcaggcctgaaaataaagatgagatatgaaagaatttaggttattggggaaggagccagtcatttaatctcttttgtatttcagactgctctcttatttcacctgtagtttacaatactagctgacgagtgttcttgtgattgttctgaaacaaaagctcctctgatgattttgaagctagttttcctgatactttttagctaccccaatttctataaaatatttagctcagaataccaagaaagacttcaaggatccaggatactcctgaaactttctgcagtattttgcatgtatgtatgtctatatgtttgtgtgtatgtgtgcatttgttagttggttttcaaggtgtgttagtcaaggtagaagctatgttgctgtaagaaagagtcccagaaaatggtagcttagacatgatagtggtttttctctctaataacagtctgcaagtagccagtgcatccgtgggagtttggcagttttgctccttcaagttgtgcagtacttctgtttcttctttttgtcccatctgctgccaggctattgcactccttctcagtggttgaagctggctcatccacgttctagctaaatgactggctatacactaggagtgcacaagttacatacatcacacgtgctcacgttcctttgttgagaagttggacacagccaccagtaacctcaagggagtctgggaaagatcatctctagtgtggctcaaaatcagggtttgttactatacaaaatcagggtttgttacaatacaagaatgagggggagaatacagagaggcagttagcaatctaccaca

SEQ ID NO: 199110 - DNA, 1000 bp, Homo Sapiens
gatcttccttaaatcccatgtgctaggttttgatatctctaatctcagtagatgaactggaagctcagagagaataaatacctcatttagtccactcggctaataagcaaagttgggattcaaactcacgtcctctaaatcagtctagttggcactacctgatcccattcaacttattgtttcaacttctcagttcctgagtcggccttgtaaaagaaatatgaaattataaataaacatttataaaaatctttgtgatttaggagcatatttccctaataagaagcacagtctcaaaatattgtttgcagccacatacatctatgatcctgtcccagtgattttattgttcccagagatataaagataactaagttaagtttttatccttgaggacctttcaatttagtaggttaagtgcacagtaataaacattctaaccttgccacgagatccataataaatgccacttttctcgccaagattttcctaattctgcaaaatgaatatattcaagaaaaatctttaaatttttttccaaattttaattatatacaagtatatgagtaatctttcctcatatattttaaattttagggtcaagaaactggtgtcatggggatggttaacggggtacaaaaatatagttagattcagtgaataaaatctagtctttgatagcacaataaagagactacagtcagcaataatttattgtacgttttagaataaatgagggagtataattgaaatgttcataacacacaaaaaggatgaatgcttgaggtgatggataccccatttaccctgatgtaattgctacacatgcatgcctgtatcaaaatatctcatgtaccccataagtgcataagcctactatgtacccataaaaattaaaaagaaaaaaaagaagctggtgtcatctctagctttgctgaagaaccacctcgtggaatgctttcccataatatgattccaaaatacttgttgaattgaattc

SEQ ID NO: 199111 - DNA, 1000 bp, Homo Sapiens
tcaaaccataaactccaggaatggtgggggacagtatctgggacttgctctctgggaccctggtggcctctctagtctggcctgtcagccaccagagggcgctaaaggaccatgggcagagtctgaggcagtggtggtaacgggtgaaggtgatggtggtggtggtgatgatggtggcagtagtggtggtggtggtgatgatgatattgatggtcatgatggtggtggtgacaatgatcatggggaccgtgctgatggcggtgtttgtgatgatggtggcggtggtggtgatggtggtgggcatgagggtagttggggtggtgatggcattaccgttgatgagggtggtgatgatagtgatggtgatggtggtgggaatgatgacgaagatgatgatgatagtggtgcaaatggcagtggtggtggtagtgactgtggtgttgttgatggtattagtgctgataaaggtggtgatgatgatgatggtggtgggtgacgaaggtggtggtggtgatgattgtggtggggataatggtggtgatggtggttattgcagtggtagtgttgatcatggtggtggtagtgatggtggtcatgatgttggtggtgttggtgttggtattggtgttggtgatggtgatggtggtggtaataatcatgggatgatgatagtagtcatggtggtagtgacaatggtgacagtggaggggatggtggtggtgataatgattgtggtggtgatggtgatagtgttggtactggtggtggtgatgatggttgtggtggtggtgatgatagtggaggtggtagtaatgatgatggtggtggtagctggtagtggtggcagtggtggtgatggtgatgattgtggtgatggtgatggggtagtggtggttatggtggtgttggttgttatggtggtagtgatgatcatggtggtggtgactatagtcactggtgatgctggtgttcatggtgatggtgatgatgatagtggtgg

SEQ ID NO: 199112 - DNA, 1000 bp, Homo Sapiens
tctatcctcaactcccccggacttcagccccacaaacgtctgccccttgtcacttcttagggctgggggtgtgcacactggtggggatgcagctgcccttgagaggttgacttgggaaggcaccatgcacaggctctgggaccctggacagggcattctggagtcccaggtgcctgaaacacagtctaatattgtggccaaggactcagggtaagcatgtactgttgacactgaaagctcctggccttgtgcagagaagcctggctagaaaagtgtcagagagaagctggggaagggtcagggtggggttgtctatcatgcagcaggagtagtacacttccccactcctcaggtctcagggtgaataatgtattctgagagagagagagcaagaagtgaaaagtacacctaatttcctttcacttttactttcatttttgtttatttatttattttatttttttgagacgaggtcttgctctgtcacccaggctggagtgcagtggtgcgatcacggctcactgagacctcaaccacccaggctcaagtgatcctcccacctcagcctcccaagtagctgagaccacaggtgcaccaccacgcctagctatcctttcactttctgtccctgccccgacgatacccacttactgtccatagtttagtgtgtatccttctaggatggttaattgtatgtgtcaacttaactggaccatggtgcccatatacttggttaaatactattacggatgttttctgtaaatgtgttttttggggatgagattagcatttaaattggtgaactgcaactgtgagttttccttggcaggcctgctcttgtctcctcccttggtaggtagtgacagcccctcaggaactgttggtggtattagttgacaactacatcaaactcttcacagactgcaacacagaagccttccggaagatactggacatgaagggaatgaagaggaacaagcagagcagcatgctggaattc

SEQ ID NO: 199113 - DNA, 1000 bp, Homo Sapiens
acacataactatgttacagtccatcaactccactcgagtatttacccacgaaaatttgtttccctccaaaaacctgaagaatattcaacgtagttgtaaacaaaatacataactttttattttattttcttgtaattttttaaaatacggagctttttttttcttttttctttttttttgagacggagtctcgctctgttgcccaagctggagtgcaatggcgtgatctcagctcactgcaatctccacctcctgggttcaagggattctcctgcctcagcctcccttgtagctgggattacaggcacctgccaccatgcccagctacttttttggtatttttagtagagatggggtttcaccatgttggtcaggctggtttcaaactcctgacctcaggtgatctacccgcctcggcctcccaaagtgctgggattacagacgtgagccactgcgcccggcctaaaatacagaacttccaaacacacaatgcactaatatccagtaataaaaatgaacacattactgatacacttcacaatgtggatgaatctcaaaaacatgtaactaaaagaagttttacgcaaaaatactttgtgattccaaatatatgaaattctagcgcaggcaaaattcatttctggtggaagaaactggttgcatctaggggtatggagccagaggttgcctgggaaaggcttgaggaaactgtctgaggttttggtaatgttacttctgttgatatgggtttaggttacaaaagtgtttacatttttcaatagcaggaaatatacactgcatttcattgtataagatatttaccttaaagaaggaaaacaaaaatccatgagtgggataaaaagggcctgaacttaatggtggtgactggaatgaaaggctactatgggcaggacaaatacacaattatccctccctaactgagcccaggaaccaaatggattcaaattattttcagatgaatctttcactgtctgaattc

SEQ ID NO: 199114 - DNA, 1000 bp, Homo Sapiens
catgcttgggcaatatattagactgttctcatgctgctaataaagacataatcgagactgggtaatttataaagaaaaggagctttaatggactcacagttccacatggctggggaggactcacagtcatggcggaagacaaaggaggagcaaaggaacatcttacatggcggcaggcaagagaatgagaaccaagtgaaaagggaaaccccttgtaaaaccaccagatctcatgagacttattcactaccaccagaacagtatgggggaaaccacacccatgattcagttatctcccactgggtacctccctcgacatgtgagaattatgggaggtacaattcacgatgagatttgggtggggacacagccaaaccatatcaggcataaacttcctgtttagtcctctaagaagtaccttcaaaactcaccttttttccagccctccagccacaattccaagaatcacattcacagtgaaattcttggagggcactggggaggacaaaactcccctgggactgttctttgctgctctgagaatgactttgtgccacagtgttgaccccatagggaactgtctgaggtcacgcctggcttttgtgtggccaagaggcaggatgtgtcacctgatgcccctttgctttccctccaggtgggcctaccatgactttttcaaccggtatcgggtgctggtcaagaagagagagctcgccaacacagacaaaaaggccatctgcaggtctgtcctggagaacctcatcaaggtgagccacacagcccagctccaggagaggcctgaccaggtcccctaaagattgagggggtggcgtcgttatctacattttttttttggtcttcatccttcttactgaatctatttctgggatattaatccattttcctacatcagtgactagaaaaaaaagcaacccattctccttatctagagcacttcccaaccttttttacagctcagcaggcatagaaaatggaattc

SEQ ID NO: 199115 - DNA, 1000 bp, Homo Sapiens
agcagggacggtatctacaaacgtgttgtggaaagagaaaaaatcctagttcaaggaaaggtagatctgtgtctccagggagatttagaaaggtctctctcaggggctcttaaccttttttttgtgacacagacccttttggcagtctggggaagtctaaggatctcatctcagaattttttttaaattttgattaaatttttaaatttttttgtagagacaggggcctcactatgttgcccagactgtctttgaactcccggactcaagggctgctcctgagatttcaggcatgagccaccatgcctggccagaatgttgtttttaaatgtataaaattaaatatgttagaatacaaaggcaaccaattttgttggaatagttgccaaaatattctcaaagtttgtgatgtaataatataataatgcatgcacttttttttttttttttgaaatggagtcttgctctgtcgcccaggctggaatgcagtggcatgattttggctcactgcaaccttcacctcccgggttcaagcagttctcctgcctcggcctccccggtagctgggactacaggcacgtgccaccacgcccgggtaatttttgtatttttagtacagatggggtttcaccatgttggccaggctggtcttgaactcctgacctcaaatgatccacccacctcagccttccaaagagctgggattacaggtgtgagccaccgcgcccagcttaatgcatgcacttctttatgaatgcataacattacaagacataatagcaggtctaaaaattaccacaattttgaagtagcaatgagcgtaaagcaataacagtaatctgatataaaaatatctgtgatttctattggtgacaaaataatggataaggttaatattactgtagttagttgcttaccgttattgaaggatgtgctttcaattagggagtgtggaaataaggatgaaatctttttctgaaccaaataacccactgaattc

SEQ ID NO: 199116 - DNA, 1000 bp, Homo Sapiens
ctccgctgtctcgccaggctgaagtgcagtggtgtgatcatagctcactgtaacctccaactcaagccgaattagggagagtgtgtgtgtgtgtgtgtgtgtgtaaattgttttgttttgctttctaaagacaaggtatccgctgtctcgccaggctgaagtgcagtggtgtgatcatagctcactgtaacctccaactcaagcgatcctcccgcctcggcctcccacaagtgctgggattacaggcgtgagccactgcgctcggccttaatgttattgatactgtaataaactggaattcctatactgttacctgtatattttataccatttattaccattaacataagtgaagagaatttttttttttttgagacggagtttcgctctcgttgcccaggctggggtgcaatggtgtgatctcgactcaccgcaacctctgcctcccaggttcaagcgattctcctgcctcagcctcccaagttgctgagattacaggcatgcaccaccacgcccagcaaattttttgtatttttaatagagacggggtctcaccatgttggttaggctggtctcgaactcccaacctcaggtgatccgcccgccagcctcccaaagtgctgggattacaggtgggagccaccgagcctggccataagagtcttctttaattctcagtttgagaaatgaatgattctagttttgctgcaacattaataggctcaaaaacggacgtttcaaaaccatcataattgtatccatttataatgagatacatggaatcatcaaaggatggcagaatctcacgaatggtttttttttccttcattaaaatattcagtcttaggaaatagttacctgcagacattacatctcatatcacctgtgctttttactaatctcttgtggtagtgctgtcaacaaatgatatttttattttccagctcttaaaccaccttatagcatgttttctgttgcacagtatttttataatgaattc

SEQ ID NO: 199117 - DNA, 1000 bp, Homo Sapiens
atgtttcctggcggcgctctgcaattgattatctggccctctaattattttcctccagatgtattaaatctctttttcccttcctaaggtgaatttagctttcttgcccttactgccattatgtctacatgtaggttacgtatagttcaatatttttctatccttcggcattggcaattcaattcaactcctactatctgaatacatcactaatgtgccatttacccatcctctttgttttggataccattaagcacttcccttcacagctgtttaagaaggtggtgggggttggggggcagggagaaagatcagaagacctgattgtaattattgttggcttcaggccatgctacttctgtctaggacaacctgttccataatgcttagaaaaatttccaggaactacctgaagccaaggaatttcttttaaagccagcaatagtgactaacccaaagatctgatgccgcagaaaagtcaaatcttatttaatgtatcaaaagatatattgagattttaatccacgtaattgatagacttagggtgatggatttcacgctagtaactataaatataaataattttgaaccaagttaaaattatgattaatgtcagtttgtatacagcagtctggtttcctcaactagattgtaagtctagtgaagacaggaatcttcctttaaatgtcttcatcccaatgtctagtgtgttccaagcacactgtggtttaataaatgtatgacatttctcatgtttatgcatgtatcaagaatctacatcataataaaattaagaatattagtttgtcttactttaagtgaactctacatttaaaaaatctcatattagagaataaatatacttgctataagtaacataaattttgtaacgtaaaaagacaaaaaaatttttgatccaatattgtatttaccattatttgatataatttttctttttcagaactaaggtctatgattttgatttatgacaaaagaattc

SEQ ID NO: 199118 - DNA, 1000 bp, Homo Sapiens
tcacattgtttactttcctttccttacattgatcatttatgaccattccaatcttggatcctgctttgtgaccctatcccacccatcatgttttctgtagaaggctgtttgaatcagttaggaggactgcaccagaaagggtttgtcgtgatgtggagagcttgttgccaaaaaaactagtcactgctgtggttctgcaccagtttatgctgcgacctgctgccataacagcagtgtctgagtgacaggctactgttagtaggagtaaaacacacgaggatggaatatttttaaataaagggaaaacaaaaatatcaatatattggggggcagacatgagattaagaaataaatttaaaaatgacagactataatgttcaacatctgaactttcagatttttcaacacatggttctcatttttggaaagaggtcaaattcagaacatacaatcattcttttgtgtagattaaacactttgtgtttagaaatataaaattataaaataacaaatgcgccatgtattttgatggagataattaaagcaatgtttcttaatggccaagagggacagacagtcagagaggggcagacaaaaggggtgtggccatttcttcactctaccatcctcaccctcagaatcactactggaataaaccatcaggacttgaatggaacttgtcttaactgttagaaataaggtgaaaagaagtagcttatctgctaacaaaaataaaacaatgataactgaaaagctgaaaacatcaaaaaatacatgcactgagagtaccggaataaactcaaatatttatggtcaactgactttcaataagaatgttgatatggtttggctctgtgtccccacccaaatctcatctcaaattgcaatccccacgtgtccagggagggagggacctataatccccccatgttgagggagggaagtgactggattatggaggcagttcacccatgctgttctcgtgatagtgagtgaattc

SEQ ID NO: 199119 - DNA, 1000 bp, Homo Sapiens
tttctagcagggtctgggtatttggggattgggtgcaacatgtttcttgaaggtggtgctgctctgagtggtgggttggaggaagccttcaggggctgtgtggtgggggccttagctggtgctcctggtgctcagtagactggggctgcccgggggtgggagggcaggactgttggtgaggatgtccagcctgccagaggatacaactagagtgttttttctcgttgcttagtgtctgacagaggcatagggaggtagagcatcttacctgtggctacagaggtaatcagggactgcttagtagttcacggtatcacctatgttatacaagggccatgtgattttagctaagctcctccctgtcccagggcctccatgtcatcatctgtgtggtggggaattggctggatgaacagtgaagctctgtccagctttgggtctacgggttggaactagcggaggagcatcaggctcctccagtggatgctattgctctgttgggatcagagctcggaccccagcttcaagttgcctggagccctggacaagagctgtggaatgaagtcttcctaaccctcagaggattgcttagcattggcctcaggcttatgcaacgagtgtgtcctcacttggtggcctaagctgacccgataccagctttctgagacctctttgggatttctctcctcccctacctctctggtgtccgtgttgccttggccctgctgttcatgtctgaaacagacatgtgtgggccccacttccttgctgcctcactaagtcttaggctcagcacatgttctaggtcccagcagcggtcttggtagtgccaaacctcaggctgcactctaggcctgctcatgggtcctgcagttgagctgtgggagtctggctcccagctcagtgccaatccccgggtacagggatatcaggtcactacctgtctgttgggaatctgcccttttctctgccagaggggagctacatcacagctgaattc

SEQ ID NO: 199120 - DNA, 1000 bp, Homo Sapiens
aaaaaaaaaagacttaagttttgttgttagtcatggtctttttgtctttgatggttcctgatgaagacttttccatgttttattgtttagatactggctggttgaaagtaggaggtgaaaacttgtatgttaattgtttgaatgagttatattacttataggaagctgacatttttctcccatctccctgtctttctctcaaatgtttgcctagacaaacatacaatgttccttaaaagaattgtatattagctagagaggttgatgttattctttttactttcaaaaattgtgtggcatgagaatagattcatttgctaatagtactttttttctttttaaattttagatatgggcacggttatgaaatattttgtgttacttgtaacagttcaaagactctgcttgcctcagcttgtaaggtagggaagtttacttttgattctgcttggtcacaggttatttgggtcatcaggctcctgcaagtttggtaatgatttaggcagaactctacgtgaaaggccactagtgcttggttttttgaatcttactttctcaatttctcttacccttctgtctcttcaaaagcttatggtttcattttaagtctgtttcagctgcacattttgagtttatctgtgcctccctgctaaaagtgatttaatcaggtatctcaaaatgacacctgcaatcccggctactcaggaggctgagacatgagaatcacttgaaccccagaggtggaagttgcagtgagtcaagatcgcgccactgcactccagcctgggtgacagagtgagactctgtatataaaacagcgatatctcaaaatgacacctaaaaatttgatgaattttaaataattggagtcatagagacacagggaaatgagaagaggaaacctggagtgaaatccatcagactgttttttgaggacactcttggcactgacctaaggtagatgacttttgcatttacctggaaggatggtcttgaattc

SEQ ID NO: 199121 - DNA, 1000 bp, Homo Sapiens
ggaggagatgcgctagggtggccatacgcatgcgtgtaaggtccctaatggcgcaggttgctgcaccgtgtggagaaagttttgggagagctctgcttatacacttaggagcagaaagtctgcttctgacaccagaaagtgaaacagatattctgaggctacgaggggcacagcactgccagcatgctgagaattgtccttagaaacaccttggaatcccccaaaccttcccttccaacagctttgcctctggtttatatcaattttgttttgtttttagagtctgagtctccctctgtcacccaggctgcagtgcagtgacacgatcatagctcactgcagcctcaaactcctgagatcaagcgatcctcccacctcagcctcccgtgtagcttaaaccacaggccctctcccccatgccaggctaattttcttttcaaatttttctgtagagacagggtcttgctcggttgtccaggctggtcttgagcttctgttccttgcactgcaaagcgtcctgactaatgctccctccctcccttcctcccttcctcccttcctcccttcctctcttcctccctttccctttctctctctctcttcctttctctttttctttctttctttctttctttctttctttctttctttctttctttctttctttctttctctttctctttctttctctcgctttctttctttctttctttctttctttctttctttctttctttctttctttctttctttctttctttctttctttcttttcttctcacttcttttagcccatcaccaagtcctttcattcctatcttcttaatagtcttcaaatctgtccactgttcactgttctcaacccctctgccgttgtctcagggcagaccactgttatcttcacctgaattactgccgattctgaaggttactctcacagcgcagacctagagtcactgggttcaaatgccaacttgctccttatgagcttagtgaattc

SEQ ID NO: 199122 - DNA, 1000 bp, Homo Sapiens
atatgcagatttgggcaaggccagtaattaatttttggcttctgaaaggtaagtgatcatgttcaggtgtggattcagataaagtaagttagtagggtctctcagtagaggaaaaaatgggagatttcatcttaagaaggaagaggatgaaaatgtgaacccaacatgtgctgtttgggaatagattccagtggtgtgtctggagcagcaggggggcatctgtgggtgtccacaggcagctggccagcaggcagacagcacagggctcagaaccaaggcctcctggtgcagggaaggtatgcagacagcacctggggccccatttctgtacctggcctggcttcccaatcccatcagctgctaaattatggggaggagagtaccatgaaggcaacagaactcatcttcttttaattattattctatggtagtatggtcatgacttgtatttaatatcttctggctggcaacaatgtactgaatgctctgcagaccacagcattaagcatggctggccattggctgttatgctatgggctgacatcttaattctacagacatgagatgcttggggaagaaaaggaaggctcctatggcaccagggcaaatagcaagatggtagctccttggtcccagacttggagtccttgacctcagcctctgtccagaggacccttcccacagttgcacagcaggacactgatttatgatacttcaagaggtgttttcaaaatgagtgggcacagaaaaagtatctaaaagagtttaagatattaatttatttcagatatccaggatactcaggaagactgcagtgagaagggatcccacaacaaattatgaccaaaaatagctaagaatattgcatttccaatttgccagtatgctagtggcgtaggaggctaaaggctggtatgagctcagcccgggcttttgcctgcattgtcggcatcccaaattagcaacaagtgtcatcaaatatatgaactgggaggaattc

SEQ ID NO: 199123 - DNA, 1000 bp, Homo Sapiens
gggctgctattgccaagtggttaagagcatggctgttggggtcaaatgttgattttgtcaccaaaaagactaggcaattcatagtatcttatggaattccacctccttctttatttaatgtggatactcataccttctttatagggcaaaatagatcgtggtgaatagtatgagatccggaaccagactgcctgagttcaaaacctagctttcccaccaatcacctgcattaccttggaaaaaatacttaattaccctatgcatcagtttctgattctgtaaagtggagataataatataataatgtaatttagattggtgcaacctaaattgaaagtaatgacaaaaaccccaattacttttgcaccaacctaataatattatataataatattacaacaacaatattgtattattgtattatataatgtacatataatatataatatttaataaacataatatcacaataatcatagtgtacagagttgtgaggatccaatgggtttgtagaaacatctagaacaatgcctagcacaggattcacaatcagtggatgttatctacacttattagagtgtgttgatgaaaattaaaatgagataatgcttgcaaaagcctagtacatgtcttgcccatggtaagtgatggctctttttgttaggaaaatgggtcctttgtccatttactctctttccatgcttgcccttggggaactttggagcaaagaaccccaaagtctctctttaattgttcttctgcaagcaatgagcatcttatctaattggctagatagagtatgtgatttactgtgctgctgtttattagtgggcagggagagtcaccctcaggcaggggcagacttcaccatcccccttacctggcttgtgccttcttcctgccttcctgggggagtccaccaaaggggaatgtgccattaaaagaggaaatgcctttttctgcctgtcacaggctcacctctgactagacagatgaattc

SEQ ID NO: 199124 - DNA, 1000 bp, Homo Sapiens
gacttggagcccagacccgacggtgtcgagaggatctgaggagagtctcccctccccataccctctccgcctcccaccctctccccagccccatgggacttgtgaaggcggacttgcttttttcgccgtccacacaaccgcactagccgggccttcggcaccgacggaacatctctacctgcgccccgggagccctcgccgtctcacctcgcgcgctgccgtccgctggaagcacctccgcgcctccccaggcgccagactccatcccgccccactgcgccccgccccgtggctgagccgagccgggccgtgccttcccctcctcacccccagccccgcccgtcccggcgcagagctgcagaggcaccggacgagagagggctccgcgggcccagctggcagccaggccggagacaagttgcagtcccgggctctggtgacgccgtggccgcaggtcagatttgggagggcttttcccggcccgcgggcctgggcgctccgggggagggagctccaagggcagggtggcgggggagccgcagctcctccacgttatggaagaaaggggaatgctagccccctgcgcctccgatcttatcctaaggctaaaaccggtcctgttagggcctgtcctctgcccaatcaaggttttgagagactgggttctttgggacctgggaatgttgggtggcctagtttgcctgggcctgcgggttcttctcctggcaccagcacaacataccagggagggagctttgggctttaggatccaagctttccccctcagccctcccttaggaccaagatggccttgacccatcttcctcccacctcagggccaccagggtcaccactctagggcttcaggctggaaaagcagccatgtggggcaagaacaggcaggcctgtgttctctctctggttctgccgctggctctgcctggggcttcactgccctgtcctgggcaaccttcctgtcaaggttgttgagaagttactg

SEQ ID NO: 199125 - DNA, 1000 bp, Homo Sapiens
ctccaacaaatcctacgagctggagcttattagttctctattgcagaagagaaaactgaggctccgggaggctatgggacttctctgtcccatcttagcaacagaggtggaatccacagtccacacctttgactgggacatggccctacccacccttcaggggctgagaactggcgcagactcagccttcagctgattttcacctgattcttagcagacgtcttggaaaaacctcctggtgacataataagagcagtgtggctccagggtcggggaggaatttagggggtgagaattgggggtgcccccccttgccctgagccagggcagctgcagagaaagtactattcagggcagggcaggaatggaccctggagagcctgagggtcccacagggagagcacgctgtctacccccagcacagcccccgcctctcctggggctcagcaggcagaggggagagggcaggttcagcccagagaagagggactgtcacaggtaccaagcttgtctactttggcaggagaaagctaaggtctgtaatcacactttctgttttcacttttcttccatttctgagtaagcatttctattggaaaactccagacttgtctgagctcaacgaaaggaaaagggatctgtgggcacccagagcaggccaggggtgggggtggggagccgggcccctgagtgggtagtatgcgtttccaggggctcagatctgatgatcccatccttggctccacaaattcaatccatgccccttagcttggcattcgaggcctttccttcatctggcttcagcccctgcttctctctggcttacatccaggtttctgctcacattgttccctatgcccacaatgccctttcctcccatcctaagagatccaatgcccaaactctggtcatccttcaaggcccagcccagatgcctcctcctccatgaagccttccttgaccccctcagctggacatgacatctccctcttctgaattc

SEQ ID NO: 199126 - DNA, 1000 bp, Homo Sapiens
ttgaataatgatgaggaaagctggggccagagatttgcactgaggagaatgaacagaaatctgtccctgttcttcttcttcttcttttttttttttagacgagtcttgctctgtatcccaggctggagcgcagtggtgcaatctcggttcactgtaacctccacttcccgggttcaagtgattctcgtgcctcagcctcccaagtagctgggattacaggcacccacgaccacgcccagctaatttttgtatttttaatagaaacgggatttcaccatgttggtcaggctggtctcgatcccttgacctcaggtgatctgcccgcctcggcctcccaaagtgctgggattacaggcatgagccaccatgcccagtctgtccctgttcttgggagttgattagaggaacaagacaggcatgcatcaaaataaatgcacttggttgcctcgtctaatcaatggtgcaaaagcaccaatcttgaaaacaatttctagttacaccttgtagtatattttgggttcttgtttgtttgtttgttttggagatggagtcttgctctgtcgcccaggctggagtgccttggcatgatcttggctcactgcaaactccacctcctggttcaagcaattctcctgcctcagccacctgagtagctgggactacaggcacccaccacctcgcccagctaattttttgtattttagtagagatggggtttcaccctgttgcccaggctggtcttgaactcctgagttcaggcaatccgcctgcttcagcccctcaaagtgctaggattacaggcatgagccacggtgcctggccccttgtagtacattttgtcttcccagtctattttgagatgttattcaagtaaatgtgtgtccccagggctccagcaggctcacagcaggaagcagcagtcaggaagtacaaggtggcaagcaggacactgggtcagaacgtgttctggacccactggcaggtgaggtttgctgaattc

SEQ ID NO: 199127 - DNA, 1000 bp, Homo Sapiens
cttgtcaccaaagggcatatgtccctagacataatcctgagaaaattgactatccacaatttatactgtacaaggagctgtaataatgtcctgggctgtgagattcaagtggatatttttcttttggtttcccatcccaaaatactccagtcatcatccccagtggtaagttattcttcattctgtggcttattctcaaaatgtgggttttctttacattcttatgctgcccctctccattgcctcagaaccatatcctatcagtagatttttccattctgaaagctgcctacattacaagtcttatccagtgggtattaatgtggaaataatgaagatgtcacatttttagaaatgtttcatagcctctcaccttcatgtttctttaaaagtgttaagaagttatattttaatgcagtgaccttaactgataagaattattccctctaagactaccaaaatacaattttttttagcatttcattttctacaacttgaaaaaattatatttctaccaaaagttgcatttcaacaacaacaacaaaaatactcaatacctactccaattatacaaactcacttttggttaaaaaacataactgctggaattatcatcttgggtaatttatatgcataataatgggcaatgtcagtatagtacatcccataccattctttacttatctttactctcagaaaattatgacttaacatttgtatcatcaaacacgtcacaattttggtctcatattgagaaagcataaagtatcataagaccctgttggccatacaccagtgaaattagaagggcttaatgacattgagagtgaaagaccaaaactataggtgtgaaatgtggaagactttcactggaaaattaattattaatgtaacaaaatcatgaaatcttaatgccaactggtattatggaaaaatacaatgggttgaataagaattatagtcataagaagacatcacagcaccctactctgaagaattc

SEQ ID NO: 199128 - DNA, 1000 bp, Homo Sapiens
cgctccatacattaggctccacggatctcctccgaggtcaagtccacatcctttggctctcagctcagatgaagttcatacagtctttttccaatgtatttatgtggtgtaacctttatatgctgcttattttaggtttttttctcatataaacgaaacactctctagctcaatattctttaagagccactcatcacttctaggataaatactttctgatatagcccttgtctgaattcctaggctcacctccttctctccattcatgtgcccctgtgctctgcctgcaccaaactacttgcctgttccctaaacactccatgctcccttcatacctctaaatctttgtagactctgttttatttcctctgccaggaatatcaggacataaatgattcctgttttttcttcaggactcacttcaaattattttctcagtaaagcctgccctaatatccccaaaggctattactcttcttctttcattacatatttgtatttctcctgtgtaattaccaggttatacaccaatgtggaaaaggaggaagtggtacaacccattccctacatggtctcaacagttacccggttaactcacacatatacactttcatgtgtgcacatccacacacctacaaggaaaaaggaaggacacacctaacactctgactttttttttggttgaaattctacattctggctctttgagagttttaatgaggaggtggactcattattttcactcatcatcaattgggagtgactcttctgccacattttattagtttttctttcttcagtttccttcactggttctgagacagtatgttccttgtctccaatgttctggactatgtagcattcatctgcaataacagaggcattttctgtagatggccttttttttttttttttttgaggcagagtcttgctctgtcaccgaggttggaaagcagatctcggctcactgcaacctccacctccagagttcaaggaattc

SEQ ID NO: 199129 - DNA, 1000 bp, Homo Sapiens
tgaggttgctaagaactatggtaagaatgaatcttctaaccaggagattgtgaagaaggaaaaataaacgtgctagttttgctctcatatctcaacagcaaaagttattgccacagtgtatgataaacactagataagatggaaaagacattaagtgtgtgagcagaagacatgtacagaaatgtgttccaattgacagcaagaaggttgggtactattcaaaatttcaagcatctactggagggtcttggaatgtgtgccccttgaataaggcagggggactattgctgtaatgtcattcgtcacatcaatagctaaagaagaaaaatcacatgatcatcttgatagatgcagaaaaagtatatgataaaatgcaagaatcaatcatgataaaaattctcagtcaactaggaatagaggtgaactacttcaacttgatacaagaatatctgcaaaaaacctacagttaacatacttaatagtgagaaactaggttttccactaggactatgaacaagataaggatgttccctcttaaccactgcttttcagtgtcattctggaagtcataggtagtacaataagacaagaaaaagaaggaaaatgtgtaatgattgaaaaggaagaaataaaactgtctttttggcatacgatataaatttctatgtagataattcaaaagaattgacaaaaaatcctggaactaataagagattacagaaaggttgcaggacacaaggctaatatacaaaagttaatcactttccagcaatgaacaaatggaatttgaaattaaaaacataataccatttatattagcacctccaaaaaatacttaggtataaatctaacaaaataggtataagatatgaggagaactataaaactctgaaaaaaatcaaagaactaaataaatggaaagatattccatgctcatgtatagaagattcaatgttgtgaagacatcagtttttctcaatttgatatacagattgaattc

SEQ ID NO: 199130 - DNA, 1000 bp, Homo Sapiens
cacacaccccattagatttcaggatgatgtcttcttaggaacttggtatgaaactgcatttagtctatttaaagacattgattctggaactcctggcagccaagatttccttctccagcctctttatattgacaattctgcatttgctttttggttttcagccacctctgtgatctggtttcaggtaattgagggttttctgagcaaagaagtaagttacatcgtgtccagccgcagagaagtaaaggcagagagcagtgggaaaagccatagaggctgccctagccctagccccagtgaggtcagagtggaaacatcggccatggttgatccaaaaggcagccaccccaggccttcacggaaacccgttgactcggtaagaacctcatgtaggaaaggtatgctgtgtaaacaaaggaagtaggctttggtgagccttttaaggcagtctctggttttaatttcatctggattaatttaatctctcatttgaattcagggactgagaatattttatcatagctctggatctaaacacctcagcaacatactatcccccatgctacccttttatgccttatgtcagtttttacgggacttgaaagtcagaggtttagaaaccagaggagagtcttcataaaccagagaagacgtgttgggattggtctgcgcttgggcaggagtaccctgagtaggcagccattcccttcttccttgcttgcatgtatgaagggccaagagtttggacaatacacatgttatgtctttgatttaaaatggaatatggcttttcccctctaggcttgcattcttattttgtctaacatattaatattaaaatgtccatgaacatacactgttggcattgtgatgacagatgggacttcctacgagcaaaaatttctaaagtgaaacatttgctttcattatctcctggagggtgcagagactcttaaagagggtctcaggacatttgtaacaattggatctcagtgaattc

SEQ ID NO: 199131 - DNA, 1000 bp, Homo Sapiens
gactctatgtccatggtccacactccagtctcaccctgagccccggctccttgagtgtgaccaagctcttgatcacatcgtgctggtcacaggacacgagccagcacatggggatggctccacacagtccctcctctcaatgctggacactggtctggaggctgtgacaatgctcctgagacggaggacagcaagagagatggggattggtgcttcgggggtcagcccagcggcagctgcctcaggccccgggagccagggctcaaggggtgcagagcctctaacccaactggggaccatagccatgttccacccacagtgctcagctacccttgctgctcatgcccctgggtgcctgggtctccatcttcactccccaacaggccgacgcatcttcactgaccccagcctcttcttccaggagggctccttctctggtttgctgagagtgcactcaggtcctcctcactccctggcagttccccggtctggtttttaattccttcagactctttgcttctgcccagagagctccctaatctccaggcttgctcactgtgtggagcaccagatccatgaatccacctgctctgggacagcttcacctggagttcccatagtcccctcatgttcagcacgacccgggtggaacccagcatctcaccccagatctgtgacccagcagtcccccaagtcagagctcccctctgagactaccccatctgctcattccccctctgaaaccctgtccaaggcagcccctctacacaccaaggcccacggcccagctcagacctttcctttctccttggaccatcacaatcaagttacccacctccagccaccctccaccttccatccaccccgaagagggcttgccagacacaaagaagaccctcatcctgagcttcatccaccaactcctaacctagtggactagcttggtgccagtgaacaatggctaatctccattgacaaaaatcacgactggagagaattc

SEQ ID NO: 199132 - DNA, 1000 bp, Homo Sapiens
acaatgttgtaatagtttgtgttgtccccatttgcaaatagaaaatgaatgcacaagaggtaaaactgctaaaaacagacagcaccaggatactagtacttctcacacattaaaggccaactttaaagacatcaccatggatcagcttaggctgatcattaaatagacgtgctttactgctaacaaattcggtgcatcataatcatggacaaatgcactgacagataatgaacaaaggacactcatacattactttcctttttgtacacattatgtcaccatgtgaaacaggatttggagttacatgctttaaaaatcacatgcatttttgaaaaataaaaggatacacatgctaaactatgttttttaaataaagaattgtagcacgggatgagaaataaatcaattcaacacctaaagcaatggaaaagcacagcataaactatttcagaaagtctggtaattaatgtaaagaagcaaattgcattatatcactcattacttaataaaaaattgagcatttattttccagggaagacaaatgtggttggggttcctactttataacatttggtgtggatttttacaagattattatgcaatccgtcaatggactgtgggcggtgcggggcagcacggattccaaatatttacaaatcacatgcattaccttgaattgtgttattacggcctccacaaccattgtgccatcaactcaaaggaagaaatatcttcctcaagctctatttgaaggctaaatatatcttcccacctttgtttctactattctaatttatcacctggtcattttctgacatctccctttaatacagcttcgttttacacctctaggtcttttgatgcacgctcttaggcatctctgccttactgctgcacacatccaccatgttattcagactcacattttcacctactcttccagcttctctcacaccttttctcaatgtgagccctaggagtcatcctaactaccaagctt

SEQ ID NO: 199133 - DNA, 1000 bp, Homo Sapiens
agagagtgagtgagattgatagtgtggtggagatagctggggagaggtagagggtggcataagaacgggaacgagaataagagtgagtataaaagtaaagaataggacttcatcagggtgaaagtactggagtgtaccctgtcagcaaagatgatctatccactttgagagagacttaatggtgccggtttgaggtaaaaccaggagatatcagttatgatggtttggaggaaaagtgtaaactggcagtgtaaacaagggcagggtatttacaagtagttgaaaataatgaatatgagtatgactagacagaagatagcaaggatgacaagtttttggggtgcagttcaagttgggatggtgtctggaatgagactgggctctaataaaaaggactgtccatacaggagcttaaatgggctttactagcaccctgaggacaggctttaattctgagaagggcgagaggtaaaagtactgtccagtccttttgaagctggaggctgagcttggtgaggtatgtctttaaaagactattagtcctttttacctttcctgaagattgaggacggtaaggggtatgaagattttactactgaataccaagagcctgagaaactgcttggtgatttaactaataaaggccggtccggtttcagactgtatagtgatgggaaggccaaaccgaggaattatgtctgacagaagggaagaaatgactgtggtggccttctcagaccctgtgggaaaggcctctacccatccggtgaaagcgtctacccagaccaagaggtattttagtttcctgactcggggcatgtgagcaaagtcaatttgccagtcctaggtgggggcaaatccctgagcttgacgtgtagggaaggggagggggcctgaacgatccctgaggagtaggagaatagcagatggaacactgagaagtgatttccttgaggatagatttaaccggacaccattagcagggagagcatgtgtgttt

SEQ ID NO: 199134 - DNA, 1000 bp, Homo Sapiens
agcttcttcgcgatggtttcgaacatcctcctttagctcggagaagtttgttattaccgatcttctgaagccttcttctctccactcgtcaaagtcattctccgtccagctttgttctgttgctggcgaggagctgcgttcctttggaggagaagaggcactctgatttttagaattttcagcttttctgctctggtttcttcccatctttgtggttttatctatctttggtctttgatgatagtgacgtacagatggggtttggtgtggatgtcctttctgtttgttagttttccttctaacagtcaggaccctcagctgcaggtctgttggagtttgctggaggtccactccagacgctgtttgcctgggtatcaccagtggaggctgcagaaccgtaaatattgcagaacagcaaatgttgctgcctgattgttcctctggaagcttcgtctcagaggggcacctggccgtatgaggtgtcagtcggcccctactgggaggtgcctcccagttaggctactcaggggtcagggacccacttgaggaggcagtctgtccattctcagatctctaactccgtgctgggagaaccactactctcttcaaagctgtcagacatggacatttaagtctgcagaactttctgctgccttttgttcagctgtgccctgcccccattggtggagtctacagaggcaggcagttctccttgagctgcggtttgggcttcccggctgctttgtttaggtactcaagcctcagcaatggcaggtgcccctcccccagcctcgctgccaccttgtagtttgatctcagactgctgtgctagcagtgagcaaggctccgtgggtgtgggaccctccgagccaggcgtgggatataatctcctgatgtgccgtttgctaagattgttggaaaagggcagtattagggtgggagtgacctgattttccaggtgctgtctgtcacggcttcccttggctaggaaagggaattc

SEQ ID NO: 199135 - DNA, 1000 bp, Homo Sapiens
tactcagcaacgtgctcctccctcgggggaccttccccagtgcccctccatgctcgaagggcctggaaggatcagaatgcaggcctttcccaaggacggcacagaacgtgatgaggagatgccactgggggtgcagaaagctccccatccccctgggaagaggcgtcagcgtgccctcagggtagtcaggtcctgagctttggactcctcgcttggttaaaggcactgtcccttgtgcaatctagaggaatgctcctcaaagcatctctcctggggaccaggagagccgcccctgctcccaatgcaacaagatccctgatcgccagcctcttgcctccctcagagggagacaagtccgcactggagggagcacggctgcctagctccctgtcacctcccccacctctctatctgttcactgggacaacagaggatccctgaagccgctggaggagctggctttgcaggtcttcctccatcaccttccaccaagagaagttctcaccccgaacttttgggggttcatcctggatccctgggctccgaaaagccacggtcaccagcacattcaaacagatgccatcactgtgatctcggcccaggtgctgcagtccaagcaaccccttgatctccaccaccaagtggtgcagggtcagacactcctgcagcagccgcaggacggccatcttcatgccacccctctgctccatagggtcgaggccacaggcagtgacaggcaagtgaggcatccccactgtgcccactaacacccacactgtctgggcgctggtaaaggtagccacgagccgctggcagaccagatcacagggtagctcttggggcagaatgagagggtgcctggcttgctggcgatactgggcggctagttcaaccaggtgcaggatgtcatgggctcgcagcggagtgggcagggaggtccgtgggtaccaggcagcctgcagggactccgcatcggcctccttggaagtcttgagaattc

SEQ ID NO: 199136 - DNA, 1000 bp, Homo Sapiens
ccatgccgcccggccgtgtgatttcttttctatcgatctcaggtcccttgactgcaaactcaaatcaacggcagtgcgcattttcatgatgtctggatgggataagctatacagccctcacgtgatgcacaggacggagctgggctcagtcaatgatggttccctttctctgcttttggaaaggtgtgctgtcaacaccaatttaaagagctggcaaaaacagtcattctcagggcctttctctcatcggcctctcaaaagcacaggcctccacagagatgaacagtttctttcttttttttcttctttcttttttggagacgggtcttgctctgtcacccaggctgcagtgcagtggctggattttggctcatcacagccccaacctcctgggctcaagcgattcttctgcctcagcctccgggtagctgggactacaggcgccaaccaccacgcctggctaatttttgtatttttagtacagacagggtctcactgtgtcgcccaggctggtctggaactcctggcctcaagggatctgcctgcctcagcctcccaaagtgctgagattacaggcgtgagccaccgcacccggcctgacatgaacaaacttttatctttcttcccgcttttctcttatttttcagaagcttcactgtatgaagatagaataataacaagagagaaggacatgaggagagtgagagatgagcccgagaaggtggtgaagcagtgggaccatagtgaggatgagaaagagacagatgaggacgatgaggcttttggggaagctctgcagagcccagcaagcggaaagcagagtgtggaagcaggaaaagccagaagcgatttgggagcagttgccaagggcctgtcaggagaattaggcacaagatcaggagaaacaggcaggaagctactagaagctggcagaagagagtcaagagaaatttataggaggccttcgggagaattagagcaaagactctcaggagaattc

SEQ ID NO: 199137 - DNA, 1000 bp, Homo Sapiens
ctcctgggtacaagcgattctcttgcctcagcctcctgagtagctgggattacaggcatgtgccaccacgcttagctaattttgtatttttagtattttagggtttatctcaaactcccgatctcaggtgatcctcccgccttggcctcccaaagtgctaggactacaggcatgagccactgcgcccggcctgcaaatgctttctaaccttaagccaccttcttgttttaaaatatacctatagtttgactacaagatgtggaacattatgctttaaactataaactttgcaacttaaaacatccagatgaacggtagcgttcaaagaattcacttggggagactgtttacccattccacggcttctgccattgcctaaataatttcttaaactctttacaagttgccttaggaggcagttacagtcattcaagaaaaccaatctcagtactttatagttgtgtctcttttgactaaaatatgcatgaacaactactttagccggagttaaattgctctagctgcttctacaggttaatcccactctcaaagatgactgatttgtcaccttggggaaggttaagaagcactgtgttccaggcttaaaggcagtatggagaaaacagttctggcaaatttgtggcatcagcagcatctgattcagtttaggcctgtacctccctcctcttgtgtccaagcattgcatagactattgtgttgaactccatgaagtagattttattttccctgcttcccagaggacagaaataaggttctgacattataaataagctgcccaagaatgtatggctaagaagtaatagaaccaataatatatcctttttattccattatcctcaaagatgattatgtagaaagagagaagtcagttgggtataactttatgtgtaaagcaagaacgatgaagaaatacatcgtaattgagttggtggatatggaggactttctatgttctagatggttttagggcctggaattc

SEQ ID NO: 199138 - DNA, 1000 bp, Homo Sapiens
tggtacagtgaaaatacggtattataatcttttttatctttaagatggagttttgctcttgttgcccagcctggagtgcaatggcagggtctaggctcactgcaacttccgcctcccgggttcaagtgattctcttgcctcagcttcccgagtagctgggatgacaggcgcacgctaccaagcccagctaatttttgtatttttagtagagacagggtttctccacgttgaccaggctggtcttgaactcctgacctcaggttatccgcctgcctaggcctcccaaagtgctgggattacaggcgtgagccactgtgcctggcctggtattataatcttataggatgactaccatatatgtggttcattgttgacccaaacattgttatgtatcacatgacagcataacaaatcaggactatatgagcatgcataacgaggcagtacatattctcctgccccacccgcctctctctgtctctcttcacgcacacatgatgcatgatatatatttaagtgactcaaatcttccatccagaaacctttcgggagggttccacctggcagcccactcctatcctgaggttactgactgctttaggcagtttgagctgccatagcaaaagcaccctagactgggcagcttaaaccacaaacacttctcagagttctagaggctgagaaggacaaggtgaaggcgctggcagatttggtgtctggtgaagcctgcttcctgggtcgtagatggtcatcttctcagtatcctcacatggcagatgggtgagggagccctctggagtctcttttatgaaggctctaatcccattcatgaaggctcatgacctaattacctctcaaaggcctcacctccaaataccatcacattggagattctatttcaacatatacattttggagagagataaatgttcggtctacaacattgatgaagcactatatcgcttgcatcttgtctttcagccagggcaagaacaagctt

SEQ ID NO: 199139 - DNA, 1000 bp, Homo Sapiens
cctgtattagtccattctcacattgctataaagaactacctgagactgggtaatttatgaataacagaggataaattgactcacagttccaccagctgtacaggaggcatggctggggaagcctaaggaaacttacaatcatggtggaaggcaaacgagcagcaagcacatcttcacatggcagcaggagagagagagaggtggggaggtgctatacttttttaaacaagcagatctcgggagaactctattacgagacagcactaggagtatggtgctaaaccattagaaaccacccccatgatccagtcacctcctaccaggccccaggccccacctccaacactggaaattacaattcaacttgagatttggatggggacacagagtgaaaccatatcagaccctgtctcaaaaaaaaaaaaaattctcactcctcctctgaggtggtttgtgctagaaagctgtggagccaggacttgaaatcagctcctttccctccacagtctactcttaaccactgccccacaccacctcccataggcaccacccctgcccactggctgatgtctccctgagggctgccttcacatccttctctcattttgtccccagctcgtcccactttggaccggtttgatccaactcacaattctggcatcttccttgtgccagatgagctctccctgtcccctaaccaaccccttcactaaatttcatgccagctatgccctgcctgcccccctcctctgcaccccaaccaaactctatggctccctctgccaggaagcctgcctgggctgcctgcttcattctcatgtctccttctctgtccctgggtctaggctggggcccccagtgcatcagtcttgccaccctgccccaccccacctgcctcagtttcaaggctccacaagggtcagaaactctgaaagggggttgctcaattcagaggcagcctggcagcagctgtgtgatttggggtcagtcacttgaattc

SEQ ID NO: 199140 - DNA, 1000 bp, Homo Sapiens
catggagaaaccctacctctactaaaaatgcgaaactagctgggtgtggtggcatgcgcctgtaatcccagctactcgggaggctgaggcaggagaatcacttgaacctgggacatggcggttgcagtgagccgagatcctaccactgcactccagcctgggcaacaagagcaaaactctgtctcaaaaaaaaaaaaaaaaagaaaagaaaaaaactaaatactaatgaactaaacatccattttatgaagttagaaacacatcagcaaaataaactcaagaaaggtaggaaaagaaataaagagaagcatagaaattaatgaaatggaaaataaacacaacagagaagattagcaaagccaaacgttcctctgaaaagactgataaaaatgacaaacctctggtaagactgaccaagaaataaagagagaaagcataaataaacaatatcaagaatgaaatactgatataaatataaaggcttcacagattgaaacaaaataataagaggacattgttgaacatttttatgtcactaaatttgaaatcttctaagaaacagacccactctcaggaaaatctaactgactaaaagagaaaccccaaacaatcctataatcatgaaagaaattgaatgtgtaaattaaaaccttcccacatattaaactccaagccctgctggcatcaccagcaagttccagacactcaaagaataaataattctaattgtatgcaagctatttcaaagcatgtaaaaagaggcctcattccctcaactcattttattaacttagcattaacttgctgccaaacctgacagtacaaaaaagaaaaatttcggccaggcacggtggctgatgctacaggcagtttggaaggtcaaggtgggtagattgcttgagcccaggagtttgagaccagcttgggcaacagggtgaaatcccagctctataaataaatacaaaaattagccaggcgtggtggtgcatgcctatagcct

SEQ ID NO: 199141 - DNA, 1000 bp, Homo Sapiens
catttggtttatcacaagagagaatctgcctctccaacctaagctttcaaagagattcatgttagaagcacatcccttcaagaatgcctttcactggaatgaaaagtcaccgcttagaggatgtttgtacaatctgtttcatgtctctgggcaaaagcacaaacaagatttccaatcaccgccgtcatctattcattctaactcttgggtttggtagtatgccctccatatcataatatacctcacatttccagcgtatttcatagtttactttcatatatatcttagtaattgtatacagtggatgccaggtgtcacattatttaatgcggaagctgagactcagaagggttaaacccagcttgcaagcagcaaagctgttataaagctggtctattcatcacatttgaccaagccagtccatagtggtgaagatatgccctggaatagcccagaaacaaagagaagagcctagatttctctctttaaatgaccatcctacttcccaaaccaagctttctcatcacacacatcagtgactggtgatcacattgtccgctagtctgatgctatttcaagaatgagagtacagctaatgcacttagtggtcccatagtttctttctagaacatgaataactgttatagagaaagctagagaaatgggaaaccaagaaaaacctcagggtaagcaaaacggattcaagactcaactttaccacttacacaatgcatgaccttgaatgagctactaagcctaggcctcagtttcttatctgtaaaacaggattgcctttaaagagccctctggttctaacgccttctgattcacggggtaatgagaagaggcaaaagaaacatgtgccatttttgaaccggcaggcaccaccacaatctcttgttttgactgaggaaattaaacaagaaccgggagttgctgtacatacgttgcctcgctggctgccatgaacagcactgggaaagacaaattgctggaattc

SEQ ID NO: 199142 - DNA, 1000 bp, Homo Sapiens
tctttctactttttatcatcgtatattcagtttctcactgtaggcttcagtgggctgagaaatacttcttcacagattctaaaaaaaaaagaatatttccaacctgctgaaacaaaaatggttcacatttgtgagctgaatgcaacattacaagggagtttcacagatctcttccttctagtgtttattgcagaatattctttttgtcactattgggttctatttgctttgaaatgtcccttttcagattctacaaaaacagtgattccaaccttctaaatcaatagaaatgtttaactcggtgagccaaatccacacatcacaaattagatgcacagatggctgctttctatttgttattgcggaatattcattttttcactactggcctcagtaggctctgaaatgtcccttcatagattctacaaaaagcatgtttccaatctgctgaatcaaaagaaaggtttaactttgtgagctgaatgcatatctcacaaagaagtttctcagatagtttctttctagtttttatcatgcaatatttagtttttcattctagccctcagtgagcttcaaaatgacccatggctgattctacaagagtgctttcaacctgctgaatcaaaagaaaagttttactctgtgagctgaatgcaaatgtcataaaacagtttcacagatatcttctttctattttttatcaggggatagtctgtttttttaccataggtttcagtgggctcctaaatgtctcttcacagtttctacaataaaagagtttccattgtgctgcataaaaagtgatgtttaactctgtgaactgcatccacacatcacaaagcagtttcacagaaagcttctttttagtttttaatagcgggatatttggattttctgtaaaatcctcagtgttcaccaaaatgtcccttcacagttctacataaagagtgtctccaaccttctaaatgaaaagaaaagtttcactgttgtagctgaattc

SEQ ID NO: 199143 - DNA, 1000 bp, Homo Sapiens
ccaccacacccagctaatttttgtattttttttttaatagacacagggtttcaccatgttggccaggctggtcaagaactcctgacctcagacgatccacccacctcagcctctcaaagtgctgggatcacaggcatgagccgccgcacctggccttcttcagttctttctttagttgatgtctccagaaatctgcttttttccttcaatattttcttcccaatcttctcaagacaacattcacctagagatgttaggtaaacaaatatttccctagtcctcacacatatgtctgacatcatatcacatagctatcaaccagtttctcacacttttgctaagaattctcttctcttaaacctgagattgccactgtcaaaagctttttctattactgtggctatactcaaagttccagaacaacaaaatgcatgcaaagaagcccactggaagcttctggaaagttgtgcttagatctcctgcgatggtcccagaagcagaatcatcacaggaggctctgtcctctgctgccatagtgggaggactgaagtttattgcttttaagggagcctgtgaatattacatgatgtaagattaaaagtgttggaaaagtcattctgagataagtagaattcagttttctcaaatataaaatgatgggattgaaccaggttagagttccctacataggcagttactacgaagagaaaaaaggagagggtgaaattgaagttcactgtgctcacctgagggccaggcggggacagaggtgaatacaaggggcttaaaatcgccctcactagcaagcgctctctacagtcatgataagttcttatattcactaaatttttgtcaaattagagctatacgaaggcaaacctataacataagaaaacaccattttctgcctctctctattaccttatttctctccttggaatctcatgattaggattagcaaatgctaagtaaatctaagcctcttccttcatcagaattc

SEQ ID NO: 199144 - DNA, 1000 bp, Homo Sapiens
tgtgagccacggtccccggccagccttttcagtttttgaggaatatctttgataaacagagctgcttaattttaatgtaaaccaaattatctatcttttcctttatgatgagtactttttagtcctgtttaaaaaaacttttcttaacccatgggtcaagaatagcatcttctataacagtgctgttcaagagaaatataacacaagccataatctgagccatggatataattttaaatgttctaatggccccattgaaaagtaaaagaaacagccaagattaattttatttaacccaacagatgtaaaatattttcgacttacaatcaatacagaaaatacaaggtgccactgtatttttttcagtctagcgtattttacactcagcacatctctagcgctgccaagctacatggctggaggccgtgctggacagcagttccagaaccttctacacttagacctacattctactgggctcaattattctttgtagggtgtgaggtacaggccaaggtttttttaaatatggctatctggttggccagcatgacttatgaaaaagactggctatctgtgccatctctttttccctgtcttgatcactcttgccagattttccactatattcctgttttcaaagaatccaactctggcctcgatgactatatctgtgggagactgactttctgctttgttaacttctgctccagcctcatttccctccatccaccgtctctgagcccagctactgctccgagagtgacgagtacctgagggctgtgaaccgctcctggccggtgtgcaccctgcaagtctcagcatggcatatttttgttatctttcagctaaaaagtatgttgtaatttccattacaaattcttctttgtcccactggttacttggaagtgtgcttcctaatttctaaatactaggagtatcactttgctgatttctagtttaactccacttgggtcaagagcacactccagaggaattc

SEQ ID NO: 199145 - DNA, 1000 bp, Homo Sapiens
actgaaactgacaagtctgtgatttgaatctgtatcatttcagagtccattcttcttcctactctatgttacttccagcttttaagttactgaaaatgacttatttcttcccatgaagactctgtgaggctgttcctatcggaagacagctgcatcactttctccagtgaaagtcacagaatgtagtgcggcatcacagtagtcatgcttgggctaaggaaggcagggtacaccgtcttaaactccaaattgtggctccttgatgtttatttaagctggaaatgacacagtcattcccctgtccatggggggggaattggttccaggacatcccccatttctggatataaaaatctgcagacgttcgagttcctgataagaaatggcataggatttgcatataacctatgcacatcctcctgtgtattttaaagaatctctagattacttataacacctaatacaatgtaaatgctgcgtaaatagttattatatgtattggatttttttatttgtatcatttttgtttttttctattttttcctccgaatatttttgatctgaggttggttgaacccacagatgtggaacccatggataccgagggctgactgtactggcaaagctttatgctctctttctctttgatactctttatccatggactaagactccctcttgtggtagaagcatgtctcctccaggcacagactgaaggcctgcttctttctcaagaggtgaaactcacctggtttagtgagatgtgatgcactctgagattggctcccaagtgacttgtcatctaaggttttatcttgtgaagtgggttgaagttcagtaggtttggaacaaacagagaattctgtcctggaaaattaatcgatttttgccatataaaatctaagagaagagaaaaggttgttattcgcctgaattttagtcaactggcaatcatacaggctctctgattccactgttcacctcagtgaaatatgaattc

SEQ ID NO: 199146 - DNA, 1000 bp, Homo Sapiens
gtatgttgggtgttctcaatttctctccttcccccaaacagactaatgactccctaaaaacaggtgccttgctggccgggcgcggcagctcgtgcctgtaatcccagtactttgggagtccgaggcgggcagatcacctgaggttgggagtttgagaccagcctgatcaacatcaagaaaccccgtctctactacaaatacaaaattagctgggtgtggtggcacatgtctgtaatcccagctactcaggaggctaaggcaggagaatcacttgaacccagaaggcagaggttgaggtgaaccaagattgcaccattgcactctagctttggcaacaagagtgaaactccatctcgaaaaaacaaaacaaaacaaaacaaaacaaacaaacaaacaaaaaaaaacaaagaaaaaacaggtaccttgctatcatattcatcattctctcacccagtcatatcactggggctcaaaaagtatttgtcagaaaaagaaaagaagaaaaggaatgaagaatctatgtattaaaagataatactttttaaaaggggctggggatagatgatcaaacaagagttttcattggaaacactgaaaaatgttcatgaactcagtgggtttcaacatcattatttctgaccatacccggcttctttggggtgaggcccaaaacgtgtattgccattttaagccaaggtaaaacaggttccagtcctggcccgggctctgctggtctaggatcccatgacagtttcacagttaaaagactgctttggatcctaaaggcttggaagtttctctgtgtctgggctttcagtgctaatgcttaaaaagctccaaatttctacctatgttcaatatcacctcagggcagagtatgcttcaaattttacttggccctctccttctcgctttgggctatgcactttccactgtaggcttcctggaacatagcaaaggcatactcttatctgtgactacattcttccattcctaggga

SEQ ID NO: 199147 - DNA, 1000 bp, Homo Sapiens
gatttgttagaagttcaaataggcagtttataatcttccgtgcacttgaagatgacccttattagcaattcatattatttttttctacacatttttccccgttattaacgtcttacatttgtatggtatacttgttataattattgaaccaatgttgatgcattatcattaaacaaagtccatattttattcagattgccttagtttttacccggatgcccttgtttcaggatcctgtccagcatatcacatcatatttggtagtcatttctctgcttggctcttacagtttctcagaccttccttgtttttgatgacctagacattttgatgaatactggtcaggtattttgtagaatgtctctcagttggtacttgatgtttaaatcatgattagactggggttatatgtttgggggtggaagacaacagaggtaaagtaccattttcatcaccttgtgtcaagtgtatatattatcaccatggtttataacttttgatgttcaccttgatcacctggctaaagtaggatatatctagtttctcctctgtaaagtgactctttcttcccctttacatatgtactctttggaaggaaatcactatgtgcagcccacacccagggagtgagaagttatgtcccctctccttgaggacacagcatcttcagacattacttggaattcttttatgccagagattcctctcttctcccccatttgtttatttattcagtcatttatttatatcagcatgtactcatgggtatttattttatactttggcttataattcaatattactttattttggtactcaaattatttcagttttggctagtctccaatctttcacttggatctcatgtccctttgacatactccaatcattgtggattttatttttttttttttttagtacttaggtactttctcacactgaaagatgcttactactaccactactactactactgctgctgctgctgcttctcctcctc

SEQ ID NO: 199148 - DNA, 1000 bp, Homo Sapiens
ctatctagaagcttgagctggcaaaaactgaataggaagcgcttccatgggtactgctgtactttcctgaatattttcaattctgtctcaggctgagaatcttgattctaaaagtaatagaatgctgtcctgagacattttattctcatgtagcctgagtactaattgttagctagaatcctctttcacttggctttataactgtcctgtcctgtacttctagaacagcttctattttctaaaacattttaaccttaattggtataatgacatctaaatattctggtcatctagggtatgatgcaagaattgtttaataactctgtttggtgagttttgtttgttttttcacctagttaaataagtcaactaggaactgtctgtgtgaaagcacttagattctccagagatacattatctccaaatcaatcaatatgaaggctcactttgtctttaatgggatccatctggttaatgctgtgtttcttgagtttcatagattatgaaatcataaagctaaaagaaaatatggagatggtctagttagaccctttcattttacagctgagactacttaagtgcagagaggctaagtgacttgctcaagattgtacagctaattaatgagtcacactggaattcagtgtagtcttatttctgatataactgtgctaattttttcattgcagttagtgaagaaattatggatttataagaagtaaattttccaggaggtttaagtggacttaaattaagtatttcttataattgaaatgtgtatatttctttcaggtaccaggtgtcactggatttctatgagcaaatttgttatgtttcacgttccagatagaaatcagccaatttaaaaatagtggtgaagttattatagcctatatttaatgagcacacatttggctgcattaaaatgaatcttaatgtattttttgcacagcggagataatctgttaatatttaatgccataaagcaacaatggaattc

SEQ ID NO: 199149 - DNA, 1000 bp, Homo Sapiens
cagcctggccaacatggtgaaaccccatctctactaaaaataaaaaaattagccgggtgtggtggcacatgcccataatcccagctacttgggaggctgaggcaggagaatcgcttgaacccagaaggcaaagtttgcagtgagccgagatcgcgttgctacactccagcccaggagacagagtgagactccgtctcaaaataaataaatcaatctcttaaactgactcattggtgctaacatgtcacaagtaaacattttaaagataactttgctttcagaaaatgttgaaactgtagattctaatcaagtaccttaatttactcttaccttttctatcagaaaatgttggtcttgttctcaaataaaactaccaatttttcttcttatttctgtggtgagaaaaacaaatccaatattttttttttggaatcttctgaattttgcttaaagtctgaaatttctaggccagtgttattctatttgcaacaaaatcacataacacacttgttaaaatgcagattcctattgaatcagatcattgaggaggagctctggaatttgcatttctaacaaactctccagatgattctaatacactttgctaatcattgttgtagacgtttcctgctagaatatatctatatctatatctgtatctctatatacattagatgtatatatataattgagatatgttcatccactcttatatctatatttgtatctacatatacattagatatacatcaatatctatatctgtatcattagatatacattagatgtatatgtatacacatgtagatatacatctacatatatatatctctatatataataatgcatatgtatctatataatgcattagatatatattagatgtatatctaatgtctatatagctacagatattgatacagatacagatatatagatatagatataaaaaaggggtggatgaacaatatgtctagtaaacatggtagtacaggaattc

SEQ ID NO: 199150 - DNA, 1000 bp, Homo Sapiens
actgcaacctctgcctcccgggttcaagtaattctcctgcctcaggctttcaagtagctgggatcacagacgagcaccaccatcctggctaattttgtatttttaatagagacagggttacaccatgttggccaggttgacctcaggtgatccacccgtctcggcctcccaaagtgctgggattacaggcgtgagccaccgcacccggcctacaatacatatttggatgcacctaataatcacttactatgaatttaaaaactgcacggttaccatcccccaaaattcctgagcagttttacattccaaggcaattaagaccaaaataaagaagatagtactttcctccattaattcccctaccatgtatgatagaaatttctatctataacaatattctatcttataccaataaattatattaatatttggctaatttaactgttcttcctttatttcacgtgtctgaaccttgttttcctaatataacttaagcttagtgaaagcaaaaaactacagagtattactctgtctttcatggtatatagtatgatgctggccatacaaaaaaaacactccactttccaactgtatacccttttgttttgttttgttttttttgagacagaatctcgctctgttgaccaggctggagtgcagtggtgtgatcttggcacgttgcagtctctgcctcctgggttcaagtgattctcgtgcttcagcctccggagtagctgggactacaatcacgtgccaccaagctcagctaatttttatattttcagtagctacggggttttgccaggatggccaggcgggtctcaaactcctggcctcaagggatccgcccactttggcctcccaaagtgctaggattacagacgtgagccaccacgcccagcccccttcttttgaaacagggtctcactctgttgcccaggctggaccgcagtggtgcaatcatggctcactgcagcctctacctgcccggctccagcaa

SEQ ID NO: 199151 - DNA, 1000 bp, Homo Sapiens
tctgcctgtcctttaagacagtacttggtttcctatatgacattctctcctaacacttcaaactgtaattgtcaaatgtgttgactgaatgagaaaagtcagaattaagatgagaactctgcctcttcacagggcacatgctacagctttaactgcattaaaactttccccaaatctcagcaagctaagagattgtggtgcagagggaagatgttttgtgagcatcctgtatgagatcagtttatgtgggaacccagagaaggaagttgctcattcattcatttattcaacaattatgcttatttatttgtttttatatttttccctttctcactacctgaacatttaacagttatttactaagcatctactatgtgccagacactgttcaaggggctgggggagagaacagtaaacaagacaaacaaatacctcgtctcatggaaatagcatcttggtgggaatgaagcaaacaagaaggcaaacaaataaaatgtatgtagtgataatggcaatggagaaaaataaagcagcttaaggagaataatcatttactttttgaaccctatgtggggtgctggcatagagtggtcaatgtaagtaacctggtgtctgcccacagggctcacagtcttggagggaggacagactttagaggattaaataagtgcacaaatcaataagttactccaaattgttgaaagttcaaaggaagaaaacgatgcatcagttttagagagaagaaagggagagccctaatttaacaggtgtctcagtcagtttttactgctctaacagaataccagagactgggcggcttaaacaacaaacctatttctcacagttctggagactcagagttgaagatctgggtgacagcatagtcaggttctggtgaaggcatgcttcctggtttgtaggtggatgccttcttggtgtatctgaggagagagggagagagagatagagaaagagagggagagagagagaggagaaagag

SEQ ID NO: 199152 - DNA, 1000 bp, Homo Sapiens
gctgttttgataaggctgaactaggatgatcagggcatggcaaaacagctattagcagcacttgttattaatgacatatgaacgtggtaaaatatacgggcttccgatgagtctattagtgtgtttttttatgtttaggaatgtttctaagttgaagagctgaggagtatataagaatgactccatacttttccatgaaaattcaacacctgtcctcaaaacagctgggtctagctccaaattgcccactgtagtcttgtgaaaatttctttgaattctccctttttttctcaaaaatacttggatttcacattctatcccatagtgcattttatttgtttttatgttaaaatgctacttttcttcgcaaatgttagaggagggttgacttgcctggaagaggtgccatgttcatcttgcagctcccctacctgctgtaggccctgggggagtctccctccccaccccacccccagcgtgagaagcggagtcctttctgccactgacagagggatgtttctgggagtaagcggtatgcttcatggagttcacccctgaattttgaggattgaccccaatttccttagttattttgaaatttctagagattggtatatctaactcaggatgagatcatttatgtttaaaccattcttttgagctagagtggaatgagtgaccccatttttctgaatttcttgcctttagttaaaacaaaaatcggtgtttaacttgccttcagatgatctcttctgggtgtttttctgagaagacactctcaaaacccagcagtaaccctggtcgattttgcacctgtgcctgaaatgctcccttgccgtgccctggtgtctagtcctggtcagtgcactcaggaggcttgcaaaactcaactctagtcctaaatactcctcttccagcacttacttcttcagtcacaaagttgctttgcccacccagctgctgtcctgggtcacagctggaagcagaaaagtctaagctt

SEQ ID NO: 199153 - DNA, 1000 bp, Homo Sapiens
gttactcaagtgtgaaacctagcattcctcccctcctctaatcctcttcccatatatatagtatgtgtatagatgtatatatgtatgtatgcatatctccaattccattactttagtctaggccaccaagacctttggaatgaataactataatacaaaccatccatactaaagtcagagtggtctttctaaatccaaatcttactgagttatgccctgaccaaaaatcttatcaagaccagatgccttaactagtatggcctacgaggcttgtgaagacctagattctccagctgacctcatctcttagcattcctggcctttcctttgcctcctacttccaatgtgccagccttttacttcttttacttttacttcttacaattccttaaaagcaccatactttggcatctggccacaggctattaccttggctggaacaccctccattctcatcctccttctccttggcctggctaattcctattcatcctttaggacactggcttacgatccaatttccactgggaatccttttctaacctaagactaggcatatttctatgtggtcacaacacttaatgtgctgtacagtaactgcctgcctgcatacagatggttcctcaccaactatggttccacttaacaatttttcaactttttgatagtgtgcaagcaatacgcattgaatagaaaccatacaaccattctgttttttactttcagtacagtattcaataaattacatgagatattcaaaacattattacaaataggctttatgttagatgattttgcccaactgtaggctacgctataatgtttagtaggcaaggtatatcaaacgtatcttcaacttatgatgggtttatgtaaccctgtcccaagtcaaggagcatctgtatttgtttctcccatcttctcattgaaataccctttacagtgagggctttatctcattcatctgtatcctcagcacttagcatggtatctaacactc

SEQ ID NO: 199154 - DNA, 1000 bp, Homo Sapiens
cggagacaaggtgagtgacagcagcaagcaacgcagcagtcactaggcaacaagatccagccttcagtggaagagaatcttaaaacatttaacccccacactgtctgggtgtctcattgctgaaatggcagtaatctctggacaaaagcctaatgtgaataggcagcttgtttctgaagccatgttttttcaggcactgtgaggaaacttccttcttagactaagaacattactcaatttgaaaagattggtagagttagaaatctttaaaactgctttttcacagggtcacagtttaagccacatgaggatccccccagtgtgtttagaactgttattcaattgctccccataagccaggctgctgcacaggtcttgtagtctgtgctctgcacaaagccacactacagaagggggtgagtgggactgaaatcagcctgtgcgctcttgccaagatatacccttgttagggcagtctggagaagggtatctttatctaattggttgccctgatggggcgccattttgtaatttgtctgcctggaggaggcgctttttcctaacttgcacagaattgctctgtgagctcttaggtggggggcactgcaagtacatcttgtggcccccactagtcaaaagctctgcaagactgtctcttctctttcacttgactcttgctgtagaatttagcacaggctggacagacccaggtgtgaactggtggtgttgctttcaaactggatttccagaatcgcctcattcagactgttttggtttgtttccagaaaaaatgtcctctaaaatttttctcatgaagcaaatattttgtcagtttgtgagagctaattgtttaatattattttccacccccaaacagttacacaatataatgattttcttaagataaaccctactgtttcttagtcagatcaaaaagtgattgacgggcatttattaagtgggctctttgagaacagtgggtaccatgtttctctaacag

SEQ ID NO: 199155 - DNA, 1000 bp, Homo Sapiens
caactgtcatccctatctatttccaaagctttttcatcacccaaacagctctatacccactaaacaacaactccacatcacccactccccagccctggttatctctgttctactttctgtctctatgaattcggatattccagttgtttcatataagtggactcatataatatttgtcctttttgtatggcttatttcatttagcacagtgtcttcaaggtgcatccatgttgtagcatgtatcagaatgccattcctttttatggctgagtaatattcccttgcatggatatataccacattgtgtttctccattcatctactgatggatacttgggttgtttttgccttttgctattgcagataatgcttcagtaaacattggtgttcaagtatctgttttagtccccacttttagttcttttgggtatatacccaggagtgaaatgctgggtcacatggtaattctgttttgctttttaagcaactgccaaactgcttttcacagctgctataccattctgcattcccactgcaatatatatgggttctaatatctctacattgctacaacacctttttttaaaaaaaaaaaaaaaaaaaaagctgtcctattaggtgtcaagtgttatctcattgtggttttgatttgcattttcctaatggctgctgatgttaagcatcttttcatgtgcttattggtcatttgtatgggttctttggagaaatgtgtattcaagacttttgtccatttttaaattgggttgtttgccttttgcctttctattcttctctcacttttaaattgattttctcccatatttctccacaaagtcaaaaagatgatttcatttgaacacagataaatgctgtcagccttccattgccatatacattgaattaaggtcaaatgctttttgtgctgttgctaaaatcacttgagaatctgtctctcttcaactgaaagaattgttctggatgcgttgatgctgtggaattc

SEQ ID NO: 199156 - DNA, 1000 bp, Homo Sapiens
aggaggtggaggaggaggagctattgagggaaatgctcagtcagaattgaagccagctgagactgtagggacaggctgctcaattcacccatcagtgaggcctgacttacagaagcatcagcattgggacaggccccaaacaaggagaaggacatttcacaggagcaaatgttacttaaaattcgatttactcttttttgttgatttagggtggctatttaattagtttttagcattgcacattgtttatggtcattgtttcaatagaagttaaaagtaagaaactttaccatgcccttgatttgtagacaaaataactgttccagatttctctcttgtccccttgccacatttctgatttaacagtgtctctgacctggtgaattgcttctaaatcatatcaccaggttccccgagcttctgttgtgtggaacttctcccataagacaacatcactaaagctgagaaaacacatcttctctcgtgtctcaagtgataggttgtctgataacaaatgcaataggccaaacgaacatttgtgttctgaaaatggcattcctcaatgtggaaaattccacaaaatttgtagcttaagctgagaagttcactttgaagtccgccaagactgacccctgagcaagcctaggacttgcccatgaaccaaaccaggcttggaaaaggctccaggaaaggccacttcttgtcagttgtggatctctaattaataaatacaaggtattcaaatttgaaccatgtacaaaactctgtgctaagagttataggggtaggagagcagaccaggatctggcccacacccctcccagctctatttgagtacacataatcagttctcgaggaaaggaggctaacagggtgtaacagcagccatggcgttcaggctcccttcctgtctgccaccagcctcacagcctgcttgcccaagcacgttttgtgagccaaaaagaggaacaacctcaggaagaacttcctgagagaattc

SEQ ID NO: 199157 - DNA, 1000 bp, Homo Sapiens
attgaggaaatgggaaagtgagaaaaaagaaaaaagaagcaaatcagagtgctgaaatccagttagagtaaattgatcataacatcagtatagtaagattaactttcaaggaaaaaggaagaccctgccaggaacacagagaagctgaggctgaggaaatagggagaaggagaccctaatgttggcattaaccaagatgaagagctagtgcctgtatacagcagcagagacaaataataagaaataaggtgtgaagtgcttcagctaacacggaaatgtgttaagcccacaggtttgaagggaaacttactagcttgaagttgtactaaatgagaaattttgagtgaataagagggaagaagcttgaagaaattggccaaattgtaggcatcttcgatatgggaaaggagaaaggaggcagttaaagcttcatacgaatagagatggatgagagtggcattcagaagtggaaagaaaaataagaggaagagaaacaggtaccaacagaaactgagaggtcttaaaaggaagaagatattagaagtgagaaagagtttcagaaaaaaatatgaactatgaaatgaagatagaggaagataattggttatgaaaaagaaaaaaatggctatatgcaagtcagtactgtaggagcaatgaagaaacagcaagagtgaaatcatagagatctatggattaagatctctgaatggtgctatgtagaaaagtgggtggaaaagtgggattgccaattttacgtgtcaacttgactaggctaagctcaaataccagtgtagaagttgctgtgaaggtatttttagatgtgatcaaccgtcatgtaaatcagtagactttaaagatcaccatccataatgtggatgggcttcgtcgaatcagttgaaaactttcacaagaaaaggctgaggtctcccaaagagaaaggagttctgcctctagactgctttcagactcaagactgcaacatcagctcccactggaattc

SEQ ID NO: 199158 - DNA, 1000 bp, Homo Sapiens
tttacctctttttctattgattggaatagtttcagaaggaatggtaccatttcctccttggaccgctggtagaattcggctgtgaatccatctggtcctgaactctttttggttggtaagctgttgattattgccacaatttcagagcctgttattggtctattcagagattcaacttcttcctggtttagtcttgggagagtgtatgtgtccagaaatttatccatttcttctagattttctagtttatttgcgtagaggtgtttgtagtagtctctgatggtagtttgtatttctgtgggatcggtggggatatcccctttatcattttttattgcgtctatttgattcttctctctttttttctttatcagtcttgctagcggtctatgaattttgttgatcctttcaaaaaaccagctcctggattcattaaattgttgaagggttttttgtgtctctatttccttcagttctgctctgattttagttatttcttgccttctgctagcttttgaatgtgtttgctcttgcttttctagttcctttgattgtgatgttagggtgtcaaatttggatctttcctgctttctcttgtgggcatttagtgctataaatttccctctacacactgctttgaatgcatcccagagattctggtatgttgtgtctttgttctcgttggtttcaaagaacatctttatttctgccttcattttgttatgtacccagtagtcattcaggagcaggttgttcagtttccatgtagttgagcggttttgagtgagattcttaatcctgaattctagtttgattgcactgtggtctgagagatagcttgttataatttctgttcttttacatttgctgaggagagccctacttccaagtatgtggtcaattttggaataggtgtggtgtggtgctgaaaaaaatgtatattcttttgatttggggtggagagttctgtagatgtctattaggtccacttggtgcagag

SEQ ID NO: 199159 - DNA, 1000 bp, Homo Sapiens
ttttgttatggcagcccaagcaaactaatacagaactgtataacacttctcttgccctctattcccattactaagatttatgaaagagacaagcctccaatttctacaccagtttctcaaacctatcaccaggaaggacatggaaagtacgaataagtacacatttataaatattatgtggtgaatttgtctaatttaaggtttttactatgtctcttgcccagtaaaagtagagactaatttctctatttgggatttctatagttatttacattatatagaatagctttgtttcaatattaagtacatatgcaaaagaaaaaagataactatagttctcaaaagtatgctataaaaaatggctaccaaaatccaagtaatacatagcttcctattaaagtcagtactcctgtttttaattccaatttaacatgattatcttaatttacaagttaatatttatcatgcatattctaaagaccagagaaacattttttagtcatcatcctaaaacaaaatgactggagtattgacactggaacagccacaatgctaagaatggtatatgcattatcttattcaatctttacaccaactctgtgagataggaaactgaggcttaggaatattttataatacatatattcacgtagctagtcatttatggaggcaacaacttatggagctagtaatttgttaaccaaaatttgatttcaaattttattttcctttcatagtatttttctaaaatatatacacaagttattttgcttcattctgggttgatttgtatgcatatggacctgttttctgttttactaaacccaacatataagtaaatagatttaaaacttttaaatggtaattcattaaagttttaaaatactgaacctaacaatctattaaaaataacaatttgaaagattacttaacaaagttacctttcgaacatatgatttcctgtattcattcatttcaccaataataccacgtttgaatt

SEQ ID NO: 199160 - DNA, 1000 bp, Homo Sapiens
agcactcagagattccggactccagtatcctcattgtacacttgaggaagcttgggctcagaggctttatgttaattccaacagtttttgcaacaggaggaggagaatatctgtccaggagccctaatcaagactcagcaggaagctggtggcttcctttccttccttcttttgcttccttcctgttcttcctgtgcttcctttcagttcttccttctacatatggggcccatcgcattcccactgactcagatgctgaggggccagactgaagggacagtggccattgcatcaagtcagagaacggatctgacccatctagtagaagcttattgttttggcagaagcacaagctcttagaggtgcagctgcagggtgtgacctattggggacattgagctcagtgaccatgggccctgagagtctgaaatcctggaatttctcccaaaacgaagtccatgtagggaagccaaagtgtgagtcttacccggctggtttacaactgactgacatttgctgcctgggcagctgctgtgggtgcctggaaaccctattggactaggactggccccggcaaaaaacaagtgttatagctgcccagtgtcctctgagtggatgctggtgattctggtatggagcccagatgtaaggcagcaggtggtccagaaggcaccagaagaggtctcctgtcaaagtcagggccagagaagaaggcacagggaacctactgcacgagactttcacttgcaacgagcaacccatgatgaggagggaggattcctgggggcattgagtcccccagacacaaggacccaagaccttcttgcttggaaagtgaattcctcagaattccgagatgatgccagtcttggaggaagatgacatgaggacccaaaaccttcttgcttggaaagtgaattcctgagaattccgagatgatgccagtcttggagaaagatgacatgaggacccaaaaccttcttgcttggaaagtgaattc

SEQ ID NO: 199161 - DNA, 1000 bp, Homo Sapiens
catctggaggcttgatccacttccagacttcctcgggctgttggcagaattcactttcttacagttggaggactgaggtccctttgtcttgctggctgttggctgggaactgttctcaaatcctagaggccactctcagggcttgccacgtgacttcctccagctcagccacgggacccacccaccgtcaagtccctctcatgctttgaagctctcagacttccccttctatgacccatggaagaaaacggtctgctttcaaaaggctcacgtgattaggtcagggccacccagatcatctccctattttaagatcaactttaccatctgacataactgaatcacaggagtaaaatctgtgatattcacagtctcagggatccttcaggtcagggtacaggcactcagggaacaggaagctttggaagccatcttagaattctgcccaccataccaccaaagagggtgcaaaagagagacctttcacatcagacaggaagttgtatgtgggcactgcttgtgctaggaacaggggtgtgtgtgtgtgcatgtgtgcatgcgtgtgtgtgcatgtgtgcgtgtgtgtgtgtatgcatttgtgtgtgtgtgcatgcatgcatgcacgtgtgtgtgtgtgtgtaaaggacctccaaagaagcccaggtagagtttccatgaggagctcaaagtctgatagatgattaacagttgaaggaagcttagggcacatgactcatgactccaggaagtgttctctttttcaatgaaacactcccagcagccccagcgatttcttctatgcgaggtctccagaagctctccattactgctgcgtaggagaagggagaagggtgagagacacacctttacttcagattaaagcagcacatgattggtgtttgcactgaaggtcaactttctgaggaggaagctggaggatcagggaaggcttcctgaggagatggcctttaaacctggccttgaagactggggagaattc

SEQ ID NO: 199162 - DNA, 1000 bp, Homo Sapiens
ataaatccaaggaggaaaaaataattctaccaggaaaaaactgaaatcacaggtagccaaaaagctttgtaaatatgaatcttatttatcaggaagtaccatcaatatttgtcatattcctgctaatgaaacaaattaaactttgtctttttttaatagaaattatcacagtattgacaaatgaaaaattgtctcaaacccagagaagacaaaaatcaggtgatctacctttatttgttaatacatttgaaaatattttgttagcctgtttaaagcagacttccgttgttgtctgtaataatcgatagtatattggattaacagcctcatcttttaagacaggctttataatcatatggctgattaaggggcagcaaagtataaccaaccctgtaactatcctttaacttgtacctaacaaaaatagtaaccataacctccccttttattctgtaaagatcctttttctgaaaatatctttgaactaacttcctttaaagctagttcccttgcaacaagtacaaaataaaactatgacatatgctgacaatcaattaatctgacaagtttgcattaacactgtcaaaaccaaactaatgtcaaaatagctgtaattttggttatctaacacagattctaacatatcctctctagcaacaaacataccatgtaagccttgaatttatttaaaatttaaatctttttttgtttgtttgtttgagatagagtctcgctctgttgcccaatctggtgtgcagtggcgccaccttggctcactgcaacctccgcctcccaggttcaagtgattctcctgcctcagcctcctgagtagctgggagtacaggtgtgtgccaccacgcccggctatatttttgtatttttagtagaggcaaagtttcaccatgttggtcaggctggtcttgaactcctgacctcatgatccatctgccttggcctcccaaagtgccgggattaccggcatgagccaccacgcccagcc

SEQ ID NO: 199163 - DNA, 1000 bp, Homo Sapiens
cagagatgtacatggtcaatgtaatcaagcccaaagagcaaaactctcaacatttttgtattcatgttgatgacatttgtgagtgcgcacttggagacatcttttactctgtgaactgcgtgcagtttttgcccatgcatgcctgtaatgagtaggactgggaggtaggaacgggccaaaggagacgcagacacagtccctttgggcagagccccctcctcatgttcttgcttcctgatcctgtctgaactttcctaggcactgggcgctcactgacttgccaggcagtccactcagtttgtgaaatgctcaagatataagggtgtgatcaaatgcaaaattatctgtctgtagcttttgctgattcattcaatcctactctctggagcaatacaagtttaacacttccattttatttcagaatgaattcatgccccttcactgctctgcattctcaattttaagctgtgcaaataaacttcctcccaccattttttatggagcatcatttccagatgtttctgtggctttggtggtcccctcaggctccaccctagttggccaaggtcctaccaacaacacgatgccagaactgtgcccacctggcaggagacaggttgcaggtagacaacccatggctcctgttctgtgcctggcttccctagagcacattcagctgtgttgtgttttgtcaatgatggtaacaaaaatgactgagcacttgcgattgatcagactctgtgttttgctaactctggctcatttaattcctaaaatactgtgataaaatcgtgtaatcattttctattgctgctgtaacaaattgacacaaatttatcagcttaaaacaatgcaaaaaattgttttactgttctgtaggttggaaatcctgcagttctctcaataagcaaaaattaaggtgtcagaagggccgtgttcctttgtggaggatttaggggagaatcggttctcttgctccttgaaactgttggcagaattc

SEQ ID NO: 199164 - DNA, 1000 bp, Homo Sapiens
ggattgggtggaagatgtttaagagggcaaatttctagtccctctccttaatgctacactcctgtatattggtacaaaacaggtttattgtttggagatggaaaaacgtggagttttgagcctgagagtgaacccatgcagtgaagagaacaggcgtgctactgacaatagaggattaagaggccatatgcataaggagtgctgattttgaagtcctcaagccaactcgttcaatcagaactctggcagccagactttgtccttgaggcaagggacaggaagtgcacactttgaggaagctgccagcccaagaggaaggaataaagacactgaccctggggcttcttaacaaagggctacagtgaaggtcaccctaaaaagcaggggcttatgttcagcttccaattcctttttcaatctcccactctgcgtttactctcctttctttttatatctcagatttttactttgaaaaattaaaatctcagggtgggcatggtggctcacacctgtaatcccaatacgttgggaagccaaggcaggtggatcacttgggaccaggagttcgagaacatcctggccagcgtggtgaaaccccgtctctactaaaaatacaaaaaggagctgagcatggtggtgagtgcctgtaattccagctactcaggaggctgaggcagaataatcgcttgaacccaagaggcagaggttgcagtgagccgagatcataccactgcattccagcctaggagacagagtgagactccatcttgaaaaaaaacaaaaacaaaaacaaaaaactacagaaaagttgaaagattagtacaaaggatacccatatagtctttacataaattcatcaactgttaacattttgtataccttctcttgctcttctctacacagactttttttttttggaaccacatgatactttctcatactcagaccaccaaagaatagcagaaatctaagtaaagttcctaatgtggagatggaattc

SEQ ID NO: 199165 - DNA, 1000 bp, Homo Sapiens
acacaagtagggggctctcaggcaggagagagctttctatttggtttcctttgttctaaagggtgttttggtgggctgcactgtgccttctcccagcagcagcccatgctgtgaactggatatccaaggatcttgcaactcccaaggatcccactgttcccctgtgttcgctgcacttagagcagcatctggaaaatgtttgttggggatctagtggtatgaagaaacaaagactgaaattctctgggcaggatagtagcccacaatcagtgtacaaccaacacggtgcctaccatttcaacttgggttcaaggggagtgtgtgtgaacctgcacaaactggctactaagtgctggacccccagggagtttccaaattcctcctgaccgcagtgcctgggcttacaagagcagagaggctcttcaacaatttggtcctcagcagcctgtcacaagggtaaggagaacaaagaaactcccacctacactttctgtgggattgcaagttcctcaggagtcaatctctgccagagtcttgctgccttccttttctgcacctgagcttcttcctgtggcttctctgactggttttgcattcttcctcagcattccactccagccatgatcactcatctgtaactttgtctcttctttctgtagagaactcacatctgacatccctagttagccatccacagtggatgccttttgttggaacacagataattcatagtctgtgcccattcaaaaagttcacctagcgtacctctttcccagacttctttatcaccaacattcaaatcctgttctttccaagtcccttatcatccagccaaaccactgccaactgctgatgaatttgtgtaggtccacacttttgaccaaaataacaaacttctgaggcatgaaacaacatgggtgaaacctaaaagcattatgctaagtgaaagaagccagacacgatagattacctaatgtgtgattccatttacatggaattc

SEQ ID NO: 199166 - DNA, 1000 bp, Homo Sapiens
caggcggatcgcttgaacccaggaggcagaggttgcagtgagccgagattgcgccattgctttccagcctgggccacagagtgagactccatctcaaaaaaaaaaaaaaaaaaaaaaaagagagagagaaatgctactgatttttgtatgttaatttagtatcctgcaattttactgaatttatcagttctaatcattttttggtggagtttttaggtttttccaaatacaacaatcatctgcaaacaagagtaacttggcatcttcatttccaatttggatgccctttatttcttcttcttttttttttttttctgagatggagtcttgctccatagcccaggctggaatacagcggcacaatctcagctcactgcaatctccacctctggggttcaagtgatttccctgcctcagcctcccgagtagctgggacaacagacacccgccaccacgcctagctaatttttatatttttagtagagatagggtatcaccatgttggccaggcttcaaactcctgacctcaagtgatccactcacctcagcctcccaaagtgctgggattacaggtgtgagccactgcacccggcctttctctctcttatctgactcctctagcaagggcttccattattatattgaataacagtggtgacagtgggcatccgtgtcttgttccagatcttagaggaaaggctttcagtttttcacctttcagtatgatactagctgtgtgtcagttgtatatggcttttattgcgttgaggtgtgttccttctataaccagttttttggggtttttatcatgaaaggatgttgaattttatcaaatgccttttcagcatgaatttaaatgatcatatggttttttatccttcattctattgatatgatgtatcaaactgattgatttggatatggtgaaccatcctggcatccctgggataaaccccactttggtcatgatgaacgatgtttctaatgtgttgttgaattc

SEQ ID NO: 199167 - DNA, 1000 bp, Homo Sapiens
catccgctcccagtcatgactgtgacacttcccctgaagagagaagcctcaggccacaccgtttgtgaggaccaggccagaaagaagccacagcgctcctcctgggtgcttgtctgaggtggtttccttaacttagttaagaaaaggagagcatttccctttcctccccataatgtaagagtcattcattatcggagtagggactgatagtttatttctaaaatatctattgcagtcatcaaaatcattattagtagtacatatattttacattttataggattaacttgtcatggccctttcaagtgcactattgtgtcctagctgtgcctttgagtgacaagtattggtgttcccatactactgggaagaaatttgaagcccagtgtggtgtttgctaatggtaacataaccagcaggtacgaataagcaggagggatgagctctcaggaacacaggtcttttaattcctctccttgacccattcatttatgtgacagcttctgtgactgagatgacagctagttctgcaactgtgagtggggaattgaaatctcctgtaatttatgttgaaaaaaatcttggatgatttattcctgccaggcactctctttggcctctgaccttcaaaagtcctcacccaaaggacagtttgtgactgggttcctgtttggaaggttgtcgctgaaggtgtatgcagtgtggctggaaacagcaccccggcccttggtggctgcgcttggttccccttaaggaagctcctatgccgtgctggggcctggcctttaattcccagagggcattagtgctagcgacacctcacatcaccactgaggcacctgcctctgttgttctcatgtgcattttccaaatccccaaatctgtgcgtttccagaagtttctggaatggggaagatctcaaggacttacttgttttaatggttacaaaaggctggttgggccaatttccttagggcatgacctctctggggaagaattc

SEQ ID NO: 199168 - DNA, 1000 bp, Homo Sapiens
cttgagcttaagaattcaagaccagcctgggcaatatagcaggaccccatctccacaaaaaaataaacaaaactagccaggtatggtggcgtgtgcctgtagtcccagctacttgggttgctgaagtgggaggattgcttaagcccagaaggtcaaggctgcagtgtgctgtgatctccccactgcactccagcctgggtaacagagtgagaccctgtctcgaaaaaaaagaaaaagaaaaatagcacacagccacagaaggagaatgccatgtgaagatgaaggcaaagactgaaatgatgcatctattagccacgaaataccaagaggtgatggccgtcatcataagctaggggatggcatggaatagattcttcctcagggccctccaaaagaagcaatactactgacactttgacttcagactttagcctccagaagaatgatacaatgaatttctgttctgttaagcacctcacaccccccaaaattgattctgattggttaaatatgaatagaaaagataaagagaatttgggccagagttggtctcccctgatgaccagtgaatccagtacatttattcaaggagcacacaattttcatcttgattattgttcaatttagatataaagccaaacctaggcactaggtaacgatcttaggaatatttagtagctaaatagaacaagaaatatatttatatatttatataaaccagtttctgagaaaagggcagtcatgtatggtgggtccaagcaagaaagcagtcaaatttagaatatttatatcagatatcatttttttcctggcaatatatagcagaaaaaaagaaaaaaaagaaagaccaaaaatcaaaagactagttaaaacatatggggaaaagattccaggagcttattgaagacttgtaacctgagcaaacagtactaggaaaaatgagaaatagtcttaatatttcagtttcccttgggtcccagatctccttcaactggaattc

SEQ ID NO: 199169 - DNA, 1000 bp, Homo Sapiens
tgccctggcctgtggggctcgtgcctgtcatctggtgctatacgggtaccttcttcgtctctccccaaggctgagcacattgtcccatagtcaactgtactggcagtcactggtcagtctctcctcctgaactgtaagctcaagggaaaggcctgagctgtgtcatcttcgcctctgcagcacacagtaggcacttggtaaacgtgtgttgagcagactgatggaaggcattgacttgtcagtctcctctacttagactacgggtttccaaggcagggaccctgtcaatccctgtcatggcgccacaggccttggtatgaggtagctgttcagccacggtatgctgagctgattaacccatggggcagcagtgcagtgcagctaggagacccaggtccagactccagactctgaccctgcccattacacgctgtgtgaccttggacaagaccgtggggcctcactgtctgcaggaggctaagaagcaccgcctgccatgtggagaatcagtgtgaaaatgacacacgctctcatcaagttagaggccaggaaacgaggtgggctagaaggtggtgcagaagcacaaataaaaacgtttttttaagatttgaagcactagggccagggtgaggagaatacccagtcccctttctgcccctccaccgaagatgtgacatccaggagggaggagggccaccctgtcctaaagaagggacttcactctggatagcaacagcttcaaaggaattttggaccctagagtcatgcttttttataaaatgactcaggctccactgaacatcccagggccttgtccctacaggtttccgtaggcagcagatgcattggcacaagaatggctggcaggcagaccaatgggtttgatccaggctctacccctagctgtctgtgtggtcccctctgaacttcagtctcctcgtctttcaaatgaagatagacgtaccactggggcatggccaggcttaaagggaattccgcg

SEQ ID NO: 199170 - DNA, 1000 bp, Homo Sapiens
tggctaacatagtgaaaccccgtctctactaaaaatacaaaaattagccaggtgtggtggcaggtgcctgtagtcccagctactggggaggctgaggcaggagaatggcgtgaacctgggaggcagagcttgcagtgagccaagactgtaccactacactccagcccggggacagagtgagactccatctcaaaaaaaaaaaaaaaagagaaaagataaaacagaaagacaagtgttttgagagcccccagctaaattggacttctagtacctcagcagttagctaccttaccttaacagaaaatcaaggggaactggacaggagtgtttatagtgtgcctttcatgggatgcttctttcacatggtggacagcctaaagcctagttgtccaacctgtgaccagagggtccctcacacaggaaacttgtttatactggtagatgtctttgtggctcttgtctagctcgtgtccaatttttgcctgcgtgaccatcactctggctctaggagcctgaccttttgttctctccagtatctctgggaaagcccagcttggggcagttcctagttcttcagatggaaggtgcaaattcaatataacacaataggaagcaagttcagagatatttttactttcagttcctaggcaagaaggacatgagttgggagggtagtcctctgtccctgtgtcatgtgaagcaggaatgaagagttgggcagagagagagtgaaaagcgtgtagcaactagcaatatatataagggaagttcaagagcaaatacctgaatggtcctgataaaggaagctgcaagaaaatgtggagcctagtctgttaggcaggagggatgcctctaagttcttatttctgaccactggcctgagccatttgggtatagtatagaactggaaactctgtcaagagtagcggagccctgcttctggcatgagaaaattaaatgttcaaaatgaatgtggaagcaacataaaattaaagaattc

SEQ ID NO: 199171 - DNA, 1000 bp, Homo Sapiens
tatgttcattactctgaatgcgcaatcaataatgaaagttaatgatttaaagttttttgctaaaatctttgtgctaaataaatgatcaacaagctaacatcttagtcatcacaggaaaaacatgttcaaacaataagaaactcctaacttctcagacaatcctcactcccccaacacatttcaactggtttcttcagcattactgtgatagccacaaatatgctttccatctctgaagtatactaccccttggtcaacacagctaacacatcttccctgcgttttacccttctgaaaaaatattgaaagctattgactttcagagactctttattcgaaagaaaaagccggattaaacagaagctcatacaagataaactgctttccagaccacttacaatacaaagttatctttccttaaatcaaaactgcattacaactatttgggatatcacaatgtctgccccaaagcaaataaacaacattactttacagtaatgttagtcgttattaatccattaactattacctctgacacattcaacttagagctctaatcatgagaccatttacataaaccttcaacattaaccttcaaaaagaaatctagaaaaaacacttaaaatttttctagtctaaaagtataaaccacacttggcaatactgaataaagtttggctactttatctgccacattatttgccaatacatacaaaatattcctttcaaaaggaaaaactattggtgcaccagcactaagctaaatcatctgtcctgttccattagagcactatcttaaaacctaaaaccccaaacaaatatgttttatgttcacaactgttctccaaaaccaaactattccgcaatacaatgaggaattggagagggagatgtttctttgggttaatcacaacagacaccaatccattcagctttaagagtctgttttgttttacctaagcagtggaaaaaccaacagctaaatcttgaaaacatgatc

SEQ ID NO: 199172 - DNA, 1000 bp, Homo Sapiens
gttttcccttctgtgactgattctttctgggccctgggacatttatattcagcctctgcatttgtacattcatttgttcattcacccactcatttattcaataaatatttattgagtacttaaatatgtgccaggaactgttctaggtctcaggatataagagggtaccaaaaaagcaggatctttttttttttttttcagagagcctaccttccagtgggagagatggaccacaaatacataagcaaatacatatacaaaatcattgcagattatgaaaaatggtaagaaagagataaaaagtgtgaccggatggaaggtaactggggcaatcacttttaggcagatgcctctgagatgccatctgagctgagacttgacagatgaagtgccaacaatctcagcctctaagcctgccaagcttgagatgttatttgtattagtaatttgcaggtgcaaatgacccacctagactgtttctagtgcacagtatgctttgttgacaaaatgccctgaagcaaaatgccacagatgtcagcttcagttttgtggattttcatagcatcttcccgtaaggttggtcattgtcgttcccaaccactccccggtttgggggaaaggacacagggtgtcctctgactctggtgcacacagggtgtcctctgactctggtgcacacagggtgtcctctgactctggtgcacacatgagctctcaccagtcctgctgggaccaggctgcaggcaaagaacaaacacctacttaatgaactgtgatgacagaggagtggccatttgcttcctccagtgctgtccatgccagctcctgagcccatttgtcacttcctggggacacagctgactcatagagcactggcagtaatcttggcctgggagaggtgggaaacagaaggcttggataaaagcaggtggagctggtggctgcctaggtaatatgatgggaacttttgtccactgacctgtccacaattcttggaatt

SEQ ID NO: 199173 - DNA, 1000 bp, Homo Sapiens
gttgccaaatcttttaactagtttatttagcgtcaagaaggcatctgctccaggtaagcaaaggcacaggtctagtttctccctggaagtacctctccctcaccagaattctgattagtcgtttgtcctgtgacctcagttctctgatgatttaagtcattagtcatttatccaactttttgtcttgttgtgagtatggaagaaattttctatctctgtctctttgagctaaaacagcccccaaatttattttgaagtaatctgaaagggggactgatagggtaacagtataaaatcatgaataaaataaaaatacttgcattatgtgattaaatttcatgttttttatatagttgattatatcattaaggacattgtgtgttctagatactaacacctagaattgcccatggttaattctctagcttcctaaaattataggatttagaagacttgaagacattttctatttaaaatgacatacaattgcaactatgaatgttttcacgtttcatgaacacactgattccaatgcaaatttcaatacatttaaccaattattaatttactcagacaaatctcagtggcttacatattagcagaactataaattttgatctcctatcaaggacacataaaataatgtaaacacatctgaaattttactgacctaatatgttgaattaggatctaattttaagtcataagggatgaaggaaatatattcagccaaaaccagatagctgaaaagtgtgattttagccttaaccattggaatttaggataatatggcacatataactcctaactttataataacaacagatcccaagaactgatcattatttagtaactattatactgtgagtaagcatttttattaatgagtgatggagcaggagatgatcatacttaacttgcattactatatgttcattgagtgtttggacacaaatatcatctgaaacaactgcagctgctctcaactctggtagaattc

SEQ ID NO: 199174 - DNA, 1000 bp, Homo Sapiens
ataaacatttataacatgggaacaataataggatttattccagagaccattgtgaagattatctaagataacgtatagaacagatcctggcccataggtaagttcttattaaattgtagttacttttcaattcttggggcttacacaatgtatttccattgtagctttcaatgcactgtatatagatgattgaatgtactgcatcagaaataaattggccaacattctacgtagagagcaaaaagaatactaaaaatctgagctttcagaattggtcataatgtggagttattttcattttctcttttcccaatctctcaagccatggctgttcttggtatatacttttaccttttaatttatctttactcctttcataaatgtataaggtcaacgatagttcccagataaagagatataagtaaatagcaaccaatacaacatatagaagtttttcttataattttattttaaaatgaaaatgaaaacctttccattggtatatttaaaggaaaaataaatatcctccatcaaaacttattagcatattaatgtggtccctttattagtggtatgtgtttaagtgtacctgttcaaggtaacttcaataaaattcataatacttgatatatgactcattttatgtctgtgtcttcctatttttataaagtaattatgaaagccagtaaaacatatcttattggaagcccaacttacaaagcaaatataagtggagacatgatcatttaaaaggaggcagactgttgaaatcttgctcattcagtttcctgtacatatgcataaggtattttgatttattaaaaatcttttgacatacatacagcatatctccagtcttcttaagtcttcattcccaaagggagacatttgcaacatttactcagatgctcatgtttaatacagaacatcaggtagtaaaataaaatattccttatctgaacactgtagccacatatgccagcaagataaacatgaattc

SEQ ID NO: 199175 - DNA, 1000 bp, Homo Sapiens
tttctgtcactcgccagaggtccccatgtgactcatggccactggttggttattgaatgcaagggtggcaggggtgagggttctggctgcccgggtccttacggtgccaccctctctgcccgtctctgctgcagggttggggtgctggaggactgcttcaccttcctgggcatcttcctggccatcatcctcttcccctttgggttcatttgctgttttgccttgaggaagcgacgatgccccaactgtggagccaccttcgcttaaagggaacaccaggcccggctttcctacacccagctctctttttctaatgtaaatgttgtgtacaataattttatttgattaagcttcaggactgttttgtaaagcgaggtgggaccgatgtggcacacgccagctgcggtttcccggagcgtggagaggcagtgctgctgctcccgcccgaggctcatgacaactcaataaagcactgcttttattttttgcagtcttcaatttgagaaaggtgagaaataatgttttcaataaatgagattcataccattgttgacctggtgctgcttactcggtgctttcagagacccaggaaagactggaacgacacccccatcgctcccccggccagtcctgaccacagttgtattcagcaggcgcttacagctcaagaaaatgttttcaagttctgctttattattaaagttgtaatcccttgatatttacagagcaggcacctcggtgccaaggaccaggccatgcccgttctggtctgggaggcagaacctggggttgggtgagccacggggtctgcaggttgcatccgagacccccaggtcctattcttccaccccgtaacaaaaccagaaacctccccaaggcagaacgccaaaggccaggtgtcacccacaccccagcagttccccttagcgccagatggggctccctgagccctgtggctgaagtggggaacacggccatggggcttgtgtggactgaattc

SEQ ID NO: 199176 - DNA, 1000 bp, Homo Sapiens
aacctggaatggctgtaattacaaattgtcctcagattacccagctcagaatctacagacacacgctaaatgaaaaaggcagcatatttaatggtcagaacatcacaacatacaatttgcagtcagatgaatgtggaccacttcttgggtgttttatcctgggaagacacttaccctttctcagctttaatttttcattctgtacaatggggctaatactacttatctcttggggattgtgaaaggctcaaatgagataatgtctgtaatatacttaattcagtacctgacagacaatatatgctcttccttcatgtcaccaagtcttttgttattctatttaattcatatttattttgataacaacatgaagatacccacatacctagcaaaatgtaggaactttataacaggcattttctttgctgctcagaagcttatctgagtcttttccacctattccctgatctgtaattgtgtttcatatttttgaggctctctgaagtgaaatctccagattgggaaagggttaagggattcatatgtaaatagacatagaattcagtgtgtgctcaattaagatttgatgaatgaatgattactgtataattatagagatctgacagtgataaccatagttaattcattgctaaggtcgtgtacattgaaaaataattttaaagcattttttagtaatttgtgtttttaagttgttagtaaactaaattgcaaccttttgttctctgaatattctcttaactataaatctaccatgttttaatcagagaaatgttgtgacagttccaggaaaggaaacattttttctgtttaaaacatttctagcatttcagccaaacaatttatctagaatggttttccctttaaaaggaatagtagacaattagaagcatagtacagtacattttctgccttatggttccaagccaaaaaccagagaacttttgtgctttataagcaattgtaaactaaaatgagtaac

SEQ ID NO: 199177 - DNA, 1000 bp, Homo Sapiens
ttatggtatcttcactttatgtcaaagtctaagctatcagtatttttctttgtagtagttggtgtatgtgccaaagttagaaaatctttctctgtcttggttattaaaataagtggctgaattttctaatacctttatgggttctgttttgttttggtttgttttttcatttgtgtggggtttttgttgttgctgctgttgttgtttttacacttttggttaaagtgtgacaggaaaaacttttctttttttccctgaaaatggttctgtttttatgccagcttaatgtactaattccctcatttccgtctaaaaaaaaaatcacctttattttaatactatattgccataggtacttggatccgtgtttgaactctgtatttttctgttgatctgtatattagtaccaaattgtttctaaagcaattaacaaataatacattttaatacctggtagtaaactgctcccttaatcccatcattattactcatctatttcagaaggtactttcttattattcttccacatgaatttaaaaatcatattgatattttcaaaatatcacattggaatttgtaggttctttaggaagaaataacattttagggtacatttttgttttcttatcatatatcaagtttttcattttaattatttatttcatagctttttattatcgaaagtttcaaacatacacagagaaagaatagtaggtataatgagctccacgtttctattctctatctagcttcagtaattatttacatttgccaaacctgatttaagtacctctcctatgaagcaagtcccagatgtcttatcatttcatcctcaaatgctctagattgcctgagaatggtctcaaaaaacccaccatcatattattcacaatggtaatttcttactgctatttaatatccaatttagatttgcatttcataattgtttcaaaaatagccttttacagtaagtttatttgaatcagcatctaaagaattc

SEQ ID NO: 199178 - DNA, 1000 bp, Homo Sapiens
ccacttaagctcacctccaaggacagatctgaattaaacttcccaattgacagtggcattggagatttgtgacatcatcatcagaaactgtctattaagcctctccctccaatgagcaagccccagcaagttttacagagtcccagaccgtgccgaagaccctgccttcaaagcatttagtagaagaggtaacacacagacagacaagtacaataaaaatttaaagatttatacctgctgtgagagaagtaataaagcttggttgaattcttgggtttattatgtaagtcagactacatgtctttttgggcaccatgatattcacaattgtgtccaagttaagggctcatgcattttagagatgggaatgagggatggtacataaagtggaaccagggagagcagatgtagaaaccttatgtctgggattaccagggttcttgaaggctgtagatcttctcatttccttagtcaacaagtaactccatatagaagcctggcctactgctagttctcgggctatcatgagcaagaaggcaaccaaatctgtgtgaataatgggaaacccaattgaatggtgttttttgagatgtttctgtttgtgtttcaacaccaaatgttgaaagcagaaagttggttttgttttgctagagctgctgaagccaggagatgtggagttgcgagttccctgccatgttctggctaatggccagcaatgaggaaggaacgtttggggcactgctggtgggcgtcagcacatggactgactccgcacaggcatgcttagagcagccctctctatgcctgacccctgcctctgtttctcaacaggcacagcctttgtcatcagagtgctcagccccatctctactgggaccctcattcatctaattgtcccggtcagaaatcttgtatggtctttgatttcttcctcttccatgtcacccagatatctcaaatacatccactcccttccatctctgctgctaatgcagaattc

SEQ ID NO: 199179 - DNA, 1000 bp, Homo Sapiens
aataaaacaagaaatcagtcataaaaggaactttggaacctatacaaagtaatggaaaccaaatagcacactcttgaacagccaatgagtcaatgaagaaagcaagaagaaaatttaaatatgtactgaaacaaatgaaagtagaagcaaatgtcaaaacttaagggacagagcaaaagcagtactaacagggaagtttataataataaacaactatatcaaaaatgtagaatgatttcaaatatcaatctaacaatgcacttcagggaactagaaaagcaaaaacaaaccaaacccaaaattactagaacagaaaaaaataataatcagagcaaaaataaatgaagttgagactaaaagaacacaaaaatcaacaaaacagaaagttcattttttaaaaagataaacatcgacaaaccattaaactaaccaagaaaaaaaaagatccaaataaatatatcagaaacaaaaaaagagacattactactgataccacagaaatacaaagaatcattaaagactgttataaccaactgtacaccaacaaattggaaaacctagaggaaacgtagaaattcctgtacacacacaacctaccaagaataaaccaggaagaaagagaaaacctgaacagatcattaacaagattaaatcaattataaagtcttccaacaaagaaaagtacacggccagatggcttccctggtaaattccaccaaacctaaaacacacacacacacacacacacacacctctcacactaatacttttcaaactatttcaaaaaattaagggggaagaaattcttagaaactcagtattatacgaggccagtattaccctgaaaacaaaacaggacaaaaacacaacaaaaaagaaaaggaaaatagcatgccaatatccccgatgaacaaaggtataaaaatccttggccaggcgcggtggctcacgcctgtaatcccagcactttcggaggccaaggcgggcggatcatgaattc

SEQ ID NO: 199180 - DNA, 1000 bp, Homo Sapiens
gaagtttgggggctccaggactgggagtgccctcggggaggtctacctcccggggcaggtctatttcccaggccaggtaccgtagttggcactagtaagtaagtgctccacaaattcgtgttaacatgcattttcaagaatgcaatttatttaattttcaagtcttcagtcccagctactccgtaggctgaggcgggaggacccctttagcccaggaggtcaaggctgcagtgagctacgatcttgccactgcattccagcctgggtgacatagctagactggtctcaaaaaaaaaaaaaaaaaaaggcattttctcacctacctgctttgagtgcctgccagaaagaatctccaggtgaaaggggacaggtttagggctggagctgaaggctggcatttggggtttgaggttctgcgtttggcattggtttgctgtttcacttgggcaaatctcttggcctctctgggctgcgtttctgtagggaatcagtaataaggcaacctgtctggctctaaggctcagaggcacggggcaggctttgaatttccagcaagcaggagaaagagcctttgatttgaagcagagatttcctcttgaacattaatattctgggcttttccaggctggagctttagaaccgctgttactaaactaagtgacatgagtagccccccgttgcttacagaatttcttggcttggcatttggggttttctcacgttgattctaccctgcctgtatggcttaacccccaactacacccctacactgtaattaggaagagcctcagacttccccacacaccccacacaatgttcagacttctgtgccctcactcatgctgttccttctgcccggaatgcttttccctacactcttcaaatgattggctctttctcatattgatccccacataaatgttacttgagtagagatcctgttattaactctcagagcttcctgttttctctctttagctcttactgcagttcagaattc

SEQ ID NO: 199181 - DNA, 1000 bp, Homo Sapiens
aagaaggtattgagatacagaggaatattgtcactctattggtaataccttattttgctagtgtgttgggttttggctcaataatttgctgtattattctattttattgcttttgttttatttttgttatatgtattattctttttttcttatgtattttctttttctagattaattattgaagtacaaacaaagaattatttggaactgtacacattaagagagaaacgaagtggacagtaagccaaaaatattcaatggctacaaattcagggccaatatacaggaaacattaaggttccaattatgttgttgctcactgtaggagcatctgctctctatattccatgtgtcaaaggaaaatatatctgagttaaaggtcctgaccccttccactggaattgccaatgttgatgatattctgagggttgcccagtagaatgcaggatacccagttaaatttgaatttcggaggaacaatcaatagttatttttagtataggtatggcctcaaatattacataggacttacttaaaaagtatatgtatgtgagagatataaaaatatatcatgtttgtatatatgtacataagtgaaatacatatttatttctctctctctctccccatacacacacacacacacacacacacacacacacacacacacatatatatgtattgcttatcttaaatttaactgggtattctgtatttttatttagtaaatctggcaacacaatttatgccccacacattcacatctgaagttactacttcctgtctctgaagaacgtgtttacttgaatgctacttatgtttcgcactcttaagttcttttagtctacactatgttttttacagcctttaaaaaaataattcaggaatgatgccagaaaaccatgaatgactgagagcacattgtatatcacacagccctgcttctgactctctgtgaatcaaaatcatgtgccagactccccttctcttaggttgaatt

SEQ ID NO: 199182 - DNA, 1000 bp, Homo Sapiens
aatgggtgcactaaaatctcagacttcaccactatacaattcttccatgtaacccaaaaccacttgtacccaaagctagtgaaatttaaaaaatgcttgaaaaggaagaaaaaaggctgggtgtggtggctcacacctgtaatctcagcactttgggaggctgaggcggacagatcacttgagctcaggagcttgagatcagcctgggcaacatggtgaaaactccatctctgcaaaacaattagcctggcatggtggcatacacctgtagtcccagctactcagggggctgaggtgggaggattgcttgagcctgggaggtcagccttcagtgagccattgagccatgatcttgcaccactgcactccagcctgggtgacagagtaagaccttgcctcgaaaaaaaaaaaaaaaggagagaaaataaaagaaatattttgagaatgtgaaaatcaaagaggctaggcacagtggctcatgcagtgggagggtagcttgaattcaggagtttgagaccagcgtggacaacttagtaagactgtctctataagaaaatcgaaatatcagccgagtgtggtggcgtgcacttgtgatcccagctacttgtgaggctgaggcaggacgactgcttgagcccaggaggtcaaggctgcagtgagctgtgattatgccactacactccagcatgggggacatctctgaaaaaagaaataacataaaaaaaacaagaaaataaaaaaacaaaaagatgttagtactaatgcttataatgtctctatatgtttctgctgctgttcagcagaaaatggtggtaatcctaaagcaccaaacttactagatatggtagatgctgtgagaaagaaaatgcagaaaaaggcataacattcttactctacaccagagcttttataaaaagttaaaaaacttttagagtacgctataagtactaaattctaggttaaaattagcaattgtctagaaagtttaaaagtaagaatt

SEQ ID NO: 199183 - DNA, 1000 bp, Homo Sapiens
tatgcagttagatttctcactattcttttactttttttttttaatagataggtgtaaaatgttctcatgggactaagtcctatcattctttgacttggaaggaagggtagaattttctctaaagcgtcttttttttttttcccctaactatcgctcatgtcagacccaaaaatccacactatttttggtactgaatcttcagaaacaataaacctcctcttgaaagaagagtcctttgcttccttgtcatctctgaacagttcctactgaatttttacaacctgtatcctctggtcatctactttgacctgtcagcagattgaagtttttgctgaggtgacataaataggtggaagtggtagcgtaaggccaataattccacagctgaatggcctccaagcaggcccaagcaggcaattgctgtgactgggtaaccaagaatcaacactgacatggctgagtggagaagtatcagaacctaatactggttgttgagtgttgaaaactcctttattactagagtgtaaataacaaattatttgaagagttccatatttctcttcttagttcaatccttactaagaattattaacattttaaaatgtttacaattgtgtcttctttctttcttcaagaccacacaggtgaatattagtaggcttaactgtcagagttcgaggattctagaagtgcattgctcacatttcagtaattcagatttgtgatctttctataggataataacagctacctgaatccaaatctctccactcatcttccaaaaaccattcaggccagtaaggggagcaaatgaaccatccgtaactcatgactacaacatagtaatataattaggagacagagaatacaatgaatttatttttacatatacacagggaaataaacagggcccattccagagtacggtctggctgtactatgtcaaataagaaaaagaaaaaaaaaaaacagtgcacagaaagaaaaagattctattagt

SEQ ID NO: 199184 - DNA, 1000 bp, Homo Sapiens
ttcctttctgtctcagtcatgatcttttctcagtatctcattatcttcccattatacatgataacatttaattggtacaaatgaataaattttattaattacatgacctaagtaaggcatcagagataccaaaattattgtggtaaaattattcaccctgataatctcacttctattcaacactttcttgcctatgttaatcactatcttgacttctattgctatagcttagttttgcctactaaaaaattttatataaatataatcaaatttaaatacatataaaatacaatatacaatttgcatgtatcataaatacagtcatgcaatttgcatgtatctttgtatctttttccttttattcaacattatgcttgtgtgatttttcaatgtcatcataggtagcagaagttcattaactcactattatggaaaaaggttgaaattttttttataaaaagacccagatagtaaatattttatgctttgttagccatacagtctctgctgcaactacttaatttttcatagaaacacagtcatagaaaatgcatagacattgaccatggctgtgtgtcaataaaattgaacatggaaatgtaaatattataaaattttatatgtcacaaaatattgttcatttttaattattttgattactttatttctttttaaaatgtaaaaattatttttacctggtggttgtacaaaaacagaaggtgagctgagttggcctcaggctgtattagcggatgtttagtatagtgcattcactgctatgtatcacttttgatgaacatttggatcgtgttacattttgactattgcaaattgggtggttgtgaacaactgtataattttatatttttgtcttttaatgaatactggaaataacttgagatataagaagaattattaagcacagaatacgcatagattagcttaagtgtattttaccaaaaatgtagataatctcagcagaagtatatgagaattccaa

SEQ ID NO: 199185 - DNA, 1000 bp, Homo Sapiens
gttgcagtgagtcaagatcacgccattgcactccagcctggggacaagagtgagacttcgtctcaaaacaaacaaaccaaaaaaccaaaacaaaacaaaaaaaagaagtaactagggttcaaatggcccagggttaagatttggagaaaggaaagggagagcggccactgagaaaatggccctatctacagttgtgtaggaatttaggacagagaagtaacaagagtgatctaagcagcactggaaacgtaggggaagggggaggtgtcgagagggcggcaaagaagacatggaaagggcagggaaaagagcagagaatgtaaggccagtgcagaaagaaacaaagcaaaggataagaagttcaaaggctgcttcgaatacctaaatccatacaaagatagtatacggcaagtcttgtaatgtaatacaaatggactaagcaaaaaagaggccagagtttcagcctatagaactcaggaaaggaaatgagaatcaaagtttattgaatctgtagagtgttttgatgttagtgagtgttggaaaattatttgccgggggagggaggctttggttgcttggtggtaaagaacgcaaaataatcccttttatagtaatctgtgaagatcaaatgaacatgtatataagttcccacataaacatatgataatattaccagaaaagcaatagtaaatcatattctcatctgggctgcaggaatttaggaggataagaatgatctgatttatcagggatggcctaatgacatttaggaaagaaggaatgaggaaaggcagggtttatgagagctatacggtcctgaaaaggaaatgaattccctcggtttgaattataggtttgggcttttcatgtcctgcccttagacccaatactatagctgatcagctgtgaagagctgtttgctagatgctgggcactttacctccctaaaaatggccctgtgagaaaatattccagcacacagattagaaaaccaaagctt

SEQ ID NO: 199186 - DNA, 1000 bp, Homo Sapiens
ttctctgttatttactttgaaaaacactttatttaatttgattccacaaatgaatatgagataggcacaacatatagacatctacttattttttagatgatgaggcttctaggtcaaataatttgtgcaaaattggccaactggcaagagatgagctggagctaaagtataggtctccacttcttctagtgctcttttgcctcaatgtattgctagttacttataataggctttattctgtaatcatttattgagtgtatacgatgtgcctaaaaatctactttgcactgaaggagggtataaaagatgtaagacgtatcctgagcttctcatgtactacaatctatttggataaaaaaatgtatatgagataattagggaagaaagtgaactaagggaatattgagagagggaagacaaatatgattcagaaaggtcaaaagtcaattgtgagttaagaccccaaagatgcacagagtataattttttaagcaaaaatcaagaaaaaagtgctgaagatgagagttgtttttgaacaatgtcttacctggagttgtgggcaatgttaggaaataaggtaaataaatgtctgttagaaagctaggactgaatgcaaaggacatttgttcatttactccctaatacttagtctttctttgtgttacccaaagtactctttctcatttttagctatgaagtctgagtgggattaactttacccagatttattgagctaataagtttataccatcttctgtcctcaattatttttgcaatgttgggcaaataatccaattagagtcagtaagatgttaagatatatttgtaggcattatagggaatggaaaatatatctttctttcataggaagtgaggtttacaacttcaatacccatttctataataagggcagagcccagacattccagaagcaactaggtagagtctgagaatgaagacaggatctcaaaggacaggaggaagagaaaggaagaagctt

SEQ ID NO: 199187 - DNA, 1000 bp, Homo Sapiens
gaaatcaaatattctgagaacctgatgccagaatctagttttcattgtcaattgttcagctttacattgccttacaattcacacatttattttcgcaagtcacaaaatacaaaactctaaatagaaaacaatagctaagtgtttacatactaggacttgtacaaaataatgtatgtggattgtatcaggggtgggagagttttttttttgtaaaaagccagatagtaaatatttcaggctttatgggcccatgtggtctctctcacaattacccaactctcctgctacagggtgaaacagcatagacaatgcgtaaacaaatggccatgactccgttctcatagaactttatttacagatgggccaggtttggcccatggaccatagtttgctaacattggattccactatttaatctttgtaagagccctataggtagaaactattattatttagccattttacagatgaagaaactaaagtctagaaaagctaagactggctttttcagtataactcctgaactcagctattatttcttgagctgttttcctgattaccgctaaagaaaaatatgcagtggaaaaatatttggggtcttatattttagtactgtggatgaaaagaaaacacaatcttcctgagctacaagtataatgttcctgctgtaacttctaatctatttcttcaatgtaaataagactgaccctccttgactcctaccttcctaaaagacttgatcctagttgatagaggtcaaggttgtggtctcagcagggtcaattctgaaagtgcttccccaagcccatctgtcagccttgagcagacccctaatgggctgagaaagggaccaggtctttatgcggtgaatgagacacatcattccatagacattaatttttgtggatgaactgagagctatttaataggaaacaattacgtgacttattaagggtcattaaattttagtattcataaagtcagtacatgactaaagctt

SEQ ID NO: 199188 - DNA, 1000 bp, Homo Sapiens
ggcctctctgaggaagtgacattgaaagcaagaacatcaggataagttgatgttaaagagaggaacgagttttccaggccagagggatggcatatggaagggtcatgaggcaggaaaggccagctaccatgtttaatgatgcttaatgatgtgtgtgtctaccatacacatcccctacagattagtttttgttttgacagggtctctctctgtggcccagactggagtgcagtggtgcaatcatagctcactgcaacctccaattcccaggctcaagcgatcctcccaccacaggccatcatgcatggctcattttttatttttagtagagacaaattctccatgttgcccaggctagtcctgaactcctgggctcaagagatccacccacatcagccttccagactgctggcctggtctcctccagatgtttataactcatgagtgccaggactagacctggtactaggaagcagctgcattggatttaccaggcttttcactcttgtattttacagggctgggacaggcctggactgcaaggaggggtctttgcaccatctctgaaaagccgatgtgtatcctcagctttgagaactgaattccatgggttgtgtcagtgtcagacctctgaaattcagttcttcagctgggatatctctgtcatcgtgggcttgaggacctggagagagtagatcctgaagaactttttcagtctgctgaagagcttggaagactggagacagaaggcagagtctcaggctctgaaggtataaggagtgtgagttcctgtgagaaacactcatttgattgtgaaaagacttgaattctatgctaagcagggttccaagtagctaaatgaatgatctcagcaagtctctcttgctgctgctgctactcgtttacatttattgattacttacgatgattcaggtactgttgtaagtgctttacatgctgttatacgagactcttgggagaaatcactttaatgaagctt

SEQ ID NO: 199189 - DNA, 1000 bp, Homo Sapiens
ctggccgatgttcctgcccatccgtgctgtggcgctgggtgtttacggtcaggacagatgttgagatagtccaggcatggagtgcccttgctgaccaggaaggcctagacagaaaagctcacttttatcccaagggcagcatgagaaacgcagcagacgctgtcctgcgtgggctgccatgggcaacaccgctgttcctttctcggcaggtgcattcatccctggagcgcccgtccagcctgtggttttacgatatccaaataaactggtgagttgtgtttttttggggtcagcttccaggggaattctccgggaaacgggaactgcgagctgcctctgtgcacctgtgtctctgtctctccacaccctttatctgcgccacagcccacacttggccatgctgagtccatccggcctcagcgctggagagggcaggacaggcccgggccctgggctcggcacgttcctgagtgcggcctgttctatgcacgtgtccctgatcaaccccatgattccacagtggtccccagtgttccagagccctgcttccatagctcctgacaaagctgccctttcctctgtgtgccaaacctgacattttggagagggaacccctccaccccacatcaccggccagggcccccagcagctttcagtacccagttcatgctccaggaagtttaaaaattaagaacatttaagttctggaaggcggaggcagctggagagaaaggaggtgactttgtcatttctgtggttttatcatttagtgcccaggttttgtttggtttaagagaattaagaaggtgtttggggtccagagctcctggggcgaaggtggtagaccccacctttgggagaaagtctggacgaggcctcagagcagttccccatggggccttgccgcctctggaggaggcttagcctgccctggctctgccccggcccaccacaccacaccccaccccaccccaccccagcctgccctggcccatcacac

SEQ ID NO: 199190 - DNA, 1000 bp, Homo Sapiens
aactcagagctcagggcatctaagtataggccaagattattagtgctatagggaccaaaagtcccagctccttaatttgtaatttggccaattgtaggtttataacatggaatcaaggatagagctttgccacctggtacctgggcacaaggtgatttaatagtagtaaacttgactactgctggggccctgttaataatgttctgcaagggtggtatttgtgctgagtgatgttctttgttcagtgtccaaccaggaagggaagattcttataagaggagtttacacaggagagtggataaaccaaagagagcatgccaccagtgaaggcacaggtagaaaacatttaggctagagagagacagagagctgcagtatcacatgaacatgcccattaactaataagggtagtggccagcttttccagaatggattaggggaaaataaaatcttttgcagaaattagtgataagcactctgaatgtatgaagttgatgaactgtgggtgatgttaaggtctctgagggaagaagcagatattcctacaagatgacatgattacaagagagttgaggacagccaggggacaggctcttctcttaggcacaggagatatgggacattatgagatatttaggggaaagaagagtacattgatgtaaaactcctttatattttcatgaattattttttaaaagtatgaatcttgatacagagtgttgttgaggcattctcacaaatctgttaagaccttgtttaaatacaatgactgaatgttccctaaaccattattcaaaagagattatggtggccagtggggatagaactaggtaaaaaacaccctatgaaattctgtgttaagaaggtatgcttatgaaggaaagaattaggcatttcagtcaagtccttttctcttttctcatctgcaaaataaatttggaaaatggtactcaccgagtgactattgtaaagatcaacagagataatgcacataaagctt

SEQ ID NO: 199191 - DNA, 1000 bp, Homo Sapiens
aactgatggtccctaagctgtccaggctcccttagggcaactgactgcttcagattgaagctcgactaactggtgcatgcgtaacatcacactgtgtatgttaaagtcttcaaaactttatgacaggcaccataaaaatcagcagtgaaacttttaaagcccactaaggaaaactgcagagctgactttttttgttgatcaagaaaaataatttgtggcctatgaagtcgaattttcctggctagtgtaggtctcccatactataaatatgatatagattaaatggaaactgattagtatttgctgaattatagtattaggtagtataaccttttcttcaggtatagcttcaatggaggaattaccctgagcctttgattagatgggcgttgggaattttaagagggccctgtaaagagtatcctttgaacaaactgagattaaagataaaagaggaaggcaaatggaaggttaactagtatatcaagtgtaactcctttagcgcatgtgatacatggaatagtggttagagcctggactctaggaccacacggactacatttgaatctcaggcatgctgcttcccggctgtgtcatcttagggaaaattacttccactctctgtgtttcattttcttcaatgtaaaatgagggtcacaagagtatgtctacaactgatcgctgtaaggattaaatacatttatatgtaaagcacttaaagttccaagaggagaaaaaaatgcctggtgtgtagtaagcagtatgtattagctattattgttattattattatttcaaagggtagattggaggatatggttctcttggtaggaaagtaatcctactattactgaatcccagaattaatgagattaaacatcctctatcccccagtggagtcatggcagtcctggaccaggctggccttgactgaggaaggcctactcgggtgaaacttgcagcagagaggctgggaaattccccccactgcaggaagctt

SEQ ID NO: 199192 - DNA, 1000 bp, Homo Sapiens
gttcctgagcccgctctttatctgacaaaaaaggaggactagagccacagatgagagtctaaaggcgctacctgtgccaggtattcagcttgcatgtgattctgccacacattgacctctcaggagcctttaaaattgaaagtgttctgaacattcaatccagcaagtgtttattgatggtcttccttgtgctagctgttggagatataacaaaaagcaaacacaatttctgcctttgagacacccacctattggggaaagaccaaaatgtaaatggcattttgattcaaatcaacaaacacttcttgaggctgcacttaagggtcctattgctttaggcactagagatagcagggaacaagacagacagaagatcatgccctcctggagtttatgttctacagcaatttcaatcctgtgcaacagaactttctgtgatgatagaaatattctgtacgtccactgtccaatacagaagccacttgccatgtgtggttactgagcacttggaatgtggctagtgtgaatgaagaactgacctcttaaatttcatttaattttaattcatttaaatttaagtagtcacacatggctagagcagcactcattgtactttcagtgataatgaaatgttctgtacctgtgccacccaacagggtagccacaagtcacatgtggttagtgagtacctgaaatgtggctattgtgactgaggaactgaatattaaattgtattgcattttaattaatctaaacttaatgtaaacacatgtggctagtgactatgcattagcacagttctggagacttggttctcaaagtgtggtccatgaaccagcggcatctccgtgttaaaaattcagcccctgcattttagcagagtcctcagattaaagtgtgaaaggcacttgtcaattagagaaagataaggcataaaacaaagtaaatgaattatatgtgtgtgtatacatatgtgcaggtgtatctgtgcatgtatggg

SEQ ID NO: 199193 - DNA, 1000 bp, Homo Sapiens
aagtattctatattcttactgattcaagtcacattgcaacttggcggcccatgattaagtgttcagtctttcctaaggtctagcccaagatgtatttttcaaaagaagagtagttattcgtagagaatggcagggctctgcttctcaatcctgagggcctgtgccatgattcacttacaggggcctggcaaaggctcctaacagcatgcccacctgtcactctctgtgggccacattttgatccatgcttcagccaaccaaacgatagaggcctttctaacactctgagctgcaacattaaatgcaggatctctgattagtgaggccattacatgtggtttgagccaaccttacgtccttgtaccaccaccttacacccttaatatcatttgacatggattctctggatttctggtctgtatagattagaaaaaccaactagctcttttggagtgtagtacactttctaatgagtcatgcattgtttccaactttagggtcctgctgaaacttgagcctaggtacagatctagaagcaaagaggaatggtaggggtgggtcctgcgtagcatcagcattgtcttgcatggtgactgcctcaggaaagaggccattacagtttctttgggcaatgcagggttaatcccctgagatgaaggtggagaggctacttctaattgacatagagagactgagactgctttcactggcaaagactcatcagcatttgaggctcaatgtccccagcttcatcagtcttcccatacatccccatttcaactttctgaatctcatttcttcccagtcaatgccccctcacattgacagataccctgaggaacaggtttggatttccattgtcgttcagccagtcacagaatgagttctcaatttggttttcagcaatcttagccctgtggctacagaaaataagggtctctttcagggcactcatggaagctttcaggttatttatgcaacaccaagaaactcagaattc

SEQ ID NO: 199194 - DNA, 1000 bp, Homo Sapiens
tgaaatcacagagcttccaagtgtttttatccattttcagctcctttacacaatccagttcctggcattaaggccgggtgtgcctgggatgctttaaatatttgttcttttaattttaaatccttatgttaagctcctagagtgggccatatcatttgaggttgaggtgccactacaccaccatggttccagataagaggaacttttgccatacttcttatcatttctaccatctgaccattttgagcagatcatctgaacatagtgtggcaatggcatgcagactgagaggtgcaattcaagctaaacatcccatgaggggattaaagacacacacagaaatatagaggtgtgaagtgggaaatcaggggtctcacagccttcagagctcagagccccaaacagagatttacccacatatttattaacagcaagccagtcattagcattgtttctattgacattcaattaactaatagtatcccttattaataataattccataggaatcgttgtgcagcacctctgcctgttctgcaatgcaatcttcctaaacaagtacattcattttttctaactgggtccaatcttgtttacaaataggtttttgagggcagtatgcctcaattataggagcagattatttttttttattattatactttaaattctagggtacatgtgcacaatgtgcaggtttgttacatatgtatacatgtgccatgttggtgtgctgtacccattaactctccatttacattaggtatatctcctaatgctatccctccccactccccccaccccacaacaggccccagtgtgtgatgttccccttcctgtgtccatgtgttctcattgttcaattcccacttatgagtgagaacatgtgatgtttggttttctgtccttacgatagtttgctgagaatgctggtttctagcttcatccatgtccctaaaaaggacatgaactcatccttttttatggctgcatagaattc

SEQ ID NO: 199195 - DNA, 1000 bp, Homo Sapiens
aaataaataaaataaatatttaatttcttttaaattctttagcttgtaagacttttttggcatgaaatttagtatagaattgaggttacaaagtaccattggttgtattttgaatgtgcatagaattttattatgaaaaccatttgtttttcttaacatttctcctttcattcacagtatactcagtttaatcaaattgttctcttttttctgagtcagggtttcactctgtcacccaggctggagtgcagtggtactatctcagctcactgcaacgtctgcctcccaggctcaagtggtccttccacctcagcctcctgagtagctgggaccacaggcatgtgccaccacacctggctaattttttgtatttttagtagagacggggtttttccatgtttcccagtctggcctcgaattcctgagctcaagcgacctgcccatctcggcctcccaaagagctgggattacaggtgttggccaccgtgccaggcctcaaattgttctctttttaaactacattattctctgaacttcctatctgaagtccagattgcattccattgccaaaggaatcttggtaaaatatttcttttatcataatgctttgttcaggaattcaaaataactttatacatatatacagagagagagaaagagaggagagagagagacagagagagacagagagagcactcaaaagcattactatataattataaccgttaataaattatactggggaaataattaagaaatggcgttgtgttgaacaacctggatatatggctaccctaattttcaatctatgattctctctctgtttttatttctgtagttatttatctctgcattattttgcagagaatcatatgataattggcctgatttaataattccataatgtacacaggtatatgtattataaattataacaatttatagtcctgcaaggactgaacttttttcactgagtgatttttcttctagcttggaattc

SEQ ID NO: 199196 - DNA, 1000 bp, Homo Sapiens
aatcttatcagctgccctgctaacgaaaaagtgcacagctgaccaactttgcttcaagcagcaggtctatgtttgttgtttcaatctggaagctggtggattcttagaaaggaaaaaaagaaaatgcccctccctttgttttgcatactgtgcagaatttttgagattgtttattaagctcttctcagtgcctgtagaaggcatctcactgcatccagatgcagatcccacaccttgcatgtgatttttccagcttccagacctttgacttattattcccttttgctcagatatattctccagatctttacagagctacctctttctcaaaattcaggactttctgcctatttcatctactcaaagagacccttcctagtctctctaaataaaacggccctcaaccactcacccatccagttactctgctaggttttcttcagagcacttgttcactactgtgactacctatgtctttatctttttccttcctggacagaaatgtcactcctgtgagggaaggaggtgtctgtcctgttctgtttgaatcctgtgtgcctggcatagaagagaatgctccacacgtgtttcggaaagatggggaaatgacgcctgctgctccacatcctcatgccccagagacactttcaggatgaagagtttgaatgtttccctgagacctgccctttcttccccagtgtccacactgctctcacatgtggggctgcctgtttttgcttgtttctggggaaaattaaagtctaatttcaggtaaacgaatggcaaaaggaaggttaatagtgtgacaagtaatgcaaatcgtctgatttacttttggaaacccccccctcccaccacagatgctctgaaaagccatttacacatttaagggtcccatagagtttaactgaaattaaaatgatgaagggatttatgaagcacagattcccctttcactttgctttattcttctaaaaccttaaaacaaatggaagaattc

SEQ ID NO: 199197 - DNA, 1000 bp, Homo Sapiens
ggttgagaagggtattcagttataaattcaggtcctttcttattttaaaaaataataataataaagtgaggggggagagggggcttagggtgtaagccagaacccagatggctgagccaagagccacagagaacaaccccagcaaatgagatgatgtcttaatcagggatcagagaaaatgcacttggtcagatttcagaattgctgtggtccaatgactcacatgtgctttcttcccccatcccatgaatagtggtatctttagatttcagaattgctgtggtctaatggctcacacgtgccttcttcccccaccccatgaatagtggtatctttagatttcagaattgctgtggtccaatggctcacacatgccttcttcccccatcccatgaatactggtatctttagtggccaacctgtattgtcccatcattggagattgggagaggggcaaagataattttcacttgtgttcccaggtcagattgagagaagctgtaccaaggaaccatgcacagaagcctcagccttacaaattaaatgtaagtaatgtgtggccagaaagcagactgtaatgttctttttaagaaagatgaccatgaattttttccacatgtctcttgttgtgatatagagtctatgtcccctcttcttaaatctaggagggcgtgcatttgttttcatttacatgcagcaaaaggcattcttctgatttgtgaggttactctacatgaagtgatccagcttttccctccctgctacatcctgtctgaactccttacctacagaacccgtgagaccccaaaatggatatttactggcacgctcaatatgagatcctgtgccgtcatgcaaggggctttgttatcctaaggcccatgacatgagcaagtccacaacagcagaggtcacattgcccaggtctacattcctagccaagacacatgaccaaagtagcctcaggtgactccattccccactgcacccattggaattc

SEQ ID NO: 199198 - DNA, 1000 bp, Homo Sapiens
ttttgtttgatcttctttgctaaatgctactcaccatcagcatccagctcaagaccgtcctctacccagaacgtcctgtccaggccaagccactctggcatatcactttcttgaactcctccagatgtatagccaattccataaaactgagaacctggttttaatattaatagcaatgtccagggtttattgatttgaccctgcttggaatattcttttttttttttcaatctttatatggcaggctttttcaggctgttctgacctcagctcaaataacaccttccccaaacaggcaattaagtcttaaacactgcaccttttaaaatttctttcataagaagtctatgaattggaaaatattgagcttacctgcttactttattgttgtacctggcatacagtaatgtcccaagtgctattaggcgttatctttccatcatatgatccttctactagaatataagcctagtgaaagctggaactgtgtctctgttgtgcccaacatcaaacagtgtgcccattaaatatttgctgagggaatggatgcattgggtaagtactctgtgtcagccactgcactaaagcattttatatacattctcttgagtccctataacatctctctgctgtgggtcttgttattagcagatggggaaacagtgtcaaatagggaaagtaactgctcaaagccatactgctgagtagtaggagtggagccaagatttaaacactgatcttctaaatccaaaacctggactcctcacttttatactatcttgccatggatttgtatgatcttttcttgaccgaaagcacctgctttcttattagcttctgcacatgttttgtttatcctgatggaggataaggttcctgaaggcggaggccatgtctcatttctttttattgctcacaggctgcctatcattatgcttagcacagagtggaagatgaatgtcattattttgagcattgcttcactggcgtgaaggaattc

SEQ ID NO: 199199 - DNA, 1000 bp, Homo Sapiens
aggcagctgtgggaagatcggaggcagcgtgtgcgggcacgacaagtgcaaaggccctgcagtggggtgagtgcagagcatttgagaacagatacaggagccctgccccactcctggccccggccatttggctaaagtccttggtgggttgtaccaccttaggaaaggcctgagcctcacgttccttgtctgtacaaccagaggcaggaagaaggagcctgtgagcagtggccggggcggaggacaggcctggtctgcaggagctggcgggcaagggaccagcggtgcccctgcccagagtagtcatcctctgagatgggagcggtgccgcccccgccctgcccctttgttctttgtggttcagcctgtctgcatgtcctcctcgtgactcctgtgtccgtccttgtgaccaggcccctggagcccactggggaagagggtgactttcctccgatctcggggaggtggctgctgcttcagtgacaccttcatgcacacgttactatggaaaccagagtgccgtgcttgcctgtatgtgagcgtaggtcgggggagcagccctcccttccaaggagcactgagagggactgtcacccccatccagtcacctccacatccggcacgctcctagacaggagacactgccctctccccaccttcgtgcattcaccacacactgggcatgggccctgggactctgggctcagacctgtccctgccgtccagggagtcctgtgctattgggggtgactgctagggcgacagaggatggacagagggatggaccaaggggacgggaaggggaagaagagaagcaagtcctggggtggactgcactcccgaaaaacctcatccgctatttgcccgtttcacaaatgagaacaatgaggctctagaaataggcggttcgcacaaggggctgcagtggggtcaaataaggccagggaagcagctggcaggctgtacagaggttttttatgttttggctttgaaagaattc

SEQ ID NO: 199200 - DNA, 1000 bp, Homo Sapiens
agctattaccaagtgcttcttatgaatagttattttaagatgcagctttccagaaatactgctttcttaaacaaagtttcattccagaaaggaaaaagcctttggccaatttagaagaagctttgtaccattcctgggaactgctcagcatctggggttgctggattttaagatggagttctcctatctaataaagctgctatgatcattgaacacagacacatgtaagatgtgttggggccttggggacgtaaaatgatagcacgaggagggacaggaatctaaatgctttgtcgcacacaccagagcataaataattatcaaagaatgcttaggggaatttaatttaattctgcatgtaatgaaagatgaaaaattatcttttccattaacatcaattgcatcaaaatcagtatttttataattttctcaacctattttttttctttcaactggcgaagtatcaaaaggcaataaagagaaaaaaagtacttccagatggttggtctaagcaaattacatgcaattttcctttaaataaaatggaaaatatatgtaatagaagccctgctgaacacctatcaaatcaaaatgattactgtctgcaccgttgtaattcactcactggtttatggcctcactctatttcaaagagtttcccaaattcatataatgttctgcagtgctagagctggcatcagatctctgatgtagctgaaagatgcagactgtgaaatcttccattgttggacaactttcttatttgggacatagttgagaaagctgagcagccaaaaaataaaataaaataaattgtcctttcaaaggcagctttaaagtcgcactcactcagctcaataaactctgtgtttcaggggtaaccacaaaaagagaagactttctacttgttgttccaagtatacattttacactaaaccctatgctatttagagagatattggtaaaaaattatggcagtgggtcatcagatgaggaattc

SEQ ID NO: 199201 - DNA, 1000 bp, Homo Sapiens
tttgttcagtctcatacttgtgttaggcactcccctaagcgtctttcacgtattatcacaatacatgaaatacacaaaaggatgtgttaccccctttttacatggaggtaactgaagctcaaagagggttaagtaactagctgctatatgatggagctggaattagaatccagccagcttactctctttttattctattcacttatatttatgtatttttcttttttgagacggagtttcactcttgtcccccaggctggagtacaatggcatgatctcggctcactgcaacctctgcctcccgggctcaagcgagtctcctgcctcagcctcccgagtagctgagattacaggcacaagccactgtgcctggctaatttttgtatttttagtagagaaggggtttcaccatgttggccaggctggtctcgaactcctgacctcaagtggtcctcctgccttggcctcccaaagtgctaggattacaggcatgagccaccgcacccagccatctcttagctattatattttgcaacttcccagaagtggtcggtgaatcccaggctctcatgattttaaatcagacattttgtatttgattgtatagtggtgggtaaccaaatacaaaagaaaaatttcttttcacatggcagtggaaaaactggcctaaactaatcttttactaataatgacctctaagtagaatgataggctctaaactggtaggggcagttcagttgactgttttcgtacaaggagtatggcttttgttcaagggaatgctgtattagttgtgagtagttggggttttataaatacagagtgtgccagatgttgttcatctttggcacttctgttttaaggaaatataggcttgcctcttggggtcagaaatgaatacttcccccctttgctgttgtgtacagttttcttcatatgctacatataaagttgcctttttaactttgcagcctcctgggatattcactgtagagaattc

SEQ ID NO: 199202 - DNA, 1000 bp, Homo Sapiens
ttgaccctttaagaagattagtctgttcacagttttctcctgtgcttataaaccttcatgtttcctgcctatcctctcatcttttaagtctctcctaattgatcttcaaagcattgaggctggcttgtgctgggtcctcactactccaggccattcctgcttccccttccctggtacctgcaaggcctgcctccagtccacattttcctgtgaagtttttcctgaattcctcaagttctttgatcaccacagcaatcctatgagcttatagatattttccccatttcacgaatgtggcaactgaggtccaagttcagacagctagatctaaagacacagatcctgcacgtcatctccccaacaagacagacactccaagaaggcagtgaccacatctttccctctagtttaccatacaaaggacagtagggttcttggcacacaggtgcttagtaatggtttttgaatttgatttcaatttgagagtagattaacagcatttctgtagttaggagagcagccagttacatattcttttcttgggagtttagacttgcaggtccctctgaatgaggtaaagccaggtcctcctaccccaactaaagtttaaagatgcaggggagatgtcaaaagatgtgatctgagatttctgcaatcacttggaaactgtactggctaattaagatcataatagattatttattctttcattcactcatgtttatgcgtgtgttctttcactctttaaccattcagcaggtatttactgagcaactgaaacttcattcatattatatgagttattacatgataatatcaataagaaaaattatgtgaaagtttattaatattggctatgagggggatgaaagcagcaagccaaaaaaaaaaaaaatgctgtattttaaagaaagtcaaaggtagcttcatccatgataaaaagggtatgtaaagtatgatttctcttatataaaattttatttgtatagacaaagaattc

SEQ ID NO: 199203 - DNA, 1000 bp, Homo Sapiens
ataatactcatgtaactattgttagcaacagaaagcatgaactccacaataaacaaagttactgttatgactttttcttgatgataaaaaataagttggtaattaaaatgaatgaatgtagaatgtttatttttacctaaatatttaatacatgttaattattttgacttctaaatatgttaccatgtgtctagctagttgatgcctttccaaagcagctttacactgaagtgttaaagtgaaaacaaaaagtagtcagtaacaaagcctgcaatatgacaatgcaatctggtgtgtgagaggacttccaggaaaaaagccattcattctttgagtaaggcaaaatctgaaactcggtttttctcacttgacagtagatcagtataatcaaagtaaagttctctttggagagctgtgaacataatggaaaagaaagtcacttattcaccatgctataatagaatattttgtgataactctcattttgaagcattgccaaggcttttgtaagaagcaatggaaatgttgtgttagtatgaaaaagaaatgctgattctctctagtaataaatgaatgacagaattctttattgccattgcaaaaaaatttatactaacaagtattcccatataattcatggcttgacataaaacattgtattgtcttatcaaataagggagcattttaatctataataaattttactttatgaagtaaatcttcctacagtttttatagatcattggtaaatgttataatccgtaaaatggatttttaaaaagttaacaattagttttcaaatagtgtgattataaaaaataagttgtaacttgtagccatattcttaaaatgataatctggagaatttaaaaagtgaaattctttatgaaaagaactttcttagtagcttcagtttcttaagatttaggatgcctcatatgagtgttgcttaggttatggaagaaaaataattttgccatgctccatttagcaagaattc

SEQ ID NO: 199204 - DNA, 1000 bp, Homo Sapiens
gcctggcctccccaggaaagcatacgcgtgttcacatttggtaatagagtgtttcaaggttcaggaaccttccagtacccctgtacctgcctcacagcttggcagaggcccaggagttgaggctgtgggccttaacagtggagtgtcctgcctgggtggcctaggacagggatgggccttccacagggtttcttatacagaccctggagctgctgggtgtgtgcccggtgggggccttttgctgggtggcatggcgtagacctggcccagagcccaggagaacgttctcagccccctgccccctctcttggcagcttatccaggcgtgcaccatgcagcagctgcctgtgccctatcaggcctacccccacctcatctccagtgaccactacatcctgcaccccccaccaccggccccacccccccagcccacccacatggcgcccctggggcagtttgtgtctctgcagacccagcaccctcggatggtgagtcggcatgggtccgatgctggagggagatggcgtggggggaggcagggtgaggacagcctcgtctcactgacttgctgacccggcgctggttcttccagcccctccagcggctcgacaacgacgtggacctgcgtggggaccagccctccctgggcagcttcacctactccacctctgcgcctggcccagccctttccccgtcggtgcccctgcactacctgccccacgatccgctgcaccaggagctgtcctttggtgtggtgagtgccaccccgacccccacctgggctccagggcagctgggaggcagacccgctgggccgacctgcatctgggctcccaggcagctgggaggcaggcccaccgggctgacttgcacgtgggctccggggcggctgggaggcaggcctgctgggctgacttgcacctgggctccggggcggctgggaggcaggcccaccgggctgacttgcacgtgggctccggggcggctgggaggcaggccc

SEQ ID NO: 199205 - DNA, 1000 bp, Homo Sapiens
ccagtccaccactgatgagcagcttggttagttccatgttttcgctattataaatagtggtatgatgaccatatgggtgcatatgcttttggtagaatgatttattttcctttgggtatgtacccagtaatgtgtttgctgagtcaaatagtagttcaactcttagtctttgagaattttccaaactgctttccacagtggctggaacaatttatatttccaccaacaccgtataaggattcccttttctctgcagcctcgccaacatttgttattttttgacttttcaacaaaagccacctgactggtgccagatggtatctcatagttttgatttgcatttctttaatgattagtgataatgagcatttttgaacatatttgctggctgctagtacgtcttctattgagaagtgtctgtttatgttcttcaatctgttttcaaagattttatacacgtgtcctggaaaagtgctggccacaaaggagatgcctgataaagactgtggaaaaaaatatctgaacatacagtcataaaaaagaagagaggtatgtcagctaatgttaatgatgttggaattatcaacacacagatggtaacttgctattttgaaaggatgaatttcctctgaaaatgagatgaaaatagagtccatgcagagttctgagaatatcatcatttaagtaatgcacagacgaaggcgataatacactaaacagcccttaagcaggataaataaaataaattcatcaccttgggcacaaaatagttaaattcacgtaaaccaaagataaaatgaaacactagaaagtaaaaagaaataagatgacacattacatacagaggaatgaagatatgaaaggcagctaatagcacattaaaaacaatgcaaacattgtcagcagaacaaatcttctccaagaaatgttaaaagtaattccatcaggctgaagtaaagtaaaggtagttaaaaaacctaaattttcaggaaggcatgaa

SEQ ID NO: 199206 - DNA, 1000 bp, Homo Sapiens
aaagcacaccaaaagaggttgagaatgagactcctgggtcggttgttatttcccctagtttggattgtgtgttactgtatgcatttgtgctacacctatcacctactctttaggtgggatatttcttcagctgaatgtgggagtctcacatgtgagtatgttttcaaagagaggctcccaaatgtgtccaccataatttggatgattaggaggtggaagaaggtgaggaaaaagtgagtcaagaggagcaaatgagcacatggacagtttccagtgggggcatacttagtattatagcttatcttgttactcacaaagtaaagacatcaatccgtgattgatcactgattgtctatagtggtatgttttatagaggtattttctccaaaggtggtcactattcatgctgcaaatgcaaagtagctcctgactagatggggtgttggaaggtcttctaagctcccatgggatacaggaaaccaaagccaggtataagagattgctaagaaaaagaacatatcatggaaaaggaaaagaagaacaaaataattggggttttttaagctacaattgtgatgtttcatctctggagagtaaataaagatattctggaaagtcaggagcagtgtctactccaaagagaccaagaaaaatactcaggaactgtcaagagaaaataattctgttacttaccacaggaagaagaaatgtttcctcaccgacctcactgagaagaatcagcaacagtagcagcagaaaccccaccaccacaaccttcaccatcaccatcaccacaataatcatcatcattgcaaacattgattgactgttactatttccaggcactgcacagacctcagtgagaagaatcagcagcagtctcagcagcagcaccaccaccgccatcaccatcttatcaccaccaccaccatcatcactaacatcaccagcattgccatcacaccaccaccataaccatcatcatcactaacatcaccac

SEQ ID NO: 199207 - DNA, 1000 bp, Homo Sapiens
aggagtttggaagaagttgattctatctctcacggattttaggaatttaagcctccagtggagaaagtaattgcagacatgctggaaatagctgaagcactagaattagaagggaaagctaaagatgtatttgaattcctgcaatcttacgataaaatttgaatggaagaaaagttgcttcttatgggtgggcaaagaaagtgcttttctgagatgaaatacactcctggtaaagatattgtgaacattgttgaaatgtcaacaaaggctttgaatattacataaacatatttgatgaagaaacactgggttttagaggattgacttcaattttgaaagaagttgtactgtgggtaaaatgctgtcaagtggcatctcatgctatatggaaacatttcatgaaattaagagtcaatctatgtggaaaacttcattgttatcttatttttaaaaattccatggctaccgtagcctctagcaaccaacactgtgatcagtcagtagccatcaacatcaaggcaaaaccctccaccagcaaaaagattacaattcactgaaggcttagatgatcattatcattttttaccaataaagtgctttttaattatagtatgtattttttgatataatgctattgagcatttgataggctatattatagtataaacctaatttcatatacactgggaaaaaattatgtgactcgctttattgtaaaataatctttattgcagtgctctggaattaaacccacaatatctctgaggtaagtctggattagatatatgtatgttcttcatgtatgtgtctgtcttctaagaaaggatgaataaataaactcttcctgtatccatgctaattgaggatgtgtaaagggtagcattttgtttattcactctctctgaaacttaggaattgatatatacatattcataatgttatatattaaaaattaatctgaaggttcatatttctctctttgaaactcactctggaattc

SEQ ID NO: 199208 - DNA, 1000 bp, Homo Sapiens
ttatttttgaagcctaagggcaaactacagtctgaaaaaaaatcccagtaaatgtattttgttttacactttggggcaggtagttgtcaaccactaaatattatatctgataataaatttctattaatttatgcaacaatttcactgcataaaaattattttgttaagaggcaatgaattctttataagacttttttacagctgaaataacatttcagctaaacaaaacatttggtgaatattgatatttgattctaagttagcatacatatatatgtatacatatacatatatatataactttctgtaagttaaaactgttctgaaaaagatgtactaccttaatgataaaatattttccaacaaaggaaaaaagtcaaaaccatgaatcatttgtatcttcactagcccaggggcatcaccatccaatttaattaccagagactaaaatcaagacattatgctttttgtcaaaaccaagaatcacttgtatcttcactagcccaaaggcaccatcatccgatttaattaccagagactaaaatcaagccattatgctttttttctttacttcctacctgctctccaagacgttgagtcatttaccaactcttgttgaatgtctctgaaacatctctccagtatgcctacatctctcctttcccattgtactaccactacatcagacctttctcttttttttttttttacctaaatgttttaatagctttcaaactggcctattttcttgcccagctaaaattagttcttatagcaaccagggcagtcttttaacaacaaaccaaacaatattgataccttactcaaaactttttaatagcttcccattgccttagaataagatccagcttcttaaattggaccaccaaatgctgtacgatctggcctgccctcatcttgtactacttccaccactacatcattcttgaacatgacagctggtgcctagcattgcactaactactgcctcctagaattc

SEQ ID NO: 199209 - DNA, 1000 bp, Homo Sapiens
aaatgcaaatgtcttgagaaagattattagactaagattttacaagtaatgttcaccataatttatctttttagaaaagataatcattcaaagggtttttatttttagtaggcgtttagataagcttagttgaccttttcccaaatcttgacaattagtgatgaaacaagatattccctgtgagaagaacacagggtgtactttgctgccctaataagacaaacaggaaagccaataccgggtagattgctgtgaaggcaattaaactttgaaaagggtgacagtgcaacctttgaccaagcaaacagcaatctctgtaccaagtagtgctttgatttgccaccagtccttttattttcacctgtgaaagagctgaagttgtttttgctggatacatttcctatttctccagaataaagtttatttttgagttagatattccaaagccttcaggttggggtcatcttttacatttgtagagtgttctggtggctgccgtgactaagctagaaatcttgttgagacatgtgttgtatttttacagatacaacaggctgttaccccaacatgaggggtaggctggagaaaggggatgcaaaggttagcggatggcagcagacagaaaatcccgaaaagaatggctgggagaaaataacagagacctagcaatgcaaagttcttcaaagccagagagacgatgattctgacctgtttttagaaggaacagtgttggccttctattgcaattgttggttgcttgctttgatgttttcttttaaaagggtgacaccatttccttagaagaccagcccaaagttctgttgatcttagcatattatactgattttttttcaagaaaaaataaaaattgggttaggcaaaatgacaagacaacaaaatgtcttgctggttaaagtatcaccaagagatcagagaactagaaaactcattaataattcctggaagatgggagagttatctgtcaagagagaaagaattc

SEQ ID NO: 199210 - DNA, 1000 bp, Homo Sapiens
tcctctcatttctgaaaaatttatacaaaaatacattggatctagttgaatgtaatcaaaagaattgggggttttcatatgtgtagttgaaatgatgaaataaaaggacagagtttgcctttggaatttgttgtaacttgagcagtgggagtcattcattaaatttattcattcattatattcattcattaaattatttcaaatcgtaaccttgtttattgtttggaaaaaagtgaagctttgttcttgagtactttaaatgttgtttggtttgataattacctatagaaatgtagagcttgaagacatttttggctgtgccaggtaatgataaatccacttaaagggaactcaataacttagatctaagttttcctgaaagaaaaaaatgtatttttcctctgcattcaaaatgtagaaacaaagtatgtttatgaactttggcttttttgcttaggttattaaaacagttattgctagatgcagaccactaaggtgcactttaaaaagagagacaaaatacggattgtggtcaaaatgtaaagaagaaacgtaaaggaaaaattcttagctttgatattctagaccattattggaattttgcctcaacacttttcatagttaattaagaaatgctaagaaaagctgcttttacatatgtaaaatttgatagagaagagcaaatgtttttgtatttcttgtgagtctatttttgtggagaactatttccacctttgagtatatatgatagaaatagaaggtggcctttagaatctgcttgcagattttgaattaaggtaaataaaagataaaagctactttggttggcacaaaagtgaaactacctcagtggattatatattcataccagcaatttcaaggaagcagtggaagaacccaaatataatatgtaatgtcttaggtattaaaaaatgcatcacctctgttctttttgaagttgtttttttacttactattcatttgctagataattgaaaac

SEQ ID NO: 199211 - DNA, 1000 bp, Homo Sapiens
cgtactgctgtcccgaggcacagtagactcttgggtttcttggtaaaactcatgggttgcattggtgatttctctgattgttaaatatagggtttcaattaaacactgtcacctattgaaggctctgagcttgaggctgtcagagcacttgtcagaacgggcttaaaggtacaggggctccagaataacacttccttgataaattgaacaggatggaaagagaaatgaaatgcaaataactttaccaccataggattcattatgatatgatgccctaactgcttaccacataaaatcaccacaagtcacatgcaaatcatcttgtaatatcttgggaagccctggacttggaagtatcctatcagatcagagagataacagtggaactctcggctggttatgtttctcttcattgtttgggagataagagaggggaatagcaatctgaaaagttcaaagataaatttctcacctcataattgattatcatatttgcctttttttatcttttttatttcaaccaaattatcttccttgggtgagtgggggaaagaattgtgtctgcacacaatggtggcattccccacaatggttggactatgactattctgattctatttccaatgtattcttccttcctttccttctagtccactattttggtggcctttgccagccaggagagcaataataaggcagtctgaaaacatgtctaaaccaatcaaatgtttgcatcatgtgtataaatgcatttgcattcatacatgtttgcacaaaacatttgctgtgtatgtaattgcttatacatatttgtgatttttgtgggcaagtgttgacatatctgtgtctttgtcatcatgtgtcttgctgttatatatgtgtaaaagggagtgtgaatacgtgcatgtgggctttatcacccctgaaggacagcaaccccacagatccatgtccgtaataaggaacaaaatatggagtctctctaacaacatttgaattc

SEQ ID NO: 199212 - DNA, 1000 bp, Homo Sapiens
gcccagagagccgggagaccgcaactggaggccacgcccccccatcacgtcaggagagtttgacccgccgagattcaccaccttcctgcggcagagcccgccctcatgctttctctgattggcccgaggcgctgccggccgaaccccgctcccaacccattcttgagtgcacttggagagatgtttcctccaaccaatccagagagcgttctctccggactttccaacgattggatggcgaggataaaaccgtcgtccaatgatcctgcagtcaccaagttgtcgttagcaggggttcacggcagtcgttttcttccgtttgcttgtgtctttggaataaaacgtccaaaaatgggatgtatggaatcttgctataggagttcccaacttacagcgatgacgttcaaggttttttattttattattatttacttttgagacggagttttgctcttgtcgcccaggctggagtgcaatggcgcgatctctgctcattgcaacctccgtctcccaggttcaagcgattctcttgcctcagcctcctgagtagctgggattacaggcgcccgccactatatccagctaattttgtgtgtgtgtgtgtgtgtgtgtgtgtgtgtcgttctgtcgcccaggcttgagtgcaatggcgtagtataggctcactgcaacctctgcctcccaggttcaagcgattctcctgcctcagcctcccgagtagctgggattataggcgcctgccatcacacccggctaatttttgtatttttagtagagacggggtttcaccatgttggccaggctagtctcaaacccctaacctcgtgatccgcccgcctcagcctcccaaagtgttgggattagaggcatgagccaccgcgccatgccgctaatttttgtatttttaatggagacgggggtttcaccatgttggccaggctggtctcaaactcctgacttcagatgatccacccgcttcggcctcccgaagtgctgggat

SEQ ID NO: 199213 - DNA, 1000 bp, Homo Sapiens
cagcaagtgaaggcatcaggcctggggctggttctccacagcccaaaccagcctgcaagtgaacaaccagggactgaacctttctgggacctcctgcaatcagagctttacgaagtgacttaaatcgctggggatgggattcagtgatggagcaagtcaaacatctttatctgcccactgagaggagaaaagttggagacacaaatggccctgaaagtcacaagctgaaactgtttgtctgtttttttcccctctggatgaggaatggctgagcccctgagcatgtgtctggaacttatctgggaggcttactccctttgcttcaaacccaattttagaaaaagttgccaacaatatatgactacggaaagtagaaaaaataatgtggggagattcacgtttgatttcagaattatcagggtcacaaggatagagccagatgttgcccatcacttattacatctttcggaacattctgcagaaccacatttctgccttttttctctgctgtctgcattccagacaccctcttagctcacacagtgcgccgagaaccttggggctgtggtcaccctgctgagacagcagctcacaggaaccctttggccacatccgcatccatcagtgtccacaacatctttcgtttcttgagttagatttattttatgataagcggctcaggcagaattccattcttgcttaagatatgcctcaattagaaatcaagagatctagccattggtttttttttttgtatcatttaaacagttccaaaataattaatatgtggtttgattcatttttgtcactgattcacttattcagcagattttaatcactgatatggtttggctgtgtccccacccaaatcacatcttgaactgtagttcccataatccctaagtgtcataatcccataatccccgcatgaccaggagggcagtaactgaatcacgggggcaattacccccatgctgttcttgtgatagtgagagaattc

SEQ ID NO: 199214 - DNA, 1000 bp, Homo Sapiens
ggtttttgtgtgtttctatttaaagacatcttatttaatacatattattgatgcactgtcatggaactcaatgccaatggaactataattcgtgtctgagcaaagcttatctgacacatattggcgacatcacagccctcttgcacttaggaacactatacagctcttcaacactacacttgggggtcatcttaatgaaaacagcaagaaaaagtacaaaaagcaaaaaaaaaaaaaaaaagtggcaaaacatggaccccaaaaagaacactgtgcatagtaggagagctgagacaggaaggcagagtgtcaccttgttcagccttatatgggaaggtgtgtgttgcgcaacccaaatttttcaccactctgcatgtatttgtgagtgaccctaaaagtgcctcaaggattaatttggtgattacataaattttagcaagtaggcaaattctcaaatatgaaatccacaaataatgaggactgacactgtgtcatcttgtattacatgtgattttgcagcttgcagcccgcttacatgtagatggggataggtagcatggaagatctggagtgaagaggcctgggtttgtatctggattggccaattattagttttgggcaaattaatagaccctctctattgtagtttcttttgtttcttcagctgtaaatggggctgggtggagggtcaattcctgcctcatagggttattgtgaaaattaaataaaataattcagtttgagtacttagggtagtgtgagcacctaggaaatacccaacaaatctttgtagaaaaataattcagtttctgtatttaggatatcgtgaacacctaggaaataaccaacaaatctttgtagaatgaggttcctatgttggataccatgatatgctcttctgccctgcttctggaagcaataaccatctccttgttgagttcaagtggagagggaggcagggagggtggtgctcagagaagaaatgttacagaaggaattc

SEQ ID NO: 199215 - DNA, 1000 bp, Homo Sapiens
cttgggcagttctttatagtagtgtgagaacagactaattcagtctgcatgcatcccagttgatttatccattcacctactaaaggaacatcttgctttcttccatgttttgacaattctgaataaagctgcttaaatattcatgtgcaggactgtgtgtgatgttaagtttcaactcatgtgcaggattgtgtgtgatgttaagtttcaactcatctcggtaaagaccaaggagcatgattgctgcagcttttgctttttaacctcactggattatacttttacccagatatcagctgtttaacatattaatgtattaattcactcagcttactgattcagcaatcatttcttggtaactgatgtttaggagacacggtctgggtgttggggacatgacagtaagtagagtgggttctgcccactggcacggatgtcagggcacaaggactggagaggatgatgcacacagtgagaggtgctgggagtcacacacatgctgactatggctggctgaccccgtgacagggcgtgggagtaaagaggagtcagacaaactcctcagttttcggtcctagcaagtgggagaacaggggcacatgcaggcatcgtgctgcagggagatgctcctcgcaggacccaggacagaaccggctgccagggatggcagcgaccatgatggctgtggtgggacaggcagacagctatcttaccaacagaactcatgctgcttatatgtggcgaggagacaaaggaaaaaaagggaaggaccaagaatgataccaaaaaaaaaaaccaaaaaagtttgatattcaaaactctatcaaggacatttcccatagaaactggacttgaatggaccttagagaactggttggatttactgcctaggatggaagggggtgccacttgcacgccaagcccaatattgcagaggggctgattggagctgtgcactgtgaaggatgagagctgggcacacacaacaactgaggaattc

SEQ ID NO: 199216 - DNA, 1000 bp, Homo Sapiens
gattgtgaagtcaatagttgtttcctgtaaggaatctttgttgaaaggtatgtctgcatagagtagaagttctcaaccttggctgcatgttagcttgaagtagaacatttgggcctagacagggtgtattgatctcattcctgaccctacccacttccctgcagaaaatggaatttaaaggaaaaaaagtttaaaggaaccccagtacttgtgctctacttatggagattgtcataaaaatggtctggggtgggcgccaggcatcagactacagtgactttcttgctttattcttagggattttctgatttccttttttttttttttttaacctgatgaaatagtttatttacaatttaaacgaataaatttcatattctacaacacatataatctattgactaaatgtaactaatgatgaacctccatacaaacaaccccactaaaaagtgggcaaaggacataaacagacacttttcaaaagacatacaagtggccaaaaagcatatgaaaaacagctcaatatcactgattagagaaatgcaaatcgaaaccacaatgagataccatctcacaccagtcagaatagctattattaaaaactcaaaaaacaacagctgctggcaaggttgcagaaaaaagggaatgcttacacactcttggtgggagtgtaaattagttcaaccattgtggaaagcagagtggcgattcctcaaagagctaaaaacagaactaccatttgacccagcaatcccattacattcccaaaggaatataaatcattctaccataaagatacatgcacacaaatattcactgcagcactattcacaatagcaaagacatggaatcaacctaatacctgatatggtctggctttgtgtccccacccacatctcatctcaaattgtaatccccacgtgttggaagaggggcctggtgggaggtaattggatcatggggtagatttccctcttgctgttctgttgatagtgaattc

SEQ ID NO: 199217 - DNA, 1000 bp, Homo Sapiens
ttccacaatgcgactacacctgtcctatctaaaatggtagccatattaaacatactttaaaaaattaaatttactttcttagttacacaaaccacatttcaagtgcgcgagagctacatgtagctagtgactagtgtattggacggtacagattgtagagcagttccttcatcatggaacattcaattggacagtgctaaaccaagcttttctttctagagtacatatttgttcaggtcattccccttgagcacctcagtatgaaattcgcactgcttaacgtgtgattctggcccagtttgcttgatccatcctgaaccatcccagctttataatctccccacttttagctcagccatatgatttattttctgcttttccaaggggaaaattctcattattttgaccttgtttgcaatatgttgctctcaacttctgaaatgttctctaccctctgatcatgcctatacatataaatacctccagactcttcaataattgcccattgatatcaggtcacactaaaattctttaacttgttctctagggcttcatatgttgttttgttttgttttgtttttccctcactatattcccggactcatattaaatagtgattcttcactgattggggttcttgtagttctttacatgccttcctcaccctgcttcctcttcccacagggttctttcacctgctgcctcctctggcctcaactctaatatcccatctttctttactcacttaactccatttatttttcaaacgtcaattaatgtatctcatcatgaaagaagctcttattacatcaaatgtcctcagtaagacatcatagtaagagctcagtaagatcacaataaaaatatatgatggtgaatactggattatactctagattataattattttatgagttccataagggatgtagctctagctattttgctcactattttattctgagcatctagcacagtgcctgggacatagagggaattc

SEQ ID NO: 199218 - DNA, 1000 bp, Homo Sapiens
ggtccgtggcttcacttctgaggtcagtgagaccacgaacccaccagaaggaagaaactccggacacatctgaacatctgaaggaacaaacttcggacacatctttaagagctgtaacactcactgcaagggtctgcagcttcattcttgaagtcatagagaccaagaacccaccagaaagaataaattctggacacatggagatcgtgccattgcactccagcctggaggcagagggagactctgtctcgaaaaaaaaaaaaaggaaccttgcaagaagtaaacatgttaatggtgacaaccaggattgtcccttgggggtaggattactggcaattgttaaggcaccttagacttttccttcattttctagtttcccactgtggggttacattactttcatgatgtgaaaaacccatgctacttgccaatgacttaaattatatattcgactgggcacagtggctcacacctctaatcccaacactttgggaggctgtggtgggcagatagtttgagcccaggagttcaagaccaacctgggcaatacagtgagaccccatctctacaaaaaatgtagaaacatcatccacaaaatatgtagagacatcctcatgccggtagcccaagctactcaggaagctgggacaagaggttcacttgagcctgggaggcagaggttactgtgagccaagatcgcaccactgctctccagcctgagtgatagagcaagactctgtctccaataaatgagtgaatgatatgttcttgcagtattggacctgttggcatctaaatatctcacctcaaagattatagaagtgctgttctggatgttgctatccctgtgaaaccttctccaacccccgccctccctccttggcttaattgcggatactgtttccaagtaaagcaaatttcatttctccaaattaaagtgacatgaagcaggtttttcaccctggtcagcccttgccacatagttgggatgccagaattc

SEQ ID NO: 199219 - DNA, 1000 bp, Homo Sapiens
tcattataaagctccccatcaatctttcacttaattaatggttttagcagctaccaatgatcactgcctacacccattaattcattagggcctacggaatggtgatttttagactctacactcattctgcatttataagctgtaattcttccattaaaagtaacttttcctactcaactatttgtgtattctgaaatacaattcaaaccaggaaagcaggataaatgcttgatttcttctttttatttaaacatcttcagaataatgagttggtgtcatagcaccctcttaagatgaccaatgaggttttcttttttttcctcaataatatggactcaagggtttttttttaaataaatattttatatgtctaaatccattgtcattattcattttttgcccactgtatatttacttttattaaagcataatttaatacagtccaatgtacagattgccagtcttcagtctgatgaatttcacagtctgattaatatatacccctataatcacctctgaaaacctgacattggacatttctgttgcctgagaaagtccctttttcctatcagttctttcctcctccccaccccacacttcccgccccagcaagcatttcctgatttcttttttttttttttgagaaggagtcttgctctgtcacccaggctggagtgcagtggcacgatcttggctcattgcaacctctgcctcccaggttcaagcaattctgcttcagcctaccaagtagctgggactacaggcgcctgccaccacacctggctaatttttgtattttagtgtagacgaggtgtcaccacgttggccaggctagtcgcgaactcctgacctcaactgatccaccctcctcagcctcccaaagtgctgggattacaggcatgagccaccgcacccagccctgatttttatcaccatagattagttgtgtctgttccagaatatcacataaatggaatcacatcttatagtctctattgta

SEQ ID NO: 199220 - DNA, 1000 bp, Homo Sapiens
agatgcctgtactgtgacgtgatgctgaagaacctggcacttttatcttccctgggttgttggtgtggagtgaaagatgaagaggcaccatataagcagagcatttctatacaaagagagtctcaggtcaggactctgagggcaggggggtctcccaagaaggctcacccctgtgaaatgtgtagccccatcttgggagacatttttcacttggcacagcagcaggaaactcatcacaagcagaaactgaacaggagtggggcatgtgggaaaaaactggatgacactgaaaaccttcatcagcaccagaagcagcacattggagagaaactcgagagaaggggtgccagagaagtgtcatttgtaaacagctgtaaagtccatgtgtcacaggagccatttatctcttatgaggttgggaagaacttcttgcccagcttgggattacaccagcaagaggctactcacaatgtagagaagacaaacactgaaactaagcatggcccaccctttcatgagggaaagactcattacagctgcgaagaattcataaaacctttttttttttttttttttttttttttggagacagagtctcactctgttgcccaggctggagtgcagtggcaccatttcagctcactgcaaactccgcctcccgggttgaagcgattctcctgcctcagcctcctgagtggctgggatcacaggcgcctgccaccaggcctggctaatttttgcatttttagtagagatggggtttcaccacgttggccaggctgctcttgaaatcctgacctcaggtgatccgcccacctcagcctcccaaagttgctgggattacaggcatgagccaccgtgtctggcccacaaaacctttcggcactactcactcacttgttccaccagaagcttttcactagagaaggatgttacgtgtgcagtgaatgtgggaaatcctttagcaaatgtaataccttcagtaatcatcagtgaattc

SEQ ID NO: 199221 - DNA, 1000 bp, Homo Sapiens
tttgttttgagacaggatctcactttgtcacccagggtagagtgcagtggtgtaatcatgggtcactgcagccttgacttcctgggttcacgtgatcttcccacctcagcctcctgggtagctgggactacaggtgtacaccaccataccctgataatttaaaaaaaaattttttttttaaatagggttttgccgtgttgcttatgctggtcttgaactcctagcctcaagcaatctgcctgcttcagcttcccaaagttctaagattacaagcataagccactgctgttgaagctctaaatggcattttttcattttagtccttgttcacctcagctctagaatttctttttttgtgatttctgtatctctgttgaactttacattttgttcatatattgtttatctgattttgacgagttgtatctgtgttctcttgtaacatgctgagcttctttaaaacagttattttgaattctttttcagttaattcatagatctccttttctttggggttggtcatttgaaatgtgttgtgttcctttggtgatgtcatgtttcttttctatgcagttattcttggcttttctgctctactcggtggctgcatctttttaactggactctgggagttctcccagagctattttagtctgtggatagttgttaaatcattgtttttgtgggagtacaagggctaggacctcctagtccaccatcttgatcacattacaccaagaatcagtccactctgagatcatccgtcttctggccaccctttggtttacattttaagaaaatgtggacagagctgtaactttcctctcctctctccagagagctgcctacctctctggagataggtattttggctattcatttcctaggttcaagtttatcccaagacttgtacagtctcttcatcactgcagggaggtggcctcttatccccttagcccagaagtttcagattcccccaggattcggcagttttgaattc

SEQ ID NO: 199222 - DNA, 1000 bp, Homo Sapiens
ggcatggggggaactcagcctggatggagaactctccgctgtcagaagcacctccagctccccagcaagagggcacttccgtgcagtcaggcagaacagcctgggcactgttcacgaaagcctaggagagaaggctgggccatccctgtgcgacgttaagcatttgtgcaggacacaaggacatattccatttgaaccacaggaacaaacgggaaaacaaatttgacatttatctttgatcagacacatgtagaaagggctaagcctcatcctacacacgccctggacgtgtggggctaacgcctttgaggatttcctacttcttccaccatgaaacccacctcagacaggaggccagactccaggaagacagtgggtactcagggtggagacagcatgttcctaaacagcaagttaggactgagaggatacatggggagggcctggggccaggcagtagcgaggattccaacccctaggctctgcaggctcctgccgcccttcttccacccgtggagagcacagcgccatcggctctactgccttctgctgccatcccagggctttgctggctcacatggtgcattttcacgattccaactcaaagtgtgtttctaatcatcacttgtggaaatttacccagaggatgactaagtgcacagtacaacctgacttgatctgatggagaaaaagacgaccaagtggaattaaccatttctctcatctgaggactgggcacagggccggctccagcgaggtatatgcagcaacgatgggaaacccaggcaggagaccgaggctgagcctccagaaccatgcagaagcacgctggaggtccaagcttctggaagggtccagttcctcccaacttcccaaggaaaatcttatcctcctccctccttctctcaaaataccttcttcccgtttaaattgaatcaggtatttttcagtcctgacatcatatctgaaagtttcaaagacagaaaaggtgaaagaattc

SEQ ID NO: 199223 - DNA, 1000 bp, Homo Sapiens
tacattgcttaagatgtttcttctataagtatagggtgaaagtgcagataaatccaagtgtgcaaatggtatttcacttcattattcctccttctctgcccctcagtttatacacctgggcaaacatagatgtacagacatatctttatgtagttatgtatatctttacagcttgatgcccgagtctcagactcatgtaaaagcaaatctggtaaatgaattcagattatgacgtttgtaccatcctgaaatcagtctccaagaaaaggttcaagataccaacttatcagcagatttttttctgaaataaagactctcttcatggttaatttatagaatcttattcttactgtaacttttaaattggaggagattgggaggcatgacatataccaactttttgaatatggcattgtttcctagcattggtcaatgggatattgcccatccaggatgaggatattaatgtgactatttcaactcttctcttcactgaaatctgttcatctcagtgttatttattgccaggcacagtggcatatgcctgtattcccagctacttgggagctgaggcaagagggtcccttgagcccaggagctcaaagaccaacctgggcaacatagcaagaccccatttctttttataattgtatttatattaactgatctgagtgctaaaaataaattgtatagacacctttattcccataattagttattatcattcctaagaaattctaatgaggttagtcaaataagtcactggaaaactgaagtctcaacacaagagtaatataatgatttgcttatgggtacaggctgaatatattagaactccatgaactttagttttgacagattaaaaataaccagctaatgaaattaagcactgaagctttattcttaggttatccctagagaaataattcctcatttttattttggcttataacttgattacaaattgagagttggcttttttgtaccttttatggaattc

SEQ ID NO: 199224 - DNA, 1000 bp, Homo Sapiens
acttatgtaagcatgcatgaaaatgacacatctgtgacctacagattcaaaattccaaggcagaggtcagctacctgtgagtgaggtttaagaaatgcctaatcagtctctccaagggaaaatcaatctggcctttattattcttctcaagagaattggaagtagcactcattacagaaatccacttccctccaactccaaggggatttagaattttccaattgtacttaagtattatatctctggcaacagttgtcctaagagagagctcttttcttctgtgtaatattcaagcaatcttcaaaggcttttatctgctaaaactgatatgaaaatggcattttatttaccaattcatctctaagtatcaaatcattacttttctgttttatgtacatatcatctataaatgttctgaacatttaaacagtcaataatttttctattctgtgtttcagttgaaatagaactttacatcataaagaatttaccagttttagaatgttttatagtaaagatacgtgcattcacacaaacatatatgcatatatacctatatgaatgtgtatatatgtgcacatatatgtgtgtaaggctacatattatatggtatagagattgggagtttgggttctggagtcaaattattatgatgtgaattctcccttctgtaagaccttttgaaagctacttaacctctctttcagcttcatctataaaatgggagcaataatagtaaccacttcatagagttgtgatgactaaatgaattaatacatattaggtgcttcaaacagagcttggcaggtagcaagtggtcagcttagcaaatattagctattttattagaaacagtccaagtaacccatattttaaaaaactgagttacctgtgaacaagaaacttctaagttattggtgtgttttatatgtgttttacacagttagcaatggtaatagcattattgctcctgtttgctcttcttgaagacagtgaattc

SEQ ID NO: 199225 - DNA, 1000 bp, Homo Sapiens
atacactgaaccaacttttcagagcactaggtgtaggacgttccattacaggttttgtgttcattacagatttacacatgtacctccagagccagaaggataaagcactcggggaaaaattaggtttgtagaaataaaagccacggaagactattgccagtgtgaaaagtaattggtgaaatttgtgacatggtcagaaaaaaatacagctcagaaccaacatatagggtaatatttaattacattttgcagagaagagttgatcccactaaagataattttagtaaaatgaaaaatggaagcaactggaaatggtttaacgttgccagatagaattaaataaacaaatagtgtttcctctggaaagtacattttggacaatgttaatagctctgatttaagtgtttgcatttgcaacagaagccatcttggagtcagtgttttttattcttagaataacttagaaatcaactaaattcaaaaagtaacatgatcatagagaggacaacctgacttcaaggtaatacagtggataaagagcagttgtaacaagtgtaatctcaggctccttcctctaccaacaggtctctgattagcttattagtgctctaaggagaagaaattattttagagaaagggagtagctgtaattcccaaagttggatttgtagaagaaggatgtggtggaaagatcctaggctttagaatatttgaagtaaggaagtctgggttgaatctagctttacctcttgagccttacagctgcagttttcccacctatccggtatagattatgtctaccttatagttacaagcatttaataacattatcagtgtaaaaggtcctatcaagtttagttccctacccctcttagttcctaacaaatgacgaaactgacctctaccctcctcttcactccatccccaagcaacttggagccttaatagaatctacagatttggtaaccagttctcaagtcctgtggctgaaggtgaattc

SEQ ID NO: 199226 - DNA, 1000 bp, Homo Sapiens
aacactgccagaatgcaaggatcggaaaaggtttcagagaaagtgacatctgaatgggtctggaaggaaggtgagagtccatgggaaaaaaagaaacagagccttccaggtaagtggagaagagcaagaacagagactgaattgtggaagaagagatagaaaatggatttggagaatgacagatgagagtggaaattggggcagtggtcagctcatcaagggccttaaaagccacattaagagttttagatttttttccgttaaagcagagctccttaaactgtaatgcgcatgaggatcatctggggatcatgttaaaatgcagattctgaatcagcagatcagaggtagagcccaagaacacatttccaataagctcccacatgatactgatgctgctgatctgggaccacactttgagtagcaaagccttagactcatgctgtccaatgtagtagtcctcagccacatgtagctgttttgtccttgaaatgtggctagtgagatggacgagttagattttaaattttatttcagtttaattcatttaaatttaatatttagagcatactcagtttgttattttaaaacccttaagtacgtttggattaacttgagtatgtgaaccaactttttcaactgtaagatttatgaaatctcagtaaaggtcaagtatttccaatgagagtttataatgaattgagaagtgccgtaagtgtaaagtatacaccaaagttcaaaaattttgtatgaaaaaagaatgtaaaatttctcattttaatattaattacatattgaaatggcatttttggatatactgggttaaacataaattattaaaattcacctgtttcttttaaccttttaaaatgaggctattagaaaatgtaaaatttcatacatggtttgcatttgtagttcgcattctatttctattggacggcactaacatagatgagagggagatattatttattggtttctaatctaaggagaattc

SEQ ID NO: 199227 - DNA, 1000 bp, Homo Sapiens
agagggggaaactgctgtgttagccccctggcgtgtagagctgattctgtcagatcttaccactgatcatactttctaccgtacattaagtgatgtgtcaaatcatagcaacaaaaaatattgtccctagctgttaggtactttgatttgaaaaaggaggtttcaaatcattttcttgatttctattaagagcttaataaaactacagaaaacacaaaagataattggtattgtgttcaaatacaaactggactttactcagcaatctgcctattcagcagacagtgcaaatataaattttggcaaattccattcagtctataaatttcttaccaaaaaaagaaaaaaaatgaaaacaccttacctactaaataacctgcatatcttatatacaatactgctaaaaaggcatataatttgcttacctgacattgagccttttataatgaaaattttgggcctcttaaaaattcctcagaacctgcagaagcacttaataagatttttgactctataaaagtagaaaacacctctttagacgtggctgtcattgttgtcagccatagaaaagatattaaaatgttggcctgccataaaatcatattttccaagtgtgggacaaaaggatgtctgttttagtaggcttgggctgccttaacaaaatgccatagactggatggcttaaaaagagaagactggaaagcaaaagagaagcggataagctataagcctgcctttcttcatggtccaggacatgtagccctcttgtgcccaaggatcaccagacacctgcaagttagctcactgcaaccttggtgttaatcagtactgcacaaagccctcttcagcataaacactattctataaaatctccagcaagccctttttctttgcagtcatctcttctcatgttgatttgctcattgctttcttggaatgtatttttatactttgtctaacaaatctgcctttctttatttacaactgtcttggtgaattc

SEQ ID NO: 199228 - DNA, 1000 bp, Homo Sapiens
cccttatagctgcttatctgctttgcactgttagtgcctctacaacagtatcataggatcattagtttgcagatgaggatcctgaggcttggcaaacagcctagtagctgagtaacattttactggctgagacgggtaagttaggctttgatttctggtctttagaccattccttcttctcttctttctattgcaagatgctttctctgaccttcattcattcctgtttcttaattcctgtcaggcttcttcctgccaatggtgttaggagagcagggagggtcagtgatggtcaccaaacatagtcttggggatgacttggtgagaggaagggttttcttggtgctggggtctcagggactccttcggggagctgatctcaggtgagtgaatcaccaaaccccacaggcctctgaccttcctagagggaaatggaagttgttccaagtgtgcaaagaacagggagggagtggtgatatggtttggatttgtgtccctgcccaaatctcatgtcgaattggaggaggggcccagttggaagtgattagatcataagggcagactcccccttgctgttctcatgatagtgagtgacgtctcatgagatctgatcatttaaaagtgtgtagcacttccccctttgctctctctctcccctgccaccatatacataaggtacttgcttccccttcgcattccgccatgatcgtaaatttcctgagacctcccagtcatgcttcctgttaagcctgcagaactatgagctgattaaacattttttccttcataaattaccaatctcagatagttctttatagcagtgtgagaatggactaatacaaatttcttctggtgctctttagttcaggacttgtctcaggcaattgcctgtgggcaagccatctgggaccccagcatgggagctgtggccccaggctgcccccacttgccattggtacggattctccctcatgatgacaggtgaagccagctggaattc

SEQ ID NO: 199229 - DNA, 1000 bp, Homo Sapiens
ggtggtcaccgagcagcttttgtttaaggctttgctaaatgtttggcctttataacgtagtcaccttaccctgagagatttgagacaaaacctttcccctgatcttgattgtcctgtctgtaagaaaccggcccacctttcctggcagcgtcctccttcggtttttgttctttccataatcaaattatgtcacatgaattgaggtggctgaatgctactggttggagaggggaaggggaagcaaattctgttcctcctttttctccctcttcttcttcccctttaccatcacctcctcctccttctccctctcctttttctcctccttcttctacctttccccctttccttctccctcctccctcctttttcttatttttatttttaaaacacaatgtattgaacatttaatatgtgtcaggcactatgttaagcattttacatatatttatctcagttaattcccccaacaagcttatgaggtagattccattattatccccattttgcagtggaagagttgaagctggagaagaaaaatcatgtgctcagggttgcacagccaggatgtgggagccaggactggctgactttagagccccagttctttttttaaactcttaaaaaattcacttatttttcatgttgaaagggtggtgtgatgagcacctctctgccccctggccaggtttgctggctgaacatcttggcactcctgttccatgtgtctcttcttttcaatatatacagacacttcctttttgccaagccaccttggcaaaacacttgtttgcagacaaataaaattttacccttaaacacttcagttgggtctcccaaaaataaggacaattgccttcctaacctcaataccattattaacccaagaatatcaattttatttcagttgcaccactcaatgcatagtccatacttggatgccctcaggtattccccaaatgtccttgatagctatttttaaacattaaatccagaattc

SEQ ID NO: 199230 - DNA, 1000 bp, Homo Sapiens
atggtccagtagcgggacaaactgacgatagcaaaagggagtcttatcatataatttataaatatgagggaaatgacactttgggaggcagttagaaaaagttaaaactgttggccaaggtcatagagcaggatgtgacccatacctccatccccaccacgtcccagaatgagcacagcaggtctctggctctgaccatcaatagccacagacctgtgagcagcttctgtcccagccactggggagacaggctgccatagagggacaataaaagtgaaaccacctccattaatcagtgcacaggattacatatgaatggctgaagccttgccaaaaagctccagctatgacaactgaccaagaaaatcaaaaggctcttaagcaaaaacatgtctctgagagcttctataaagcctgtctgaaaaaaatggtcacagagctcacagacacagctgtctagtccaagggcagaagacagaggtctccatagaacccactactgctgggaatgagaggagcagactgagggcctataaaaaacaggcccctggatgaagaaatatctctctcctttctcattcatagttgtgaggttcatacactagcccttgtgacgacttgctttgaccaacagaatgtaatagatgtgatggagtttgggatctgagcttaggcctcaataagccatgcatgctcttatttgctccctcagagccctgtggggctgccatgtaagcaagcctgtgctagcctgccaactatgagggaccacacaaagtagagataagccatcctagccctagaccagccagcctcagccaaaacagaagttggctgcagttgaatgtgtgagcccaactgagagcagaagaaccaccccactgatcccagtccaaattgcaaacccacagaattgtgagcccataaacagttgctattttaagcagcaaacactaacttacatacccaactaatatccacaggtgagcaagtagaattc

SEQ ID NO: 199231 - DNA, 1000 bp, Homo Sapiens
aataatgagtgcattctaggccagcttccccagtgagtgagtagagttaatcctgctgaggatctctgggagggggtggagaacacacccttcggagtgatcctgcctgaggggtgagggagccggggtatttaaacacaactaccaaccattaaacatcactggttaggatgtgctcctggaatatgttaattccagcaagaggaaagcatcaggcacagcaatacagatgttggctattgggagttgagtctatgtgtcttgagtgatgaggatgggaaagtatgggttgagctgaacaaattcactccagccctttcaaccaaatgttttaaacatggcattgccaggaacactcacacagataaaaggacattggaggaagcagcgtgagagcatgctgcaaactgcaagctgcaagcaccaactggctatcgtcactcatgaagatcagatggttaattcagttgacagaaacgcaagatcatgtcccgccccactctcacctgcttcctgactttctattgcagtgaatagtcccatcctctcacagttgtctagatcaaaactctcagtgacgtccttgactcctccctgtaacttgcctctcacatctattcagttgccagattcaatcaactgtagttcttgaacacttttgaaatccatccacttcttttcatccccgtccaccaccctggtgagactgcactcatctctcacttggacctcaacagctgactcctcttctcccatccccattgctctgtttccaaaagtgagcctcaatccattctccgcttggtagccaaaactaccttttaaagttcaaacatgatcagatttgttccttgctcaaaccccttcaaagtctgcatccctgcctttccagaacccactttccctccctggaacccacctcccttgtatgaggagtctgcatgacctggcctgtcttaacttcctgggacacacatctcattttcttctttgtgaattc

SEQ ID NO: 199232 - DNA, 1000 bp, Homo Sapiens
taaaataacttggctttaagtatatatcatacatgttcatcacagaaaaatagaaaatacagataagcagaaaaaaataaattgaaatcacaacaggtaaacattcttaacatgttgcatgtttttcctccatgccctttttatttaaatgctgtatttttttcctgttaagatcatttccaatcttcttgatcatgtgggcaaatctcactttgcagaagcctgtggctatctttgttagggaagatctaacaatcagattgtctaactactcatatttgcttcctagactatgatgtaatctttttcttcccacaagaaaacatctgcaagttttttccccccctttttttgaggcagggtctcactctgtcacccaggctggagtgcaatgcacaattatagcctgctgcagccttgacctcccgggctgaagcaatcctcccacatcagcctcccaagtagctagaactatgggtaagcgccaacacacctggctattttcattttttattttttgtagagatgaggtcttgctatgttgcccaggttggtctcaagttcctgggcccaagtgatcctcctgccttggcctcccaaagtactaggattacaggtatgagccaccacacttagctggtatgatcttaaaatgctttttacattttctctttttctgaagatgagtcaaattgtcatttaagagaaattaaatttgacttagaatgttttctttaattttaagggagaagtatttctccatgaatgtttctttcctatgaatataaaattactgatacctatacttgtatatgaaacatgaccacaaattgctgatgaacatgatttaaaaaaatgaatataccagagtttacacatctaaatgtgcctattcccttctatagtctttagacgtgcacttatccaaatggttctgccaattcatccaaccatctacacaatgcctctctgagagctgcctttagactatggagaattc

SEQ ID NO: 199233 - DNA, 1000 bp, Homo Sapiens
agagagagaaatagaaaaagaaagaaagggagggagggaaagagaaaaaagaaagaaggaaggaaggagagagcgagagagaaagaagaaagaaagaaaagaaaagaaagaaaaagaagaaaaaagaaagagaaaaggaaaagagaataaaagaaagaaagggcctgacccactggagaggcttgggaactgtctgtggggcacacaagtgagcagaagggtggacacatggatggacaggcggacagacaaactgaaacttcatcctacacgagttagaggtgagagggaaaaggcagcatggactagggacaaggccaaaggtcctgtcagatggtggccgccaccactgtgtcacccctgtccagggcctgtgaaaggacgtccacccaggctgcagcctagcagagacatttcttcatctcctccccccaggcacttttggccctccccagacttcgggcccctcttctcttgccaagaattaaggctgtggcctcagccgcgcaggaagccacctccagcccccaggtggtctgggactcccaggtctaagacaaaggggacagggaagaggggcagagggaaagattggatgccgggaatcaaccgccctctcaaaatatctccattgcagagactcctaaaggggaactcccctccagctgcgctgggaccccaggaccctgccccggcctgaaggccaggtgagtccattccctaaccctccctggcccactccaccccactccaccctcctccacctggaggtgacctcatctaacccacccctctctccgcctacagggcacccagatgtgctgctcaagggagccccaagggctggaagggggttgtgaaaccgaaataaactgccaagcctggtctgtcctccagggtgcaaaggaagagtgcagtggccagcagggggcagcagagggcagcaggcactgggaaagggccgtccccaggcctggtccccacctgaacaacaggagtc

SEQ ID NO: 199234 - DNA, 1000 bp, Homo Sapiens
cgttttccatgtcactcttaccattttactttgcactatgcagtgtatgagggtcccaatttctctacatccttaccaatacttaattggcttttttgattgtagccatcctagtgggtgtgaagcggtttctcatggtggttttgatttgcatttccctcatgactaatgacactgagacagagtctttttcacatgctcattggtgattcgtctctcttctttggagaaatgtctgttcaagtcttttggctgttttttaattgggttgcttgtctttttgttgctgagttgtaaggatccttcatatgttctggacactagacccttatcaggtgtatgatttgctataattttttcccattctatgggtgtttttttttttattctataatgccctttgcacaaaagattttaattttgatgcagtccaaattatcttttttctttttttgatattgtgcttatatgtaagactgtttgccaaacaccaagtcatgacatttttctcctgtgttttttcttctaagagttttatggatttagctcctaatacttgggtctttcatccattttgagttaattttcatatatggggtgatgtaaagattttgttttgtttttatttttttgtagagacagtctcactatgttgcccaggccgatctcaaactcttggcctcaagcgatcctccctcctcggtcttccaaagtgttgggattacaggcgtgggccactgcatagtgcctggccaggttttgtttggttttgatcattatcttttctgtcaggatgaagacattttggcattaaccgggaaggaggttgaagggcagtggtagttgggagttctgaaagtactatttcaaatctgtttaacaaatgcgtatacattgcttcttctgtgcaaagcattgtgcctgcatgggcccttggatggtagtgctagagaaataggtgtcccttgatatcctgggggtggaagcccacaaacagaga

SEQ ID NO: 199235 - DNA, 1000 bp, Homo Sapiens
accatcagcataatctcaatgggacgctgtcatcgactcccagagctgccccgatcccaaccccccagcctccaggcgacctctgatctgtcaccttttctagaattttcctgtaagtggaattgtacaatatgaagtcctttacatttttatgtttggcttcataaataaatattatacatatattttatatctacactttttgcatctacactttattttattttattatttctgagatggagtctcgctctgtcgcccaggctggagtgcagtggcgcaatctcagctcactgcaacctccgtctcccgcgttcaagcaatcctcccacctcagccccccaagtagctgggattacaggtgcctaacaccacacctggctaatttttgtatttttagtagaaacggggtttcgccatgttggccaggctagtctcaaactcctgacctcaggtgatccacctgccttggcctcccaaagtgctgggattacaggtgtgagccactgcacccggcctacactttatatatatatatatatatatatatatatatatatatatatatatatatatataatgctctatctatacatgcatcatgttattgagatgtaattcatatgacatacagtgcacccatttaaaatgcataattctttctgagtattatctgcggcaccaaaaagaagaaaaaaatcataaaataaaaagaaaacgcacaattcaatggcatttagtacattcagagtcctgcaaccatcaccactaattccagaacattctaattatgccaagaagaagaaacccatcaaccatcacttcccatgcccctcccagtctcggcacccacgcatcccctccctgcctctgtggatcggcccgtcctgaaccttttgtagaaaggggatcacatgctgtgtggccttttgtgtctggcatctcttactgagcgtgacgtcctcaaggtacatccacactgtggcctgtgtcaaagctt

SEQ ID NO: 199236 - DNA, 1000 bp, Homo Sapiens
ctccctttttcttttcttttcttttcttttcttttcttttctgtcttggtctttgtctttggtcttgtcatcttgtctttttaggatctggctctgttgcccagccaggctggagtgtagtggtacaatctcagctcactgcaatattgctctccatccatgctatccatcccatccatcccccagctcctgggctcaagtcatcctcctacctcagccttccgagtagctgggattacaggtgtacgcccagctaatttttgtatttttcatgaagatggggtttcgctgtgttggccaggctggtatcaaactcctgacctcaagtgcctgcctcggcctcccaaagtgctgggattacaggcgtgagccaccatgcccaaccttttctccctttcttaactcatgagtacacaaaggccagaatagtgaagtgacttttccagggtcacacagccttcacctgcctcagctcctgccccatgccctttcgctctttagggctccattttagtatgggaaaaatgtgctcaggaaactttgaaagtcacagccatctgttgggacaacgttggcacatagtatccctgcatccccccaccacctccctctgctttgtggagttgtccattgtccctctgctgcatttgcgtggctgtagcccctgtcctccaggcacaaatctagcttctgcaagttgcatccccacatctagccatgctttcccctcctgtgccaccattagaggatttcactgaatcacactcctcaggccagaatcctagcagaacttccagtcctgcgttagacactgtagatttcatactctccaaacccctgggtgttcatttatatataaaataagtgaacccgataccaacctgagaggtttttcttgctctcaacgccattcttaaatacaaagaggtccattttattattttatatatttgtcttttttttttttaaacaaatttctgtttaaatagggagcaagctt

SEQ ID NO: 199237 - DNA, 1000 bp, Homo Sapiens
gtaacagtttgatctctctttcttttccccacacacatcccctaagaaaatatatttttgcatttgttctactattgacttattttcttaacattttaaaccttaagaacaaaggttaaataaagcacaccacataatcttgcaggggatatttgcattttaaaactgccagtaatagaagaacgtgatagcacacgtaggcataggttttgatcaaagatgggagatataggggactctgaaaaaaatctctaggagtaatgaaaagtaaatagagatgggcttaaaataactcatagactatctcatttttgacttgtattgtttttgtatcacaggaatttgagcacataaatatagtttctatgaagtactgatcatattccttcagcttagtgacatagctaagttcaagttaaagtagagtaggctgtcattagtaaaaatgcccagataacaaaaaataatcatggaccaaacataattttcataactataaaagtttaatgttcagactgcttttaagtttttcaatgattttttttcaatcagacacatttttatgcttcacacattttcatgcttcacacatttgtaagatttgcaggataagaaattgtggccatttttagagcataggaaaatgacatacacagaattgtcttacataaagtcacaggaagagaaatcgttgatccacaacaaggactcagtacttttagaaatttgcaacaatcaaaattagaaaatggattgtttgaggcaagcaatttcaatctcatttactagagtaggagctcttcaaatatctggtaggtgatcgcctaaaaagaacaataaaacaaactatttgggggaactttagatataatttatcacacaaaatgctgaatgacttggaaagcagctcagagtcctaaatcaatggcaaacgtgaatgttttttcatccatcacccagtgatattagaggtgacaacctggtgaaggcaacagaattc

SEQ ID NO: 199238 - DNA, 1000 bp, Homo Sapiens
gcagccccagactgggcgtgttccctgtatcaggaatcccttccctctgctcccctgtctggcccgtccctgcatcatcccacaacagtagtaacaataacaaacgtggttccttgagcacacgctgtgtgcctggcactgttctagacatgggggcccagcagtgagccaggcgcggcctctcctcctgctggagctcacctaggaatgaagttggtaacgttcttatacccatcttacagatgagaaaactgagagggttatggaaattgccaagaactagtaaatggagaagtcagggccccttgccttagagagggtaagggatgtccccaagtcacaccccggcagttgggagtggggaactcagcactggagccgcctccctctggaggagggatcctttgccttccctgagaaggacccttgctgcaaacacgagtggatatgagccaggggcacggccaggctgcctctgccaccctctctccccagcccagggtagacaggtcacaccaaccccaggctgtgcctcaattcacagtgccggggaggcaggggacaggcacttctggagccccctgcctggtgtgcacctttgctgtgccctgcgcgggctgggaggccttgggcaaaggtgttcatcttacagtgcctcagtttcctcccctgtgaaataggggaatgatggtgccacatcagaggctagttcccaggttgttagtcccgagggcttaggagaggccccgctgacgggaagcgctgcctgcaggttgggtctcattgtcttttgtcatcctctgcaggacaaggtgctggctggcactctgaggcaggaattggacaggtgtgggctcctgtcaggctctgaaacttccccagtgccttgctgggggtcagcggggcaatatccccctgactctccttatctgggagtaggtcctgatgactgccgcctcccaggggtgctgggggtccctaagagtgctgcaacaagctt

SEQ ID NO: 199239 - DNA, 1000 bp, Homo Sapiens
tgttaaaaggataataaggaaatattacaaacaactctgtgcacataagtttgacaatttagatgaaatggaccaattccttaaagccacaaactaccaaacccacccaagaagaaatagacagactaaatagtcctatatccgttagaagaaattgaattcatagctaaaatccttccagaaaagaaaacttaggtccagatggttttactggtgaattctaccaaacatttcaagaagatataacaccagtagaacacttcctaactaattgtgtgagcccagcattaccccgataccaatgaatctgatggattgctatttattagtaatgcctacaactgaccacataccacaaaatccacctgcaaaagatacagcagtgctttaattccaaggcagagcagcacaggcccactctccctgtgtgctgtgtgtcttccaaggatcttcagagaaggatatattcttctggtttctgccaacattctcaggaaagagtaaacgtgaaggtcaggaatcgccataccttagatactggcttcttcttccttagcacagcctgtttccaaatcttgttccagggcccctgacttcagcttggcctcctgagactcttagcccatttctgactttcgtaagtctcccagaaccccctaaaacctttctttttttttttttaattatactttaaattctgggatacatgtgcagaacatgcaggtttgttacataggtatacacgtgtcatggtggtttgctgtacccatcaacccgtcatctccattaggtatttctcctaatgctatccctcctctagcctcccaccccctaacatgccccagtgtgtgacgttcccctccctgtgtctatgtgttctcattgttcaactcccacttatgagtgagtatgttcagtgtttggttttctgttcctgtgttagtttgctgagaatgatggtttccagcttcatccatgtccctgcaaaggacatgaattc

SEQ ID NO: 199240 - DNA, 1000 bp, Homo Sapiens
tttaaaaatggttgaaaagctactgtacagaataagagagagccagctaaaaaaacagatttctgggttgtattgaggggctagttgggtccataaagcataaattttttaatgatgccaatcttacagttatgtacttttatccagcagagtttagtagtctgggtagagatgtgggaaaggagaccattgtgttcatccaaaactgacatgggagaaagcaatgacatgggagaaagcaatgaatgaactaagcatagtgctctgtaatagacattgaagtcaggtctcaggtctaatcttgactgcttagtgagttaggcagattacttaaccttctctcagcttcagtttcctaataatcatactgaatcatatcagttttctaatcataatcatctattcaggcagattattcaaccttctctaagcttcagtttcctaacaataatcatactgaatcatatcagttttctaatgataataatctgttctcagtgatgggaattaaatggacaagtgaactccttaacgcatagtttgggatacatgatacatgtcaataagtagcagtttttaacattatttgtgacccaattctgtcacttataagctaggtgaccttaggcaagtttctttcctttttatctataaaaaggaaattataatacttgttagggattttcagctgggtatattttgaggaaaagatgtcaagctctacgcctgatacagcctttaacaactcagtaaatgctagttgaagcagaatctgtaaggaattttttagaaaattaggttggaaagttaggtttggaattttggcctttgtcttatcattagtagggtatctttaaaagttcatgagcaggctgggcatggtggctcatacatgtcctagcactttggggggccaaggtgggaggattgcttgaggccaggagttcgagaccagcctggccaacataatgagtccttgtctcttacaaaaaaagaattc

SEQ ID NO: 199241 - DNA, 1000 bp, Homo Sapiens
aaaccctgttcttgcaaaaggatacaaaactactcataatctacaaaaacgatgaatcctaagcatgttacatagaaggaaaacagtttcaaagcatagggagctgttagaccagcttcatcttcccaagcctcttccaaaacttcttggaagctgatatataacactaaccttccaaaaacacaacagaagcagaaaatcttaatggggcaccaggaaaagagcaagcctcgagaaaaatcaagactccccccgaccaaccttcccaaataacacaaacacaagagttaacagtacaatccctctttgagaggggactgaatcaatgtggcagggccaaccctacacacacacacacacgcgcgcgcgcgcgcgcgcgcacacacatacaccacacacacagctaccgccctgccaggggatgatgaaatgaggaacggaaattaacatttcaggcaacgtctcacattgttccttgaggccaagggctgctgttgcagccgccaccgccaccgctttcctcccagccaccccccacacccgcccgcctaccctccccctaacaccccccacacggctgcccgcattcctgcccctcctcggcctacgcgcgcctcctgcaaccccgacgcccccaggtccccagttcgccctccccctccggctcggagcccgagagccgcctgctctcatttcaaaacagcgataataatagggacgctgagaataacaactacgaccagcacggcgaaggcgcccctctcgcgggtcagaggtcggcgccccagctccgcagaacccggcgcccggccagcgccccctggcagcccctcccggcagcctcaggtccccaagacctgcaggcccgccccgaagccccccgtccgcccctcacggccgctccgagcccccgaggcccgccccggagccccctgtccgcctctcacggccgccccgggcccccacggcccccaggcccgccccggagcccccaatcggc

SEQ ID NO: 199242 - DNA, 1000 bp, Homo Sapiens
attcacattcatattctccactaattcccacaattgtatttctgagagagagaccttcagtatcccggtcgttcaccaaatgttccctgggtgctgcaaggagtctggctgtgtatgagtccaggagttcaagaccagcctgggcaacatagcaagaccccacctccacaaaaaatgaaaaaattagccaggagtgatggcactcaactgtagacacaactactagggaggccaaggagggaagtttgcttgagcatgggaggtggaggctgctatgatggtgccactggtactccagcctgggccacagagtgagatcttgtctccccccccaaaaaagaataatattctgtaacacgtgaaaagtatacaaaattcaactctcgatgtccatatataaagtgcgtttttgtttttacttttttgtagagacaggatctcattctgttgcccaggctggtctcaaactcctagcctcaaaggatcctcccaccttggcctcccaaagtgctggaattacaggcgtgagccacagtgcccggcctccagttgtctctgaagtctcctttttcttctggtagaccagggttcagcatacttctgtaaaaggagagtgaatatttttcatttcgtgcgccatgcagtctctgtccaaatgactcaactctgctcttgtatctagaaagcagctgtagatgatatgtcaatgatgaatgtggctgtattccagtaaaactttatgtatgggtcaggtatggtggctcacaccagtaatcccaacactttgggaggccgaggtcgggagttcaagaccagcctgaccaacatggagaaaccccatctctactaaaaataccaaattagccaggcatggtggagccagcctgtaatcccagctactcagtaggctgaggcaggagaatcgcttgaaccaggaagacggaggttgctgtaagacgagatcgcaccattgcactccagcctgggcaacaagagcgaa

SEQ ID NO: 199243 - DNA, 1000 bp, Homo Sapiens
tttcatccggttgcaatctaggtgttgggtgggactgtgatcttatcagaggctcgagtgggggatggtgtgcttttgagctctttcaggttgtggcagaagttatctcttgctgattgtgggacgcaagtctttgttttcttgttgactgtcccttgaggtctcctcttgactcttagaggccccctgtacttgcttggcgcatggccccttgcagcttggcagctcacttcaaaacagcaaagagtcttctgcttcagtagactaagtcttacgtaacataatgtagtcatgggagtgacagcgcagcaactttgccacctaatgcaacccagtcaagggaaagccattccattgttttcaccacattctgtgggttagaagcacgtcacaggtcccacccgccttgcactccgggcaaggtggctacaaggaggcatggacactgggtggggagattgccaggctcacctagggtctgtctgctggcctggggtgttcttcagaaccctcattccctggatactgacatgtcagtctctgggaattggttgcatctctctctcctccatgacgtatcagtctgtgggagagcggtgcgtctcttctctctcctccatttgcatgcattcccggacccacttgtagaacggaagtagaatcaagactcgtggccacagtttgggtggatgggacacttgggcttgccctggtactatcaggctgtttgccctatgccttgcatttcccactgtcctgcctgcctctcaggcttatggtgaggatgaggtgagatgagatgatggatgtggtcagtgaagcagctggtcagggcctggtggaattctactctagtccagtctgcctctttctccacctctattctctaggcagagattggttattttcagtagtaagtatggactcatcagagttcttgaggtctttgcttcctgcctcaaattcccttctctcctttccctgactgatgcctactcat

SEQ ID NO: 199244 - DNA, 1000 bp, Homo Sapiens
gggatcacaggtacgtgccactacgtccagataatttttaaaattttttgtagagatggggtccctctatgttgcccaggctggtctcaaactcctgggctgaagtgatcctcctgctttggcctcccaaagtgctgggattacagtcatgagccaccatgcctggccaataacattgatattaaaagctaaaaacatattttgaacacccatcttccaacatatgcatatttatttgagtcatttttaggtactacatgttaaagatctctccattataacacatatgcaaacagagattttttgtttgtttgttttttgtgtttttttgaaacggagtctcgctgtgtcgcccaggctggagtgcaatggtgcgatctcggctcattgcaacctccgcctcccagtttcaagcgattctcctgcctcagcctcctgagtagttgggattacaggtgctcaccaccatgcccggctaatttttgtatttttttttttttttagtagagacaggttttcgccatggtcaggctggtctcgaactcctgacttcaggtgatccccctgccttggcctcccaaagtgctgggattacaggcgtgagccaccacgcccggccaaacagagaaatttctaaaagacaagacacattgagttctagcattttcttccagagcccactgggttgctgtcctcacctgggagaccagatcaacactgttgacaggcagcggccgacacctccggcagaacaggaggtagggagcgggctggtttgtgctggttttggagtacgtggggcatgttctggggaaaatctcaagtccctgaagtgtgctgatgacaaccaccaaaccaggggccacaggcgcaggacttgcaggggcggcccacttcacggcacatgcactttgcaggttctggagccctctgcctacaccctcacatataagaacaggcgtgactccaaaatacacatgtggcaggtatgccagaattc

SEQ ID NO: 199245 - DNA, 1000 bp, Homo Sapiens
gccccaaggtactctggaagccaacggggaacaggagggttcttgggtttctggatgtggggaaaggagaatgttgccattttcagatgctggggaaagaccaaagtctggactttgaaatatgtgtgttgacaactgtattgattctaaagaaaaaaatctacatatctatattaagtcaacagtgaaataatcgtagagtgctacccttataaagagacaaatcataaacttggctgtgtaatgtaatgaagaaatactgtcacagactgaattgtgtctccccaaaatttatatattgaagccttaattccaagtatctcaaaatgcagctgtatttagggatagccctttaaagagataattaagctggtcatggtggcttactcctgtaatcccagcatattgggaagccgaggcaggaagatcgcttgagcccaggagttcaagaccaacctggacaacatagggaaaccccatctctacaacaaataataataaaaaatagccaggcatggaggtgcacctgtggtcccaactcaggaggctgaggtgggaggatagcttgaacctggaggtccagtctgcagtgagccaagatagcgccactgtactccagcctgggtaatagagagagaccctgtctcaaaaaaaaaaaaagaaaaaaaaagtaattaagttaaaataagttaattagggtgggccctaatccaatatgatttgctctttgttgaaagtggaaattaggacataaatagatacagactaggtacagagggaggaacatgggaagacacaaggattttgaaacatttaccccaacatttaccctaaccctttgaaactgactccagttcagtcctgcccagtgtcacacacttgatatagatatttcatttttctcttactagcaaccaccagaggcatattcacttctgtggatttggaagctttcccctacccttccaggtcaatcattaaatggctggcttctgaattc

SEQ ID NO: 199246 - DNA, 1000 bp, Homo Sapiens
agctcagagaggtgaagttacttgaccaaggtcacacagcaggcaagtggcagagcccaaggtagaacttccaacatgctgttttgattactggcctgggctgatcccagttttcctatacgtgacaattctttgcattatcttgggtctagatgcttctagtccagaatgaccccaagggctgccagcccctttgggtttccccaccaacgtcaaaggttgagggacagaggacatttccctgttggcaacgaactgggccccacactcctgatcagctcagccattgccaggttcttgggcctaaggttgatccaaatcggggcaaagaattaggtcctctcaaagcggagtaggaaagaacaagacgttcatggggccttcctgtaattcggcttccatgttgaagtccaaagtcccaaggccagcatgcaggcagctcactgcgtccgccctccacaattccaccagcccccagcccactcaatacacctgaggcctatggagcgtgtgccaggcctcaccaggcccctcggactttcccaatgctgtgttctgcccagaaagctcctccctgctttctcctcctggcctgagcggacccattcttggatcagcagccttctctccagggaccctgctgcttcccacgagtgcccaccctgagtcaccctcgtttgcgggcactggaaccgattgtccataactctcttctcccatgctgttgtctccacactcccaacccttagcacaatgcctggtacccaggaggtgccccataagggcatgcttcaggcacgatgcctaactgctgaatgagagaacactctgaaagcacagagggcacggcacgcgcaggcccctgcgagaggcctggggcatatctgctcacttctcacttcgttctcaccctacaaggtgcggaaggttccatccttgccctcaatttacccgcaaggagagggacactcatgcagatggggccgcagagctggaattc

SEQ ID NO: 199247 - DNA, 1000 bp, Homo Sapiens
gggtgtgatggtgcatgcctgtggtcccaactactcaggaggctgaggcaggaggatcctttgagcctaggaatttgaagcggcagtgagccatgatctcatcactgcactccagcctgggtgacaatgtgagaccctgtctctaaaaaataaaaaaagtcgattgtggtgatggttgcacaattctgtgaatatacgacaaactattaaattgtgtactttaaatgggtgaattgtatggaatgtgaattatgtatctgaataaaacttatatttttaaaaaaataaacctcccattcctatcacttcctcattgttcaatatggcttcatatatttcttcataaataaatatactgatttaatacgtgtttattcgcttattgtctaccacaacagtaaaggtaatttcaatgagagcagagcctgtggcgcgttcacttctatattcccagtgctttgagcatggcacaaaaggctactgaataagtaagtgccagtgtgtgaatatatgagtacctgtaagaatcagcaaaaataaaatactgtttccagggccccacccccagagattcagacgcaattgatctgagggagagcctgacaaaggtctggctcaagactcctcgagtgataccattgtacaaaccaagacgaagagccctgatccacagcagctgtcatctataaccctaaccctgtgtcacccctgcagatgaggcttcagtagctcaccattacctctacagacattctaaattcaagttaaataacgcagatgaaggactcaggtgagtctgggactttctgtatcagaatcgtcacagatgcctcaaaaaatcagattcccagaccccgttggagacattcagatccttgcagacccctgccagggaattaatgagttcaggttcattccacatgcagattctcgggactccctccaggaaattaaattgagattcccggatttaaccccctggaaggggtcccaagaattc

SEQ ID NO: 199248 - DNA, 1000 bp, Homo Sapiens
gggaagagagaataagggtggggcagggatgtgggtactactgaggcaacaggaccagggcatcgtgaataaggtgcttgtcatgtctgtcagtcatctttctctgggaatgatctacaaggaactctctatttctaccaaataatccacaacgccccaggaagttcctatttccatgctatggagacaaaacaagttttgtatccccagtcatatggatacaaagcaagactggaatcgggattccaaagcaaaaaccaaaaacacagcagtcagggcagcatcccatgttctttaatatctcatatgagaaggtggagctcagaatggtagcaacaaactgagatttgagtctaagatcttacttcctctgcttctctaggagcacagccatggaagaacacacatggggtgccattaccagtaggaaatgtcagtcaatgcacacagtgacagaagatgaagatgacagtgctactttgtcatataatggatgaaaggagaccctcaccctgagcttgagaagcctctacttaggtcttccttcctttgtttctcatcatacctgcccactgaagatgtaatccaggatctctctcataaccattaccgatatcccttcaagttcaatcttataagttgatccatcatcttttggaggattatagtttaactttgtcctaagaaagggaaaaaaatgtaaaatttctatgaaagaacagaaatagctataaatatttatgtactcaaaactctataacgtataagatacttatcagtatatgaatccccacctagaaaatttagttcgttaactttaggtctatgtatttctataactttcaactacaaaacattggtcccaggatcccaaatgctacttcttaaaaaacaaaaacaaaacagatgaccaaagaactaagatccacatgaccatgaatctgtatttcaccttggaaatcccagtccctttaggcttattttctaatgtattgaattc

SEQ ID NO: 199249 - DNA, 1000 bp, Homo Sapiens
gtgctaactatagtatcgctaaagcattattccaagccttaaggtatctcctttaatccttaagcaaccataacaggtaagtagttatatgagtatgcccattttgcagatgagaaaactgagatgcagagagagaaagtaatttgccccacatcgaccagctgttttaagtggctcagcccagaactggatccatcagtgtgagttagtgccatagtgcatgatgtttcataagaagcaatgtgggttctaggagctctgccacagggatctgcagctggaggccagaggctaagcagtacccttgcctttctctcccccacctgcaaacagagcagcctctacttgcgtatcctgcttcaagggtggatataaggaccagccagtctccaaggccacaggaaggaaaagtcatcagttagagaggtgactgttctcatcgccaaaacatccttcactactaacaaaagtttttgctactaaggtctcttaatgcatttcacacacagctcaatttgcccacaacttttcaagatttcatttctttctgaaacagatctgcattggccatggattataaatttttgaaaaagaaagtcatctctggatttcaacagagcccacaagcagggccccttcctaagtgagcgttgtacactaattgtgtgccacatggcccccaaacagaaaattcgctgtggttcttcctctgccggctcaaactaaatttgagatgaaagcatggcaaggaggagccgagggctgaaagtaaaatccatccctacctgcatgaaattacacaacagagtcagggtgggaatatgagatagcatttgcactgcaaggaggtcagtgaaccaaatggaatttataaacaccacaggctctatcagcgagccaaaaacatttgaaagacttttcattagaagccatttggcccaaaggtggttcgtcaaacctcagaattttagcaaaacactgttgcatttggatggaattc

SEQ ID NO: 199250 - DNA, 1000 bp, Homo Sapiens
cctgctggctccctggaatgggagctctaggaaaccaggaggtggtgggcttggctgggcaggtggaggagtctgcagtttgcatccaagttcctacctaggcaaatggaaccccgaaagcccttttggaaaagtctctgatcgggaaggggggaggttctgagagctttcttcccgttaccgactccaaggtcctgcagtagggcctccaccatcagggcagggagcgctccacgcgcacctaccctccccgatgagcgtgcgcctgggccactcccggaccagccacccttgcagctctggagtccccggcaggccgcgcccgtgcatgccccacatccccaagacccatctcagcccctcgcccctggcaggatccctgcccgcgagtctacggccctcgccccccgggactcgcggctgggcgaacaaagcggacgcgcttgcaagcggccagcgtcgccctcacgccccaccgacagggaccccaaactccagccccggaacccccctcccccgctccccgggtcaccggctggcttggctgggagggggctcaggacgaaactccgggccacccaccaaggagcgtgccgggcacggcttcccgggccgggagcgcagagaacaagggggcggagactcggtccgtgtgcccccagccccgcgcggggaccgcgcccgggaggtgcccctggcccgccggacgaccccgagctgccaaaggggtcttcgcgactcccgggagcggcgaagggtgagccctggggggaggggctgcggctcgctgcggggaagcgctgcgcgggggtctcgggggctggggctgaactcacctccggtgccggcgccctccgggggctccatgcggccggtgcggtctgggaggggcacgggcgacggcggcgtcgcctggcccgggcgccccaacagctgcggcagcgactcggccccggctccgggcgcagcgcatcggggcagcaaccggggggccgcggcg

SEQ ID NO: 199251 - DNA, 1000 bp, Homo Sapiens
cgaggcacgaggatcgcttgagcccaggggttcaagaccagcttggacaacaaactgaaaccctgtctctataaaaatcaaagaaaaaaaaatagccaggtgtggcagccggcacctgtggtctcagctgcatgaaagactgaggcaggaggatcacttgagcctgggaggtggaggctgtagtgagcactacacaaaagaaatcgctgatccttcagcagccatttcccactccagcaactccccgcccctggcaaccactcatctactttctgtctctatggattggcttgttccggacatttcacatacacggaatcatacagtgtgtggtcttttgtgtctggcttctttcactaagtattacatctccaaggttcatcccgctgtagcatgagcgaagtgtgacaattgatagatggatcgatgaaggttacattcattcattccatacacatttactgagcacctactgtgtgccagtcttggcgacgacccagtcaggaatagaactaacagtaaaccctgccctggagggcttctggtagggaggagagacaataaaccgaataaactagtacattatttggaatattagacgctgataagagctcaagtgaagcatggggttggaagttgggtgcagagagaggggctgtgacttcgagcagagcggtcagcaaaggcctcgccgcagggtggccgcagggacgctcccgctcagcccggaaggaggcgagaggcgcggtgcccgtcccggcgactctgggccagcaaagagctcccagcgcacgcgtcggtgcctcgaggcccgggaccctgcgtgtctggtccccgccgtggccctgcgtccgtgacggtgggtggcaccagggagcatttcgcgcggcggggctggggcctgcctttgaagggacggagtcgggcgtcgtggtggggtggacaccggggatccccggggcgcggacgaggggggcgtccaccctgcgagctcacccca

SEQ ID NO: 199252 - DNA, 1000 bp, Homo Sapiens
gctcgtattaataattttgcaactaaggcaaggttaattttgcattagttggtgcagaggaagactttttccattagatacttgctctcttgagaagcttgcccaggaagtatagtttgaaataaaagagaagtaagataagaatgaagtcaagcaaactgctttcctgtatattcactatgttgttgaaagacatggctatcaatcacatataatgaagccagaaaacctggaagtcattttcaattttccctcttatgttcctttttcttcatcaatcacaaagtgaaatggacactaatttataaatatgccacatctgtcttctttgcttcatctccgtttctactgttctagttcaggttttcatccttgtttggattactactttttattcatccatatgcctgtagtttctccagttcctctttccatgtagttaatatttgacatcaagtgttctccgtccctacccttacttctgcttttatacagcttatggctggctaaatcattgaattgttagtgcggaacatagcctctggaatatggtgcacatgcaaatatttttgaatgattaagcactggagacagagcaggagtcagtattaagaactctttaaatatcctaatgtcactgaattctgtgccttttttcatggaacatcagacatttttcttattggaaaaagtgttcaatttttttttctagccatgtagaactttttctcctgggttggttggtttgtttgagtcctactcttttaccagttacttgtgaacagtggtcttgacttcttttctccttggaatacctccatcatttgacataattattataaataattgcccaatatgtaatatgtgattattagcataagttttccatataaactaataaaaaagctgttacatggtttcactatgaaaacaaaccagaatgaccttgtgagaggtagaaataaatcttattttctttacaaaaagtgccttctagctc

SEQ ID NO: 199253 - DNA, 1000 bp, Homo Sapiens
atttcaggaaaaaatgcaggactgggtggggaaagacagaaggaaaggccacataagcaattattttttcccccaacaaactataatatacatttaaagaaacatctgctataagaaaagataaagcctcttttaaaatatagtgacatcagacacaaaagcacaagattttaaaagagcatttcagaaagcagacggcactagaaattgtgatgtggtacattagatttttacaaaactgtaaccatgtgctttattatgtgccatgccccaggccagagtggaacatggctggcatgagggacccagccatgccactcgggtatggaaagaatatggtggcaggagggcaggcagtgtagaagtgacagctcatgtgcatagctgacttcctcctgcttagtcatctagagacttccttaagagtgtcacagctaggatgagttcattgttcagtttgttcattttgagaaagtatctttcgggaattgtgtctaacgtgggtttcttttctgtacttggctccaatgtcatgggcaaactgccagccatgcaagaatccaagtattctgacaggaatcatcccagataattctgcttacgccagctaaacaacttgcatcattaaataaaccgtcttctgactgtatttatgaaatgttatgtctacctatcaatgagactacattatgcaaacattcaagtggaggctcattcaactgacccctgcctgacaatatttttgttttttatctggttcttctgataataatcatatgccctccacagagaaactgatgctatggagtaaccattcaggggatataaagaaagaacagtatctaatacacaaactggtactcaaaagaattctgaagtcaccatgtatacaagaaaaaaaaaaaaaagaaaaaagaagtctagagaagttgaaaactctttcacattctttgtgggttttcaagtctactggggacttgttttggaaaaagctgaattc

SEQ ID NO: 199254 - DNA, 1000 bp, Homo Sapiens
cctcacaaaaattacaccctattttacaagtgtatacttaaaatgtcagttaactgaactctgtggggagcgtggacagataaacagaagaatttgacccacactttcaggcagggaaacaagaggcttaattttcttttttctatgtctgttcagttttaaagagaaattattttttcctcaaactgctatgaaacctaatttgaaggcatttaaaaaaattgttatctgttattggatttggtatacaattctgcttactctataagaacataaagaaatctaaagaaactaaagaactctaggccgggcgcagtggctcacgcctgtaatcccagcactttgggaagccgaggcaggaggatcacgaggtcaggagatcgagaccatcctggctaacacggtgaaaccccgtctctactaaaaaaaacacacacaaaaaaaattagcgaggcgttgtggccggcacctgtattcccagctactcgggaggctgaggcaggagaatggcgtgaacccgggaggcggagcttgctgagatcacgccactgcgctccagcctgggcgacagagcgagactgtgtctcaaaaaaaaaaaaaaaaaaaaaaagaacctaaagaactctaaagagaaaaggaccacctttgcaaaaggcagcacagacataaaattgcctgtcattaaaggcacggattttccatcaacggccattattttcacattatagagtcatagccgtggaaggtgtctgaagcagtttcctcagaaagttcctgacttcccctagaaatgaacttcttcaactttgcaatttatatttgcataaaaatttctacagccattcaatttgcaaaatatatggatctatcaactgtaaaatagttcttaagtgtattctttttgggtatttgaatctggtggatatatggttttatgtctcagtacaaatccatcattccaatattagtcttcagctttaattattcaactgtggaattc

SEQ ID NO: 199255 - DNA, 1000 bp, Homo Sapiens
ctgtaatactctttatcaaagtataatatatacagcaatgtgcaccaatcttaaatatacattttggtacacttttatgtaattatattcttgtttaactgccactttgatcaatatgaagaagactccacatagtgggacaccatctctacaaaaaatttaaaaattagccgggcatggtggcacacacctatggtcccagctacttaggaggctgagatgggaagatcacttgagtccgggaggtggaggttgcactgagccatgttcacgccacttcccttcagcctgggtgacagagcaagatcatatcttaaaacaaaacaaacaaacaaaaagacaaaaagaaaaacaggacattccagcactccaaaaagttctcattcgtcccttcccagccaatatccctatgacccagagataaaccctattctgacttatatcacttttgattagttttacctattttgaatttcataaaaatgaaatcatatgtacttttttttgaaaaagggtctcactctattgtccaggctggaatgcagtggcatgatcactttggtagctgagaccataggtacatgccaacatgcctggctaaatttttttattttacttttggtatagatggggtctcacaatgttgtccaggctggtcttgaactcctgggcttaagcaaacctcccaccttggcctcccaaagtacaggattacagatgcaagccaccgttcccagcccatatatactttttaagtctgtctttgttcactcataatgtctgtggggtttatccatgttgttacatgtagtagtagatggtttttttgtctgtttttactgtgtaaaattctaccacatgaatacactataatttattagttccccactgagacttatttggcttatttccaaagtttggttattaaaaataaaactgtcatgaacattttgtccacatattttaatggtcatatgcattcatttttgggggtatatac

SEQ ID NO: 199256 - DNA, 1000 bp, Homo Sapiens
tggcctttaggcccctaacctgcatgtagagtttcagcaagcctcatgctactttaggttttcttaggagctaccaccaaaaacataataaacaatcatttttttgcaaacactgggtcagcctgcctgagaggatctgtgaaagtgtctgtggacttaaggttgagttttccagagtggctgttccactttggcagtgataccctgtgcttgtaccatcctgacttacctctgatctccatgtggcccaagatcctgcataacacctattaggattagcactgtgggctcagtattctaggggtgtttgtgtcattgcatctttgtttattacatatccaaaattggttgaagtacctataaaatgagagatttgctggaatatggaaaggcccattctctacgtttttagtatttgtcaaagaattaccttctctggccctttccctcttgccttcaaaaattgttacatacattaactttaatttcggctgtattgtaactgctccaggggataggcttgatgtcacctcccagagtaagagttgattagaagcaccaaactgaccttgagacccttctgatccttgtcaatatgaacaaaagtcagaactatttctgctttcttctattccttgtggctcttccatggatatgactttgtttgagccaaggaacagctgctactgagacttaagaattccaaggaggccgggcgaggtggctcacgcctgtaatcctagcactttgggagctcgaggtgggcagatcacaaggtcaggagaccagcctggccaacatggtgaaaccccatctctaccaaaaatacaaaattagccgggcatagtggcaggtgcctataatctcagctactcggggaggctgaggcaggagaattgcttgaacccaggaggtggaggttgcagggggctgagattgcaccactgcactccagcctgagcaacaagagcaaaactccatctcaaaaaacaaagaattc

SEQ ID NO: 199257 - DNA, 1000 bp, Homo Sapiens
taaagacagaaatgtcttcccattttggtcaacctgaaaaataagaggggcttctagaagcctttgttcagctggcagttttatatataaccaactcttttttttgttttttgtttttttttgagatggagtcttgctcttgttgcccaggctggagtgcagtggcgtgatctcggctcactgcagccttcaccacctgggttcgagccttctgtgtagctgcctcagccttctgagtagttgggactacaggtgcatgccaccacacctggctaatttttttatctttagtaaagacagggttttaccatgttggccaggctggtctcaaactcatgacctcaagcaatccgcctgcctcggcctcccaaagtatatataaccaactcttaattgttgagcaagtagaggaaagtaatggagtacaacccacatgatggagcagaacaacgattggtcatgtttgattttgccatatgcggagcaccccacattgccttgtacaaggtggaggcatagtctctgctttacccaagaagctgagaattctcatatagcaactaccacttaaaaagataaaaatgggctgggcacggtggctcatgcctgtaatcctagcactttgggaggctgaggaggacagatcacttgaggtcaggagttcgagaccagcctgaccagcatggtgaaaccctgtctctactaaaaatacaaaaattagccaggtgtggtggcgcacacctgtaatcccagctactcaggaggctggggcaggagaaccacttgaacccgggaggcggaggttgcagtgagctgagatcacaccattgcactccagcctgggggacaggagtgaaactccatctcaaaaaaaaagataaaaatgaagtaaacatcagttttctgcaagcgttctcacagccctgcaaaatgtggccaaggcagagaatgcccagaacccggggccgtttcctccaggctgtctcctatcctagaattc

SEQ ID NO: 199258 - DNA, 1000 bp, Homo Sapiens
tcccccactcccaaggccctaggttccctcccagaaccatgtccacatacatctgcaccctcctccccaggcagcacaccacccatgcttttctgccccttgcttctgtccctcaatgcatcctgcagacggcgccagtcaggacttggagttcctgccacctttatatcagcacacagggttccactgcagggctgtgcccagtcctcaaagactgagatctagcttgtttctcatctcctgcccccacgcctgctcacctgatagtccttttgcagcaacacggtgtggatgaggctcttgtcaaggcacagggctgcaagcttccgacaggtacgccggacgttcagaatcagatctgtgctggggacgtgactcaggatgtgaaggaggatctcatcagagaaccctaggaggtggaccccgtctgccatcccggctgctgcagggtgcatgtcatcatcatcattggatatgtcctgaaaataagggggacaccattcccacaggatccccaaggatggctgtcagcctagcctgcagctaggcagagaagcaaagagaagcccttatccatgggaaagaaggtgtttttactaaaactctcaactgaatgacaaagaattcacgaaatccttcaaaaccccattatagagctgtaagccagggtctcccttcaaaaatgaaagattacaaaaaaagatcatcatgtgtttatttcttttgttgtgagacagaagtttcactattgttgtccaggctggagtcaatggcgtgatctcggctcactgcaacctccgcctcccaggctcaagagattctcctgcctcagcctcccaagcagctgggactacagacgcatgccactttgtccagctaatttttttggttttttgtagagacggggtttccctatgttgctcaggctgatttcaaactcctgggcaagtgatcctcctgccttggcctcccaaagggtgttttgttataatagagacag

SEQ ID NO: 199259 - DNA, 1000 bp, Homo Sapiens
ctaagaagtgtatatttaatttttaaaaaagaaaagtctgttaggagaatatagcattgaataactgtaaacactccccagggatttggaaatgaataacatagaccctctctcttttttctaaagaaatttagtaattatattgctgcgaaatgcaaactattcgatatactatctggccactgaaattcaaccaagagacactaacagtcacctgctcccttttggaaggtctgttacatttctacctccataatgagcggatgtgtaaatgtaaaagaaaaaaaagtgttgaggccacagttatgtgaagctcctcatccaagctcttcatgtaagcaaattacagaaatcattttccatccaagggtcgaggctaatgcaataagcccgaatcaaatacgacatggagaaatcacatatgctgatgctagataaacaaactaagcaaactttaacttaccaaagaacaaaggggtaaaatgatattgaaggaaggttatgtaatttctgtgttaaatattggataaggtactcacaagcagttctttacacatggccacagactcacttttgcatatgatgctattcacattgaaacattaaaaatgctgtggatacttaatatatctctgtagtttgtgtaatgacattaaactgttgtactttctaattatgctatttttaatttttatgcaataatcatgtcagtcaacccaaagatcctaactcaattaactatacatagagaatattcctgaaaattttatcaagattttgacatatttagcaccacctgatggtacaaaagagagatgggaatgggtcttaatatttgaaccacagaaagggaaattatgtcttattatattaatgtatatgttttaaaacacaaaatattttgagaattttaggatggggcatcaatttagaagattttcatgtaaaatctatcaaaattatatttatatagaaaaaggaaaactgagaataagaattc

SEQ ID NO: 199260 - DNA, 1000 bp, Homo Sapiens
atacagccagaattcaatcctatatctttttttttaaccagcatgcctttattcttaagttccttatgcacagtgtttagttgtgaaaaaatggaaaataaatgcctgccaatatagcctctgaagttttgctatgtgtgtaattcttcagtagttacactaatggtgggcacatacatagacaacaatctctttgctcaacaaattccttttccccacttcatggttacaatctgtatctatgatcatctacgtctttaacaatgcaaatacacttgggaattgcatgcaattgaccttgacatatgggttaatgtcctaaattgcagaagagtgaaaatgttcaggtcttgaaaaaaattatcacaatacctttaagtgaaaaaagcatgtatagtagggaagttttataccttttttttttttaacatacacactcaaatgcacagatacaggaaaagatttggaaagatatgtctccagatggtagctattttggaatgcagtgtttaggaatgatgatattctttttctgcctgttgtattttatacattttccgctgtgaacatctgtcagttttccagttctttgtatgttattacagaattctcgtgcatgatgatgcacacctgattcaggcttaaagatatcaaattaagaataccttacttcaaaaccataagcagccatatagtaaagaggctaattgaaggcctcagtgtagcagcaagaatttcaatggaaagattctcattagtttctcaactatccttcagaaaagaaagatgttacatcaatctagcagtagaaatgaaccaaggtaatagcatagagatggaaaaagggtttaaagatgcaactgtattttatttgttgcaaataaataaaatgtaaatccaaggaagcaatctgagacacattataagggtggctcagttttagcaaatttcgctaattaaaaaaaaataacaaaacctcataaactaagtttttagaatg

SEQ ID NO: 199261 - DNA, 1000 bp, Homo Sapiens
tgggggctgtattcacaggtcaatctaggagttgggcccctctcttttcctgcttgagttaagaattcctggcagagaattaaagaaagaatttaaaccactggctcttggggaagcttcctgatgccaaccaagacatctgaggtgtgacctcagtacttcctattggcatcaagtttggcacaggcttcatgatatttgaactttccttagtcttgacagcgttggaattttgtcggtcctctgagttctcattcacctcactctactgtcaggaaatcataggttacacttacacaaatctggcaacacctcaggatgttttgggaactgtcactctttgttggcatggaacccgtaccaactgctctttgtggagtctggcctgggcatctcgtgctaggattggagatctgggcaaaatttaagagctggaaaaatcagagtgactacaacccttgctctcaaacttctcttggagaagtttttcattaaggtcaagttccaagcatggcacttggaccaggactcagaacccaagaagtcaagagttgagcagacctcggtacaaagtgagtatcagagcaagataggaagcaaaggaagaaggtctaaccatacaaagctgcaaattttggctaaagagtttggcctacataatattttgagaaaagttaagttaattgtccatatttaactcataatgtgagaataggatatctcacattcaagtccagatttccatctcctcttgctgcaccttgtaggtcctcagcccaggcaagagaagactatcctatctggagctttctcttcaaccacttaactcattccagaggaaaatgctcattctaggtttgcattttttggtacttatatgccatttcattttcattttcctaaatagagtacaaggaacacacactatcctttcctctgtgttttcttcctgagaaactattatttaaaccaaatattggtacttgagaaacagagaatt

SEQ ID NO: 199262 - DNA, 1000 bp, Homo Sapiens
cctggaaatacagcccggctgctttaagagagctggaaggagggaaagactgccagtgttttggcgttgcaggcttgtttatctttccgcctttcctccaaggcgaaactcgttttgcaagcaacattcctacagaaaatggcacacgtcataaaaagagaccaatttatagaactggcaccgaagttcatgtctcactccagaagcatctcccagctccccatcggaaacccaactagatgtagaagtccatgttaaaacttagagagtagacttagggaggggaggtgctgagggtgggggggacaggagagaatgaagtagatttgcagatatcctgtaggctgtacacccagagaccaaagtcagccctaaatgatcttccaaaacccaaggaggaccaggcaggtgccagggcttggaaggcttcaaccttgggactcatgggggagaggagtgaatttttacacccagcttgccccaggacggtccagaggcaggtccacattcttggccatcctaagtccacctgcttgggccagccatgaacctccaggactggcctagtgggtaactgccaccaccaactgctctccctcccaccctggcgcctctctgcagggcctggcggggtaccaggaactcaaagaaagcctgttgctgtgggcatctagttgatgaagtcagagtaggtggtgctgtgggcaggcttcaggacggcacctttgcgtgctgcagttgaaggcaaatgtgctcttgaaaacgggaaggcttggaagaaaaggttaagggatgtgggtaatcaaaagccaatctgtcctcccttccccccaaaatacaccccccttagggtactgaacctgcacacttgcatttccaagctggaaacagtgtcgagtgcacagaacacagcacccgcctgtctctaacttgtctgaataacagggccatttcagaggggaacaacggccttcagagcctctgcaatttccagaaagct

SEQ ID NO: 199263 - DNA, 1000 bp, Homo Sapiens
gatttggcagaacttaggagttcatgtttctagttttactggaatctggccatttctctccatcccagttttctgggccagacccctagctgatgaatatcctaactttttcaagagacccagcaaggttggaagttcatgtgacattgtaattcatccacccacagaacagattttaggtttgtttttcagaaatctcaactccacaataagaagtgaaaagggattttttgtcacagtcatagaaattttctggttgtttgctggatcttgagctgggaattccaagccctgcaccaccattttctctctgtcacattctctagcatacttgcaggcaccagccataccagctggaaactgcctgttctgaaagagctggaatgacctttggaatgtgcagctgaggtaccaacttcgagatgacattttttgtggaggtgagttgttgtccttaaaatgtggaatatactgtaaacgaatgaccattattttgtgctgtgtctccaacacacagaccacatgggtctaggactcaaggagtggaagtagaagtggccttgctcaccatatcttctggagaccctcttggaggattcctgcttcccgtgcttttagctttatgctttgtatgcatagaggttggttcccagagtagggagcatttccaaaaggggacacaagaaaagtcctaataaaattatagctgccacctggtcattttgagctcctgatcccagaagaccaggaggctaggaaaagagttaccaactcgcaggaataattgactgtgatcataatgtggaaataggggctggaaagagtatgtgaagaactcatgtgaccattgggtcatctcttagcacttctgtggccaattctactacaaataggcgggtacagcaagcactgctgataaggacatggcagtcaggacttagatctctcagggatgagggtttgggacttctcatcaggacagccacctacactgcattac

SEQ ID NO: 199264 - DNA, 1000 bp, Homo Sapiens
tttctctttcttctgacaagagtggccacatcaaaactgactgttttctaggaagtattttcttggaagctgaagacaagcctagaggagaagactgaatggactaagcctctcactctgtgcttttgtgagcataagtatctgaagagggacagagagcttcagcatttaaagtgggcaaggatattccccttgtcttgagtgaagcctggcttttcttcagcaatacaacgtcaccgcagccctcctgcatttgttttctactgatacacaacaaattactacaagtttagcagcttaaaacaatgtacatttatcatctcactagttctgtgggtcagaagaccagacagacatagcttagctgtgtcctctgcctggggtttcacaaggcaatcaagatctcaactggggctgtatttctttctaaagctcaagtcttcttacaagctcatgtagtggcttgaagaattcagttcctcgtggttgtagaactaacacccttattttcttgctggccctcagccagtggccaatccccagaaggctctcatagtctttttcacagcacagttgcttagttcttcaggaccaagcaggataatttctcagacctctagatcctttgtaagggcttaactgattatgtcaggcccacctaggatactttcccttttgattcattcagtgtcaactaatcaggaaccataattatagctgctaaatctctttgctgtgtaaggagaatttccatcctaatcgtgggtcctgtccacactcaagggggcagggattatgatagagcataggccattgggatcatcttagaattttgcctaccatacctgtttattttctcactgtgtttctctcagggtcaggaggtgggggcaaagatcctctttgctctgcatagctgctttcagactattattttccgtcctctcatgaaaaataacaacaaaaaaacactgagtctgagacttgtgctttttttctt

SEQ ID NO: 199265 - DNA, 1000 bp, Homo Sapiens
acgccttctttcctcccccactgcccccctacaaccccgacactcttcacggaacccctgtgtctgctaggcactgggtaggcactatttgtataaataaaactccttttgggcctgtgtggatcccctcctgagccaaaaggcagtttgagtctgggagtgacaagacctggccgtcacaggagtgggtggggcagggagaggaggtgaccttttgcagctcaaccccctccacagcctcatttgaaaggtcctgcccaggactgtgggggagaggggaataaggagggggacactgtctcaacaaaggtcatgatgtcccagttttgcccgaggctgtcccccatgtcatttctgccagctgcaaagagcaggggagcccacagccagctctgagtgaggggatggcggccaccacccggtcagagccccgctccgcgcctgccagagcagaggatgctggagaagcaggggccaggacacataggtggtcccagagctgggagctgctgaaggaggctccagagaccccgcagcccccacaaacagcatccacttcctgcagggtcctctccccaaggccccatttgctttgagcaaacaaccctctcactgactcccaggcctgaccctggccaggctgcatggggtcctctggggaggttttctcaaagacctgtccagcccatgggccactgcaggaaatcctggaggccagcgctacaatgcatcgcttccggcagcctaggggtacctgggcacaggaaagaggtgccggcagctttcaggctttcaaaagggactgggtggccccctgggatcatcacggccttgagcagcagtggtcaggcaggggaacagaaaggctgacctgggagggcaatgggagtttcgagctgtgagggacagccttcctaaaatcccactttctcactcctctgcttacatacattccatggctccccattgcccaaaggatcaagtctagacactgaagctt

SEQ ID NO: 199266 - DNA, 1000 bp, Homo Sapiens
ggagcagatacctcccagggcccagtggtggcacctgcagccagggtcccacaaagctggaggctcagggcagaactccacgctggccgcgaggctcaaaaaccttcctggtgttgcatgagccgcgactgcagctcatgcgtcttcctcagcacaggcccaactctcggcagcgatgggtctggcagggagaggacacaggagacctcaggggacacggtcttctcctttgtcccagagcaaagctctgccaccctcacccctgtgggacacggagctgtggccatgagctagtccacacccatgttccagttgccctggcctcatccaagcatcccctaccctgctcccagcagggcaatcatgcttcagtggccccagccacttgctggagaaagttctttatcaggggacagcagcctttgctcacagagcaagggtgagctggggaaagactggcctcaccaccctgacctgcacttggttaggagggccgctcagtgctgcccagaccccagaacaacacagctgagtgggtcagctcttctgaggtgcctcttgcggcctctcctcctagactcctggcttcctccaggcgacaccctgggactggacctgaggcttaggggcatagggtgataatcggagaagatgcagggagggcccagtgcctgcaccctgaggcgcatctgtctatctgctgggagcacactgctcacccctgaccaagtgcctgcctctgttcctcctccctttccccacacctgacccttggtctcagatgtcaccctccctagggccagcctctggccctggccctggccccagccctgctgtctccctgcctagctacctggcccacattcattctaatacatctgtatgccctagacagatgcctgctctctccaggactcagtttccctaactgttcaagaaatgggctggactgttgttcttaacctgtccattcttccaggaacagccttcacggaagctt

SEQ ID NO: 199267 - DNA, 1000 bp, Homo Sapiens
tttgcgcctatcttcccaaacatttgcatctaaaatgatctacgtacatacttttcttctattttagaaagtagaatgaacaaatggaaaattattcattagttactaaaagaacaatgcttagggtttatccatcacttcaccgacttctttaaaatttccaagtctttcaaggtgtcttaaaaacagtaacttaaaaagttgccacctgcaggctaaactcagtaacacattcaattctgaggaaacccatctggcagttaactgatcaaatcaagtattttcataattcctgattttttttcctcgaaaaatacatttttacaaaattctcccacccaccttcttctctcctatattctttccagcagtgttgaaagaggctcagtgtctctcttatcttgaaaaccctcccctcctctaagatctctcagactactgccccttctacttgtctcatcaaagctaacttgctttctccagtttaactcccaggtgttcccagccctctggcttcatgctcactgaaattgctcacctccttaaaactaaccccaacactggctgggtgaagtggctcacgcctgtaatccgagcactttgggaggcagaggcagatggatcacttgaggtcgggagttcgagaccagcctgaccaacatggtgaaaccctgtctctactaaaaataaaaaattatccggacgtggtggtgcatgcctgtaatcccagctattccagaggctgaggcaggagaatcgcttgaacccgggagacggaggttgcatgctgtaagccaagatcgcaccattgcactccagcctgggcaacaagagcgaaactccatctcaaaaaacaaacaaacaaacaaaaaactaaccccaagactaacaagtatttgcaaggatgtagagaaactggaacctgtgtgccgttgatgaaaatgttaaacagtgcagcagctaaggaaaacagtatggaggctcatcccaaaaagaattc

SEQ ID NO: 199268 - DNA, 1000 bp, Homo Sapiens
ctaagcaagcacataattagataagtaaacactgttcacatggaagtgccaggtgagaaggtgacaaagcgttttaaagtgtctcaacgttgaaagcaagaaaggaaaaaatgttttaaagtatgtttgaggctgggttacttggttacactattcagaaattaaaagagtttttttttttttctttttgagatggagtattgctctgttgcccaggctggagtgcagtggcacgatctcggctcactgcaagctccgcctcccgagttcacaccattctcctgccttagcctcctgagtagctgggactgcaggcacccaccaccatgcccagctaatttttttgtatttttagtagagacagggtttcaccgtgttagccaggatggtctctatctcctgacctcgagatctgcccgccccggcctcccaaagtgctgggattacaggagtgagccactgcgcctggcctgagagagccttcttaaacctatcagaaaaataaaaatcattgtttaatatctatctccctcatagttttcactttcttctctttccctgggcaaagaaagattatttctttgtttcctgcctgagtctcacatcccattctcaccatgagacctaccaccaggttccaaaatccatatgcctgggaccaaaatggtaatttgaagatcacaatttctttccagtaaacttttatgtttcatatcataatgctgagcatcattcttgatatctgccagggatagttgtgggatttgggtgaaaaatactaactcattctcatcctatttccctgagtaccttttcacatcttgtttgcttttatcccctttatgtaccttgtctaggacaataaatatttgttgactaaatgaatcttgtttcattaggcctctcattggtcctttctgatgtgtccttaaagcattttattcactctcagttcttgactttatgaaagtcctgcaagctacaatcatctgatgaattc

SEQ ID NO: 199269 - DNA, 1000 bp, Homo Sapiens
tatgaagaatgaagaaaattttaacttacatggcaaaagacaacagacaccaaaataaaggtgactcatgttggaattatcagataatgactttaaagcagctattttaaaaatgcttgaataaggaatcatgcacactctgcaaaccaatataaaaatagaaagtttcagcaaaagaatagaatatataaagaagaataaacaagttttagaactgaaaagtgcagtagccgaaataaaaaccactggctaggctcaacagcagaatggaggtaataaagtcaataaacttgaagatagttcaaaagaaattagctaatatgaatagcagcgaaaaaaagatggaaaatgcaaaaagaacatagcctctgggaatgtagaacaagaaaagatttaacatttgtgtcatcagggtttcagaaggagaagagatagtataggactcaaaaaagatttgaagaaataatggctgaaaacttacaaattttgtgaaagataaaacaagcaaagccattttgagaagctcagccaccccaaataggataaacccaaagaaatccatactcagacacatcataatcaaactgctgaaaatcaaagacaaaataaatagtgaaagaactgtaaaaaaatatatattacttctgggtgaacaatgatttgaatgactggattgctcttcataaactctggaggccagaaaaaaattggaacaataatttattgtgctgaaaaaaagagttgtgaatccagaattttgtatctaccaaaaatatccttcagtaatgaaggtgagattaagaaaagtaatactgcaaatgtacattgcagctcaggctgtgccctcagagtctgtgtgagagtaggcaatagtggggacagtggttagtaaaagagcttgtaccccttctcaaaggggttaagtgcttgttaaatccaggagacagctgtcatgtgagaatgaaggtccagtgctgctttccagctctccaaggaaaac

SEQ ID NO: 199270 - DNA, 1000 bp, Homo Sapiens
ttggcctgcggtgcctcttcctccaggggggacatggagctcagggaacccaccaccgagatggcttggccctgggctgacaggcgccgcttgatcaggacgctctctgtcttcaccaccttctcctccttgggctcctccttgcactgtttggtctgctctacacctgagggggaggcagcaaacagacacccagtgcgtcagacccacctgctccaacccgaggacctcctgtgtgcctggctctgttctgagccctgtacacacaaaacctcgtttaaatccacacaacactgtcctggagtgggtactctttttatccccacttttcaatacaactgaggctcaaactagaaatgccattcattgctggggggagcagcaaatgctacagccactttggaaacatgatgagcagtttttgttttttagactgggtgtcactctgtcacccaggctggagtacggtggtgcaatcagggctcactgcagtcttgacctcctgggctcaagcaatcctcctgcctcagcctctcagcctcccaactagctgggactacaggcgcatgccaacatacctagctaatttttgtatttttttgtagagatgaggtctccatatgttgcccagcttagtcttgaactcctgggctcaagcgatcctcccgccttggacttccaaagtgctgggattacaggtatgagccactgtgcccagccctcagctgttttttttggagacggagtctcactccatcaccaaggctggagtgcagtggcttgatcctgactcgctgcagcctccacctcctgggtccaagccattttcccacctcagcttctggagtagctgggattatagacacccactgccacacccagctaatttttttgttttcagtagagacggggtttcaccacattggccaggctggtcttgaactgctgacctcaggtgatccacccgcctcagcctcccaaagtgctgggactacaggtg

SEQ ID NO: 199271 - DNA, 1000 bp, Homo Sapiens
ctgcatagctgggattacaggcacctacaccacacccagctaattttttatatttttagtagagatggggtttcgccatgctggccaggctggtctcaaactactggcctcaggtgatctgcccacttaggcctcccaaagtgctgggattataggtgtgagccaccatgctcggctgacatatttaaaaattttttttaattgtggtaaaatactcaacatttaccattaatcgtgtttaattatacagttcagtggcattaaatatttcacatggttgtgtaaccataaccaccatccagctccagaattctttcatgttgtaaaactgaaactctggcagggcacgttgggtcacacctgtcatctcggcactttgggaggccgaggcggacggatcgtgagactctggcagggcacagtagctcacacctgtcatctcagcactttgggaggccgaaatggacggatcatgaggtcaagagatcgagaccatcctggccaacatggtgaaaccccgtctctactaaaaatacaaaaattgtctgggcgtggtggcgggcgcctgtaatcccagctactcgggaggctgaggtaggagaatcgcttgaacccaggaggcagaggttgcggtgagccgagatcacgccactgcattccagcccagcaacatagtgagactccgtctcaaaacaacagcaacaaaaacctgaaaatccatgcctaataatcaataattccctgttccctctcctttggcacccaccattctactttctctctgtgtgaatctggtgacgctaggggcctcatgtaagtggaatcacacagtatctccccttttgtgactggctgatttcatgtaccataatgtcctcaaggttcacccacatgacatgttacatccttcccttttaaggctgaatcaggctgggtgcagtgactcatgcctgtaagccgagcactttgggaggctgagacgggtggatcatttgcgatc

SEQ ID NO: 199272 - DNA, 1000 bp, Homo Sapiens
gtcgcccaggctggagtgcagtggtgtgatcttggctcactgcaacctccatctaccatgttcaagcgattctcctgcctcagcctccagagtagctgggattacaggcatacaccaccacacccagctaatttttgtattttttttagtagagacagggtttcaccatgttgatcaggctggtctcaaactcctgacctcgtgatccgcccgccttggcctcccaaagtcctaggattacaggagtgagccaccgcgcccagcaaaaagttttttaactagctgagtatagtggcacgagcctgtagtgccagctactcaggaggctgtggcgggaagagggaggctgcagtgagatatgatcgcaccactgtactccaacctaggtgacagcaagaacttgtctcaaaaaaaacaaataacttcggccgggcaaggtggctcacacctgtaatcccagcactttgggaggcagagtcgggtggatcccctgagaccagcagttcaagaccagcctgaccaacactgtgaaaccccgtctctactaaaaatacaaacaattagccaggcgtggtggccggtgcctgtaacctcagttactcgggagactgtgacagaaagatgaaggctgcagagagctgtgatcgcacccctgtactccaacctagatgacagcaagaacctgtctcaaaaaaatagacaaatacataaaataaaatcggagtgaagctaccaatgtaatgttgagtgagtgatatgtttcagaaaatactttctagatccttgatgtttaatacggtatccctagtcatatgtggctatagaaacgtaaactacttaaaactaaataaaatgtagaatctcattcttcagtgacaatagccacagttctactgctcaacagacaattgtggcttgtggttactatattggacagcacagatataaaacatttccatcaatatagaaatttcttttttattctttttttttttttttt

SEQ ID NO: 199273 - DNA, 1000 bp, Homo Sapiens
accagtcaggggtcacgtcaaggaaggctcagagactgtgtccgaccaatatggtttatttctgccccagccaagcttctttggaccctggctgggggaaaggcaccccaggcaccggcaagttccagtcattgcagatcctccaggtctaggtgtgactggtagtagcctgggcactgttgctggacgttgtattctccttccttcttccgccggcgggtggtcacctatgagggtgaggaggaggcgtgagaatggactggtcagccgtccagggagaggagaccacaggggtgagaatatggccaaagccagaggccttatgcttcctctgtctcccttcattgtttcatttaatttctccctcagttcttttcctcttttcaccactttcttttcttctgtctccttgtttcactctcggtttaaaaaaatttttccccctccgatatccccttcatttctctctccttttgcctctgaatttctttatcaatatatcacatatctaccaatgatctatttatctatcatctagctatcaatatttatctacctgtcaatcaattatctaccaatcaataaccatcaattatctctcacctctcaatcatctcctatttataatccatcaatcatctatcaatcacctgtcatccatcaatcatgtatttatcatctacttatcaatatctatcaactatctgttacctatcaatttattatctaccaattatctatcaaaataatctatttatcatctacctatcagctatccaccaatcatctgtcaactatcaatcatctatcgcctgtcttctgtctaaatatcatttctctctcatctcattctcagtctctttctctctggcttttggtcctgatctcagccccctctctccctcccttcctcctctacatctgtccagcttaactgaggcataactgacataaaataaactgcacacatttaaagtgaatgttttgataagttctgatc

SEQ ID NO: 199274 - DNA, 1000 bp, Homo Sapiens
gaaggcaggtgaactttgaggctgaagaccttcccctaggatcgggggaggagggagtcctgggggggccctgggatcattgtgctgagggctgactcttttcccagtgggtagagctcccatctctctctctttttttttttttttttttttttttttgagacaaggtgttgtcctgttgcccaggttggagacgagtggcacactcatgactcactgcagcctcaatttcccgggctcaggcaattctcctacctcagcctcccaggaaactgggactacaggcatgctctattttgtctggctatttaaaatttttttttcttgtagagatggggacttgctatgttcaccaggcggtctcaaactcctgggctcatgagatcaccccacctcagtctcccaagtagccgggactacagcatgcgtcaccatgctcgcttaatttaaaaatttttttttgtggagatggggtcttgctgtgttgcccaggctggtcttgaactcctaggctcaagtgatcctcctgccttggtctcccaaagtcctgggatcacaggcataagtcactacacctgacaatggagctcctaacccttagcccatctgctgggcgttttcccccagctctgtggcttggtatcttcttaaatgtggagataaatcacgccttctcaaggtcatttgaaatcaaaattcatctccaagtttcaggggcagggaagacttaggcagttaaagacggggaggaagggagtttcaagctgggggcatggcctgcccaaaatcctggacgtgggagagagggaagggcaggtctcagtttcctatgagattctcttggagtgaatatttatttactcaaacccctcctggcagaggcaacgcaactctcccacccccaccccccttcctcttgaaattcaaaacacacatttggccaggcgcagtggctcacgccggtaattccagcactttgggaggcccaggcaggcggatc

SEQ ID NO: 199275 - DNA, 1000 bp, Homo Sapiens
aggcaggagaatcatttgaatccgggaggtggaggttgcagtgagctgagattgtgccactacactccagcctggaacctgggcgacagagcaagactccgtctcaaaaaaaaaaaaaaaaaaaaaaaaaaaaaagaacaaacagggttggatccggaatgggggaaatggaacacgctggggctgagcttccccaggacagagggagcagtggcagccacagctgcccccaaccagagccctgctgtcactctgtctgtcctctgtgtcaccacttggtgctctcccggcccattcctccctctgctccttcaccctcctctccgtccatggcccagccattcattccttccctgcctgcccacccccagccttggcccagggtacgaagatgtagtcgtccatgaagcgcttccggaggttggcggcaatggcgtcttcggtgatctggggaagaagcaccatgtcatccacgccgctctgcttcacgttgtggctctgccagtggaagcgctccttgctgccctggggggtgagaggggggtcggggtgagcccttgcacggggatgcggcacctggctcaccgacgctatcagcttctgggttctgtcccacctcccccgccccacctccattcctccttccccatctccaggagaggctggcagggtccaagccaggccccctgccccagacagaagttgcactgctcggatccagccctcagccctctatttttttttaatttttaatttttatttatttatttattttgagacagagtctcactctgtcagtcaggctggggtgcagtggcgtgatctctgctcactgcaacatccacctcccgggttcaagcgattctcctgcctcagcctcccgagtagctgggattacaggtgcccaccaccatgcccggctaatttttaatatttttggtagagatggggtttcaccatgttggccaggctggtctggaactcctgacttcaagtgatc

SEQ ID NO: 199276 - DNA, 1000 bp, Homo Sapiens
tctctgggttgacctcatttacgttcaggctctctctagatagtggctcctgggaggtctacatttgtatccttttgtcagaaaccagaacagaaagaaagtgccttattctggatggtccaaagtcccaggctggccgggtgcagtggctcatgcctgtaatcccagcactttgggaggctgaggtgggcggatcacttgagctcaggtgttcgagactagcctggtcatcatggtgaaaccccgtctctactaaaaatacaaaaattagccagacgtggtggtgcatgtagtcccagttactcaggaggctgaggcatgaaacttgcttgaacccaggaggcggaggttgcagtgagctgagattgtgccactgcactccagcctgggtgaaggagtgagactccatctcaaaaaaacaaaacacaaacaaacaaaaaacaaagtcccaggctcatacccctctggctcacatggcccccttccaccagagtgtggggtcagctccactgcaaccacgtgccctaaagaacaggacagtctcccccgaaaaaagtgagatgttggaaattcaacgatgacagacaccttctagaactctcttcctatttattttgcctactctgatgtccttttctcccaggcaaagataaagcccagcaagcaggtataagcaaacggagagtgctcctgtccctcagggaggcaggggaccttagaccattgcagaaaacacagcagtgggtgtgggtgtctgtctggggctagttgtaccttgtaaaccgaggctctgagttctgtgatgatgtctaactcctttagaagccgaggtaccctgtagtaagcctgagtgtatcagttcctcctcatggtggctcttttttctggcagcccacttatctagaacaaaacccataatgaaaacatgagaatggccgggcgcggtggcttatgtgctttgggaggccgggacaggtggatcacttgaggtcaggaattc

SEQ ID NO: 199277 - DNA, 1000 bp, Homo Sapiens
tggagagatgttgactctcatacctgggcttaaggccacaggtacaatcatgattcataccagcacaaatgtctcagagcagattgagaatctcatgcatcaggtataaagccctagggtgatacataggtgagattgtgagactcaccaagtcgacagaaaagattgtcatcttcccacatgaacacagcccattgttaaggctctggatttcacaaccaaaagcagtcaaatgttggaaaattgactcttatatgtgaatctggtccacaggtaggcaggtgattctaagaccaatattcagcacacctgtgaagctgtaacttcacccagataaaacagcacacaggaaagattgtgcctctcatgcacagatccagtttattgttgagatgaactcatgtacttagacccaacatatatgaggtgttaactcacatacttagaaacaggacatggctggattgtaaatatcattctatgactttcctacaggtgtaaatgtgatatatgcctctggccagcacctgagtgatttgacctacagtctgggaccagcccacatacaggattgtgacttatttttggacccagcacctaggtgatgtgactctattatcctgccttggtgctgcccacagggcacattgttggaactcacttctcctgcctggttcctgctcacaggggggattgtgacctgtgactaacccagcacctagctgatgtgactcctcttctttttatgttcttccctcaggggagactgtgatgtatcagtgggcccggaagccaggtgatctgtctctccttcatgttccttgctaacagagaacattgtaatttactgctgggcttggcatccaggtgaggtgactttgctgcccgtgtcctgctttcaggaggggattgtaacatttatctctggcccaggtgagattgtgacactcttatgcacacaaaactcatagtaaagattttcattcttgcccatgaattc

SEQ ID NO: 199278 - DNA, 1000 bp, Homo Sapiens
cagtgaccacagggaagacagaagatacagctgctctgtcccctccccggtgaccatccccatccttctcctggtgccatgcagtccccacagttcctttgccctgtccacctctccccaaactcactgaacctgctgggctgcaaattcagggactgtattccaggcacagcgacgaagaggtcctagccactacccagttctggtgtctgttagctgttacaaaattctcaggagacccttctttgaggaagaagtggttatggacccctcaggagctgagagaatgtctaaaagggctctataaacaaattaaaataaaaattcccagtgataaggaagcattgagtcatataatagaggtgtttcttttaaaagtacaatgattcttaatattggctgcaaaatagaatcacccaaagaggtttttaaatactgatttaaaaaaaagaagaaaatgaataaaatgaataaataagtgaatgaaaaaaccaatgtccaccccccagattactgatgttattgatctggagcagggctgggcaccaagacatgtgaaagctcactaggtgattctattattcagaggtacataaaataacagagcatcttataatctgtagtgtcttagagtcaatgaaagcaaacacactgctgagtcctgagaatttacccaggaactcaccctgatctcccaaacacttcccagctcctctggatgagacaccttatcgagccaacaacggcaaagtcatcaacaacggaatgggcacacaagctgcatgtatattgtatctgtaattgtcagaacataactaagcctagttttcttaggcctattttacagattagaaaactgaggatccaaaaagtcaaagttgcccaaggttacagaggaagaaactgacagacatccgaaaaccaggcccttttcaaaacaccacactgactctccaagatactgtgctccttctttgtacagggctaggagctggaattc

SEQ ID NO: 199279 - DNA, 1000 bp, Homo Sapiens
ctgtgtgatgccgaatttttatatacactaaccaaaacacttaacaaagtgactgcaaagggagagatgagaatccaattgtcttataataatccagataacgttatttttattaacatatattgagtttattgttacttttaaatattctaaataatttgtattcattcttcatttctaatatggtaaatatctatctttacatataaaacccacataaacaaaagtcctttgggtcctcaattttaagaatgtaaaggggtcttgggacaaagctttgaaaaccactactctagctacatcaatgctcttcaaactgttccattcaatagaaatgcctcttggcacttttcaaggacttggaatgaagaaatgaaacatgcagaaaacattgttgcacaggtcctagatacgtagtagacatgtacccaatatttggtaaatggggaagtaatcaaaaaagacatggaatctccaatattctatttcaaaagtgttataacagaactgcaccctaaacagggtaaatttgtgtgtaaattatactttattaacctgattccatctttacagaatacattaagaggtgacagaagggaaggagagagacaggaaagtaaaaagtgtattacagccaggcacagtggctcacacctgtaatcccagcactttgggaggccgaggtgggcggatcacctgaggtcaggagttcaagaccagcctgaccaacatggagaaaccccatctctactaaaaatacaaaattagccaggtgtggtggtgcatgcctgtaatcccagctactcgggaggctgaggcaggagaatcccttgaatccaggaggcggaggttgccatgagccgagatcgcgccattgcactgcagcctaggcaacaagagctaaactccgtctcaaaaaaaaaaagatattataatgaagttaagttataaaaaataagtgtacagggaatgcttcagtcttccaagccttcaagaattc

SEQ ID NO: 199280 - DNA, 1000 bp, Homo Sapiens
gctgtgttttcatctcattctctgtttctctctgaaaacctttctctagccctacctgtccttcatctgaggttctcattccctccatccccagcagctccagattcccaatctgggtgaacaaagaggacagaaaatctgtgaaggagaggaccgagaacctggaaaaatcagctgcagagacggggaggggaccgggagcaagtgaagctgagtaggagagaaataaaaaggaaactgggttttggagaaaatgacaaataaagtgaaaccagattggcccacgtggatgggagccaagggagggatgacccagctcatttccatggcccgggagagacaccggatccttctttcggtctgtggcagggagggcctagatcctttgagcagatgtgaagccggtggggaagccaaaagtggggttgggacaaggtcagaggctgacactgggagacagagacagcagcagtggccttggacctgagagcaaccgagtcagggaggggccgaggtcagctcggggtccatggccaggacgcacgtccagtgaggagggcgccccatcctcactctgggaacagcgtcctcggctgtcctgcgggagtgctgcctcccactctccaagcacaccttgctccaggcggggtcaccctcgggctggccagatgagcagccaaagccgggcccctgagaatcagccctgggatggtggctggaactgccgggaaagaggtgacgtcgctccactggaggccaagccacagcctcgggtggccaccattgccccatcagggaacccccatgagtgtcccctggggaaagcagagcctgggggagcactcagagccctggcagtcgacaacccctgcacccggttgcagccctgactctttaggatcggagctggcaaatctccctcttctttgcttaagccagtttgaggtggggttctgccaggtaaaccaaaaagaagtcttaagaagccttactggaattc

SEQ ID NO: 199281 - DNA, 1000 bp, Homo Sapiens
gatattggtatctagtacatcttctagtttaaacacattctattgatgcattctttcttaaaaaatatggacattcattgagaaagtgaattgcagtgaacagttaaatagtttgggtaaattgatgttgctcagcaaattatttgcttaccaaacctttggtggcatgaacaatttttgctgagattctatctgtgctcttcctctgtcccgcttcctgttctcaaaagcttttaggatgacctacaacctaggtcatctcagcaaggtgacgcactcaaaaataggtgaagagagacaaaaaggaaagtgagtgtagggcgggggttctcaataatggcattgctgatgctttgagctggataatactttgttgtgggaagctgtcccgtgcattgcaggaaattcagttagcctccctggcctgtagccaacccaagttgtgacaaccaaaaatgggttcagatactgccccatgtcttctgaagggtgagggggtggagggaaaatcactatgagttcagaactgctggtttagagggtaaggtgaaatctggaccaaggttagcacagcagatggacccgtgaagtctcagttggacataggacatgctatgcttgttggtgatagggtgtgggctttgccaggggatttctagggactgaagtagagaaacatgactaggtatgtgggttatggtgttcccaggataaaaatagtcttaatgcaaggaactgaaaggattttctctagatgttcctctcctcaactccaatgaagttcccagtgggcagggatttctgtcagtttcgttccttgcccttttgccaactgctgtgtccagagcaatacctggcacacagccgcttaataaatgtctataaaaagagatgagtcttcataaggaaggatgctatgcaatataggcccttctttacttgtttataagaacagagcagcaggatttataggaccccttccttccttctttccttcctt

SEQ ID NO: 199282 - DNA, 1000 bp, Homo Sapiens
tccctgttcactcttgtgtgtaggctgaactaattttgggaggaacttagtttatagttcaaaatgaaggcaatagcagccctttcctaacacaaacttccttctttcttggagacaagactgcctttgtaggactagcaaattagccacaagattagaaattatggtttaggagtcatgcagctggagactacaagattctggcattacactaactgctcctggggataacatcactgttttgtgtgtgtgtgtgtgtttgtgttttgagacagagtctcactctgtcatccaggctggaatgcaatggtgccatcttggctcactgcaacctccacctcccaggtccaagtgattctcctgcctcagcttcccaagtagctgggattacaggcatctgccaccacacccagctaattttgtatttttagtagagaggggttttcaccatgttggccaggctggtctacaacttctgacctcaggtaatccaccaacctcagcctcccaaagtgctgggattacaggcatgagccaccatgcctggccccatcacagctgtaaaatctaagattagtgcttggaatatttttcagactctgaactggatagatcagctggcatcacccaaattgataaactggcttacctgatctgtgccccccacccaggaactgacttagttcaagaaaacagctttgactttctatgattttatttctgacccaacaggtcaacactcactggcattacactatgcaccaaattatctttaaaaactcaacttcccaaatgcttcgggagactgatttgagtaataataaaactctggactctcatacaggtggctctgcctgaattactctttctgtattgcgattcccctgtcttgataaattagctctgtctaggcagtggacaaggtgaatcctttacatggttacattacaattgatttctgtcttacccagtgagacataagagacctctaactgaattc

SEQ ID NO: 199283 - DNA, 1000 bp, Homo Sapiens
tagtaagggttgaggaccacttaaaggctttgccacattcttcacatttgtagggtttctcctcagtgtgaattatcttatgtttagtaagagttgagaactggttaaaagctttgccacattcttcacatttgtagggttttcctccagtatgaatttttttatgtgtagtaaggtttgaagattgggtaaaagctttgccacattcttcacatttgtagaatttctctccagtatgaattttcttatgtgtagtaaggtttgaggattgggtaaaagctttgccacattcttcacacttgtagggtttctctccagtatgaatcctcttatgtttggtaaggattgagaaatggttaaaagctttgccacattcttcacatttgtagggtttctctccagtatgagttatcttatgttcagtaagctttgaggaccacttaaaagctttgccacattcttcacatttgtagggtttcttttcaatgtgaattttcttatgtttagtaaggtttgaggaccggctaaaagctttgccacattcttcacatttgtacggtttttctgcagtatgaattctcttatgtgtagtaaggtttgagaactggttaaaggctttgccacatacttcacatttgtagggtttctctccagtatgaattctgttatgtttagtaagggttgagggccagttaaaggctttgccacattcttcacatttgtagggtttctctccagtatgagttaacttatgttcagtaagctttgaggaccacttaaaagctttgccacattcttcacatttgtagggtttcttttcagtatgaattttcttatgtttagtaaggtttgaggaccggctaaaagcttcaccacattctgtacatttatagaatttctctgcagtatggattctcttatgtgtagtaaggtttgagaactggttaaaggctttgccacattcttcacatgtgtagggtttctctccagtatgaattcc

SEQ ID NO: 199284 - DNA, 1000 bp, Homo Sapiens
ccgagtctccggtgcacgttgcatgttcttttcatcatgccacgctgtccttttggcccacagcctgggtgaggcatcatatcaatgttcaagaaaagaactaatgtgagcttggcctgtgaggcacttatgaatcattaggcaaatggaccacaaaatatgtgagaatgttcaagcaggactactgggtgcccacatctatgacaattaaaaccggctgggtgcactggctcacgcctgttatcccagcactttgggaggccgaggtgggtggatcacttgaggtcaggagttcgagaccagcctggccaacatggtgaaccctcatctctactaaaaatacaaaaattagccgggtgtggtggcgcacgtctgtaatcccagctactcggcaggctgaggcaggagaattacttgaaccctggaggcggagattgcagtaagccgagattgcgccactgcactccagcctaggtgccagagcgagaccctctctcaaaaaataaaaataaaaaatttaaaaaaattaaaagtgctctacctgggaggtagaggctgcagtgagccatgatggcgccactgcaatcaagcctgggcaacagagtgagaactgtctctaaaaaaaaaaaagcagcagcaacgctttaactcatgcacggtcagctggagttggtcactgtacctagcacctgagaacttataccagatgctgtgatgtaatgtgaattataatacaagtctgggatgctgggaaaacacaaaggatgaagcactggagggaatcacggcgccttcacagaggtggtgacactgcagctggctcctgatgcatgaacagaagccagccctcgggcagacggagacaagcacatgcaaaggcccagaggcacaaagggctttcagagaatggccctgcacactgtctccacttcatagtgtagggaatagggcaccactcaagccctcccagcaaggaatttggggtcagggacaggaattc

SEQ ID NO: 199285 - DNA, 1000 bp, Homo Sapiens
aactgaaagacaagtgtcttagttcaggctgatataacaaattactgtagattggatggtctataaatgacagaaatttgtttcacacagttctggtggctggaagtctaagatagtgttaacatattcaggttctggtgagtgccctcttctgggctgcagactgcctacttgtgggactctcacatggcagacagcagaaagaagcaagccctcttgggtactaatccctcatgggattagtgtcccctcaagaccacacctaatcctaattatctaccaaaggccgcacttgctaatattacattagggggtaggattgagttttgggaggatgcacacattcagtccatagcaacaagttgctaaaaatattgggataattgaggtatggatggaacaactctaaaaaataaataaaattaaaggagtgggcagcgtaactgtcaagaaggttatgtgctcattttgctataccgcatgctgtgtacctgtggccatactatgctctactaaagatatagttctggcagctacaatcagggctactacttggactagcagtagcctgtggtccttgtctaggatttatctagtttttgtggggggcagacaggtgaattaaatgaaaatatgatagggatcagcatcaaggcatcctggaagtctttaagagttggcactaatcttctccatccccacctgaaatgtgagatactgcttttggtttactcttttgtctgaagtttccaagactctacttagctttccccactataataggtcttacttcaggatctaaaactcaatgtagaaattactctaactgccaagcatgtctatgccttcctaactataatagctcttaacttcaggacctaaaactcaatgtagagattactctaactgccaggcatgtctataccaaatataacattcagggactggggaccatcagctgttcccatggacccagggtacacatcataagccaggattt

SEQ ID NO: 199286 - DNA, 1000 bp, Homo Sapiens
agtgtctaggagcatacgaagtctccaattaaaacaaaattgagccgggcgcggtggctcatgcttgtaatcccagcactttgggaggttgaggcgggtggatcacctgagttcgggagttcgagaccagcctgaccaacatggagaaaccccgtctctgctaaaaatacagaattagccaggcgtagtggcacatgcctgtaatcccagctactagggaggctgaggcaggagaattgcttgaacctgggaggcagaggttgtggtgagctgagatcgtgccattgcactccagcctgggcaacaagagtgaaactctgtctcaaaaataataataataataataatagaatatagctctttctctggttcataggctatgctcacctgagtgtaaatcaacagaggtgtttgactaattgctaaaacaatactcattgcagtctccaggttggcagggtggggaaaggctttggttctggttcagcctttatatggacaagatgttgtacaggtttaacagtgcaaatacctccatggcggccattccccctggagttcttgattaatgagaagaccatgtcataatctagtactcctccaaaatgagtaggctgtggaatttcatttctaacttctttatccccaagatcattaaaactgaattatggagcctactattccaatgtcctacaatagatctgacagctataattttgtagccctttagaaaaaaaatatcttggtaggactcttaaaagtatggcctggaagactgcaggtttgccatcttatccatggttgtctagtgggatagatgacttgggtctttacttaatgcaattcttgtaattaggttaaggtcaagaattggttattgtcctgaatttgatgtcttgctagaatatatgactgctcaggaaataatgatcatgtatgccagattatggggagtccctaagccccagattcaactgtatgtgaagaaatggttgaattc

SEQ ID NO: 199287 - DNA, 1000 bp, Homo Sapiens
acactgacacagctgcaaggaggcaaaggtgacattttgtaaagaatgacggcagggatggtgtgggggcaatccccaaattaaagagaccatgtggccgggtgctgtggctcacgcctgtaatcccagcactttgggaggctgaggtgggcggatcacttgaggtcagaagttcgagaccggcctggccaacatggcaaaatcccgtctctactaaagacacaaaaattggccaggtatggtggcgggcgcctgtagtcccagctactcgagaggctgaggcaggagaatcgcttaaacccaggaggtggaggttgcactgagccgagactgcaccactacactccagcctgggcgacagagagagactctgcctcagtaaataaataaataaataaatagaccatatgacccagtgggacagcccaggagtggtgcattccacgggtggaatctgagagcttgggtgctggatggggccttggccagagaagcctcaccctggactggtagaggccttactcaaggtcacctggccaatggaaagcaggggccgggtgtacttttcccaaaacctccgactcctgggccagggccttcctaccatcttaagcaccgcctgctgggaagctgggtctccaagggccagttccatctgctccgaaacagcatgcactctggagagagtgctgcagaccttccgagcgctgggcgtgttgccaacagaactgcagtcctcagcaacctttgggtgaaaggagaactttctggagcctcagcaaggctcaatttccccctcagctctgtgtgtggggagaactgagtaatttcactgataaaccctggagtcaccgctcacacttaatgagctgccatctccccggctaatgacgccgccggagtttgctctgagatggcgttccttccaccgggaaatgggcggctcttgaaacacagatcctcactcaggcaggggagggacagacagtcctgagaattc

SEQ ID NO: 199288 - DNA, 1000 bp, Homo Sapiens
caatatgtgagtgcaatacacatttcaattattttatgaagatgttgtgagaagcaaaatgcagtccaggcacggtggctcacgcctgtaatcccagcactttgggaggccgaggcaggtggatcatctgaggtcaggagttcaagaccagcctggccaacatagcgagaccccatctctactaaaaagaataataataataataccaaaaagagcatgcatgtgataagtacagaaaaaaagcaattgttttatttattactcctttcaatccacactaagtatcaatgctatagtaggcatttcctatcacttaatccagatattccaatagaaatgctctatgaaaagaaacgtgtccaaggataagctttccctggtatggaaggaacagaacttggcatcttttaaactaaaccagacactgtgttgagcacttaggctttctttacaaatagtcctacagctggttggaagcacttgggaaaggcaatgcaaatctaattaggctatgccatgtggccagcattagtagcaatttttgaaaagagcccaggagacaacttacagaaagtgatttttttccctttaagggttgtctttctctgttgcttgcacacacacacacacacacacacacatacacacacacaatctcattttctgggtgcaaatataagacatgctggggaccatacagattcttactgacctggtctgccagtaagacaaaataatcagtaattcctaacagaacaaaagctcatgtgttttaagtggaaagagaagaaaaccgtaagacaggaacaaatggcaaagaacaggacagctgctccatccaagctatttccttgggaaggaattgacggtttcttcatttctcatctgcattgaaacattagtaataacaaacactcccatgcacacacacacacggtgttatcaactggcacgcagagtgaaaacattttcactgtgaagacaactgcacaatgaattc

SEQ ID NO: 199289 - DNA, 1000 bp, Homo Sapiens
ccatcttctcattttgtcttctccttttggtatcaagtgctaagaatagcaccacttggaaatatgacaggactgcagccagtgtggataattatcattttcaactacagatctctctcagccttgtctgcttatcacactggcttgatcgcgcccatgaagatccgcacagaggcccctgggaaccttcgtttatacagtgggagccccactcgcagcgagaaagagcaggtctccatcagctccttctactacaaggagcgggtaagtgccagagccgtagcctttgattcttaccccttctcctggattcttgttcctcatctcctgcctggcgcagcagctagattagtaatcaccctgtagcctttcactttcgtaatcagtttgttcaagaaagtcattactttgttcctttcagttggttttacctgctataaattgtgtgtgtatgggtcagggggccgttcttatggtccgtaatctttactccccatttagccttgtccttgtaatctccactcgtaatctccactccctgagttgattcccattatttcagggtagaataccttagcttcaagtcttccatggtattctgatgtttctcagcaaattaaggaatgcctctggagtcttgggatctcaatatatttggaacttgatggttgtgagaagtcttaaagttaatgtctgaaaggttttttgtttttttttttatactaagtctacatggaaatacctatctgagtggaccagatgatacaaaaatcacctgagcttgtccttatgtgcctagtttcttaaataactcattgtccctaaagtagttatcattaagctgtcagaaacccttggtgccaaccatgtagagaaagttggcagagaaagctttctgtgttgacagattgcaggtctggcttaaacagacttctagctgacatgatgttttaaacagagttaccactgagcactgcacaaactcagtccttaggaattc

SEQ ID NO: 199290 - DNA, 1000 bp, Homo Sapiens
actctgcccgtgttcagtcctgactccagacaccgcggaaagtgagaggggtcgggcaggggagtccaggggttctcagagcgcagtccctgaccctgcgcccatgttcagtcccgactccagacaccgaggaaagtgagaggggtctgggaggggagtccgagggttctcagagcgcagtccctgaccctgggagcttgtcagaaatcctcacccacccaggatctgtgcgtggggcacctggggctgtcctgggtctgctccgattgtccccgaggggatctggagggacgaggttgccccggggtctgcttggggacagggtgagccagcactgtgactctgtcattgcaacggttgtctctccccatgggtgggtggagggacttccctgaggctctgggacctccctggcagttccagccacctgagctcggagcacatgtctgtggtgcttggcgtgggggtgggtccagggtccagccccttcctggctgtcgcctgcaggcctgacccggctaagggggtccaacctggccttatccgtctaagggggtccaacctggccggcccgagagggtagggcttcttgggagaaagctgaaggtcatggaggagaaatgggggcagggaagaccgtcaggctgaaaccccacatcgggcagctcagaggtgggggcagggaagaccaccaagctgagtccccccatcaggcagctcaggggagggggctccatgctgggcccctgagccgcctcctgctgtcacagcatgaggtttatcattcagcacccaggcaagctggccctgcaggcaggggtccggcctccaaccgccttccggctgccccaccatgtccagggacctgcttcagccctccagtcgtgcttcctttcttccctctgctcactcggctcctcctggaagttccttctcgctagcccccagggggtttggatgctggaccctggggaaggggccttggggtctgtagcagggc

SEQ ID NO: 199291 - DNA, 1000 bp, Homo Sapiens
gcatcctgccagcatgctgacgtcgccagggccatgctttctggtgcgttcatgacaagatgcgggttcttgggtaaaactcattttgatctgtgataatgccttctgctctcaagagctctgcgaggcagaacagcctgtctctccgtggccgtgggaacctggcatgacagactcccagtctcagcctgttgtggggttgcattttacttgactgatgtggaaatactagtaagtcggccttgacatgagtttaagtgtttccattcacctttcccatagagtgaccgcagctgcttccttctgtcgcccaggctggagtacagtggcgcgatctcagctcactgcaacctccgcctcctgggttcaagtgattctctgcctcaacctccttagtagctgggactgcaggcacgtggcaccatgcccggctaattttttttttgtatttttagtagagacggggtttcattaggttggccaggctgctcttgaactcctgacctcgtgatgcacccccctcggcctcccaaagtgctgggattataggcgtgagccactatgcctggccttcctgaggaatgatattatgagaaaaacttgggactgtaatgtccccccacaaactaagaaggtgctgagagaccagaggatggctcagactagggaccaacccagtttgaggagtagttgggtttgtcagaagatggcttggaccagagtccagcttgaggagtagttgggcttgtcagaggatggctcggaccagagtccagcttgaggagtagttgggcttgtcagagaatggcttggaccaatccagcttgaggagtagttgggtttgtcaggacttatattcagcgcactcctggacggcggcaggacagctctagagaaccgccccaccacctgtctctaaggtgcattgaagctcgttttctggctctttgcctgctgtgtttgagtgatgagactcttttccttggtgagttctcagatc

SEQ ID NO: 199292 - DNA, 1000 bp, Homo Sapiens
aggagacattcgtggctttttcagtaggagagggtcatgatgagataatgccaaatcataatactgtgtagggtgagtagtgtgatgtttgttgtgcccaggtcttctgcatatatgtgtagtagactgaataggaatcaggaaatcagcaagggaaacaagttttttaaagacgtttttaaagattctcagattttattatactgaattcaatttcagggtctacatttagaagcaggaaattgcaagaagaaacaaacaatgagctggagagaagtccaagagattggaagagcatccaaatggtgtggaaaaatggagagggaacaatttcaggtcaacatgcagtcatccttgcctctgcaagggtgggtggcaactttagaagtaggcagtaatttagttagagtcagcacttgaaattagggatggaccagctgcttgtcagttgacaccattcctgttccattttcttacatgtaccacctcctcccctgttgagctcatcatgctatttttttcgctctctttgaggaccatcttcgctactctttgaaaaagaacatttgcttatgccttaaattgtggcaaagtcttgtacctgtttaccaggatttaaaatggttaagattgattttttatctattttcttgaattgtgctaactcctccttcttcaaggaaaacaattttactggaaaaaattattactgataggttctgaaaaggaactgcaatatagtgttgaaataaattaaacccatttagtaaacagaattgacatattcaaatgaagatgctctagttttctgttccaccagtctttgctacgcatacatgtgaaagcgattctattttctaccttggtttctgaacttttctaaagcatttctgttgtttttaggagtagccagtccctcttgactggggcctgggaaagtcagcctcaccctctggacatgtaactacagcaaactgcctgggctgccaggcacgttgga

SEQ ID NO: 199293 - DNA, 1000 bp, Homo Sapiens
ttgaaaaaaacagggctggacatggctcacacctgtaatcctagcactttgggaggctgaggcaggaggatcacttgagcccaggaaatcgaggatgcagtgagctatgattgcaccactgcatttcggcttgggaacaagatcgagaccctgtctctaaaaacaaataaacaaaaacacattaaatgatttatgcacttctacatatgttattcttcacttaaaaagtttaaaagattactgtaagaatgtcaagtgaaagaaaacttatggcaaaaagcattaatagagacaggggagttatatttaataattaaataatcaagcaactcactccttcttgtgcagtgtctcattctgattttacttctctattgtgttctttaattcagccgctatagtgttcatttctaggatttatgggtgtcattttccaagtttgtgtcttaggtgttatgtgactttatctctgaacattttaaacaaagtcttttcagaaagagcactctcaccactagttcattgacggcaaaccctccagtgtattccttctgtttttatgccattttatttcttcacgtgctcagtaatttttacttacaagttcatttcattgagattcatcttccttagaagccctgttaagtcttgagttactgtggcaaccttgttgtggattgctttagtgtttgcttctgccaaggccttatgggattcacaagtgtttaggtttgtttctgggcttggggcttgcattcatggggagctaagttttctactcacgtcctggaggcctcatcctgtaccaagctgcttcacgctcaccccgtgcatcccctcaacatgacctcaaggcctttggtaaattgttagcagcatcccatgtcaaggatggggatgaaaggggataacctagaacaagaggctgctgccacatttaggccaatgcttgaacagtggtagaaatatacaaacagctaaaagaagcagatgagaattc

SEQ ID NO: 199294 - DNA, 1000 bp, Homo Sapiens
actccagcctgggtgacagagcaagactccatctcaaaaaaaaaaaaaagaaagaaagaaagagtagggtttgttgatattttaagggcaagcttttcagacaatttcaccatctttagtctcatgcattccaaaacgttcttgcttttaaatggcaacgaatcttatctctagtaactgtgtgaaagtatcaaaaaaaacctagaaaacaatttacatttaaggcatagtttacttttattaatttttttgaccagtttaatgttgcaaggccactgcaggtataccatgttgccaattatttgaataccaaatctcagtaacctaggaggctggggaaaggctcaaattcataccttcacagcatggaaaacttgtatcatttacagttagtgttgcttgcttatttattgattgatcgactgattgttttgaggcagagtactcactcttgcccagactggagtgcagtggcgtgatctcggctcactacaacctccgcctcacaggctcaagagattctcgtgccttcagcctcccaagtagctggggttacacacatgcaccaccacgaccagctaatttttgtaattttagtagagacagagttttaccatgttgcccaggctggtctcgaactcctggtctcaagtgatccgcccaccttcgcctcccaaagtgctgggattacaggtgtgagccaccacacccggcccagtttatgttcttcaaatcagcctgagatatctcaaacaggcaataggttgtttttttttgtttgtttgtttgttttgagacggagtctcgctctgtcacccaggctggagtgcagtggcgtgatctcggctcactgcaacctctgctgcctgggttcaagtgattctcctgcctcagcctccagagtagctgggcttgcagatgcctgccactgcacctaatttttttgtagtttttagtagagatggggtttcatcatcttggccatgttggtcttgaattc

SEQ ID NO: 199295 - DNA, 1000 bp, Homo Sapiens
tgcaccactccagactgggcggcagagcgagactccatctcaaaaaaaaaagtgtttttaggaaggaattaaagtatttaatgaaagaattcaagtagttaatcattttctaggttccatcagacagacaccagtctaaaaagtgttccttagaggtagagttttaagaaaactgctgaaattcagtgaaaggacattgcacagagtgactgtttttgctcatgagggcaagacttcaagagctgtttctcttaaggctcttcctgatttctccaacgtggagatcaaaaatgaaagtaactcgtacaattcggcgaaggtcagcagtatgtaaatatacagtaaaaatgcagcaactgacttcaaaatctttcccttttaatcatgatttttaaacagttctgtcttattgctagataacattcagtcctaacttggtttatgttgttttgtaaagttagaggtcttttgagtttggaggttattggatctacgttagaaatactctcctttttctgacaactttggtagcttcctgcagggtgattcatctctttcaaagtttctggttggctgggtgtggtgacgcactttgggaagctgaggcaggaggattgcttgaggccaggagttccagacaagcctgggcagcatagtgagacccccatctctaaaaaaaaaaatttttttgctaattagccaggtgcagtggctcatgtctttagacccagctactcgggaggctgaggcaggaggatcgcttgagcccagcagttggaggctgtggcgagctatgatgtcaccactgcactccaacctgggcaacagagcaagaccctgtctcaaaaaattaataattaaaaaacacaagtttgtggctgcagccttccgtgtgttttcagcagggctgcaggaggattgtggtgcgaatgtgtgaatcacccctagcgggaatcctgcctggctgatctgggctggctgtgccagcatttgcaaatcc

SEQ ID NO: 199296 - DNA, 1000 bp, Homo Sapiens
tatttttagtggagacggggtttcaccatgtttgccagggtggtctcaaacccctgacctcatgatccacccgcctcggcctcccaaagtgctgggattacagatgtgagccactgcgcccggccaaggatagttctttattataccaatcacatctcccttgtgatttgattaacaggttttttttcccctgcaaactcaccacatagtcttatagtgctaacacctctagaacaatgtagagctccaactaaaggtttttttgtttgtttgttgtttaacttaattgaaactgaatagattactacattaattccctgaggaatttaggatttctatctaaggcttgttgttggttttatcgggagtaatttattagtgtttggttttgtttgaactggactgagagcttttgctatgggaacctgaaccaccacctttgaagaattctttttaaagattcaagttgtttgatgtcagtaaattgccataatgcttcttggtccacactgcttgacgtgaaaaaacagagtgaatattatattgcagctaagtgtcagactgtaaattactacggaaaagaccttctacagcctggtcaacatggagaattctgtctctaccaaaaacaaacaaacaaatgaaaaaaaaaaaactataaaaattagccaggtgtggtggtgcactcctgtagtccaagctatatgggaggctgaagtgggaggatcactggagcccaggaggcaaaggttgcagtgagccaaaattgcactactacactccagcctgagtgacagcaagactctgtctcaaaaaacaaaaacgaaaaatccttccattttcctcctcctccccacgaaataactaacccttgaggcctagaagaaacacacagaacaagcagcctgacatgtaacagagcaggaagcccccccatgtccacctctacctcattttgtcaagtcttcaagagacctccaggcccagtcactgtgaattc

SEQ ID NO: 199297 - DNA, 1000 bp, Homo Sapiens
tcttttcctttattcctctggtgggaaaaatatctaattttgttagacatttttattggtaattagtgagttattgaggatgcagtgacaaggaaaacataagacactgtgcaatcgctgtccgagcccctttattctgaaggctcctagggcacatacgaacaggatacagaaagccactgtgtagacatatgaagataaccacaccccctctgagcagagggaacagatgtttaacagctgtctagcaacagaataaaacagtggaacagaagtaaaacctgaattagccaaataaagtgtagaggacctaaagaggaactatgtcgttatcaaagttggccagaatgccagcctctccttacttgcttctcttcatctgctactcctctatagccaaagaaaaacaattaacacctaattttacatatgtctaaataatgacaaaacatttgtttctagtttaaaaacagtctctttaaacttataaagaaattatacttcactgatatcaggtgtgctcattttcctatgagacacacagaatgaagaaagcgtgcttgctgcggcagactccaggaacaagcaacagtggtccaccgcccaactgcacccttacaagcctgtgcaagttatctaatctgcttaagcctcagttttcccagcggtcgagtagggctcatagaacatatctcagggctgggcgcagtggttcacgcctgtaatcccagcactttgggaggccaaggtgggtggatcacctgaggtcaggagctcaagaccagcctggccaacatagtgaaaccccgtctctactgaaaaaaaaaaaaaaaaaaattagccgggcatggtgggaggtgcctgtcatcccagctacagaggaagctgaggcaagagagacacttgaacccgggaggcggagtttgccatgagctgagatcacaccactgcactccagcctgggcaacagaaagagaccctgtctcaaaagaaaaaaaaa

SEQ ID NO: 199298 - DNA, 1000 bp, Homo Sapiens
aggctttcctgagtctgtcttgagaaatgtttggcaatctgacgcatcagtttttaggaacggtacacaaacagcccccacaattgaagagccatgcttcggatcctggctctgggtgacatcggctggagggcacgggacgggagcgctggggctacccggagaggatccgcgacatttgttattgtttgtgaagcccaggcggggacccggagcggagtgctcgggggccggggagtggaaggagaaaggagcagaggacaaagattcctccccgggtgcgaggctccctctctggacacatggggccagtatcaccccggggaataagagggccaaggccgtcgccgcaggttccccggagacatttccagccccagaattagcccggctttccctggacacccaaagacacctaaaatctcctcctgctcctgctcgcagagttggggctggcgcggcgagctcgggccctcagccgagcgctacatccgcgaactcacctgcctccggtcgcgcccgcggccggctcagcctccgcacggaccgcagccggccgggcgcccgtcagctcccttctccccgctccgccctcgccccgcccccgggaggtgggacccgcggcctcgccggaatctcagggcggcctccctgaactctcgcgagccttgcctcctcggcttctcggtggctgggtcggtccgactcgccctgacgtcatacgcaccacagccggaagtagccttctgtcgtcaacgcccgtcttcccggccccacccatctccgcctggtgaaggccagactggttttgagggagttgactgaactgtcgccacttcccctctcaccagcctcacctcactgccgtttttacgccaaacctgttcaggcctctcttgagagtggcctaatgtgttgcgacattagtcacattctaaatgtcatccgaatttttcaaacagtgcaatgcaaagaatgttagaaatggaaagagagaatt

SEQ ID NO: 199299 - DNA, 1000 bp, Homo Sapiens
aaattactttgaattcacttatggaaaatgaaatgagtccatgtatttttttaaaaacgaataacatttcttaaaatatttttctgattcttagtgttgtaacagcgtagcaatatacttaaaactttcctttcttaacaagtgtcttctttctgcttgacttttataaacagtgtagaacgtgcgatgtggtcactagttgtatgcagcatatcctcatacgagtaccagatcgtaggcatatttatgtattaagttaatatcacatacaaatggtttctttataagtgttaatgttttcatgttttgatcctatcagattttagaaataagcagagttatacctgcatcttagttgttcattttgtgtattcattattaaaatgtatagttgtttaataggttattttataaaacaaatagccatgattccgtgaatagtagaggtaaaatttcaatattataagcctcagataactctcttccttttgtttttctggaattgtgtggttcctctgaaataataaggtatcagctacaatgaggttgtaatagtactgggctgtttaatgatctctctttctctgaaagataagcttttctgggattgtttttctaatatgttaggatctaattgtaatgaacagatatgtgtctaccaaaattctctaatggttttagtaattattaagttattttattaaagtaccagataacctagagttctttttttttctttgggttttagttggcaatatgagtagatagaaaaggctcctccttaaacttctcatataataattttttagcaatcattaaatgttttttcttttttctgattatcacctctttgtgttcgcctcagcagcacatatactgattatcacctcttcaaattgctttcacattttgcagttgtcatataatatatctaagaaaagagaaaaacaatgttctcatacaacagaaaaataaggtgccctagacagaaaagaagctt

SEQ ID NO: 199300 - DNA, 1000 bp, Homo Sapiens
aattaaacataatatatgcataaatatattgcatatgtttatgaggtacagtgcactgttacagtatgtatatgttgtggatggattataaaaagctaattaacattggcatccccttaaatacttcctggtttttggtattgagcattgaaaatctctttgaacagttttgaaatgccttttctttaactgcatttttcttcaggttttgttctagtcctccttttcctcagtggtctccccagcactgttcctcttgctgtcacctactgtttctcagtgagtcttagtctctagcctaacctctttccagctccattttctccatctcccaactgtccctgtacctctccagacacatgtttcacaggccctgaatgtcacttgtttaatcaaacaaacatgatctttccctcagaactctgtggtcttgaattaatgaccatgcattgtggtcactctcagttcaattaaaatttaacttgggtgtccctgtgtctgttagtgtgctgtctgtgggatacaatggtgagtaagatagacaagatccctactctcatgggcaaatgtgcacagatgtgatgagttaaggagggggaaacatactgcattctgggagcatgtgtgctagtggatgtgagctggtaccagaatcttttgaaacgtcttctgtgaggaaggataggtgggccaaagccattcacagattagttttagaattctactcattgttcctctgagatgtcttcttgctctttgtcagactatggcttttccattgattcatctctcaccattccctattagatggtctccttccgtcttctttaccctcgttcatctcacactgctgtgaatgatcattttcctaccaaagagatcattcgtgatcccttattatacgtgttgtctctgtggcatagaaatggatcatttacttggaattcagaagccctccgtaatttggcatcatctcagggaaaatgcttgttaaattaga

SEQ ID NO: 199301 - DNA, 1000 bp, Homo Sapiens
ctgggcctgccagccctgcggccccgcgcaggtggagggtgcgagtgtgcatgtgtgcggttgtgcgggtgtgcgagcatcacgtgtatctgtcctcaacagccgaagcttgctgtgcatgctgctgatgcgctctcctccctggtactctttgtgtctgtgtttccacgtattttcttctggttcacgtttactaggacgacgagagacagcgtgagcgagcacgtcctttgagtcctccttaccctgttttcagagccgggccaggcccagcagcccccttagaggccagaagggcctcgcctgcgatccgatgagcctttgtatggagatgagactgcgctccgagctctagagcccaatgaggtggtcaggttgcaacagcaaccgggcgtgttaaaacctagttcctttgaatatgtttcattcaccagcccgcatattaacttttgatgctctgggaggaatatgacgattagaaaaggactcctgagagtgcttcccagaatgccaacattcccagtaacttagagaacgctttccaggaggggactgcagcttgttaaagaacccaggccagaggaaccactcaggtgttctcagtggctttacttactgtgaggtcaggcttcaggggttagccggggctgccttttggaaggtgggacctttctaagacctgtgcaggccattcttccccctcaaaatggcaaaacagcccctcccagatgctaaactgggctcccccctccaagacaattgcttttacaaatggccaagtgtgagaccagccgcggtgttgcggacactttcagtttcgtgcccttttccacaagcaaccctcttagagtggaatgttgtgaagagtaatttcatagtatatagtgacagtcatactcctatcatttctgggcacctgctttggctctgcagcttatgctggttctcatttaatcttcaagtgtaacagatgaggaaacaggcttgtggatggaggagg

SEQ ID NO: 199302 - DNA, 1000 bp, Homo Sapiens
tttatcatcctatgcatattacagtgactgacttacagtaggatatcagatttcctttattaattagtaaagatgatgtttttatttcatcattcacctttcaatttatagagcacctgctgtaaatatcattttactttcttgttccataaaaaagagaactggagaaagaataaagctaatttaattatgcttagactttagtttctttctttggggcatatatggtaatgagtaggggaaagggaaagatatgctgcaagggtgtctttagctttatcccatggtatgtgtgacctttccatgacagatttgatgtccatgagaaatacgattgtactgaatgaaataggggtgagaaaaagggtgtagagaagggaggagaagcttcagtgaaggtgaatgggcactgagcacaatgaaatggaaaattataagatagattaaggcattaaaggtaaaaacatgtgcatacatatataggaagcatatattatatgttgctatagctggctatacaatctaccttttacataggcttactcttgtgtggcactgtgttagactttccatacattattcataatcttcataacaattttcataaagtattatcttcattttacagtccagaaattaaatttcagagaggatagatgaattatctgatgatttgaactcacattcatctggttttgaagctcagttttttcctgtttcattacatagtgcaaaaaatatgtttagggagactttgtgatgaaatatttacaacaaaattatcctgaaaaatccaggccttgtggtttttgtaggtactctgtggaactttacaagcaaccaaactagagaactacattgcttggattacctgcctctatgagaggcagtcacactggatgtgtgaaattctttgggaatggatgacggagtaaggggcactgtttgggaatcatcacatgcttgctgaaacagaggcagaaatgacattgtttgtttt

SEQ ID NO: 199303 - DNA, 1000 bp, Homo Sapiens
tccctgttggtcaggctggtcttgaactcccgacctctggtgatctggccaccttggtcttccaaagtgctgggattacaggcctaagccactgtgccctgccggtcctcagtaatctttaagagtgctgaggagtcctgagaccaaagggtctgagaatggtaatggaagggaacattcagaacatttgggtgcctgaggcttctctagagcagggtacttgcccaaagggggcttgggattttgcttcctgttccaacctaacctttgtgttgccctgatatcttattttctgttactggaggcatcttccaaactcagttctccaggtcacggaaacaagtcaatgaaaaagcaggacaggtgtcacttctgttataagcttaccacttcgggcttctagtctctgttttcaacattttagtgatgttgtctctttctctatgtgtacacttctgtatatgcttatatgcatgctgatctatgaatttgaaaagaagtttgttgtgctttacctagcatttctgggtgttttgtagcagtaggtgtggtgggctgaatagtatcctccataaatctgtgtctacctggtactcagaatgtgaccatatttggaaatagggtctttgaagctattattagttaaggtttgagataagatcatgatggagtgggctctaaatgcaatgactggagtccttatagaagagagaggacatataaagatacaaagaagagggtgaagtgaaggtggaaacagagattggagtgatgcatcgtctacaagacgaggagccaggagacagcaagaggcaaggaaggctctttctcagagccctcatagagagcaaggtcctgctacacctttatgtcagacttctaaactccagaacttggagagaggaaaataaatctattgtttaaagccacctggtttgtggtcctttgttagggcagtcctaagagagtaaaacagttaggtttttctggatttctagct

SEQ ID NO: 199304 - DNA, 1000 bp, Homo Sapiens
ttgaggattacaaactgtacaatgatatttacaacagtaagactgtgaagtcgtggagcctggaggggagggtgtgggggtgtgtaggggtgtggggaatggtgacaacggaggcactgcccatctttctgtgcctctctgataacaggcatgatacagattggtttgggggatgaaggtgggtttgagctggaggacatgagggaaggggagattagaggagctttatctggagcgtttcacaggaggaaagttttgcatggtagctctggtggattaaaataaaacagcaatattatgagagtaatagacctttcagtgcttcaccaacggggaatctgtcgccctatttcttaatgaatgtgcgtgttttgccatgggttattctcatccactaccatcacagacttgtccagacatgctcatctctgtttcccatggcctcactcccacgaggcttgggggaacagcatgcattctggccaggacaggacatggcaatggggtggtatataacctggctgggattcaagagatggatttcaggtgtgggtatgggctgcagctggatgcataggtggcctgaggcaggaaaagagaaggtgcgcacagctttgggatgctggagacacctcctgaaggggatctttctgcacaggactgtgtgtttacaaatcatcttcccttgatgtacaagttctttccttttccccttttaaacattggtgtagtttctccatattgggaagtcttggggttgggggctatgtccaggacccagtgacccaccctcttttgcttctcttgtgactctacaggagagacttctcttttctcctggccaatggccaggagaggtttcttcaagggggtccctgaaacctgcagcctcaggttccttggcaagggagccactgcttggcctggtgcctgctcacctttttttccttattcccttggtaataaacttgagatctctaagatttccacaatgggaatt

SEQ ID NO: 199305 - DNA, 1000 bp, Homo Sapiens
tcgcaagcttttgtaataaagtacactattcttaacagcctatataagcaagtaccatgcttaagatgggggagtttctcctcttgctttctgaggatgccctactctgtaacagagtaatctctaataaactatcttaacttcactatactctgcgactcaccctgaattctttcctgtgtgagatccaagacctcatggggtttggggcaagaccccttttccagtgacactcctgccatgctacgtcattggctgggagtaaagcagaaaaaatttggcctcagcatgaatgcagtggcagatcctgaaagtgaggtatctggaagctgttgaccaactacacttcctatagcaggttttcttgaagggagatcttaggagcatgttcacctccatggctacctagtgtgatttttcccacttctttgtctttgctaacacagtttctgctatttgagatgcctgacctccccgtctatttcccccgagacatgcatacttatctttcaggactgacttaccagtcagtcttccaagaagccttccctgactgtctatcccagcccccattagatgtcccaccttatacatagttttatcatagcacttagcattcatattgtaattgtccttcacgtattttgtcccttgccctttattgtgagaaaccatttctttgtatctccagtacctcattcagtgcctgaaacatggtaggtgccgaattgtactttacctttacattattgcacttcatcagcgttgctccacaaatgccagaaagtacgtgtccaaatgaaattattctctatcaataggctatagaggtcaccgtccttaatgcagtcctttattcatacagtttccattttgtattatatttgttcctgtgagaatccattgataatctctgacaaactgatttacattacagtaagtggcacccccactctgacattatttgcatttaaaaaagtgaagtctgaaagggggaatt

SEQ ID NO: 199306 - DNA, 1000 bp, Homo Sapiens
tattctaaacagtgtctccctttataaaaagagttaatctatttaaactagtttagaggtttttaaaaataacaacaaaaacaacaacgaaaagaaaatacaccaccaacaagcttttctattcttttagtaataaagaccttttacttagaatggattatgtattaaactttttccacatctttgctagctcagcaaacctttgttctgaatgctttgtgaccattggtgcctttgattatagattgcaccaccatttgatttatttttttctcatgggcaacatatttctttcattgagcaacattctgaaacttggaaatctaacctgtgttttagtcttaggaaaggaacattcatatggtaaatcctccccagttggacttggtattcattcaactcttatatggttgatttcaggccagctttaattatgcaatcaccctcaactcaaagaggatagtagaatacaaaagcactttctaatgcttgtatttaatagagtgccagttttctggaagaagcaaaaaattgagaaatgttaatatttaacaatgaagtaataatctctaaatgcaagtctagaggacgacaagagcaatttattgtataaattacagatcatttaggactgaaatccaggtacactcccttatgtgtctctgccagtattaagaaatatgtatatatgtgcatgtgtacatattttttaattcttctttttatcaagaagaaaaaaaaatcagtcacttgacctgttttacgaattataaaaaaaattaaatgtaccagtatcacctctgaattcattgctttttttttttcatccagaaaatgtggttgctttaaacacagtttccagggaagtattttttacacattctgaattacttgttcagtcattttcttatattacattactcacatccccttgctggaggaaattccctcttacaaatgctgtatcactgggatctatgtatatttatgtaaccccggt

SEQ ID NO: 199307 - DNA, 1000 bp, Homo Sapiens
gtgggacaaggagtctgagacggggccagggcatggaactggaatggaggttgagtatgtcacccacagctgagaactgacagattgatgaacagtgcagttccagccatgaccctttttagggaggagctagaaagtgagatctttattttgctggagtcctggtggcctctgagatgctcccctctcctctagggccccttcagggacagcagtgtatttccacttagactgcaggagaggaccccgccccagtcactcagagctggcgctgggccacagggcttctcacgctgccttcctcctcacccacagctgcttctaagtggcagggcagactcagcacccgcttgtcctcacactccccaggtgcatctgatgtcagcagggttgacagctctgccgtcagggcggggcttgacttccccctgccccacccatgtccccttccccttggccacattactcatccacaagtgtttgctgggctcctgccatgtgccgggcaccagaggagcttgtaacagaccagccagacactgtccaaattgcacggggttcatactctgcagtcaggacagccagtatggtcgcgggtgtgggcggcacaccaggctcagtggcctgcgcgcagctgcagtgggagcatgttgccatctgatggccaggccacagccacacgagcgccctccacgagcagacagctggactgcccacctggcccaccacactgcccctgaggaagggacccctgctcgccactgccctagtcctcagccttcggttctgcagcccctccgtgcctggcctcctggtccctagacctgccccacagacacacccttgtccatacccatctcacacatctgcaatggcaacttccaacatccccgtctctgacagtccctcccatcctccagcagccctcaggccctcatcccgaggtctccagcatgtcagcctcccacctgtccacccaccacagcctgcccaggctccc

SEQ ID NO: 199308 - DNA, 1000 bp, Homo Sapiens
tttttaatggcagcagagtattgctttatattaacatgacagtttattcaaccgaactctttatggggcattgtaatagacttaatgttttatgtttgcagctctttacaccaacacttttcctactgtagtgatttctttgaacaatttcccctccccaactccctgtggttctaaaggggtggccaatcacagtaccccatcaccctggcctttaggtgggagaatgacccaggccctgcctatcataccctcctgactacagtgactgattcagaggtgagccagcgagagagggaggaacacagtccttcttcgggaatttctataacataggtgaaaaattttgtcagttggggtcgtggagctgaacgaatatggcttgagggctcccagctgccgtcctccctacgacttgaagaaaagcttgtgtgcagtaggagaaaatgaaccaatcagagacaagtacacaagagagaaggactgggaggagtcggccctggctgcaccacgtctccactcctgggctgtcaagtttttcaaggtgctctggttccataagctcattcttcctgttggatccattccagttaccaaaaacacttttttgtttaggctggtttgatataggatgatcattggtcccagagagcatcctggctaatctattttattattttattttatgagacaagttctcactgttgcccaggctggagtgcagtggtgctatcatggctcattgcagccttgaacccctgggctcaagcaaatcctaccatctcagcctccagagtagctgggactacaggcgtgcaccaccacactcagctaattttaaagaaatgttttatacagactgaaactgcctttgcaaaattgtaacaggaaattatgacagtgcaagaagtcagacctaaccgactctatcttgcttctaacccttaagctgtccttgtttattcctgggcataggccgaagtaactttgggaaggaatt

SEQ ID NO: 199309 - DNA, 1000 bp, Homo Sapiens
tttattttttattttattttttgtccttgcaatttactttttgagaaaatcaggatgtttgtcatgtagagtttcccacagtctatattttgctgacagcatccgtgtggtgttggcgattttaaagactcacttcttaggatgctgtccttctttccaccaccccttttgaacattcctttgggaataaaactttgccgtttaggccccctggcctgtggactcctggagaacaggggtctgtcttgttcagctttggtccttgcagtcacattcatcacctgggtccttgcagtcacattcatcaccaagttatgcttggtttgttgatgaatcaaatgactcaaagaattttgctctcttttctttatatttctggcatgtgcacccttgcactcagcttatagcagtgtattttgtacagctgtttttttccccacatgcatgttcagtgtcgaaggacaggacaaacttcatgttagtttaaatacatagaccttttccccacagtcctgtagacaatgctcagtgcaaatcaaaatttttagtcactgttggtggctaacaggctgactgactttccattttcttcggttccagaatgtgtatgctggtgctttcattctccttactaatattttttttttatttttatttttttcctttttcttttttgagatggagtctcgctcggctgcccaggctggaatacagtggtgcgactagctgggactacaggtgcccgccaccatgcccggctgatttttgtatttttagtagggatggggtttcaccatgttggccaggctggtctttgacctcaagtgatccacctgcctcggcctcccaaagtgctgggattacaggtgtgagctaccgcgcctggcccttactaatattttaagaggtgcctagtttttaaccgaagagaaggaagtcttcccagactgtcccttgaatattaagaaaatatctattttatttccataataaagaattc

SEQ ID NO: 199310 - DNA, 1000 bp, Homo Sapiens
ttatattgttttgagcaattagtttttctggggcataatttccatatctataaatgaagtgatggggcagatacattctgatgcccctcttgattttaatattcaatgacaaagacatgctgttctttcatagagcactttgttccctccattaaaagaagaacctggagatttattgagttgtgacaaccactctttgtctctagggaagtaaacatttcccctaccccactacagccctcagactaaatctggcctgccacctgtttttctaaataactttttattggaagatagccacacctatttgtttgcttattgtctatggtggctttcaggctacaatggcacagttgagtattccgctggagaccatctgccatggaatacctaaaatagttagtagctggctctttagagaaagaatctttacatccttggtctataggatctttgaactgctaaagactttcttagcccctaggagttgtgggaacccgaagcagatgtccagggggccatgcaggagacttgcacacacagcaaaaagcaggccctagacccccttttagtcatttcccgtcctgctcactcctcaaaagaggacccttactcccaattgcataaagttcaatgtccagattcttaagattaaaagaatagctttcatctagagcatccagctattttgtgccaaatgattgttttgatttttttaaaaagagcttaattcttctggttttgtgcatttttattaatctctgaccagtattcaaaattttgggttggtcactgacttttgtgtaaatatgattaaagcaatggaccctcctcaggaaaatgtgcctacataatgcaaataacattttatacccaacttttgagggctgtagggagtagacaacattaagatttcagaacacatagccaccatagtttctaaatgagataatttgtgaaataatcttactacaaaagttagcattattatatagaattc

SEQ ID NO: 199311 - DNA, 1000 bp, Homo Sapiens
aggtcaggaacgctgttacggggagcagggttagaatgatggggatatagcccgggaaggggcagaggagctttctgtgccacgggaaatgtcctaaatctcaaccaggacacggttagataaaagtgcaaatatgggtgaaaattcattaaagctgtatagttaagatttgtgcacctcactgtaaaacttacttcaaatgtctaaaagactggagtctgcagccacacacttgaggaataacactttccttagtcccaactcctgtttaagtaagacagagaaagattccacagtgcgggtcggatgtcttgcggctgtaacatgtagcagcctccaagcggaggttctcccttcatcgctgtgtcaccttagatgtttttcctttgtttaaacaccaaatattttaaaagttgtttagaaatgtgttatgtgaaacacaaggtggtttaattgggacgtcatttcctaattaataaaatctaatttcagttttattttggaaaggagggagacgggtggtgtttgaaaggctgagaatgtgaagtggctgaaatgaaggcagcgcacgacctggatgccagcgctgcccgccctgcaaggagagggcggagaggccacacgcttctcatgcttcgggagtttctgtccataaatcagttttaggtactgggcctttcctcttccgttgggaagtcggaggttccacatcaggattccagcagctgtaaatcggtcaaaataaggccaaagaaaaatagctggctacaggcgcatgcggccaggcgttttgttggcgttgcccttggtaccgcaggcacgagggacccacaggggaccaccccgcgggagccccaagtaactggacggacgccaagtcccccagcccgctcggccccagctccacccgcccgggccgcagcccgcaccccatcggcccgccccgggccaggagcatccccagctccggcgtctgcggcctgaacccggtagcgaattc

SEQ ID NO: 199312 - DNA, 1000 bp, Homo Sapiens
ccttccctgaccacacattgcaaattatcaactacttcttttacaaaatccagcactctctcccgctttaccctgctttacttttcctcctacccctttgcaccattttttatgttatgcatttactgatttactgattttctggttctgcaattaaaattaaagttccacaaaagcagaaacttggcctgttttgttagtgtattccaacacctaaaactatgcttggcttatgattgttgctcgaataaagatttgttaaatgaatgattaaagtcaacatcagctacttagagaagctattatgattcttccatacaaatcttacagcagaggaactactacatattctcaatttttaaaagcgatatatgtatttgaatatttcaagttttaatttcagtggcttactttgaggattttttttttaaggtgagttgcactttgtatggctgaatagagatatgtgttcttccgacatataaccccttcaccctcataagattatttgtatgcccctggattgttgggaggataaccccattaacaatgtgtcacttgttgtttctgggtaattagattcccattatcagcaaattaaaatattccatattttttcattttccactttctagatataggtcctagacttactgaaagctacaaagaacagccataatgacaggcttgccataatttccagagttgtcttatacgtgtcatatgcctctttaatctatttgggggaaataggcagttcctgaaggtttttaatttttagggatttggagagaggggtcgtgtttagagtgacaattttggaataatccgtattagtattctgcgaatggtgtgattgtggcatatatattttcctactgctgcttcctcttcctctggttttgcttcacattcacacaatttcaagggagaatacttgagattattgcctctagttttcaataattcaaactgtactctcatcacccatagtgaattc

SEQ ID NO: 199313 - DNA, 1000 bp, Homo Sapiens
aagataaatgatatttactgataaagctaaagaaaggaaatcacagtttgcctacttgaggggaggaaagataagaaggtgcttttgcttcatcttgaaaactgaaggaagatgatgcagcaggcatttggagggtgtatacttcttcagaagaaacagaccattccatatcagtagttactatccatgccctccttcagtgctgaaacataaatactattcattttacactggatataaaaagttgaagaaaattatccttactgggaacaaaactaagaaatcatgtgacaaaaattaggaggtaaatactggtaaatgtgctattaaaaatgaattttcttctgtaatgcctataaaatgcttttaaacataacaagaatcttacacaaataaaaacaaataaattaggtcactttaaaatcataaatcatacaatgggggataacttgaagtacacagattttttttaatgctaaaaatacattggaaatattgataatgttataacaattttttttttttttttgagacagagtctcgctctgtcgcccaggccggagtgcagtggcgtggtctcagctcactgcaagcgccacctcccgggttcacaccattctcctacctcagcctcccgagtagctgggactacagacgcccgccaccactcccagctaatttttttgtatttttagtagagacagggtttcaccgtgttagccaggatggtctcgacctcctgaccttatgatcgcctgcatcggcctcccaaagtgctgggattacaggcttgagcaactgcgcccggcctataccaattattttttaatacttctagtaataaaccaacttgataaacctaccttctggtgaattccgtgccataaaattgctacaggaaatctactacaaatttttttaaaagagaaacctctgcttttcacatttttgtaatccagataaggattccattcttataatggagaataaaagtgaattc

SEQ ID NO: 199314 - DNA, 1000 bp, Homo Sapiens
caggggatgctctcaaggtcccagaagcatgccgggtactttcatgcctattatctcatttatccttacaatagcattctgaagtaggtactattatctccatcttacaggtaagaaaactgaagctcagaggggttaagcaactcgcactaggtcacacaactaataaggagtgaagccaagatttggacataaacctttctattcagtgaagggtgcctaggtgatggactagggacccagctcaccacatcacactgccttacaactctgaatgcttcaggaattctgaacaggagctgtcaaagaagaataacaggaaggtccagagttaacttaaagagaaactggcatttatattagatttaaagtttgtattacagtattaatataaggattccagaaatatgtgaattccaaaataaacttgagcttatctctggagtctcacctacctcttcacctctcacttgccaaaacacatccattgaggaaactcaacctgaaacatctctataaagtatttgggttggaagtcaattccataaaatctgcacttactaaaaccttttctctgaaaatgtactaataatatatagctagaacttgcagacaatgtcatcattgttatggagatttgtagccaaaatattctattttgtagaggttttgttattgcccagtgatgacattttttggacaatttttaagagaggcagatgttcatctatttgctggtttttcctagcttacaaagccaacaatgatttagacccaaattgcttttgatcttcccaagtacctcatttttattattaagggacttacagtacaaacgatctgtcatttgagcaggaacacccatatgtcagatgtggtcggtttgattagtggtgctaaacccctgctagcagttaaaagaggtgacttgtagaagtcacagtgtggttaaagaattctgggggggctctctttgagaaagcccaatacacaagaattc

SEQ ID NO: 199315 - DNA, 1000 bp, Homo Sapiens
ataaaggaaaaaaattatatagtcaattcaacagatgcagaaaggaacatttgacaaaattcaatgccaagtttcttagcaaagtttcaatagaagagaatttatttattttgataaaggacattcatgaacagctacagctaacatcatatttaatggtgaaacattgaatacttttcccctaagattgggaacaaggcaaggatgtttgctcttaccattcaacattatatttgaagttctaccaaactcacaggatataagatcaatatagaaaaatctactgtatttttatatatgaacaacaaacatttggaaaatgaaatttaaaaaatttcatttacagtagaggtaaataaaaaacagactaagaaataaatttgacataagatgtgaaaaacctctgactaaaaagtataatacattactgaaagtaattaaagaagaccttaataaatggagagataacctgtgttcatagattagaagatacagtattgttaagatatcatttttcctcaaatcaatctgtaaatccaactcaatgccagtcataatcctagcaggtgttttttaaaaataaagaaattcaaaagtgattctaaagtatatttggggatgcaaagtaaccaaaagaatattgagaaagaactgaattataatagtaatgctacctgacatgaaaatttactataaagctgtagtaatcaagatagtgtcaaattggcataggataaatagatcaacagaacaaaacaaagtcctgaaatatacccaagcttggccaattaatttcaacaaagttgtcagcataatccagtgggggaaaaggtcttttcaataaatgatgctgaacaactggatgtttgtatggaaaaaatgaacctcaacccccacctctccacatacattaattcagtgtgttcattataattaatagcaaacattaattcaagatagatcatagacctaaatacaaaactgtaaaatgatgaagctt

SEQ ID NO: 199316 - DNA, 1000 bp, Homo Sapiens
aactataacaagtggaggtgtaaacagactgtagcctgcacttgtgccaatcactgaattttggccaaatgtagccaactgttcaaacagtgttgaaataaggcaaatgctgagctgtaaccaatccagctgtttctgtatctcagttctgttttctgtacagttgctttcctttttctgtccataaatcctcttccaccacatggctgtgctggctcactcagaaggctgcctgattcacgaatcattcattgctcaattaaactcctttaaatttaattcggctgaagtttttcttttaatagatggtgtcagaagtgggatcagaaatagagcttctaatgaccctccaggagtgctgagtgaccaaagtgaggtacctgcagcacccgttaatctctccgggcagctggggatcaggatcatgataaattatctcagattttggagcttcacaaatttgtgttatgagctttctgagtttgagcaaatttctgatccaaactgggcttggaagttgccacagaaactggactgggtccaggatcggatttgactggattggatccagttagaggcctcttacatctgaccgggtcagaaagaaactggtagtaaatggtaatattgtagggggtgtaaaatttggcttttgaaaatttgcagggatttgtgtgttctatcactttgtttcattttttcttggtagaaaaaaaaaaaaaaagcattggctaagttaatcaaggagacctgagtgcaaagccaatatcttaggtaaaaatgggatccttaatttctgaagaactgagttcctcctggcttacacatccataagtgttaggccccagaagcagtcaagtcttagagaaatggtgaaatcttactaaagataacttagagtggaatgttccaaatgaacaaaactgcactgaagtgcatttaaaaatgaggactcccaaattagtctcatccagggatgcctattgatatgcagaagctt

SEQ ID NO: 199317 - DNA, 1000 bp, Homo Sapiens
atgcgtttttcatatgtgtttattagctatttaatttcctgttcatatcatttgctcatcttcctgttggattgtctctattcttactgatttgctcataagtcattttatattctaattactaaacctttgttgtttatagtggttgaaattatcttctcgaatactgtggatcaggggttggcaaactatggtccttgtttatggcctatttttgcacatcccaaactaattttaatgtaatctaatgtctttacgtttttaaagattgcaaagaaagaagaaagcagcagcagcagcagtggcaacagagatgcatgtggcctgcaaagccgaaaatatttatcatctggctattcacaaaaaattgctaaccaccccccgcaacctgctatgactgttttctaacttagtttctatttttgttgtcattgaaatgtttcatttcaatgtagtataatgtatcattttaaagattataatattatagattatatgactctgcttctagctctctgatttcattgttctattcatatatcaaaatgccaataccacttttaaatttactagtgttccaaaataagtctgatatctggtagggcaaatctgtccccttccaacccattttctctcttaaacagttctgatccaacaacctccccacttggtcacaatgaccaaagttgattcaatgcatgcattaattttatatttatacctttcaactgccagtatataaaattcaaagttgtttccgcccctaccccccgccagctgattattgttattgctattcctgaaagggggtatttttcaatccatggcacttgtgtgcattagcaataattagataatttgctcaaaaaatccaactcattttgaagacatctgtttgactttctttgcccttctgctggcttctggtgcaggagctgagctcttaattaattattgcttatatcgggtagtaataccccctgaaaagtgaagcaagctt

SEQ ID NO: 199318 - DNA, 1000 bp, Homo Sapiens
ggaagcagacctctaaaaggtacgtgctctttacccccataatcttgatacccttatcacatttaaaaaatagtgttaattccttaatatcactgagtagtgttcatatctctaatatctgtttctctctctttaggtgtttcagcttgtttgaatcaggctacaaataagaccatacactgtgatttgtttatgtgtctcttaagtctctgtaaatctgtaggtccccagccccaaaactctttgctttactacagtttactcgtgcacatttccttcttgagacctacagtcagcgatttctccaggatgccctgcttctttttagtggaaggtggtatttcaagatcactgtctcagagctaccagtgctagctctgagtggttggtcattgtttctagacagaaagaagaaattgttttaagataaaatgatcttgtgtttgtatcgattcaccttcaaaactgtaaaatgacttcttaggtcttacatctgtactttcttcttcctaagtttagaatcttggttgtcagcaactccagatatgatagaattagcatatcacataatgactcattggctttatcccgcaatagacacgcaacagtctcagaataacaatgccagtgctgccactaccagtatgagggtcaaaagcaatttaaggtgggtttgtttttgtctttgtgttttattttttgtgtcagctcaaagcacttaatgtaagaaaatactagaagaaagaagtactggaagaaaacggccacactggagtggaaggttctttctaagcatgacctagaagccgtcattagagagttggccaagacctgattaataaatttgaccaaattaaaaactcgctacaaaaaacttaccacaatcaaagtaaaacctccccagactcacacctgagtatctaaagacacctcacgcaccacctatcctgagtagccgtccctgtggcctcttggcgccctgccggtgtacgttgaattc

SEQ ID NO: 199319 - DNA, 1000 bp, Homo Sapiens
acatgagtggagaggaaaactatgagaagggaacagaactaaggaagagaacgattgaaaagtgaaggaagatgctttaaaagctttatttactttgctgtttgagacttataagtgaatgccagcattactatctacctatttatgagagtaaaattatccagaaatatctttagatgctcctttgaagccattaaaaactggactagatgaaagaacacagagatgactttgcagaacattgtcaataatctgtggatttcacctttttattcttactctgtgattataaatgtattttatgtcactttttccatgttttaaattataaagtttactttcccttgaaaatacaaccattttgtgtttgaaatatgactcctacattcaaaagtgtatgcttaatttttttttttttttttgagacggagtctctctctgttgcccaggctggattgcagtggcgcgatctcggcccactgcaagctccacctcccgggttcacgccattctcctgcctcagcctccggagtagctaggactacaggcgcccacgaccatgcccggctaatttttttgtacttttagtagagaagtgtatgcttcttttcttctaaagttgttacatgtctaatttttcctagatgtttttattatttcataatatagtgtacaatatagaataaaaagatttttttacatattttacttcatactgaaaattcacaaactttgaaatgagtggcagagtttaaagaatatgtgtgtgtgcgcgcgtgtgtgtgtgtgtgtgagagagagagagagagagacagagagagatttgaatgatgtgccaagtaataaatgtttctttctcgagggtccacagacctctgtattgtatgacaaacttattcactgggacaacgtagcaggtgtctttcttacatgatcccattcagtcaactagaaggtcagctattaggagatctgtatccacttaactcttggcaagaaa

SEQ ID NO: 199320 - DNA, 1000 bp, Homo Sapiens
aggtgaaagatgttgaaattaatttttatttttgttacagggaattgaccccttttccttagatgctctttcaaaagaaggcatagttgctctgcgcagagctaaaaggagaaatatggagaggtatccgagtaatttgacttttactcattttgcaagtgaattgggattatttctttttccttatactttatttttgggtttttcaactgtatagttaattggcattaactatattcacattgtgcaccccgtcagcactgtccatctctaggacttttttcatcatcacaaactgaaactgtatacccattaaatagttactccccatttctccctcccccttgccccttgtaaacattattttactttttgtttctgaattcaatatacttttttccaaagagctccccacaataaaaagctttttttaaaaattttttattattattttttgagacagtcttgctctttcgtgcagtggcatgatcttggttcattgcgactaccacttcctgggttcataggattctcagcctcccgagtagttgggattacgggtgtctgccaccatgcccactgaattgctttgtgtttttttagtagagatggggttttgccatgttagctaggctggtctcaaactcctggcctcaagtgatccacccacctcaacctcccaaagtgttgggattacaggtgtgagccaccatgcctggctaataaagagctcttgtccaccttttagatttcatttgctaacttggggagagtggtttaaatggagggttaagagaaaagactagtttttagctggttgatggcaaatggaaaggcttaaagtacattttaaaatttaattttgtgtgtaattctgaaaaattccttcctaaaaattactggtcttatctttgaaattcactggtaacgttgcttatccatctcccttaaaatgctatttcaggctgactcttgcttgtggtggggtagccctgaattc

SEQ ID NO: 199321 - DNA, 1000 bp, Homo Sapiens
agaaacatctcaactatagcactttttggcctgtattggaataattggtttacgtttagtcccatagcctccgctatgagattttgagttccctcggtatcaggacccttctttatctccagtgattaacacagttactgcttaaaaattgtttgaataatttaataaattgataagacctttccccactttgaatcttagtttattttgtatgtttaaaaaagggtctacttgagattctacagtattcatttcaaactctaacagtttgaaatctagaagatgagatacctctctctttcatcttctagcattctttatatatatacatatatttcttgtttattatttgtttctagtttattatgtatctagtttaaatatatatgtgtgtgtgcatatatatatttctccttgactagattcaccactgacaggaagggggcgccatttaacagcctgtggagaaagaaagtttttgtgacttcttttatagaaagggatggtattattatcctagctgaaattgaaatatattttattctcctctctgaaatgtcgatttacttaacatttgacattggaattgagaaaaaagccaaggatacctcatctaagctcctttgcaaattatgcacagcactgattattctccttctaaatttcatgtgggtttatgaaaggtaacaaagaatagttgataactcttgatataacagaaatgtattaatacatatcatgtatatgactatgggtggatgtgtgtgtgcattaattacagtgtaacatctggaatttggggagggttacttttgagcaaaaactgacaccaaagtgtacttacaatgcctatgtctaccaggataagcagaaaaagcatttctgtctgtttgttgtgtcacttaacagacgctttgtattaagatggtgtccatatttcaaggcctttagcacctgaaacaattcagaacccagaccatgtggtggtcccttagaattc

SEQ ID NO: 199322 - DNA, 1000 bp, Homo Sapiens
tctcttttactgtgctaatttttttttctttagagacagggtctcactctgtcgcccagcctggagggcagtggtgtgatcgtagctcactattacctccaactcttgggctcaagtgatcctcccacctcagcctcctgagcagctaggactacagatacatgccaccgctcccggctagtattttttaaaattttttgtagagccaagtgttgctatgttgtccacactgatctggagcttctaatctcaaatgattctcctgcctcagcctcccaaagtgctgggaatacaggtgtgagccaccatacctggccttactgtactaatattaatattgtgtaaataggggaaaataccatggttaatttttactcaaacagtaagaaagtttgagtaactaattttaatctcaacagcccatagctagaagaggggatctaaatgttaagttgaatatttagaaataaaagtgtctacaagaagaaaagtctttagtgaaaatatgggcataggccagcagcattagctttctattgctgcagaacaaattaccacaaacttagctgcttaaaacaacacacacttattgtctcacaatgtttgtgggtcggaagtctaggcgtggcttagctgggtagtctgtttaggatctcagtgctggaaaaacgtgtctggccaggtgctcattgtagctttgacagggaagggatctgctcccaagcactctcaggttgttggcagaatttgtttccttatggctgtaggattcatggcaagttgcttcttccaaaaccagcattggagacagactagcaagatgggcactacactcttagataatcaaataaatgcaatcatgtgcctcgtgtcaccttttttgcattccattcattaagaacaagttgcagttcctacctacactcaaggaagggaggaattacacagaagtgtgaccacaggaggcagggctcatggaggcctccttaaagtcccccag

SEQ ID NO: 199323 - DNA, 1000 bp, Homo Sapiens
gtcattcctccagaagctcccatctcattcagagaaaagttaaagttcttgcaaggccctaggtgatctcatcccactgttacctctctgactttatctgctcctgctccccctatttctgacaactgaactcctcacgattcctgggaaacaccagacatggccctgacctagagcatttgcacttgcacctctctctgcctggaatttccccagttgtccgcatagctaactcccttacttccttcaggtcttcattcaaatatcaccttctcagtgaggcatttcttgacatgcatatttctcattacaacactaggctttaactgcttttccactttcacctcttagcctttattattatctaaccctccatatgttttacttatttattgtttatctgtccctaacatgaatgcaagctcttttgagggcaaggatttttttctgttttgcttaccactttaccacgcaacacctggaacagtgcctgttcaaagtaagagttcaataaatacttgaaataatgaatgaatgactaaaaaaaaaactagctgttataagtatacaccactttctttcatgcactaagcagaataaataaccagttagtctaatatcttgaaaacaacttgccattgatatgttataggactcaagatttttgtaagccactattaatttattatatttatgatcaagatgatactcttggctcattttacatttggagtaatttaagtaataatgtttagaaaagtgttttaaatatgcaattctgtaatgaagtagaactataaggatataacagtcaaacatttattaggaaaaaagcatttttttttgatacaaagtctcgctctgttgcccaggctggagtgcagtggcatgatctcagctcactgcaacctccgccttctgggttcaagcgattctcctgccttggcctcctgagcagctgggatcacaggcacgtaccaccatgcccagctaatttttt

SEQ ID NO: 199324 - DNA, 1000 bp, Homo Sapiens
tcgccatatgggcctcttcatagacagtgtgaatgtcctcatgactttcggctaacttcgccctaagcaagcactccgagagacagaaggcagaagccacatatcatttatggcctagcctcagaagcaatataccatcacctctgccacattcccttggtcacatagactgatcctgattcagtgtggggggctgggactgtggaagggcataaatactggaagtaggactcattggaggtcatcttggaggctggctaccacacttgcttatccagggagtgtctttgtgcaagttatttaacctccctaagcctcagtttgtgcatttgtaaataataatatttacagagattcgtgaagattaaatacttatgaagtcctcttacaaagtgcttggaactgccccaaggtcttcccacatttcccaggactcctccaggaaagccaattgcagcttctcttttagaaaccctccatcctctgctctcacctcctcccctattcatcctttccctcctcacttgtcaggaaattttctaatctgacagggttgttgtgggggtgagcctccttcttcaaacctcatgtccccaaatacatgtctatgctttggtcctccgtgttcccctagggaccatgctttggaatccatgccttcagattactgcagccccagctgacactttgactgtatctacagcagaaattctggactggaaccacccagctgagggactcccagattcttgcctcatgaaaggtgtgaaataaaaatcttgttttaagtcactttgggaagaatcttgctggtaatttccaccgtcccccaccatcctatcatctccctgaccatatcaggactgaatatttgcttgggaagaacgccagaaaagaaaaaaaaaaagtttttttaaataataataaccccaaaattggttattttagaaatcttattttaccaaacacaggataaatataagatatcataggagtttca

SEQ ID NO: 199325 - DNA, 1000 bp, Homo Sapiens
gagcccacatgtgattcgaccttcctgaaattttaatggcctgtccacaccaagcccaaggtactgttacacaccatggaatgtgggtcactaggaggaccatatgcttagttgtattacttttatatcttctaaactaaaccaagagtcaaatgctcactgaagatgactgagcacagtatgtgaaaagagtaaggagagccctgctatttctgcaggtgcccatgcactaaatacacagccctggggcttacagcagttgtattagagttggaaatatgccatgttgaacaccctcaatgccagggtcaatcttgtggcagtggttcctgggttctatctggggccttacttttaatctataagagttgtcaggctaaagtggcagttctctaggtgggatgccttaagtgatcatgcatttattaagtattcactgagtacatttgggatccaaggttctgtgtctggttccacaagggacactttgagtgcctctccggaaactccctgtgtaacagatgtaaaattccattcaatatctaagaggtagacctcaagggaatttctcaagtttttttggagtggtgaataaagtgaacataggctcttgcctgttcttggtgtttatcagagaacaacagagggtgcaccaggggtggggctgttattgctctggtaatgaatttatcattattggattgggtgctaagcagacagatgagacaccacaggctgtgcaagccaagttgattagggggcctacagagtaacttgagatacagaaagcggtcccaagccctttctccagatgtgtcatcagagtactatctggtgttatttgttctttctctttctctgtctctttctcttttctttccctcttcctccctatttttatccttcttcctttcttcaaggagtcttcacaagtatctcattttattctctaaacttcctgttaatcctcagtgactcccgttctctgagtcctgaattc

SEQ ID NO: 199326 - DNA, 1000 bp, Homo Sapiens
aatatatcatcttcatgaacatcttcatgatgttctcattcctagaaacgattccctatcctctatcaagaggctagcagagtgataatcatttctatactgtcagccactgttagattcaagctggatctgtaatctttataagtctcagtgtagctctattttgctttatttcccttaagtgttacaactgaagcataccgtttttcctatggcctgtcttccttgacttcttaatctacttttgtttcttcagaatcataaggcttaaaagaacttctctcttgaatttatgtattccttaggttattaaccagctgtctttcacatattttttatttctttcttgagcttccctttttgcaagtatcttgcgcctcatatgctagcttcattgtcacatttgaaccaagccttttttctaaattgattttactttttttttaattattggcagaaaagagcatttgcctagtataagctaccctatcacagccagaggaggaaatctacttccacttatttttttgctactttcttcatttgaaacaaaattgtttaaaaagattccagagatacattgacatgcaatttatttttattacggtggcaagtaactgtctcttgagattgtacttaagcatatttaacattttaagctatatccaatcttagaacataatctgcagaatcatagtaagttgattttttaaacaaccaactggattgaaaacaacaatatccttttgtactgtgtagttgttttccttgtgttattactgcttccacccatgaatagaactattatgtgttttgaataatttaaaaagatgtgttgcttgttgattttggatttattttcctgacatattgaataaaatattcagtgagtgaatgacatatggcctttcttcactgaaatatggcaaatatgtctttttcctggtgcacagatcttgttttctaccagttttataagctatgcagggtgagtgaattc

SEQ ID NO: 199327 - DNA, 1000 bp, Homo Sapiens
aatttatactttatgtagactgttccattttttctagttactctgatgaatataatgcatatacaaagcactaaatgccatagtaattttttaacaagttttgtttaatcttaaaagtaatttttaaaaaattctcaataccttcagtagtaccattcaacatcaaactagtcattatatgtgcctatcttaattttactatctcatatttaggaatctggattttcagaaaagaaataccagagaacaattattcatcttattaaggattcattcaagaattccattaaatcgtaagctcctctaggaatttacaaaatttgcatttatttgaaactttttaagggagaaatttgttataaaaaccggaaacacgtgatgctatgttttcctacaatttccagacaatatttaagtattagtcttatgtaatgtgcacaagaaatgccaactcctcaatgagatatttttcaacccatcagagttggaattagtctttctccttcctgtgctttcactaaacttttattttttgacctcttttaatgtttacctccttttatccttctatccatgtttgttttacacatgctgcctccccaggtagatttttgagacccaagctatgttgtacccatttttcttcctctatgattcatagcaaaatgcatgaaacatagcagatacataataaatgcttgctaacatgcatgtaggagtaatgaaagtacatattggaatttaaacatagaaattgaaggatattggataaaaaaatatttgataacaaatgctgcattaggagttattttaggaatgacttaaactaggtctctgttcttcggagttaattcctcagacaataagcatatgtattccaaatgtttctgttttgcttcagtaacaagaaaatcacaagtgtaactatcaacatattatccagaataacatttttatgtcatctaaatggaggatggaaaatgtttttgcaaaggaattc

SEQ ID NO: 199328 - DNA, 1000 bp, Homo Sapiens
ggagggggctgcatacatcatgttgtgtgaagagacggggcattggaggaagagcaggtttgttcaaggtgacgggcaagagggaaagggaaaggagggagaagaaagatggaaggagatgatgaattctgttgagtttgaagagagatccaggccagaaatgctggttaggaaggcattggtgctgcatggtagtggaagtcacaggggtggactaggtcatttgaagaatgcacagagagatgagagggctaaggaaaaatctgaggaacagcacagggcatttttagggtagtgaaactattctgtatgatactgaggatatggtagataaatgacattatatagttgtcaaaagtcatagaactacataacacaaagaaaactctattgtaaactttggaatttagttaataataatgtatcaatattggtttatcagttgtaacaaatgtaccaccagaatgcaagaggttaataataggagaaattgtgcagtgtggggagaggtgaatattgtaggagcactgtattttctgtaaacctaaaactgctctaaaaataaagtctattaattaaaaaaaaaagccagtgaagatcagttatgtgcatagcagctatacttctgcagaatctccttggtgagcgtgcttttttcaggcttacataatacagttaaaagaaagaaaaataacactcccctcacagagaaataatcagctgaacaaatcactagttatcagaatgcaggctgtagtacatcctgtttttctaactcctctaaatttactagtaaagcaacccaaattgcatggaggaggggaggtcattgcttgctgtcaaggctgcactaatgacattagggtggcattagcgtaccagggctctcctagtcctcactacaccacattttgaatgagttttgcttggacaagtgttgagggtgaggtggcgggagagggaaggagagagatagcttgtgctttgtcctattacctga

SEQ ID NO: 199329 - DNA, 1000 bp, Homo Sapiens
gataggaagtaaaacagtggttgcctcaggatggaggttgtgtgggaggggcaggagcaagagattataaactctatgaggaaactttgtgggctgaaggatatgttcataatcttgattatgtgatggtttcacaggggtatatgtgtgtcaaaacttatcaaggtttactcttatttaaagagtgttcagctgggcgtggtggctcatgcctctaatcccagcactttgggaggccgaggcgggtggatcacttgaggtcaggagtttgagatcagtctggccaacatggtgaaaccccatctctactccaaatacaaaaattagccaggctaatttagagacaggtgagacacctgtatcacgctaatttagagacacctatagagacaggtggtgcatgcctgtaatcccagcgacttgggaggctgaggcaggagaatcacttgaacccaggaggcggagttgcagtgtgttgagattgcaccactgcactccagcttgggcaacagagtgagactgtctccaaaaaaaaaaaaaaaaaaaaaaaaaaagagtgttcaattgattgtgggtaaactgtccattaataaagctattataaagagctgggcatcatagttcatgcctgtaatcccaatacttttggaggccaaggcaggagaattgcgtgtggacaggagtttaaaaccagtctgggcaacatagtgagactgtgtctctacaaaaaataataaaattagctggatgtggtggcatgcagctgtagtgccagtaacttggaaggctgaggcaggaggatcatttgagcccaggagttagaggttacagtggccatgatcacaacactgcactccagcctgggtgacagagcaaaatcctgtctctattaaaaaataataaataataaataaaagtgataatttagagattcaatgcaagtcagttaaacaagccattattgccaactccttacattcccatcccccacatggaattc

SEQ ID NO: 199330 - DNA, 1000 bp, Homo Sapiens
ggtgacctgcctcttctctcttgctgcctttaacatttcttccttcatttaaaccctggagaatctgaggctgtgtgttgaggatgttcatcttgtatagtgtcttgcaggggttcttggcattccctgaatttgaatgttggcctctctagcgaggtttgggaaattttcatggctgatattatcaaacatgttttccaggttgcttgctttctctccctctcattcagggatgctaatgagtcatagatttggtctctttacacaattccatatttcttggaggttttgttcattcttttttattattttttatttttgtctgactgagttatttcgcagaaccagtctgcaagctctgagattctttcatcagcttgttctattctgatgttaatacttgtgctggtattataaaattcttgtagtgtgtttttcaactctatcagatcagtttggttttttcataaaatgatcattacatctttcagctcttctatcattttatttaattccttagattccttggattgcatttcaacttctcctgaatctcaatgagctttgttctgagtcatattctgagctctatttctgtcatttcagccattcaagcctgattaaaaaccagttttaaggaactggtgccatcgtttggaggtaagaagatgctctgggtttttttgagttaccagagttcttgcactggctcatcagtgtggcttggtgttccttcagtccttgaagttactgtcctctggatagggtttctttgcttttatcttctttaatgcttttgcatttgattgtggtctaaggtgggttcagttgattggctttgtttctggaagattttaggggaccaaggctcagctcagcactcatgggctgcatgctgtaactttaaggggctggtactgggcccccagctttgttctctggctctttaaggttaggaacctgctgcaccagaagggccaaggtgtactcaatccactgg

SEQ ID NO: 199331 - DNA, 1000 bp, Homo Sapiens
gataaataacattaagtacagattcagctgaacaatataaacctttctcctcgctttaatatgtgtcctaagacatagtggtgactacaggtagctggctttatagtagaataattcaccattcataatgccaaaggtaaagctttgattacaagtgatcattccccctaaaaagaaacttgccatgggtgtcaatgtacattaaagagttttataactgaataactggaacataaacccaaactagtactcttattcaaaatgccatgataacaatgaatacagtattctagacatgaagtacgtgctggttgtgtatcaaaccagcatttactgagccacaggcttcaggtcaaggagaagccttgtgtaagctctaaacatagtcctgactgggttcaaatgctagctctaccagctatataatccgaatcaattaaaatacctaatttttataaaatgagggaaaataacacctacctcataaaacaaataaaaagtataaataaagcaccagtaaatgctgggaaccaatagtggcagatattgttgcaataatcacagtgagttttcttcagtaggttatacattaattaaagcataattaacaaaactgatacatgcttctctactcagcttggaaatcctgatagcaactaaaactcaatacatcaaaagcaaaattaatggtttcttccccagaaacattcttagttaagatttattatttatttttgttgttgccacttttaattattatttttttcatttcctgatggtaccaccatttcttttaccacaactctcaaatagaaatgaaacataaatcataacagaatgctgtcctaatctttgatgaatggtgaaatggaaatccaaaaaaaggatataaaaatcccaaaggattattatggtgggaaaagttagagaaaacaaaactataaacatataataaatttaaaataaatagaaacttaaacatgccttactagaggaattc

SEQ ID NO: 199332 - DNA, 1000 bp, Homo Sapiens
ttgcctttttcttcacacacttgcttagacacattatacttatccacacacatatgtttcttatatatatatgtgtgtgtgtgttttcataggattattacaatttattgaaatcagacagtatcactaaatatttcctacttaatttcctgtgccccgagtgaaaagatgttcaaattgggggaagagtctaaaggagaaagagccttgtgctaaatcatgtgattttataggcacatgacattctttcaatgggggaatttctgggggatcgtttttgggctgattttatgcatatataccaaacagtttattcataacataggaatattagtagctattatgaatattattaatctactctacttaacctattatggtaaaaaaaacaattttctatctttttttgttaaataaacttaatgacaaacatcttgcaaattagattttcatatatttcatctctttcttatgctcaatttaatctatcaaagccacacattgtagaagacatctggtattgagcttaagcagctgggtttcatttgtaagggttttgagcaaattttggtgcttgccaacaataatataacagttggccaatgtgttttccttgtggcagatttgtgcagtgtggcaaaatagacctgagttcaggatcaggtgcttttctgcctctttttggcctgtctggtgggacttcagaggttttatgcagatgttcattgagcactggctgagcacttgctgcaatggccattgagtacaaattagctggtgagcagtattcgaccaacacccctcaatttcagaaacacggagtctgcagttttcccagtatggttctatgtatttcctgtatcagaatcactgcaggtcgtttttaacatacaggtcccaataccccattttgaaaccactaaaccaaatatttgggagttgagctgagaaggcttaaatttaataagctatcccaagagagtttgtacacattgaattc

SEQ ID NO: 199333 - DNA, 1000 bp, Homo Sapiens
gtgtagacacacgtgtgcacacacatgcacatatacacacacacacacgcacatatacacgcacacacacatgggcaggaggacaaaagctatccacacagcatctcccagcacggaggcagtctggtctgtggaatgtgttgagataatttaatactggcttggacacactggattccaggtgcaggaaccctggaaccccctggaatgtgctagagataagcataaggcatcctgtctgtgcccactccaccctggttgggagtcgcagaatgaggacctcctgacttgagacagattctttatccagagaatctgagattccaattcagatcctggagctgggcctgctactcacctccccagtaaatgtccaggcagcattggacagagaggctggccccgccctgacgggggctgaagaacaggcccccagcagccttgttgttgggctactgagcacttcagaggttgggaggacctggaacagtcgccccagatccatgtgccttctgtttggggtacacctgagtagcctctaacagccactgattggcaccaagagagaatccaaatgttggcatcacaaaccttaagtatggagcagggagcaagtgcctgggggctgtttgccccatcttatgaatgaatagctctcgtaatgtctctggatttttggagacgggaagaaatggccaagtaacagcatcctcattcccaactctactgagaatcaactacggtggaacagaacatcaggggctgcatgggtgtgcgcctcagtttccctctactgcccccaaactgcctactccaggagtttcccaaaagggagggggagatgaggagataggcatgcaaatgcccatttggagattttcagctactctggccattatcccatttcagagcacaccagacaggaagggcaaagaggtcccatcatgagtgccaaattgattggtactggctgcccagaacactgtgctgggaagaattc

SEQ ID NO: 199334 - DNA, 1000 bp, Homo Sapiens
agaatttagtgtctttagcaaatgtcaaaatgaaaaatcttgagtttaggaaagaaaacatttgccttgcttagttctctagtggtccccaacctttttggcacaagggaccagtttcgtggaagacaatttttccaaggactcgggggtggggttgtgggggaatggttttgggatgattcaagtgcattacatttattgtctactgtatttctattattattattattacattgtaatatgtaaagaaataattatacaactcaccataaggtagaatcagtggaagccctgagcttgtttttctatagctagacaatcccatctgggggtgatgggagatggtgacagatcattaggcattagattctcataaggggcatgcaacctagatcccttgtgcgtgcagttcacagtagggtttgtgctcctatgagaatgtaatgccgctgctggtccaacaggaggcacagctcaggtggtattgtgagtgatggggagtggctgtaaatacagatgaagcttctcttgctcacctgccgctcacctcctgctgtgtggcccagttcctaacacactacagacaagtgttgttcgatggtccaggggttggggacccctaccctaggccagccatcatcttaggtacctgaggcctttttcttgggatctatgactagaggatattagctgctctgtaaccatccctcttatagcaattctgattacttctccaaggaagatcaagaatattttgcaactggcctacattgtttattaactctttctagaaacttctactaggcttatcctgaagcccttgtgttctctttagcccacagagatataaggtatcacttatttcaaagtgataatatccttttgcattggttttattgtacagtggatcagatgaactgtggttctcactgtgtaagttaacagaagttgtccatgaacttgaaaaataaaattgagtatgtgttttgggttggaattc

SEQ ID NO: 199335 - DNA, 1000 bp, Homo Sapiens
ggtcatgagatgcttaacaaatgaaggaatttggaaagaaaaaaaaacccacacataagtcttcaatttcataacaaaatgtcaggcttatcaatattttcatttctcttattatttctcaaaagagttacataagtaattaaacagctttgagattagaggtaaaatttaacaaaattattatatctgttaactattcttacttacttttatctaaacatccaattcaaaattatttactggtgatttttaaagagtatgatatataattttcaagagtatatcagagtatattatttgtgagatcaaaaaccctgatagatgtcccaataaaagattatttttgtatacaatagaatcttctttaataaagtatctttcacataagcaatgtactctacagtaagatgtgaatacattttgtagactttaaagtatcatacctaaaagcaagatgcaattgtcattatactgaaaaaatttttaagtactctacagtaacatacacattagcagtataacttttctccttttggactccaatatttctcatctggcacttattttctcccatatggtataattatttatatatgtcatatttctctatggaactataaggaacttcaaaaccatagggatatctcattatacttaatagatctaacacagtacaccttgcagaaagagacaccatttaaaaaaaaatagactgtatttctgtaggtagaagcaaaattctagtaaggactattactagctactgtgcagtttttgatcctttgatctttcatgcatatagatagaataactcttgtttttgctttattaataatggaatgctttactaagcaaaatcaggtatgcttttagaaccagcagcaggcaaaacacaattatttcaagaacgggtacataggatatctaaatatctatgtctgagatttttctcatggtatttttcagactatagtaattttgttcactgagtttggaattc

SEQ ID NO: 199336 - DNA, 1000 bp, Homo Sapiens
ctggtctatattctgttttactcactccacatattcaaatcctgctcatcttttgcggtatatgggaaaccacctccattctgaagcctcttctctaaaggccacttggtggtccaaacacatatggtccatattgtgcattctgtcacaaccatgaccttttatttatatatgatttttattaatcatatgacttttatttatcttatgtatctcattgattgtttcctatttaagtattagacttctacaatagtaagcatctttggaagagggactatacatggatactttgttgcttcaagatcagtggtcttaaaatctgcctgtgtttggttatttatagttaacttgtcaggtaacaccatccaatgtattgtgtgtgttataaaacatacacaagactgggaatttttaaaaagtgatgaatacagaaatataaatagaagttctgatgtttatatttgtactccagtggctcatcttgggcatgccctgggatgcccacacctcactttggagacctggcattaggttcatagtaagtattcaggaaatatttatttttagccttcagctattctgtgctgcttactgacaaaattcccacctattggaaatgaaacttgagtttatagtctgagtgtgtttgagaccttgtaagggggtataaggaacgattagtcagaataaggtaggttatttttgagtggcaggccttcctagctcaaggcataacacaacaaaggtttgtttctcatgaaacacaatttgatgggggtctgttgggttttctcagaggctctcctaaaaatggttactcagatatccaagctgcttctatattgtagttataatatctggcacacatggctttttttttttttttttttttttttttttttttttgagacggagtttcactcttgttgcccaggctggagtgcagtggtgcgacctcagctcactgcaacgtctgcctcccgggttccaggaattc

SEQ ID NO: 199337 - DNA, 1000 bp, Homo Sapiens
acacccatctcgatttatatctataatatagacatacatttatatctgtaagatagatataaattgagatgttgactctgttgactctgcagacatgtggcactgttattctcttcttgatgcagaaaagtcctaggatttttccagtcttgtccaagtgaaacagaagcagaattaataatccactcattcattaaacaaatatttagtgagtgactatgcctgcccatttgggttcctagtgtccaaagatacaaaatatgtaagacatattttctattctccaaggaatttcatgtaatgttgaagaaaaacattgctaagggatataatggaggaaaaaactaattatagtaaagggatgaagaaggaagtgattattttggcttatgtgagacaagaagagccaagtagggcacggtggcacacacctgtaatcccacctactgaggaggctgaggcaggataatcccttgagctcaggggttcaaggctgtggtgagctatgattgcaccactgcactcgagcctggatgacagggtgagatcatatgtataaaaagagggagagaaagaggctggacatggtggctcatgcctgtaatcccagcatcttgggaggatgaggtgagaggatcgcttgaggccaggagttcacgaccaacctggccaacatagcgagaccccatttctataaaatttttttttaaaagagaaaaagaggaaaaaaaaaagccacatagtaagggatttttcaggatgtagaggtgatgaagtgggaaacagggtggtattccagccattcccagcagagggaacaacatgtgcaaagactcaatacaggaaacaaatctccaccctggggaggggtaagcttttaggtccagcaacatcccctcactgctcagcctttctgcagattgttctctttgcatgaaacattcttttttttttttttctaggcagggtctcactcattgcccaggctggtctggaattc

SEQ ID NO: 199338 - DNA, 1000 bp, Homo Sapiens
ttacataatggtaaagggaccaattcaacaagaacagctaactatcctaaatatatatgcacccaatacaggagcacccagattcataaagcaagtccttacagacctacaaagagacttagactcccacacaataataatgggagactttaacaccccactgtcaacattagacagatcaacgagacacaaagttaacaaggatatcctggaattgaactcagctctgcaccaagcagacctaatagacatctacagaactctccaccccaaatcaacagaacatacatttttttcagcagcacaccacatttattccaaaattgaccacttagttggaagtaaagcactcttcagcatatgtaaaagaacagaaattataacaaactctctcagaccacagtgcaatcaaagtagaactcaggattaagaaactcactcaaaaccactcaattacatggaaactgaacaacctgctccttaatgactactgggtacataacgaaatgaaggcagaaataaggatgttctttgaaaccaacgagaacaaagacacaacataccagaatctctgggatgcattcaaagcagtgtgtagagggaaacttatagcactaaatgcccacaagagaaagcaggaaagatctaaaattgacacactaatatcacaattaaaagaactagaaaagcaagagcaaacacattcaaaagctagcagaaggcaagaaatatctaagatcagagcagaactgaaggaaatagagacacaaaaatcccttcaaaaaaatcaatgaatccaggagctggttttttgaaaagatcaacaaaattgatagaccgctagcaagactaataaagaagagagaagaatcaaatagacacaataaaaaatgataaaggggatatcaccaccgatcccacagaaatacaaactaccatcagagactataaacacctctatgcaaataaactagaaaatctagaagaaatggatgaattc

SEQ ID NO: 199339 - DNA, 1000 bp, Homo Sapiens
tcagaaatgctgttgaaaggttttgtgcattgggagaaaggttaaagtatctgacatctgagttctttctgatttagggactatgatcaattattgcagcaaaatgtgaagtgaatttgattgaatctgacttcaacactgtattttattatatatctgtactattaactaatgaattcagaaatgtagcttgtataagtaggcacagatatgaaagcttactaggactacgagttcctttggcactgttttacatcatgggagtaggggccacgtataaaaacaatacacacatacacacatgtgtatccttatgttccctttaattactgtgtacatagtttgctgcattatagtggccagcatatatatacatatataatcttcatagttgatttgtgacatttttctctgatgtgctacaaccatttggaaatatgctctctgaagaatgaatatgtgagtttttagtgtgcatacaatttttcactgcttatgaaagaatcaagtgtataaactacgcataataaatgtaaataattgacagactctgccagtataatctgagtttgtaagcaacgagacgtcaaaggccacttgaacattatttccttatacagcaaccaaaatatgaggcaccattataagttaaggcattaacataagtagaatgcaaaaaagaaaatgaattaagctccctccttacccacagccttagtatattttattttaacttttcccaaagttgtttttccatgtgtcacttcaaccttttcagtatgttcaggccaaatgtgttccttccctgagctcccagttgacctttagatatcacattatatagtatgtagtttatacaacctgaaggaaccccaattctcaccaaattgtaggtacacttaaggtcacattataagaagcaaacctattgctttgaaagcacctcttactttcccaacacaaaacccctgctgccttctctttacagatcttcttactc

SEQ ID NO: 199340 - DNA, 1000 bp, Homo Sapiens
acgaggtcaggagtttgagaccagcctggctaccatggtgaaaccctgtctctactgaaactacaaaaaaattagccaggcatggtgtcaggcatctgtaatcccagctacttgggaggctgaggcaggagaattgtttgaactcgggaagcggaggttgcagtgagccgagagcatgccaatgcactccagccttggcgacagagcaagactccatcttgcggggacgggggggaaggggtggaaagacaactatttaatttcaacatcagaaagaattaatctcgcttgaatagcatacatagctaaatttaataaattacttcattctgagcagctctatataataattgtgcctttgttaattgcaaaaaaggttgacattttagtgacaagaagcaaatagttacagaattagagtaactttactgcctcccttcacaaaccttcataaaactgtcaataggaagattttagggccaccctattgttaggggctgaatcttggtccccaccaaaattggtatgttgaagttttaaccaccagtaccttagaatgtggccatatttggagataaggtctttacagaggtaattaagtgaaagtgggattataagagtaggcactaatccagtatgagtggtatcctcataagaagaggaaatttggatgtagcatacacagagaggagaagatggccttctgtaagccaaggagagaggcctcagaagaaaccaactctgttggcaccttggtcttggacttctggcctccacaattctgacagagtacatttctgttgtttaagccacccagtttgtggtagttggttatggcagccccagcaaatgaatatctatatcaagtgtgagcaagagaatgaaaacaagattttagagggaagtaagtaaatgcaagttttaaaacctcaacttggattaaatgtgatctctgtggggaaaaccatgtcttagtccctctattgccagtgccagaccc

SEQ ID NO: 199341 - DNA, 1000 bp, Homo Sapiens
gatggaagtttacacacaaacaaatctcctgtttacatatgagaagcggcttgaacacacacacacaaacacacacgtgcgcgcgcacacacaaatcatagatacgggtgaagggaggcagccccagtctatcctgagctctgtgccccagaggcctgctgtcctctcagacactcagagccctaggctattagtgaaaccctgaggaaatgacttccttctgcatcaatcctggatctaatttaaccttagaaatgcttcctgaaatggcagttgatctttagtcctgactcctggcagattctctctgggcacctggcccttttgctcttgacctagcttttttttaagttgtggtaaaatacacataacataaaatttaccatcttaaccatttctaagtgcacagttcagtggtagtaagtacattcacgctgtagtacaatcaccactaccatccatctccgaactcttttttcttgcaaaactgaaactctgtactcattaaacagtaactccccactctctccttcccctagcccccggtaaccaccattccactttctgtctctatgaatttgactaccctgggtacctcatatacatggaatatgaatttgactaccctgggtaactcatatacgtgtttgttcttttgtatgttatttcactcagcgtaatgttttcaatgttcatccatcttgtagcatgtgtcagaatttccttcctctttttttaaaataatacatcatggacattcaaagaatttccttccttttttaaggccaagtaatattccactgtatgtatgtaccacatttggtttatccattcacgggtggacacttgggttgcttccacctcttagctattgtgaacaatgctgctaagaacctgggtacgcaactatctgctcaagtccctgcattcagttctctaatggaccgggcctctcactttccccataccagttgagatcccgaccccaggcatggaattc

SEQ ID NO: 199342 - DNA, 1000 bp, Homo Sapiens
aaaagttaattcagaacctgagaaaattcatgtacctacaaggggatctacatgaataatcagacctgttagaaatttgaaccgggacaacatggtgaaaccctgtctctacaaaaaatacaaaaattagccaggtgtgccggtgcacacctgtaatcccagctactcgggaggctcaggcaggagaattgcttaaacctgggagatggaggttgcagtaagctgagatggtgccactgcactccagcctggcaacagagagactccctctaaaaaaaaaaaaaaaaaaaaaagaaagaaatttgaacctagtaagattgtaacaaggctgtaagtcatctgcatttagagaatggctgaactaacaaaagaaagtataaatctacttaaagaaacacatacgcttaagtggtagatggaagacagcttcacaataacaaagagcaggctttactgtcccatttctctttcactttgtttttaaaaggtcagtaaacagactgagaaattcaaatatttttaaatgagctgaccaagtcacgcaagtaaaaaagaagcagagtcaaaactagaacccagggcttcaaaatatgtctactacaaaatcttgtccagcatgattactggtatagaataacaggctggaactgcatggtgtctattatcaaaattttagtcaagtctttagtttaatagggtcaggggattccatttgtctggactgcccaaggtttctggagacccatcaaaccaatgcttataatattatatattataatatacattatataacaaccactggaaggtttgtggaatttatacttgttttgtccttggaatcttgaaagtgtaatattgaggactatcctactccttgaaagaaagaagcattaggcaactgataacaaatgaaacaataaagatgaatgtggagactaatgaagttccgaagactgttcacaatagcaacaggctggaaaaatctgataataatgaattc

SEQ ID NO: 199343 - DNA, 1000 bp, Homo Sapiens
tctattttatatctttacaatatgagagtatttctcaatataacttcagatatttagggcattaattagatatttaaaaagtgttcagtgtcatctgatggtagttttttgagcaatcatcatatattcgctaatcagataataaaaattattacatcatagaattttagaacccaaaagaaacatagggcttatatagccctactctcttggttttcagatgaggcactacatgtccagggaggtgaggtgacagacgtgagtcacatgcctggccagtgaccatgtcaagatgagaatcctagtgctaatccaatctgttttttgttacctcataatagtcctcagtggacttggtccttttgttgtcgatttttccccaatacacagttatattcatcgaatttgacactctagttatgttaattatataaaccacaatttatccattgcatgagagcagaataaagctattcatacatgccaaggtttaagaacgctttagacaatgcagtgtattgtgttttgcaaataaagacattaaaatgtttacatgctgtgagctaaaagctcatgggtacctgtaaataccagaaggaaagcttctcaaaaaaatatgaaatacttgaaaatgtcttgtgtcaattggtttttgttattctttttacttcattaccttggtgtcttcagttctttatagtttgtaatcatttattaatagtttttgatacaattctacatttcttttagtgtagtcaacaaaacacaaacttaaattatacccttaattagaattattaattctggaggctctttctaaacttgtcattcacttaaatattttggtaaaaatacatttattttttgttctaaccttcataaataccacccattctgtattgtaactatgaaaatgtttgagcacgcagaaaacatactacttaccaaatagatttcagtctgagatgcttaaagtgaagcaattaattctaaagaattc

SEQ ID NO: 199344 - DNA, 1000 bp, Homo Sapiens
tgccgagggccgggttggggggttttgagaaaagattctcaaaatccatgacccagacaggtcctccctttcgcgagccgggaagctacagagtaacaacccgagagagtgacaacccggacgcgacgagacggacccagagccgcgccagggccacaggctccgccccgcgcagcctcacctgccccgcgcatgcgctgcaccgccctccgcgactctgggcaggccgggtctctccctgcctccttcgcctcggctctgcgcaggcgccgccgtggttgcccttctgtaagctttttcgtcctttacctcagatagtagaattttgtttattttatttatttatttgtttgtttgtttgtttatttaaagacagagtcaagctctgtcgtccaggctggactgcagtggcgtgatctcggctcactgcaacctccgcctcccgggttcaagcaagtctcctgcttcagcctcctgagtagctgggactacaggtgtctgccaccacgcccagctaatttttgtatttttagtagagacgggatttcaccatgttggccaggatggtctcgatctcttgatctcgtgatccgcccgccccagccttccaaagtgctgggattacaggcgtgagccaccgcgcccggccccagcccagaatttttaaaattagttgttaggattctgctttcaccttggtgaaaactcttccatcaaaatcacagtatttctaagggatggtagtaacagctaacatttatctgagcactccactactattccttagaaatagcgtttcacatgttagctaacttaatcctcacaacagccctgtaaaagatgttctattaccattcacagttttgaaatgaataaacagatgtgtagtcaggtaatgtaacttgtagggtctctacaattgaatgggaattaaaatgaatacacaagtaacctcaagacagaaaagtccgttaaaaagtaccaaatactaagagaattc

SEQ ID NO: 199345 - DNA, 1000 bp, Homo Sapiens
ggatgcaagatttttagccttctcctaggaaatactatttagcatataaaataagttatatgctagttttatatgctaattaaatttattctactcttcatcaaaatagatacataaccttgaaattaaaaatattcgttgatgtccccccaaaaatcttgtgtgccgttgtttgagaaacagtgtgatagtttgtggcaatatcctgtgatgattctttttgcaatcttgacattattttcatcaaatgaatcctaggatcactttgagaagagccttgaagaagacttgagggtcctattgatgaactttgaaatattgattcagagaagtctgcttttctattttgttttagctttaaatttccctgtggcaagtctagattttttttcagttaaaattatttctgctgtatttgtagaacagaagttttgggattttgtaaaataatgaccagagactaagaattcccatgccaccccgtatcactgtggaagatggagaagtgaggaactgtacctgcgggtgagccctggtgccatgttgagggtgggaatcaggagagctgcagtggcttatataaacacctgacgaagtagtctaattggcttaatcatttattttatttattgaaatatatatctgggctgggcacggtggctcacatctgtaatcccagcactttgggagggcaaggcaggtggatcacttgaggttaggagttcaagaccagcctggccaatatggtaaaactgcgtctctactaaaaatacaaaaattagctgggcatgatggtgtgcacctgtaaccccagctactcaggaggctgaggcagaagaattgcttgaacctgggaggcggaggttgcagtgagccgagactgcaccactgcactccagcctgggcaatagagcgagactccatctcaaaaaaaaaaaaaaaaaaagagagaaagaaaaaagaaatatatatctgtaacacttttttccaaaaagaattc

SEQ ID NO: 199346 - DNA, 1000 bp, Homo Sapiens
accaccactgatgcctaaggactggctctcctggcattcccatccccagaaaagccttaccacagcctctactaacaactggcagcctgagccattgaggaattcacagatgccactgatgctgattacagccaaagaaatcatatggaaactacactactgcacccacccaaaaccaaagcaaaaggaccttgttttctgtagtaaatgtatctacagaaaaagcacttccctaagaaagccagcccataaaattgaaaatagtgactattaaaccagatgagcagatatcaatgtaagaacacaagaaacatgaaaagaatgcaaacatgacacatccaaaggaacaaacaattctctagtaactgatcccaaggaaaagacaatctttcacatgcctgaaaaagaatttaaaatgataatattgaagaaactcagtgagtacagataaatactacaaagaaattaaaaaaaaacaattcatgatctaaatgagaaatttaatgaagagatagatgttataaaaaaagaaccaaacagaaattgtggaactgaagaatttaatgaatgatataaaaatataattaagagcttcaacaataaactagatcaagtttattaagaattcagaaatttaagttcaggaagaacttagaaacaatccagtcaaacaaacaacaacaacaacagaaacaaagaaagaaaggaaggaaggaagaaaaaaaaaagaattttaaaaatgaagaaagcctaatgacatataaagcaatactataaagtgaccaaatattcaaattttgggattttcagaggaagaagagatgggcaaaggcatagaaaacctatttaacaaaataatagatgaaaagttcccaagccttgtaagagatatagagatccagagaggaagctcagagatctcccaatagattcaacccaaaaagattctccaaggctccctatagttaaaacgtcaaagtcaaagacaaagagagaattc

SEQ ID NO: 199347 - DNA, 1000 bp, Homo Sapiens
tcaccactgttaattttagaacatcttttcaccccataaaggaaccttgtacccactagtggtgactccccattcctctacctcacccccccaccttcacttcacttcctgccaaccactaatctactttccgtgtctatgggtttgccttttctggacctttcatatgaacggagtcatacaaaatatggtattttaggatgggcttctttcacttagcctgataattttagggttcatccatgttgtaccatctatcagcaatacattcctttttattgttgaataaatgttttattttatgaatgtacattttattcataagttgatgaacatttgggttatttgtactttttagctattacgaataatactgctatgaacatttgtatacatgtttttgtgcggatgtatgttttcattactcaagagtaatgaagtaatggtaagtagtggtacatacttaggagtggaattgctgggttatatggtaactctgttaaactttttgaggaactgtaaactgttttccataatgactgcaccattatacaaccccatcagcaatacatgagagttccaatctctccatatttttgccaacacttgttatattgtgttgagtccagcctcattcttttgaatgtgtccttccacttgtcccagcactgttttttgaagactgccctttacctgttgaattgtcttggcacccttgtggtcagttgatgttaatgtgagggttcatttctgaatcgcctcagagccatttatttacatgctgttttatcacctgaaacagtcttcctcaccttctaaacttgagtgtcctctttcctgccactgttcctggctaatttgttttcatccttcaggtcctaatataaatttctttgtataatctttagagatttcatccctaataatcctctagtccctcccaatctaaattaagctattttaaaatactctttcataatactttgtactttcttattgt

SEQ ID NO: 199348 - DNA, 1000 bp, Homo Sapiens
gcatataaaaaatggctgaattatctttgagtgaccacctcgaaacacactaatgttaaatgcaaaaacacttgtgaatgctcccctgcttttccaatacttgagaatgtttctggcatacaactataactttaaagaagaaggtggaatttctgctaagtcctcaatcttataaaaaggccagtgtagatagcagtacagtttgtgcaaattgagggtaggcaagcatatggttagcatagatcccccccgaaatagttatagcacataggaaacataagttgagcatattgaaaatttattctatttttaacagcctctctttagttaagtggtcaaagtcacaattaacatttcacatgcagtggctgagctatattttgcaagccaggtgtgacctgatggcaggaatacatttaccaccacactctccttactctgtaaaactatcctaaagttatgtgtgttggaaaatcatggcattccacagatagagaagggaacatttctaatacaccttcataactggagagttgtcctccaggcaattatgtgactttcaacacactttgcaagtcactatagtaacagcaaagcacaaacttaaaagaaagttcacatccataaatctgtttggagctgaactattattaaaggctttggtcttcttaattcagcattaatttttggttgtatattaaagttttctttcagttcgagtcatttggctgtgattttatgtgactaagaaatttctttgaattagcaattcagctcattttgggaaaaacttacccagcataaggcttttttgagaggatttcttttccgggggtccaacatctgtagcactggattataaattatttctaaaataaacttaagttgatggatcattgttcttcccatttgggcctgacaaaaggtagcactcacatttcctttttttaatgctgtaaactgtgtatcacttctcagctcctgttagaaaactgaattc

SEQ ID NO: 199349 - DNA, 1000 bp, Homo Sapiens
ttattttcttcagtgtacagaagtcatggaagttctggactatctagctacataaaaaatattgggccaggcgcagtggcacacgcctgtaatcccagcactttgggaggctgaggtgggcagatcccaaggtcaggagaccatcctggctgacacggtgaaaccccgtctctacaaaaaaatacaaaaaattagccgggcatggtggcgagtacctgtaatcccagctactcgggaggctgaggcacgagaatggtgtgaacctgggaggcagagcttgaagctagcagagatcggccactgccctccagcctgggtgacagagagagactctgtctcaaaaaaaaaaaaaaagaattgtctattttgttaatacaaaataggtatgttgaattgtttgtcacagaaaccaaaaaatccacataaatctcttttttcctgtaccctcaccttgcctgtttcctattctccactaaatgcttcaactcttcattttgcctggcccttgcacccaagcatggctgacagaaaatcctaaaggcccaagattctatagtggctgtttgcaagggagacgaggctataagtaactgccacactggatcctcttatgtgagaagaaagaaagaaagtatcctgaatgcctctcacatataaaagagcaggatggcagggtgtctgtgtggcccaaggagccagaggtagcaaactgtgggcaaaagaattgtgaccaaaggctagaagagggaaggtctgcagtcagccttgtcttctacctctctgctgtttgcttctcatgagcagagtccgttttccaaacatcaggacactgaaaagaagactcctgctctggaagttgacaagaaggaatatccacgaatgtaaaaatgcaagatcaaggcttggcccagaaacaatgcctaaaatcaaggggttaaaaatgggagagcagaagagagatccaagtccaacctggcccagcccaaagaaggtggaattc

SEQ ID NO: 199350 - DNA, 1000 bp, Homo Sapiens
agcaactcctgatctgctcaggtggttttttgttgttgttgttgttgttgttgttgttttgttgttgttttttttagattgcagcaattcagtcacatctccacactccacttctagctttagttgtcttgctatttccaccagatctttatttacttcctccaatgaagtcttgaaccccttaaagttaaccatgagagttggaatgaactttttccaaagtcctgttaatgttattattttgctttccttccatgaatcacaaataatcttcatggcatctagaatggtgaattcttttcagaaggttttcaatttactttgcccagatcaatcagaggaatccctttctatggcagctatagccttatgaaatgtgttgcttaaataataaggcttgatagtcaaaattactccttgatccatgggctacagaatggatgttgtgtcaacaggcataaaaagtattaggctgggcgcagtggctcacgcccataatcccagcactttgggagaccgaggcgggcagatcacgaggtcaggagatagagaccatcctggctaacacagtgaaaccctgtctctactaaaaatacaaaaaattagctgagcatgatggcaggcacctgtagtcccagctactcaggaggctgaggcaggagaatggcatgaacccaggaggcggagcttgcagtgagccgagatcacaccactgcactccagcctgggtgacagagcgagactccgtctcaaaacaaaacaaaacaaaacattaatctccgtgtacattgccatcagagctcttgggtgaccaggttcgttgtcaataaagagtaataaattgaaaagaatattcttttctgagcaataggtctcaagagtaggcttaaaatattcagtaagccatgctgtaaacagatgtgctgtcattcaggctttgcttttccatttataaagcacagacagagatttagcatgattctcaagggccctggaattc

SEQ ID NO: 199351 - DNA, 1000 bp, Homo Sapiens
tggtcttgaactcctggcctcgagggatcctcctgccttagcttcccgccttagccttcggagtggctgggattacaaggctcaagtcacagcacccagcatccctgaaatatttaaagttcctgatttttctgtgggtctttgtaattgctgttccttctacccctttgcctggtgaactctttctaatcatctagtattaacttagaaaactttttaattaggaaacctttcttggttacagtcccccctctccagttttgggttactgcctcctatatatgctcatcttacaacttatttttgcccctaaagtagcacttagtgagcattttaagaagttgtctatatctttcatttgtctgaaatctccttaaatagaaaataacagcatagtacttgatgtatagatgcttaataaatacttggactataaatggatgcatatcaactttgctcagtaaacaaccattcggtaactacttcctgccaagggccaggcagtaaatattttagggtttggggccataaggtctctgttgcttcctaaaggacaatagtcaagtctcactggtggctccaaaatatctatataagacagaatttgagttaaaacttggaatgaaaggagtaggggcgcagctctgggttagaggacattacttgaagatatctttacaggcacacagttattgtttccactgaatatctattttaggtagtttgggggtgggtctgtgggtgaagctaaaacagaaagcatcatccttgctatgaccactgctagttctgttggtgctctaaataatttcttttgaaaattactagtgctggtgacttttgaaatgcgggtgttgttgtttttttgttttgttttcatttttagcattttatttttattactccatcatacccaagtctaatcagtttccatttcccatgaacctgcctagatagggttgaattctcaggctgaatatgtgggggaactgtggaattc

SEQ ID NO: 199352 - DNA, 1000 bp, Homo Sapiens
tataattctttcattttatattacaatgtaataataatagagatcaagtgcacagtaagtgtaatgcacttgaatcatcccaaacccatcacctgccactccataccagtctggtccatggaacaattatcttcaataaaaccagtccctggtgccaaaaaagttggggactgctgccttaaggaacacaattttacttaggcgtcctccacatcccctcgtagccaagggcctcagtggaagaggccccatctccagccccaagtaggttgaatgaatctcagagcctttgcctgtgattgccgctggcatgtgcctgaggaccgggcagtgggacaagaaagaaaatcagctgggggatggtagaagacatttcttccttctagggaaagccaaagaaccaacatctcttctttgtctagctgttggatgctatcggctgaatttctgcatccccgaaacctgcctaaaatttatatattgaatccctaaccttcaatgcattgggaagtgggtcctttgggaattaattaggtatagacgaggtcatgaagatggggctcccatgatgggattagtgcccttctaagaagatggagggggctgggcacggtggctcacacctgtaatcccagcactttgggaggccgaggtgggcacatcaggaggtcaggagatcaagaccatcctggctaacatggtgaaaccccatctctaccaaaaatacaaaaaaagttagctgggcatggtgacaggcacctgtagttacagctacttgggaggctgaggcaggagaatggcatgaacccagaaggcagagcttgtagtgagccaagatctcgccaccgtgctccagcctgggcaacagagtgagactccatttcaaaaggaaaaaaaaaaaaaaaaagaagaagaagatggagggacaccagagctccctctctctaccttatgaggatacacatgaggtggccgcctataagccaggaagaaagaattc

SEQ ID NO: 199353 - DNA, 1000 bp, Homo Sapiens
tacccaaaccagaaatggggaggcttcccacgttcttctctttgctgaatactcttcaaccttccatcaccaagccctgcccattctacctcttcagtcactcctcagatccttcttcccgtccgcatctccacagccacaccctccctccattgcctctcatcactgccctaatccccaaggggtacgtgcacccagggcacaccagaccgttcactgaaggatgagaagaaaggaattgaatgtctatctacccacacttgtctggtttttgtatttaattaagactcacataccataaaatgagccgttttaagatggggaatcctgtggcattgagtacactcacaatgctgtgcagccaccacctccatcgagttcccagacttacatctatttttacgtcatgtttttagtgtttacattttgtgtatgtttcaaggcatgcaatgtgtgaatacagttgtattgtatatcatttgtgaataatcatacatctgctcagaataggcggcaaagacttttttgctgaagaagatacaaaattagaaaagtggggacacgtgacctcctaactcatctctcacatgtcaggctctagagtgttttccaaactgcctccaaattttctctgcaaaagactacaaaaatgatgacagtacactcccctcaccccacgaccagtccttaaacgcttcaatggctccctgtcacccacaggaaaatcccaaggctccatcgctgggcaggcgagatgttggattcagtggcctctgcccactccccaataccatctcttgccatccttgataccacttccttcctcaccacccaacaatcccaccaccactcatggtttcttgaactttcaggctgctttatgtcacagctttgcacatgctatttcctctttcagggtgccttcacttccattggctatctggcagatccccatggatattaaaaacccttccatcctgctcatctcaaagcagaattc

SEQ ID NO: 199354 - DNA, 1000 bp, Homo Sapiens
taaaaagtcaagaaatgacagatgctggtgaggttgtggaaaaataggaacacttttacactgttggtgagaatgtaaactagttcaaccattgtggaagacggtgtggtgattcctcaaagatctagaaccagaaataccatttgacctaacaatcccattactgggtatatacccaaagtaatataaatcattctgttacaaagatacatgcatgcatatgttaatcgcagcactattcccaatagtaaagacatggaatcaacccaaatgcctatcaatgatagactggataaagaaaatgtggtacatatacaccatagaatactatgcagccataaaaaagaacaagatcatgtccttcccagggacatggatggagctggaagccattatgctcagcaaactaatgcaggaacagaaaaccaaacaccacatgttctcacttataagtaggagctgaacaatgagaacacagggacacgaggaggggaaaaacatgcactggggcctgtcaagggggtgaggtggggggagggagagcattaggaaaaatagctaatgcatgctgggcttaatacctaggtgatgggttgataggtgcagcaaaccccatggcatacatttacctatgtaacaaacctgcacatcctgcacatgtgcccagagacttaaaataaaaattaaaatttgataaaaattattaccacaaataaacaataagtatttgagatgataaatatattaataggcttgatttggtattccataatgtttgcatatatcaaaacatcacattctaccctataaatatttatatatataattattatttgtcaatttaaaataaaactaaaaacagaaaacaattaggaaatcctgccagtatctttatttcaacttgggtagagttcagaatacttttgggggtgaagagtcaaaaaaaagtacatatgcacatagcaataaaatatacatctgattttaggtctatgaattc

SEQ ID NO: 199355 - DNA, 1000 bp, Homo Sapiens
caggttttggtaaaaactttttaataactggcaattccatattccaattctagtcaccagtttaggggctatggagtagttacagctttggcaggcatttcctgcatttgtgcatggcagtttcctggactccagttcacagtttgcagtagagggaacaacagcaacaagaaacctgaactgatatattcctctgctttttctaaaaattttgaagatacttaattcattgttttaaaactcttttcagtgtgaaatatctggggcttttgttgttgttcgccctgaggtcccttctctcaagaaaaactaatgatctgaatctatcaattcaggatatgcattggcccacaagtcaaagttgtggtatttttaaagagatcacaaaagcatgtagcatagacagtgtggtctctgtaattgcttgatgtaggctttaatgaggacaagagaatattctctcatcctttcttattcccaccctttcttccaggcttaaataaccatctggacaaggtgtgttcatccttatttttattctgcttccctctcttctctttctactcttcacacttgcgtaagccctgggctgggttatggaagcacagcagtaggtgttaggatacatattttgctctggcatatatgataggtacaccatggtttaaagtttctggttgatttaggggtagaaataagtaaagccaattttacattatttttaagtcacttaagggaatcagaacagagtcctacatttggtttggtctagctcctcaggcactatactgaggtttagggccaaaggcttagccagtagctatttatcatgaataaatagatttctatcatgatctcaggtggaagttggtataagacacagttttatttttattttattttttatttacttattatttgtttttagagacgaggtcttgctctgtcacccaggctggagtgcagtggtgtaatcataacttactgcatctttgaattc

SEQ ID NO: 199356 - DNA, 1000 bp, Homo Sapiens
accttcatgaagttcagagccacaggatgaacatctgagaacttttcctcaagagtttcctgaaaaacaaggttaaaacattcaatattacataagaacaaagtaatatgtgtgtgtatatatgtgcgtatgtatgtgtgtgtgtgtgtgtgtgtgtgtatttagagatactgtctccctctatctcccaggctgcagtgcagtggcatgatcatagcttactttaaccttgaactcctgggctcaagagatttttccacctcagcctcctaagtatctaggactacaggtgggtgccaccacacacagctaattttttatttttctgtagagatggggtcttgctatgttgcatgagctggtctcaaacttctggcctcaagtgattcttctgcctcagtctcccaaagtgcagggattataggggtgagccaactcacctggcctatattttgaatatattagtaataacaacactttaaagaaagactctctagtaggttcaataattcattttaaatatatatatatacacacacatatatatacatatatatgtgtatatatatacacatatgtatatatatacatatgtgtatatacatatatatacacatacgtatatatacatatatacacatacgtatatatacatatatacacatatgtatatatacatatatatacacatatgtatatatacatatatatacacatatgtatatatacatatatatacacatatgtatatatatacacatatgtatatatacatatatatatacatatgtatatatacatgtatatatacatatgtgtatatatacatatatatatacatatgtatatatacatgtatatatacatatgtgtatatatatatatatatatttgagacagagtctctgtcgcccaggctggagtgcagtggcagcacgaacaaggctcacagcaagctccgcctcccgggttgatgccattctcctgcctcagtctcccg

SEQ ID NO: 199357 - DNA, 1000 bp, Homo Sapiens
ataggaaattagccttttgccccaactataaaaattttataatcaaataacaaattaatgaacttaatagtcattgacaaaataatcaatgataacataccaactttagcccatagatttgaaggtgacatcttcactgtatgtacccatggaaggctagtcccatagccctgcccaggtctttcactgtagagctgaaatggtgaatagatagcctcagtggttttcactgaggtaaacactaaattagtgagcactagaaccatgctactttgaaattgttgttatgtgaggcaataactgtccttattttttagactgctttcaatgggctttatatagcttgaagttgtaggtaacgtgcttcataaaactaacccttaccaaagaacgagctagtgcaactatcaccccatttctaaatgtttgcttttcttatatcaaataataaatgctattaatgccaataaagattactaaaactatatactaatatgtgttgctgatgataccattttctaataactattactatttaatatttttcttattactgtcaaattgcttactctgctacactctcttccagtgtagttttatcactttgcattcctcacagcaatgtgtgagagttccagttgctttgaatctttgatagtaattgctattttaaaaaataggtaagcaaaaattttaaaaatataatctaacacattaattaattgcagttttcaatattattaaaatgtcaattctctccaaggaatatggagatttaatgcaatcccaaccaaaagcacaaaagacttttttaaaaatagaatttgacaaggggactctaaaatgcatataaatggaaatggcaaaaaactgctgagtcactgttgagaaacagagcgttgttctacaagatacacagactaatatttaaactacagtatttagcatatgttgtgttggtgcagggataaataaaacaatggataagaacagagaattc

SEQ ID NO: 199358 - DNA, 1000 bp, Homo Sapiens
atatcctaaaactagaaacaacccaaatgtccataaacaaatgaatggttaaacaaattgtggtatatcattacaatagaagactatttcataataaaagacaacagactattgttatacagagtgtggatctcaaaaacaatgctgagtgaaggaagccagacacaaaagaatacatgctgcataattccttttatgtgatattttagaaaaaggaaaactaacccatagtgacagaaaataggtcagtagttacttgtgtctggtggttgggggtggtattgacaataaagaggcctaaaagaacttttcaggataatggaaatgtcctatagcttgatcggggtggtaggtgcacaaatgtatacatgtgtcaaaactcaaactgtatatttaaaatgtacacattgtatgtatattaaacctcattaagattgatttatatatcattgtgataatcttacaaaatactaaaatataaagtttaagaaatggtttatattttcaaaatataaaatatgagaaaaattcaaagatgaatccagaatattaggtccacaatccaagaaaatgggaaacaagattgggcacagtggctcacacctgtaatcccagcacaagcccctgaagtccggggtttatgcccagcctgggaaacatagaggagcttgtccctacaaaaaaaattaaaatatcagccaggcgtgggggcacacacctgtattcccagccactcaggaggccgagaggaagatcacttgagcccaggagttcgaggctgcagtgatttatgatcgtgccactgccctccagcctgggctgcagagtgagacccaaaagactgtctctaaaaaataaaagagagagagagagagaaaagaaaaatgggaaacaaggagagaaaggaagaaacaaaacaaacaaaatcccattattttcctgagtataaagaaaacagaaatcttcagtttcaaatgttgttgatttattcattgaattc

SEQ ID NO: 199359 - DNA, 1000 bp, Homo Sapiens
agggatacaatttttgcagagcttttaagagcaagaaatgttttttatcaatttatataaaaatatataaaaacaacatatatccattcagaaaattaaaaaataattattggtggtgtgttcaacaatatgttatcaaatagtaattgtaagctgtaattttcccattaagtagacagacaaaattgattataatggccttttttctcccctaaatattccatattttacatgttctattatacttaaggttttctttataactttgccccaaagtctgcacagctcatctaccacagtatttactctacaggtgccccaaaggacttttttcacagaaatgtgtaataactttcattatgccaacttgaaatggtaaaacggcaggggtacctaaaagatatcctagtaatatttaatgatacatcacaaaataaatatttttaaatgtttgtataaatcattcctacacctatgaaccatttcaggctaatagagacaggtgttgtttatatgtttttgctctaaatatatatatttttaagcccaaagccagaaataatataaacaaaatattttaggatttttgagattcccaatcatagcacatttctgttctcttccttcctacatgaatgtttgctggtttaattttctttatccaaccatctacactatctttcagatatttccaaccccttctttacagactgttccaaattttgttatatattacttgcactgttatcacacagagtatcctctcagaaatggataacccccaagctttctacgaaggtgataataagcttcatttcatgttaattgctttcttgctgattgtcctgtgatatctctagaattaataccattaaatcactacctatcactctattggcataatttggcttaattacttctacatctgttatctttaatactcacattaaaatttattcaacattgtttaagcaactcagacaaatttctccatgaattc

SEQ ID NO: 199360 - DNA, 1000 bp, Homo Sapiens
gaggggctggctctcagtccccgcctcgcaggaggtgcctccccccgctgcaatgggggtcctaagagccagagggggaaaagggagtggctctcagtccctgcctcgcggggggtgcctcccccacttgcgatgggggtactaacaaccaggggcggaagaggggatagctctcagtccccaccctcgtggggggtgcttccacctcctgcgatgggggtcctcagagccagggggggaagagggactggctctcagtccctgcctcgtggggggtgcctccgcccccagcgatggggatcctaagagcaaaggggggaagaggggctcgctctcagtccccgcgtcgcgaggggtgcctccccccctgcgatgggggtgcaaagagcgagggggggaagggggacgttcgcagtccccgcctcggggggattgcctgcccccctgcgatggtggtcccaagagccagggggggaagaggggttggctctgagtccccgcctcgcggggggtgcctcccaccccgcgatgcaggtcccaacaaccggggggaagaggggatggatctcagccatcacaaaatagggggcctttatgttcaggttttgcccaagaatcagcttatttgcttcttttactagcagggcagttgctgccaaggccctcaaataggggggccatcctttagcaactaaaaacctagttgtttagagacgtaggctaccggcctcagccagggccccacagtttgggttaaaagtccagctgccatcttttctctctctgacgcatacaatggaaaaggctttgtcagatcgggtagccccagggctggggctgccagaagattttcttgtaactcatgaaaaacctgctgttgttgggatccccatttcaaaacttccatgtccccgccccctttgtgacctcatacaaaggcttggctaatactgcagtttgggatccacagtctacaaaatcccacagctcctaagaattc

SEQ ID NO: 199361 - DNA, 1000 bp, Homo Sapiens
caaagcacacacaacttgtttcctcatctgatctttaccgtaggtgggtgaaagattacaatctccattttacaggtgagaaaacagacccgggcaagtgaccggccaacgtcagatgactggcaggtatcagaactagaaggagcacccagactttctgaggcatcagtcagaacccctcctacactgggacattgcctctcaccgctggcattttgttccagcctgggagaggctgtgctggccccacagtcctctatggcaagtggagggtgtggggcaaagggtgtcccttggtagctgccacggccactgccctccaccctattccttcccaacagaaccccaattctcttcagttgtggggggtctagatgatgcttgagaccttctcctgccctagggtgtgcaggttgattagtcataatggtaattctatgccttttgctagtggttgtcaaaatgtcgatatgtgacctaattccagccaatagaggttggagtaaatctgcagaggccattacttctgggaaagatgtttctctgtaagaaaagtaattatcaggaggaaatgcccccccccaactggtgtctttttgtgtgatatcaactattcgatggtatgtggctgatgatggttaagtgcaaggatgcaaagctctggggctcagctctgaaaggtcacctccccatcaaagccaggccgcctccatccagcacatctgcatggggccccttggattttgcctgtgggcttgtgcttgtggcaggcctctgcttgcctgtctctctctgtattgttgggctgtgagctctgttttcctgtgtccccctatcctgttgggctgtgagctctgccttcctgtgtccccctgtcctgttgggctgtgagctccctggtgctgcacacttgtcccttactgcccctccccagtgcagtctttacatggtcgggggcatggtggggaagtccctgaaagcagggccgtttcatgaattc

SEQ ID NO: 199362 - DNA, 1000 bp, Homo Sapiens
ttcagtaagaagattaaatgggacctgttttagaagagttgttcttggaataaatagctatgtaaataaatatatatacttatgatactctagtctctttgttttcatttgtgttgcctcagtgttatttttctttcaggaagtatccacaacatccattgatatttgaaccacagattgtgcaagtgttctttacatcctgtgtcttctattttatggagatgtagaatcatgatttggggaaaaagtagctacatgttatttgtagactaaaagaaaacaaaacagtgctgtcaagattgtattaagcaggaactcatatatacctcatgggaaataaattagtataaaccttttgggaagccattgaacaatgaaatatttgtgtcttttgatctattaattttacttttgagaatgtattgtaaagaaataatcacaaatgtggaaaaagctgtatggataattgagtttatcatggaactatttataatagaaaaaaatgggaaattaaatgaccaactataaggaaatggccaaggaaatcccaatcaaccagctgttgtatagccattaagaatgtttactaggaggataaaataacatgaaagattcttttgatataacattcagtggtgaaaaatgtggggtagaacatcttttatttaatatgattacaaattggtaaaatatacctatgcttggtaaaaaataagcatattaaaggatgagtagtgattatgtttgggtggcgaaactatgattcattttcttcttttagagcagtttcagattttcttcaaatgatcacgttctgttttcatagtggggagaaagagtgtaactttcctatcttcataaaaatattattttccttacagcattaaagggcagtatttaaagtcagttggcaagcagtggaataagatttttgtaaagaaaccttgtgcagcatggattctctaccagatgaattttttgtgaggtaaggccacagtcc

SEQ ID NO: 199363 - DNA, 1000 bp, Homo Sapiens
tcaaaaggggcaaagttgaggacactggacatccaggaagagaagataagtgaatttttaagcgaacattaaggaacctcatcattgtaccaaatcaaacttcagatagctgtatggccagggcaaggcacaatttatgatgagtcagaaagaggatctgtgattttctttaatcttcaatccgtgtagttagggggaagcagtttgtttgaaaacacacacacacacacacacacacacacacacacacacacacactttttaaaagaagttttggtaaattgtgttctttccatcatgggaaataagcagaattatgagataatccccatcctttaagataatgaaattttcctctataaggccaaagcctgaacccaatgccaaagccaaataagccaccaataaaaaggctatgaattgagtgagaagtgaacatgattcttgccttctctaatcccaagaagacaaatagggaagttggtgaaggatggactataaacaaacaaacgaaaacaatcactgaagcagcaagcctgtccttctaggagaattcccatttctgccttcccaaaagagtgtctccaaagggcagcaagcattatctccactaaattaagcatttgcctcccatttgggctctggactccacatacctatcagtgaggtgaggccaaggcagtgggattcatattttagaatggaattatcactctaagagttgtgcaatcacattaattgccttgaaaggcttcctagacataaacaggaaataggagtagcctaactttaatttctgtctaaattctcctagctccacactgagttttatgttccgatataaacacgatattatttgttttcgtgattattatggtctgtaaatctttttagacctttgattccttgattcctcatgatctggataaaagatggtctagaaaggtatagagaaataagaagacagcaatgctttggaaaacaaaggcttcgagaattc

SEQ ID NO: 199364 - DNA, 1000 bp, Homo Sapiens
tccaataggtctgttaggctctgttcatttttacctcattatttttattttcttctcagactggatcatttcaattgctttatcttcaaattcactgattttcttctgcctgctcaagtctgcggttaaacttctctagtgaatttttcatttcagtttttgtacttttcctaaaatttctggcttcaaataggaagcagggaggggctctgtgcctttaaattttccagttgatgccactagtggaagccattgcatcccaaggaatgtctaaaccaagacaggcatctgctgggacccaccagatcaaagggcacaaccccaaatttttggaggacaaggtcccactgcctaccctggccagctagctactccaggaatgtgagctgctatccccatagcttcaggggagctgaagagagggggatagtagctgggtcacacacacagttcccttagcaaagatcagcagcctctccctttaccaatcagtctcccgattgttataaatgtccaatcaagttccagagttatgagatagttgacaatcactgtttctacttcaaggtagcttcagtggagggaccaatccctagggcttcctactctgccattttatgtgatgtactcttctcccattctacaggtaaagaaactgaggcataaaaaattcaggaatttgcccagggtggtgccaggattagagctcagctgtctacctaaaaaaaaaaacccatgcccttggccacttcactatagtgcctctccatatggtttgcacctgagatgtattttatattctcccttagacaattttttaaagaatgctagaattgggagagtgcttacagccctctgatctccaagaagcctaagtcagggcttctctccccactaaatacctcaagggtgaggagatcacattctcctagtcctgaagttctacctaattgtcgtagaaatctttccatgatatatgccaactcacttttgtgaattc

SEQ ID NO: 199365 - DNA, 1000 bp, Homo Sapiens
ctgaaattttctatcagcttctagctgacaaaaggtgctgtgtggaatggaagtatttttttaatccctgtcaacagtgagaataggaacttaatctaatatttagaggaaaaagttactcatcctggatttcagtgctacaataataatactcagagagaaatttgtctaatacgtatttgctttcttggaatcatatcaagaacaagaaaataaagatattctcagattcctaagaaccaaattgtcaagatgggggagaattaatctacacttcccttatcacaggaatttcagaagagtaaataattataaaatgcatgagttgggaaaaattttagaaatcatttaattccgttctctcactttacaggtaaagaaagtgaggccaagagaaataacaggccttctgacccctagtcaaaatttctatgacactatttgaaatacttcttgaaatataccatgttattaaaataattcgaaacaggacccagagaaacaccaagtcttaattgcaatcatgttttgatgattaaggcaaaaaggaaaggataagcaaaaaattggcaagagaaatgtttaaagagtgtagagcagggaggaagtcaggagtcctataacttattgtctcttagatacagagagttgttccagttttgcaaaatgcctgcaaaatacattgtcttacttgcttctcatcacaattgtatgaggcaagtagatgagacagatctgatttctctcctttataaatccattttttatacacgtatctgttattgcctcagcagtacagatgccatttactagatcagttaatggatgccaagtctctatttacatcttgctttagtgtttaattcagtttagtcttctgtattctaattccaaaaagcaacatggtatcagaatcctgaagtattgtaagaatcatattcaattttgtactgacataagctgctctatttgggcaaaaattggtagcctctccaagctt

SEQ ID NO: 199366 - DNA, 1000 bp, Homo Sapiens
tagtgtttttaaattatttactaaaaatgtttgtcctttatatgaaaaagccagtttacatgaaaaatacacctagggtgatgtttctttaatagtaaacttgtgagctggcatctgtaatcccagctattcgggaggctgaggcaggaggatcctttgaggtgaaagctttgaggccaacttgggcaacatagtgagaccctgtctcaaagaaatctcttaaaatttagccaagtgtggtggcacagacctgtggtcccagctacttgggaggctgaggcgggaggatcgcttgagcccaggagttcatggctgcagtgagctatctaggtcgccacagtgcttcagtctgggtgacagagtgagaccctatttctaaaaaataatattggccgggtgtggtggcccatgcctataatcccagcattctgagaggccaagacaggcggatcacctgaggtcaggagtttgagaccagcctagccaacatggtgaaacccagctctactgaaagtacaaaaaaatcagccaggcatggtggcgggcgcctgtagttccagctactcgggaggctgaggcaggagaataacttgagcctgggagacggaggttgcggtgagcccagatcacattactgcattctagcctgggtgacagagtgagagactctgtctctaaataaattaaaaaaaaataaaataaaaaataaataaaataaatagcttatggaaaaatatagctcatattattttattcagtatggctatttgttttttacatactttcagctgtataacataggtttttttcatgtttttaaatttttttcctgtatagttcagaaattttgccactgctttgtcaattagatcttcatatgaaattgtcttctcagctggcctgagatctgttagtgactttttggtagaccgttggagatatttttcttattttgtctgagtttgttttcctatacatctcatgttttctctttgaattc

SEQ ID NO: 199367 - DNA, 1000 bp, Homo Sapiens
agatgctggcctcctgggtggtgttcccatgccgagctccagttgggggtgtgaccagcaccccgtgcgggggctgctggtgttctgtgttgtcagagcagtgctgttttgtgtttttctttaaaaaaaaaatttttttttgagatggggtttcactcttgttgcccagactggagtgcagtggcacaatcttggctcactgcagcagcctctgcctcctgggttcaagcaattctcctgcctctgcctccccagtagctgggactacaggtgcccgccaccatgccctgctaatttttatagttttagtgaagatgaggtttcaccatattggccaggctggtctcgaactcctgacctcaggtgatctacctgcctggcctcccaaagtgctgagattataggcatgagccaccacacccggcctccttttaaaattttaatttttaatgagatggggtctcactatgttgcccaggctggctttgaactcctggcctcaaatgattctcctgtctcagctgtgttttgtgtttgctccagccctttgctggtgaacagacacgttcactggacacctaagtgcctggaccgtggagcacagggtgggggtgctgttcatggccggaacgccagaggctactggggagacacaggagcgaccaccatgatccacagaccaggactgtacagagcacttgaaggggcggcctcaagaattgtgccggaacagtgaacatgagggctcctggctcccctctgaggacaagggttaggtaggaggggacaggggcagggctgaggtgggtcggcttggttcatggcagggcttggggagtgaggagagtgaggagtaccgggacccggggtccctgctctgctcacctgctgagaatgagccagtgttggcctctggtctccatgtctgtagagaggcttctctgcttcccctcctgtagaatgggaacgacaacatccagccatagagtgctgagaattc

SEQ ID NO: 199368 - DNA, 1000 bp, Homo Sapiens
acctcctcattaaaattacagtggtagttgtgaatgatgcataaatttaatgcctgggttttatatattgattatgtttattgtattatagctttgaatctgtggcacattagttcctaggttagtactaaggcaatacactagatcttctttggaaaaattaactttaccaaaatcaattcttgatgtgattatctggcaataggagaactaagtgactatgtcaagatgagttttgaggaggaactgaagctataagcagcctgctgtaggctaatgttttgttgtattgctttacctatcttcctctgtaaagcttagaaacaactacttcataatctttgtagtctcaacatatgagagcttttagatggtgtaatgaggggctgttagaacatagttaatctggcagtaggcaagagtgactagatcatgttttaagagttggacttaaattgtagttgcaagcctggattttttttttttaattttttttttatttatttatgatagtcacagagagagagagagagagagaggcagagacataggcagagggagaagcaggctccatgcaccgggagcctgacgtgggattccatcccgggtctccaggatcacgccctgggccagaggcaggcgctaaaccgctgcgccacccagggatcccgcaaacctggattttattggacgttggaatagtgagttcttatgttgatttttataatttaatttctttaaggagttaaactagatgagaattgcctctaacttgatgacagactgttccaaagacagaaaagaggataaaaagcaaatctttaaattggtgctttgtcatttcacgtagagctcttagggttatagttatgcttatttaacctccatacttttgtgggccacttcctttcaggctgtcaagtactttattgaaagaagcaatccatacaaggctaaagagaacaaagaatcagcatattgtgataaggaggtagctctt

SEQ ID NO: 199369 - DNA, 1000 bp, Homo Sapiens
atgtcagggccctcaagggcagctggtgtcgtcatcaggacagcctgacttccagatcctatcgggctaggggtctggtgagaatgcagcaggcacctccctctccgacctgcaccccactctccccatgcccctcccccaccccgtggctgttcaggaacttagaggggagaagagggtgggagaggaagggagaggaaaggacaggagcttcctcgaagggatgctccacattttgagcccgtttcttcaaaagcaagcggtgatttgtcttctgggtgagttgggggaggcaggtggaagggtccctgcccttttcgcaggataagatgggccacaaccatagtccaggactgagtgtctccccaatcctggggtgctggcttagtggttaaaggactagctcatgacttaaaaggcttgtgctccatcctggctctaccactgatgagctgtatgcctttgggccagtgactctgcctccctgggcctcagtttcctcatctgttaaatggggtgtaataatgacaccaacctctcaccagtgagaagatgcaccaaaaaaatccagaacagcgcctgttttgtagttaatgttcaataataatgctgctcattatttttagactagaagactctacttccttgcctcagttgcccccttgaccaaatctgcctcagagcaggtccccttctagggatcatgtgccaggtcagagttgggtgctcagaagggactggtcataggaaggaagtgggatgagagagagcaagggtcactttggggcaggaggacgatgctgcgctggccctgggaggggtccagccagtgtagcaggataaacagtgagacacagggtgccggggaggtatcgtggaccaggagtcagaacatcaggcaccccgccctgcagctgcctctcctggcctgtgtgtcctggggtgactgacatactgtctctgagcctcacttccctcacctgtgaaaggggaggaattc

SEQ ID NO: 199370 - DNA, 1000 bp, Homo Sapiens
tacccattcagtcataggcagaaagggaagcagagcataaggagacctggctggctctgccataggcagatcttacctgtcctgcttgccctaaaaaagcctggtgactatgcaagggactgagaggtggctcccatggccatagtctaggcaaaataacccatccactaataagtgaacatggcagaaatacagtcagcatttcctcagtcttgccaataaagtcaactcctccactcaccagggaggagctgtatgaaaggggcagagagacttggaagttttcatcctaactcactcttctttgtttttgctttgttttgttttgagaccgagtctcgctctatcacccaggctagagtgcagtggtgcaatcttggctcactgcaacctctgccccctgggttcaagcgattctcatgccccagcctccagagtagctgtgactacaggtgcccaccaccacgcctggctaattttttatttttagtagagacacggtttcaccatgttggccacgctggtctcaaattcctggcctcaagtgatctgcccacctcagcctcccaaagggctgagattacaggcatgagcaaccccacctggccacctaactcactcttgagaggccagaagtgatgctggaactttcttcctctgtgggttaaaaagagaaaattaggcagaacacaaggcatgagagatgcagcgatgcatatatctatatgcagcttttgtctgcatccagtagaaaatgcatttctaggcaccaggtttaagagtgaaaacctggagtcttgtctattagcattctcattccccacaaaccagagagggaatacatttgctccagcacacccgaatgtaggaaatgtcacattcctatttctgtaacttcagttaaatctgctctgagtccctggatgcctggcaggtggagaattcaatcttgtcgttaccagcattcctttcccttctccatgggcttatgtaagaattc

SEQ ID NO: 199371 - DNA, 1000 bp, Homo Sapiens
catgtaatttccaagctataagttgctcatcaaaatatataagtgaaaaaaattaaaaccagggaaggaaagcaagacaatcctccccaaataacgttaagtctatgcgtctaattccacatcatcgatgagccatctgtcacatggactactgtccctcaaacagcactcaggtatgagacttgagacgaagttcagaccaaggccgtgtcttcgaggatatttcgcttagagaaaacgaaactacttttaaatgtagtgcttatgactagtgcggtaaccactacacaaacagcattctcctggcatttttatgctaacataagcctcagcagcgaagacaattgctaccgggggaaataaccttcaattgtgtttttagcaactgattcctcttttttgctgttgtaaagggccgttaaacacggaaacaggagcctggcgacgttagtccgcaacagaaagttattttgtactttcacagtgggtttgcctacttggtgagataaaagtggggcaagaccgggcctcaagccaggacttcctgggggctcccgggagcaccgcaggctgcgcgttccccgcgcgccggcaggaggcgcgcgctgcctggaaacgccccagcgccgcccgcgcccagagacccgccgctgtgacgcagcgagagcccgggaggaggcgcgggaacgcgcgttgggggtcaggtgccggaagaggaaacctctcgctggggctaggagttcggcggggcgcgcgccggcggctgcggagctggcaggtgcgaagcgtctgcacctggcgggcgatggcgcccgatgcgggcgccccgggatagcgtgggcgaggctgcggggccccggcgcgcacgcccgcacctctccccagccctggcgtgggcccagcccggcccaggcagcaatggggttcctgcagctgctggtcgtagcggtgctggcatccgaacaccgggtggctggtgcagccgaggtcttcgggaatt

SEQ ID NO: 199372 - DNA, 1000 bp, Homo Sapiens
tgtggaaatggccatactaccttaaacaatctataaagtcaattctattcctatcaaactaccattgttatttttcacagaattagaaaaaaactattctaaaattcatatggaaccaaaaaggaacctgaacaccaaaaacaatcctaagtaaaaaggattatattatctgacttcaaactatacttcaagcctacagtaatcaaaacagtatgatactggtacaaaagcaaacacatagaccaatggagaagaatagagaacccagaaataaagttgcatacctataattatcttatctttgacaaagttgacaaaaataaacagtgggaaaaggactctgtattcaataaatggtgctgggataactggctagccatatgcagaagaatgaaactagacccctacctattaccacatacaaaaattaactcaacatggattaaaggcttaaagataaagcctcaaactataaaaatcctagaaaacctaggaaatacctttcttgacactggtcttggcaaagaatttattgctattgcaacagaaacaacaaaatagacaagtaagacctaattaaaccaaagagcttctgcacagcaaaagaaactatcaacagagtagacagacaacctacagaatgagggaaaatatttgcaaattatgcatccgacgaaggtctaatatccagaatttatagggaacttaagcaaatcaacaagccaaaaacaaataagccctttcaaaagtaggcaaagggccaggcgtggtggctcatgcctgtaatcccagcactttgggaggccgaggcgggtggatcacctgaggtcaggagtttgagactagcatgatcaacatgatgaaaccctgtctctactaaaaatacaaaattagcctggcgtagtgatgcacgcctataatcccagctactcaggaggatgaggcaggagaatctcttgaacccaggaagtggaggttgccgtgagtcaagatcatgcca

SEQ ID NO: 199373 - DNA, 1000 bp, Homo Sapiens
tgtttcccatgactggaactcttagacctttccacaaacatacaaggatttataattcaaagctcaagcgatgaagttgaagcttttggcccataggaagcctgaactagtgattaggagaaaaagattgaggagtctgagtgggaagagttagctatttgaaagacagcattatagtagtagtcattgtaggaaaactcaggactgggttggacttacttatattatgttgctttatattttggttactgagggaggtgaaggtcatcctttcagttcttgggatgtctaaatagcttcatgactcctgggctgttggataaatttgctttcagcatcatctggctgtaccttttgtccttagcaggggtaaaaggaaccctgtgaaaagcatcataccccaggtttcagtttttgccttgaaatgtgcccgggatcccaggcagtctgggactgcgccctttctccctcttgccaagtgtcctgtatgttcttcagggctagcatggaattaaggtgaggaagctgctggccatctttctgaatgcttgcctgatctctgcaggttgcctcacccccgatcttcctgtgcccttccgcagccattctgtcccctctcctgtacctccctggggtcagttgcagctcatccctggtcttattctgcctgaggtgctgagggtgacaacttacaatagagtctctccacagaacacagagatggagggcaattcttagtcctttccctcactacatcataaacattaacacttctgcttggtccagagttcaggaatgctacttgtaaccaccttgagttattttgtcagtaaaataggtctttgtgggctagcactggatctatttcatgataaccttcactgaggggctgtaagtaccaggctatatttgcctggtccttcatatgtatcttgtttaatcttctcaatagtagtagaaaacaaatattagcattagcttctattatgcaaaagaattc

SEQ ID NO: 199374 - DNA, 1000 bp, Homo Sapiens
tgctcaaattgtctcagatttggccagcgggaagtccttcaagttggtttttgtgttttggctttgacatgcccccatcattctttgtgcattttctctccttctggcccaagatgtttcaggctcatcttgtgctttccctgcaccagcactggaatcttccattgtttaaagaactcccagtttcttttagtggagaatgatatttagaaaccaaaatctcggggctaaatttgttcattgcacagagacactgagtatgacttcctgtttttttcagtagacagagctagggaatgaatatatatctctatctctatagatagagatatgcataaaggtatttatatctttatgttaaaccatgagtataaactgattctttctatttgaatccaacacctcatggttgattgcagctttcttcctttcagtaatccccttctctgacaataagaaacctggctcctgttattaatatatttacttactgattaacccacttgtatataaccaatctcaagtcactgctatcaccctccttccccccaggacacccttactgtccttctctcagcttctagggctccccctaccgcatgtattatagtgcttggcttcatgtcatagcttttatgcctagcatgattaatggatttcaaattcaaattccttattttctgggactcatagaaatatttggtgtatagaaccttatataagccaatcaaaacagagcttattttaatttaaaagactttgtaagcgtgtttactacattcatgatgtgagaggtaaaggactttctgaattacagacatatagacagagtttatagcttcagttgtacagttttattcatagtttaaaagtaaagacagcaacacaaaaactcacagggccagatatcgtagacccgtatgctctcctgatgaggataaaattttcaattgatttgagctcaaaatggacaaacaaatgagactaacaatctgaattc

SEQ ID NO: 199375 - DNA, 1000 bp, Homo Sapiens
acctgagggccagagaggtgaaaggatgtgtccacggggccatcctggactggaaccaggactagaactcgggtcctctgactcccagcccagcactgtgcagctctctgcttccagtccctcctgagcaaatctgtaccaaaagttttttgtttctgggaagaaaaataaggcactattttggatgcttaccataaaataatcagctgaatccaggcatttatataatttgaatttctcaaataataagtaataccatttgtgagccctgaccctctggcaatcaaactgcatgaggagactggggtccatccaaatattatatatgggagcagctcaatttcatcttagtttttaatgtaaagataaatacaaattaggttttaatattttctttccagtgagtttccttgcacataaaagtgcatagaccccactttggagatctctttcccagaaccccttgtcatccacccaagacacaggtgtctgcttatgggaagaaagtaagagttaaggcattggcttgaaatctagaaacaagacagacagaaaggaaaaaggcaatctccagaagatgaggggcaatgccagcagaaattagaaagctgtcatctagttagagatctctggctgtagcatttcaaggtgttccttctgccagtaactctctcctgccagaatcactaaaactgaaagcaaaacacaaactgaccatgtctgatgtgattatggacatggttgggtcacaccagtttaaaactcacaactccctagaaaatccaaggaaatttttgcatttccttctccaagaatacttacttctcattgtatctgtgaaatataatatggcatcaaaagggcaacccacatcaagaagtgtgccccacaatgtttggggatcggggaacgggcatcacttttcttgagcaccaaccatgttcccaatgctacgttaggtgctttgcgtacattgtttcatttggtttcaaaagaattc

SEQ ID NO: 199376 - DNA, 1000 bp, Homo Sapiens
tctcttaagttcctttgtgcttggattttcttcaaagaagaaaggaggagacagagccgggtcaaggcaggatggggactccaaaagagatgagaattagtttctcactgctgggccccagtgtccatactttagcatgcaatggtgagattccagagactaaagaaatgcccttttctggggggaaggtgggggtggatggggaggggagacagactctcactcagttacccaggctggagtacagtagtgcaatctcagatcacagcaacctctgcctccccggctcaaataatcttcatgtctcagccttgtgagtagctggaatcactggtgcatgccaccacgcccagctaatcttgagacagggtctcactctgttactcaggctggagtgcagtggcatgatcatagccacctcagcctcccacttcagcctcctgagtagctgggattccaggcatgtgccaccatgtccagctaatttttattttttaatttattttattatttatttatttttgagccagagtgttgctctgtcacccaggctagagtgcagtggtgtgatctcagctcactgcaatctccacctcccgggttcaagcaattctcgtgcctcatcctccccagtagctgggattacaggtgtgcaccaccatgcctggctaatttttgtatttttagtagagacagggttttgtcatgttggctaggctggtctcaaactcctggcctcaagtgatctgctcgtcttggtctcccaaagtgctgggattataggcatgagccactgcgcctggctgcagctaatttttaagaacatttttgtagagatggggttttgctgtgttgcccaggctgggctctaacttccggtctcaagcaagtctcctgccttggtctcccaaagtgttgggattacaggcgtaagccaccatgaccagcctcaagaaatgctttttactccttatcttggacattggtacaaatagaattc

SEQ ID NO: 199377 - DNA, 1000 bp, Homo Sapiens
tgggcgtggtagcatgctcatgtagtcctagctacttgggaggctgaagcagaaggatcacttgagcccaggaagcagaggttgcagtgagtcgagactgtaccactgcactccagcagggatgacagagcaagaccctgtctcaaaaaaacaaaaaacaaacaaaaaactcaagcactatctataagacagtggttctccaagtgtgattccccagacagcaacagcagcaacaccaggcaacttgttagaaatgcaaattctctagtcttactcctaaactataaaatcagagattctgagggtaaagtccaacaatcactgcttttacaagctttccgagagatttagcagggtcacaattaaaagcagtaagaaatagaaacaaaaatcacaggtggaggtgctaagtctgaggatggaattgggacacctctttctctgggacagacaagaagttaatataaaggtattagtacatttttatgtggccaggggaggaagctgagagagtttgtgcctagtggcctctactctgttttcgaaacagggtctgctactgatagcatgaggcatgcagtcggaagcctgaggagatcattcacgttctgggttaaaattttctctctttgattgaccacagtcactgaaagcaatgtgtaatttctaattctctgggtttaccacagataccagcaaagaagtcaactcaacaaatattggctgactggatgaaaaaaaaaaaaaaactagcaagagttagcagaattccatttgactttcttctgttgaagcagttttagaatttctagaatgctctggcaaagaattaacattatttatggcattttactagttcctatgctcactagccatcccatcatttaattttgttttgttttttggtttttttttgagaccagagtctcaccttgttgcccaggctggaccgcagtggcacgatctcagctcactgcaatctccgatacctacattcaag

SEQ ID NO: 199378 - DNA, 1000 bp, Homo Sapiens
gaattttgagagggaaagaggtttttgattcttatgataggcagttcccagagtgatgtttcgttggaggaggattgtttcaatgtggatggctctttacaatttacgtgtagccagtagatgatggtctctgtagacaaagtatgaagataggacacagcaaagattgggtgtgaacctaaatatccaaaaatcccaacaatgaatttgtcttaaaaattaatatgagtggaaataaatgcatgtagcagtatggcaaaattcttgtaatactaagattgtgtttcaagagttaagacatccaaagaaatgtccatagcgagtagaggtaaaacagtttattatactggacttcaaagttgcaacaatcttttatataacaatcaaaccaacaatcttttgtgcatgttaatatcttaatctcacaacgccaagaactgtcacatttaaagaattctagctattgtgcatggcttggcatttgtaaaaaatgtatttaacatttgtttattatattttaggccaaatcagtagggacagtgtagcacttttaggcatcagctgggagtagtcagtgaaattcaggttttacaagatataaaagcatggcatatggggaaacatgtttcaagaaatgaatcttaaaaagtacagcgcatgctttatccaatttgcttgtgaaagactgctgattcctgttgtttaaaatagtgggtgtagagaatattgttgccagtaaaatttatttactttttgaagtggcatgggtgccaaaaagtaagttcatgattgttttgatacctgcttttttttttttttttaaggctagttaagtgaattgatacctgtttatttttaaatggtgatggagtggtggaggagatggcttcctactaaaagttactgctgttggtgaacatttcttttacagactttgttcaatacatcatgcattgaagtgaaacatcaaaaaacaaataggattatagatatggaattc

SEQ ID NO: 199379 - DNA, 1000 bp, Homo Sapiens
tggagttgacatctatctgtcccctaactcccattagtgctagacatacatcgaaagatataaacagtacctttacttattctttcatacgacagcacttcagaataacaggtatgttggtcccaaatatgcaaaattttgcaagtaacagtacaatggtgtgtttgaatgtgactgtatgtgtgtgtgtgctgccatgaggtaggcttgggagggcaatcttgagcagaaaataacaattctgaaagaaaaagaggaaaagaacagctctaagataatcctcagctcttttccaaaggtagcatccaatgaatttatatttatctagattacaccttgcatctttaaaatgcagcatgtcatccaaaatagaagaaattctatctggtcagaggatgcacagaaaagaaggcaatatgtgtctgaggtcgcactgacaagaattatcaatgctggtgaaagaaaatcttcagactgacttctaatcatgctcacatccaaaagagataaaatgctagtcattggtttcagtctaaagcccatggaagttcaatcagttttcttccctagtcaacactgtgaaattggtctaatctgaaaacttgttagcagccaaggtagtatctgtagcttctcctcctaagaaaaggttgttaccaaacagtaaaagtgttgcagaaagaaactctgcatccaatctgacaagattcagtgtgctggcaaaaagactgatttcatacaaatacaaaacattgaaaaatgaaacacttttcaaccaggaaaagcctcatattacaaaattttatgtcttataaagtcttatataacaatttttataacaaaaagtcttacataacaaaaattttgtcttaaaaatgtctgcaaaataagcctgagcaataaagggagacaaaaaataattttaaaaacattagttgggcataaaaaagttaattgatgcacacctgtggtcccagctactcgggaggctgaggaggga

SEQ ID NO: 199380 - DNA, 1000 bp, Homo Sapiens
gtgccattcacattgtgatctttgtgaatgggatccctgaaattgtgtactgctcggctgcctattggtattatctattgcaatctccactttacaaatgaagaagcacagaaaggttaagtatcttgcccaggcttcccaagcttgtaagtggtagagctaagatttgcatttagggtatcaggtgtcttccagggtgatatggtttggctgtgtccccacccaaatctcatcttgaattgtagttcccacaatccccatgtgtcgtgggagggacctggtgggaggtaattgaatcacgagggcatttacccttatcctgttatcatgatagtgagtgagttttcatgagatctggtggctttataaggggactttccccctttgctcggcacttctctctcctgctgccatgtgaagaaaggtgtgtttgcttccgcttccaccatgattgtaagtttcctgaggcctccccaaccatgtggaactatgagtcaattaaacctcttttctttataaattacccagtcttgggtatttcttcatagcagcatgagaacgatctaatacacagggtaagagctcttaaccactgcgctcttgcatagaatcttactgtttggctaaaatgaaaaaggttatgttagatatacttcttagatgattatttctagggcattgtttctcaagcggtggtccctggactgggaagattatcatcatgtgggagcttgacagatatttgaactatcatgacccagctccatcccagatgtattgaatcagaaactgggggtaggacctagcaatctgtgtttaacgagccctctagctgattccgatgcatgttaaaggatgagaactattgttttaggaaataacttagttttttaaatgaaaaaatatttttaaaaacatgttttcatttgttttagagcaattttcctactcagataagtttaagtgttgaatatactcttgatctgtactttaagaattc

SEQ ID NO: 199381 - DNA, 1000 bp, Homo Sapiens
ctggctttgttgttttagcttaggaatgttttggctattgtgacatcaatagcatagaatgtggtggcagggaaaagtaaaaatgtagagttttgtatgcaattgatgttgttatcaccttaaaatgaaatctataacaataagatatttaatgtaagccctatggtaaccagaaagaaaaataaacattagtagaaacccaaaggataaagacaaaggaatcaaaatatgccactgcaaaaaaaaaatcaacaaatcacaaagaaaaacaaaaagagaggaaaaaaaatgaaggaactataaaacattcaaaaaacagtgggcaaaatgtcaatagtaaattttagctaatcagtaattatattaaatgtatgtttgagtttaataacactgttctatattatccaaagtataatttaaccaaactttgaattctttgacatcagtttgcatttttaaattctagaatgttcatttgattctgttttacacattccagttctttggtgacattaatcttttcaaatatttgatccatctattcttttctgttttctgtgacatattaatgataattattttctgttaagtcaaaaatattaaaaaactgtggatatccatctattttctgtttttttacattaattataagccatattttcttgccatgtcgactatctagtaattgttggctgtgtgatggacagtgttgagataatgttagttttcaccaaaaatatttttatttctattctttttgaaaactagtaagagattaatcattcgaatccaaacaaatggtaggagcttaggtgtattaagattcacacttctttttttagtccctgtctagtacatgattcttcacattgtcagtttgaacgtatgttagctctccattttctcagccccgaaacattaggatatctcaacttggatattcagaagtttcagcccattttctcaactatatgaacttaaaaatacattaatgtttgaa

SEQ ID NO: 199382 - DNA, 1000 bp, Homo Sapiens
gaaatcctgatttttacactgtggcaaaacctgccagttgaccttcagtatcacattcttccttcttagttagtaataagcctcctgatttttagctaggcatacagcctcccaaatacacgctgtattttccagtctcattcgtaacaaagaatggaaagagaaatgttactttggacttctagggggtgtctttacagggagagggaatacttgtcattgcttctttttttttcttggaatgagatgatgtaatgatgagggcttggtgcctggatctaaagtagccatcttagactctgaggcagaagccaagggctgagggtagtgaggcagcacgaaaggaggaggctgatccctcaggatcttgtgaagctgctgtgccattgtcgggttacccacttccaacttcagttttacacaacagagagaaaccattgttgtactgactttcttcatgctgccaggcacacttaattgatacaaaaatatagcagagagtataaaagcatacttagataaacaaatacatctatatgaattaaaatcactattttgttatttacatataaaggcctgaaacttcaaataacattttaaaaccgtcttatagtatttgctagacatttgttaagtgaattagtaattaccttggagtttagagaagctgaacgttttttaatttggcagtcatctgaaaggaaaaacacattgacacattttagctattacacatgccatttatgttaaagcaacgtcttaattctttaaaggtaaagcaaaattcagaagatattaagactttagagactaccgagcaatataaatatctgtttatcattcatttcattcttcataacaattaccatcttaaccaatggaatacagtcctctgtgtcactgtgatgtccataatgcctagctagcacagggtaggcactacatgtgtgtctgctggagaaaggaatccaaaagtacagttcagaagagtatcaaatat

SEQ ID NO: 199383 - DNA, 1000 bp, Homo Sapiens
tctctttcattaggtagactgcccttaggctgcagcagcctgttttgcctgtgagcagtgagagtcagaagtacttgggaatttacatccccattcggggccatccataaacagtgattgacagctgttggagtatcaatatcccagttcttctgcttctgatgagaataccctgtgtatgatgtatactatctctatagctttcctgaaggattcaaacagttacagtttgtggggctgtctaacaccacatccttgcttgactccttcacttcctggtcccaattcccaagtcccttactggctttccctgaaaatacttcctaagaattcatgttcacaagcaaccttgtttcaaagtctgtttctggtgaacccaaactaaggtattatattcatacagacactaaatttgttattctatgatctattattttcattaatgttttgagttttacagtctcatctgtaaaatgtactcaagttaactgaatccctcaggatagattgagggaggtttcaaaagtgaatataaaattcctcaaattccctcacttcactggaaatagacatactagacactctaagtaaggcagcacttgtttataggtagctggcttctttataaaagggatacaccatttaaatgttgataaagtgtgtgtaacagcagataaaaccgtgatcaggtctcctgtgagtgagcaatcaccggccgattatcactgagctaatcacaatatgtcttaataaaggtccattcaaaagaatgaaaattgtatccatatataagacaaaggggttttaaaataaaaaaatcttagcaaagtgtacaaaagcactgaagaaaaatattgaaactaatatgtttttacacataatcattttaagatggtatagtgagcttgatacaaagggtgttacagagaccgctggaggttcctaagatcctttctggtggtctacaaggtcaaaaatatttttatcataatacgaattc

SEQ ID NO: 199384 - DNA, 1000 bp, Homo Sapiens
gttttcaaaccctgaccatggcagggactgaaaaaaagctaagagatttggaaacacattctgcagttccctccttggagtctggccttgtgtattttctttagataggtacctctaagcctcagatgcaacagtagcctctcctgtcatggtttaagcaggggtttcctgtaaattcatctggtgtatgtttggacttgagaagagcttatttcagaataccagaattaggagatcaagacggtatgccgattctgttcttcccagaacattttcagttctaaatgactctctgacttgagtggcagtattggaatttgctgggaagtatgaaatgtaattcttgtttgatggataggattagagcagataggacaaaaatgcattaaattttcccccaagggttccttttgctagtatccgtttacttggctgctttctttatgtttctgttctctgttttccccatagaatttcctgtaaactttgcctgtcaatccaatctttattgctttcatttttaatactccaattggcgcattttacaaagtcgaccagccacgctaaaatgtaatgtgtggtttgctttgtctgtataagaggctgaacctggatttctaccagaagttaaaccactgcatggcatatgaggaagactgtttattgagtggccttgggtgcctcacgtgtcattatgagccccaaatactgttcactgccttacaaataagatctgtcaaatataagacctagaaggaattttcaaatgcaaaccttgatttttcatagaaaaggactgtcttttttctagtttctaatgcccctgcatgcttagaaatttggtatattatttaagcttccacttagcatttaatatgtgatattggaccatcttctctgggctctcattcctcagcttcctacctctttcagggacccttctcctatggtcctgccaccctggtattgatcttcctgtatggtaatcactactgaattc

SEQ ID NO: 199385 - DNA, 1000 bp, Homo Sapiens
attgacccttgaagcagcccctgctctcccttcaaatggaaaacccacagacacacacacaaacaaaaaccccaagtcttcctttcggttgctacccgcaatgacgtttcccccctcgggtcccgcccctccagggggcttggaattttgggattggccgagaggctgtggcgacaaggcccggattggacagcatggcgctgactgacagcgggggcggccgccgcgccctccctctctccccggtgtgcaaatgtgtgtgtgcggtgttatgccggacaagagggaggtgaccgtggcggcggcggcggcggctctgtttattgtccctctcggtgtgtgtgtgtgaggaaatcggggctgcagcgaggctaaggctgcctttgaagcagcggcggcgaccgggacgactactctggcgactcgagtggctggccttcgcggagtgtgagaaggacaaggcacctctgcgtcctcgccacgtccgagcgcctcgggctccccggccgccctcgcggctcgcacgcccgggcttcagcccggcctgcagcggcgcccgcgggcgggcgagaaggcaacgccgccgctcggccgccgccggtcgctccctgctttctcctcagccgccgcgctaggcccgggcgacgcggacgccgcgcctcgagtttgagggcagccggcggcgcggcctcctcagcgggctcggctggacgtccgctccggatcttcgcgatggggcgcgggggtcggcgcggctaggagtgcggcgagtggagcggtgggtgcggagcggcggggcccagcggcccgcagggaggcgggagcggcggctgcggcctcagggcctgtgagctggaggcactcgccatggccaagtcgggtggctgcggcgcgggagccggcgtgggcggcggcaacggggcactgacctgggtggtaagtggctggtccccgggacgggcggctgcattgttccgggcccgcggcgggggcggaattc

SEQ ID NO: 199386 - DNA, 1000 bp, Homo Sapiens
gggccattatggtaatatctatcaaggacacttacaaacagtaaaagacaaaaggacatacaaagaaacgtacaacttaactaaaacagaaaagaaaaaagaaaagctctgaagtctacaaaattataacaacgatgggatatgaatcatgttttttcaattctaagtggaaggaagaaaaataaatcacatgtgcctggtaggggagaatttgcttaagaaagttttctcattttagatttgcttttggggtagatggtactttttcactatattcttcaatctcaagttttcacaggaatcacattaataagagacagggactggacaataacctggggagcagtaaatttgggggttattcttttgcattaattggtctagttaaccaagatgtgcaaactgccagagtagaagtaaatctacattctcaaaatttttttaaaaatgaagagtgacaaggaagaatatgcctcattctagcaaagtcatatctgaagagagagctgggaaaataggtgagatttgaaatttgtgtctatatgatgtaagacaattttagaatgatagttattatctcataggctaaatcaaagcacagctgtctctctgcatgcacattttgattctgcaacagaggtcctgcaagagccatcataatgccagcaaattaaataaggagagtttgaaaggcccagtcattgtgaacaagactgaggctatttcattcacttcacgtggtgaagtgcattacgaggagctgatatgactgtaaaatgtatggagacactattaagctgaaaggaatctagacatgtggatagttccctactcactaacacttcatgataatagagttaaatattctgaatagttcacttctaagggattaatacacttccccagtactcaaaatcatgtctgcctttcaacttatttgaaaggttcagtaataactcctcaaatactcactgcttgtcatattctaaatactgaattc

SEQ ID NO: 199387 - DNA, 1000 bp, Homo Sapiens
agcaaatttagtgtgtcctcctggtgactgtcatttggtatttctgtcctaggccgattctccgatgggggtaaatacaggctagggcatttctaatgtctaaacctccactgctctctttctctcaaaattgcctgtccaacacagtcataatttcacctccccaactccgtcgttactgtaggtttattaatgtttgttggaccggcatcctaatttgggtgtgggtgactattccttaaggcatctcaagtaaaaaggctccttacttctgatcctggtttatttattttaaaaatacttgtaaatttaatattaatttaatagggtttttaagttagtagcaggttgctgaaggatctaaatgtttaacatatattctaaaataaacattggctgtttagagcccttacagaataaacttatttgaatttttcccctggcacccttttctttatttcttctactctttcttcctttcctcttttcccatctctccctccgtctttttcctccctgccttcttttctttttattatcttgtgtttcatttgtttctttgttgcttttggtaaacgtctttctaaaaagtatgtctggaaagagataagagaaactgattaaagagcctaggacgaggtagagagacttttcatcatatacactttctgacttcgaatttttaatagtggcaatactttttccccaataaaaaagttaaccagaacagagttgtacacccttcttgttttcatttttccacttttctaatgcgagcctatttcctccttactaggatgaaagacaggaatggcttccaaaggaaaatggggagaagagaaaggagacagtagacagaagctcaatgcctgtgtgtccacagtggagacgcaggggaaagagctagtgtaatagaaccagtaaatttttttttggcttttttttttcactcgaaatgtaaacatcttcccacttcattctttccacctcataagaattc

SEQ ID NO: 199388 - DNA, 1000 bp, Homo Sapiens
gtgtcttccacctatgtcacattataggccaagaggttttagaaggcagactgtgtcatttcctctttattttctcttgtatctaggattgtttagggagacaatatggtgtagtagaaagattataggacttgaaatcagactaactccgttttgaatctcagctctgccactgtataatcttatgtaagttacttaacatctgtgagcttcagttttctcatctgtaaaacaggaataggatacttatttttatatggttgtcatgaacacagaatggaattttaaaatataaaatgctaagacagtgcttggtacatggtaagcactcaaaagtgatagctggtatcagtgttactattaagtccacagtgaaagcatgaagtcagcgttatgtgcaatcaacaatggtaaccgtgaacaggatttctagaatggtatcagcaaccttctgcatctgctacagtgaagaggataatcatttttggctgtttctaaaatgagtttctacttataatatccttttgttcacataggctggttccccaagtgtctagcttggagaatgagtcttagaaataaattttgctatattctagaccagtgctatgccaaaaaattttctgtgatgatgaaaatattttatacctgcactttccaatatggtagccatggaatcaccatgtggataccaagcacttatactgtgattaatgcaagtaaggaactaaattctttattttaattagcttaaatttaaatagccaaagcaagctagtgcagctctagacaaaaatttactaatgatttgacaaaatcaatcttaacatctataagttaataaaagtatgaactagtaaatactaaatttccaatgagttcatattttacacacaccgaactttatagaaatgattattttctcccaagtgatagattatatgtttcaattttcagtattatatactaccttacttttggaaatatattctttgaattc

SEQ ID NO: 199389 - DNA, 1000 bp, Homo Sapiens
atctctatactatctaacttcattacttatgactacaaaatacttataaaattgaggttctttagaaattagcataactatgctttgtggctgacctaataatcagaaatataaagatgccctatgccaatttaggtccaacttcaagaagaaagctacctcaacaggaatttctgacattattattgctgtcaaatgatgccatcactactcaaggctaaacagaatggcaatttttaaattggacctgggacataaccttttcccccttcctttgctttgatagtattttcatatattacttagttcgagtcaatagcaaaaatgggggaatttggaagataagctttctccacagataaggtagagtgaaagtactttcatgttcctcagactggctcaggtttatctttttcttttttttttcggagacgaggtcctgctatgtttctcaggcttgtctcaaactcctgagctcaagcaatctgcctgcctcatcctcccaaagtgctgggattacaggcatgagccacaggcacccagctaggctcaggtttagtatcaaatcagtctattctaggtattccttatagtcaacaccacttactttttactttattaatctactattcccttcactttggcgattaaaaaggtcagttttgtttagtaaaatcctaaaatcaattccacgtaattcatgtttaaacaaaataatttacattgtttccttggaatttacctctagtcaatcattacataattcttttattatctgtttcatcttctaaattcagttcctttcttgccatgtgccatattttatctaattagttcatttaaatgttactcatgttttaagccatgagaccatggctttagtctcacaagcctactaagagaatatctctgagggctaatgtgtccactcacctaagccagtcaaacttgactctgacaaaatagcctcttcttccaaaattcaaggaaatcagaattc

SEQ ID NO: 199390 - DNA, 1000 bp, Homo Sapiens
gagacaaggtgaacataactgtaaatggtaaaaaaaagaataaaaaaagaaataaatacttcaaagagagttagcaaataaaccatcccacatttggttgacttttggtgaattatcctagaactagggaagatcaaaagcagagattacagtctggaggctattgcaacgttccaggtaagagatgatggtggcctggagtagaataaaatggtaaatgtggaggaaaatgaaaagattcaagaggcattttgtaattgttgtcatgtctgtccttagagtcacagcagttgcagtaataatgctagaaacattttaagcatagtgatcatccaatccaactgacagtgtctccggttgccaacaaagaggtgaacgggcactagcatcactccatcccagggtaattacatcatttggtcatcagctactgtattcatctcctcaaaggtgttgtgatctcaaagcttattctatatgttttctttatttcatttaactgactttgctgacccttgatccagttcttatttctccactgaattctgaaactcttgaatcttctcctttgcagtcagccaactctcttaatcctctactattgttcagaatgttccctttattttaacagctttattaaggtgtaattgttatgcacaaaaagctgcacataattaatatataaaatttgataggttttaacatggggtgtttttccatttatttggttttctttaatttctttcagcatttttttgtagttttcaatgtacaggtctttcacttcttcatttaagtttatgcctaagtattttattattcttgatgctatcataaatagaattataaaccaaaagtaaaaatttaagccccccaactgactgaatggaccctttctcttggccaagaagattccaaaaaaaatctgaaaaactagttcaggccatgatgggaagggggttcagttatgcctcattatactctccttcctttggaattc

SEQ ID NO: 199391 - DNA, 1000 bp, Homo Sapiens
agctactccgcagcctgaggcaggagaattgcttgaatccaggaggaggaggttgcgctgagccgagatcttgccactacactccagcctgggcaacagagcgagattacgtctaaaaataataataataataaactaaaaaagtataactggatcgtttgtaacacaaaggataaatgcttgaggtaatggataccccgtttaccctgatgtgattttttttttttttttttgagacggaggtttgctcttgttgcccaggctggagtgtgataccgcaatcttggctcattgcaacctccgtctcccgggtccaagcgattctcctgcctcagcctcctgagtaggtgggattacaggcatgcgccaccacgcctggctaattttgtatttttagtagcaatgggatttctccatgttggtcaggttggtcttgaactcaacctcaggcaatcctcccgcctcggcctcctggagtgctgggattacaggtgtgagccactgtgcccagccttaccctgatgggattagtacacattgcatgcctgtatcaaaatctctcatataacccataaatatatatacctactgtgtacccacaaaaattaaaaataaaacaaaaatacaaaaaggaaaaaaaagacagctaagtaagtggtggtaggaagaaagactggacaagggtttgatggactggctatgaaagatgaggaagagagaagtcccagttgggtaagaggaagtttttaaggaccaccaagaaaatggtgacactcttattagataacctagaaattagacaaggatgagatgttatctggatattcaaatgaaaataccctctattcagctatagtcgggctactggggttttaagggagaatttcagatttgtggaactcagagagtcctttgcatttcaaagaagtgataattgagaagctgtgtgacaactaaggttgtactagaagaagcttagacgtgagagcaggaagaattc

SEQ ID NO: 199392 - DNA, 1000 bp, Homo Sapiens
gatcaatactggacattataaaaatttatgtatagagtctgaattttgttatttttccctgaagaattatttttgttaaatatgctggacttgaaactccaaattttgtctctcctgcaatgtatgtgtgttgttttcttttttcttatttgtcacacttccttctgggattttctctatgcaaagagagttaatggtcagccaaagaattaggtggattttatgtgcagatttcagggttcattcctctgtggatctctatcttctaggatttctcacctaattttctaccttttttaccagtctcaatttctattccttaacacattaagccaataagactgtggctttctgcacattgggatttgttgcattggagaatgccacaaactaaaatatatccttcacagttaatttttataccattgattcctcattagtttcttcctgtatttggtaatactcctgtttctctaaaaacttagataattctaaaaatattttcccatatttttaattgttatctaatgaaagactaatgcagccaagtttttctactgttactagaagccagaacaattgatgtatttttttaaattacattttctcagtgttttttgctggtatagaaatgcaattaatgtttgtatgttgatttatatccaacatccttgcttaactctcttctttattcaaacacattagatcattgcaggttttttacatatacaataatataattgtgaaaaatcacacttttgtttcctcttttcagattcttctactttttattatgttttcttgcctttcggtactggctaggactttcagtgcaatgatcaatacaagcggtaagaataaacactcttgacgtgtcaatttttttgccattaattaacagttaatttgaggtttcttgtggctttcacttaactgttaaataaattattctttttctaattttctagttttttaaaaatcatgtaaatgtgtagaattc

SEQ ID NO: 199393 - DNA, 1000 bp, Homo Sapiens
tttccgtgcacccataacctgagcagtgtacattgtacccaacatgtagcagccatcttgagaatagcctgggaggagaggcagaggaggaagagggaagctggcagactgggttacatgtgagaaatgatggtggcgtggagcagggtggtgtcagcagcagtcatagtgaagagtgggcagattaataaagcagagacaatacttcattccactttatgaagggtgaaattgaagcttaatgatattaaacaaattgcccatatcacatggccagaaaatgacagagtgaggtctatcactgaagcctgccctctacaacagtgccctccagcagcttctcaacacacattcctaacatggggaccatgttgtctattcaggaaaatgtaacttcattagcatttttagcactgttacttaatcaagcaaattatatctagcaagaaaaaagaatgggttaatgcagtgttttccaaagtgtagtctatacaacactattttctgaagagggtttggtgaataaaggggttttaaagtcccgtaggactgttacctttagcccactttaaaaagccatgggatcccttttttgagtgatacctattaaaccatggaaatgttttgaggaacatactttggaaactgttttattaatggaagagagaattattattattattttttcagacagagtttcactcttgtcgcccaggctggagtgcaatggtgcgatctcagctcactgcaacctctgcctcccaggttcaagcgattctcctgcctcagcctcccatgtagctgggattacaggcatgcaccaccacacctggctaattttttttttttttttttttgtatttcattgagacaggagtttcaccatgttggtcaggcttgtctcgaactcctgacctcaggtgatccacccacctcagcttcccaaagtgctgggattacaggcgtgcgccaccacgcccggccacagaagagagaattc

SEQ ID NO: 199394 - DNA, 1000 bp, Homo Sapiens
tttaaattatcccatgaagaacctatccaattcaataaggtattgttccctataggtaatactctagtagggtttaccccacacagaaagaggaatgggactcatccaatgtaaaatctgaaaggtgattgtggtatcactttaataccactaaatgagatattgggattgttctttccttttgcctctgcttttggtttccttacacagagaaaaataatccagtcatgtcaaatgttatatgtaacacgaaattatactctgggtgaaacttggcatttggggtcagtggttttcatatgtaggttgctgaagttccctgaaggtagtcagttatgacgtttttctacatagtctatcattcccagaaaactaattgataaataaaaatgcttagtaactattattgtccttatttgttgatacaacttgatgaaaaagaaagaaaattattttccaaatagttctgacaatatcttgcaactggagctagaaaaagagggttccaaatgccaaaataatgcccaaggattctaacttagctgaagagcatagcccaactgaggaatatactcaatagttattgtaattggtttattttctccaaaaatgctgcacatctacactaactattacattccatgcaagaatattaatattcagcttaaagtgcctctaaactttacgtgattgaatatcatttcagtaataacagtcaattaaaaaaatttgatgagccatgttgacatgtcatgatcccaaattaacttattttgtgaaagttcttttagtgtctcagattctatgaaattagaagaaaccagagtgttgataaaactaaaaaaaaaaaaaattaaatacttcaagtttgtgcctcgattaagtattttcatttatttttgaggggaaaacatatacaagttaagccaaaatagtactacttagaaacagccactaaaatccagtgcttcattaatatttgaaaagaaaacctgaattc

SEQ ID NO: 199395 - DNA, 1000 bp, Homo Sapiens
tctaaagggagagactccagtgcaataacagttgaggacttcagccaccccactcagcgttagacagatatctagaaagaaaattggatttaaactgcacattagaccaaatggacctaagagatatttacagaacatttcatccaacagctacagaatacacattcttctcatcagcaaacagaatattctccaagctagaccacatgttaagacacaaaacaagtctcaacacatttttaaaagttgaaataatatcaggaatcttctcagaccacaatggaataaaactagaaatcaacaacaaaaggaagtttggaaactacaaatacgtggaaattaggcagtatgattatgaatgacttgggtaaaggaagaaattaaggaaatttttacaattcttgaaacaaatgaaaattgaaacccaacataccaaaacccatgggatacaataaaagcagtactaagaggaaagtttatagcaatacacacctataccaaaaaagtagaaagactttaaaagaatctaacaatgtacctcaaggaactagaaaagcaagaacaaaccaaaccccaaattaatagagggaaataataaatagcagagcctaactaaatagagacttaaaaaaacaagaaaaagggtcaacaaaacaaaaggttggtttttggaaaagataaacaaaatcaataaggtacttgctagactaaccacgaaaaaaaagaaagatggtcttaaataaaatcagaaatgaaaaaggaaacattgcaactgataatacagaaatacaaaagatcatcagaaactattgtgtacaactatacactaactagaaaacctagaggaaatggatagattacaggacacatgcaacctaccaagactgaatcagaaagaactaggaaacctgatcaaatcaatagtaacaagatcaaagcaataataaaaagtcttccaacaaagaaaagttcaggaccagatggcttcactgctgaattc

SEQ ID NO: 199396 - DNA, 1000 bp, Homo Sapiens
tctctgctccacagcttctttcttctccccgcctccttgtccctcccagaacctacccaaagtcatcagtgccctccccacaccactgaatgtctggcggcctcctgggctttcccggccagtccttccaggcctgaaatctgcggccccaggtgaatccatgacttacagactgagctccaagaccttcactgcccctcaacctcctggagggaaaggccaggaatccaggcctgcctccctcccctcccccagggctccccctccctggtgagggaaaatgtcagattccctgtctcagtggcggcagcgggcgggttggagggggagtgattcagccgccgcctcaagagtgcggagcgagaagagcttttcctgccattacccggcgagggagaggctggcgcgctaatggcttcaattaccactcagacaggaacgctgggcggcgggccccacgctcatcacagccaggacaggctcaccccggccagcttgtgctgggcacccccacctcgtatgcagtcctggcgggggtgtcaaggggaggccacactgggaataacaatcctgctcagatgcgaggtgcaaagggcacggctgtgggggatttgggggggcactcccacgggctgtggtgggagtggccctggagccacagcagttgggcctggtgtgacatgaggcaaaggcagagggcacagaacagactgcaggcctggactcctttttgggggcacactgatcttcacctgagccagttcaccccagacagccctcagccattctccaaggagaccagctcacagggagagctgtgtgcaactcaggaaggactcttacttccccgaccccaactagctccatcccctccccagccctcctcgtaccctgtggtggcctcccaagaatggccctggctcctgccggccccaccccagagctccagtccaagtccaaccatcctttcacccagttcctgcaggcacccagctttctt

SEQ ID NO: 199397 - DNA, 1000 bp, Homo Sapiens
ggtgttccctcagcaaatggtttatttttttcccccatgtgaaaaaaatacccataaacaatctggtagaggctaggagcagtggctcacacctctaatctgagcatgttggaaggccgaggcgggaggatcatttgactccaggagatcgaaaccagcctgggcaacatagtgagccccttctctacaaaaattagccaggcacagtggtgcacatctgtggttccagctacagggaggctgaggcaagagaatcactggagcccaggaggtcaaggctgcagtgaattgtgttcgcaccactgtactcaaggctgggcaacagagcaagacctgcctcagaaaaagaaaaaaaaaaaaaatctgtccggtggaactatctttatatatgagaggctttatttacttgaaataaatttcttagagtgagtttcctgagtcaaaggaaatatagataatgttcatagacagataattttaattttaataaatattagcatattgctctcctaaaagtttttaggcattcaaattcctgtcagaagtacatgagaatactatattttccaaattactttcagcaatatatttagaagttttaaaagtttttgtcattttgatagacacaaatttagcttgttttaacttgtgctatctaatttctatttagtttgagcaacttttcatatttttgttatcaatttggatttgagaactcttaattacccatgtttttctgttcatgtgaaatggaaactttcattgtaagtactgccttccatcctccaagcattttttttttaagcccattatttaaataggcaactcatttactttgtcatatttttgacatacccaccttccttatgttcctgggtttccagccttagaaaaaaaatctcactggcccctgtgttgtacatgtggctatctaagtatgctcttaagatcgtttacaattttctaatagacaaaaagttcacttccaatgatgttctaa

SEQ ID NO: 199398 - DNA, 1000 bp, Homo Sapiens
ctgtcaaagaaaactgttaatgtgatattctaaaagtgagtctactaattctcatttttctgatgaatcctgaaatatttctttgtgaagttggttgcaatgtagctcatggaatatatggacatacaacaaatacagaaatcatctaatgcccaaatgactttgcacattcacacacacaaacacacccacacacacctttattattataattcctctcttaccatctctaagagacacagaaaatttaggaaaattccatgttttcaagatagaaaagcttgctatcttctctcttgggtacataatattgcaatacaagggtagatttcaaaaataatgagttaatgtgttcctgatttaacatgcttgtttttgagtgccagagactagattcccagcccacattttaatatttataagtacctaggatttacccttaagcaaaggcagatttgctgtaaggctaaagcaatcattaaggaaacatcctaaaattacatgactagaaatttaaagaataatgtttacgactttattataaagtttaattctatgttaaaagtcaaatttaggggttttaaaaaacaatactgcatagattcttatggcaatgctcttgctatataacttatattcaaataattctaatagtatgtgacaatccttaaggagagtgtgctgttgttttccccaaagtgtgcagcacgttgttgtagtgaaaggtctttcatttatactaacctgtttgaagttcactttcactttttgcttttactctaagacagatatagaggattctgtgagtattttgtgtaaattctcataataaaacctttggatttaaagtttattgaatatcactttctaattagaaaaaaaaacttcttaataagccaagacccccatttttttttttaagagacaggatctctctctgtcacccagactggagtgccactggagtgcagtgatgtgattatagctcactgcagcctcg

SEQ ID NO: 199399 - DNA, 1000 bp, Homo Sapiens
gcctcagcctcccgaatagctgggattacaggcatgcaccaccacgcccagctaagttttgtatttttagtagagatggggtttcaccatgttggccaagtagttctcgaattcttgacctcaggtgatctgcccgccttggcctcccaaagtgctaggataacaggcatgagccactgtgcccagttctcatcttcttaacctttgcccacccaaacttttataatggtcctgagaagaaggagtacagtaggacctggtaatagttcctgggtctgaatgtatgtcatgaccttatattaatatttttcataatttccaaggttatggaaaagagtatgacaattacgtttaattacctaagtaaaactattactatgttttatacatatccatcgtatgtgtttgtatgcctgtgggtgtttgaggttctattttacctagctgttctgagacttgactttattctcaatatatcatgaccatccttggctgtcaataagtatatttttacaccatcgtttttaaatgttgcataccatgttgcaggatttatcataatttataagttacttaagccagtctgtccctttcttatacatgtaggccttttccagtattttttcatgtgtattttaactgaaagataaagcactttcttgtaagtcactttgttttgttttttttttgagacggagtctcgctctgtcgcccaggccggactgcggactgcagtggcgcaatctcggctcactgcaagctccgcttcccgggttcacgccattctcctgcctcagcctcccgagtagctgggaccacaggcgcccgccaccgcgcccggctaattttctgtatttttagtagagacggggtttcaccttgttagccaggatggtctcgatctcctgacctcatgatccacccgcctcggcctcccaaagtgctgggattacaggcgtgagccaccgcgcccggccttgttttaagatgagtctcacgc

SEQ ID NO: 199400 - DNA, 1000 bp, Homo Sapiens
aagggaacttgagagatgcatttataaatgtcaactccctagggcacagaacagatccataaggggtggataatggatctgagggcaaacagaggagagtcagcacatacacacacacacacacacacacacacacacacacacacacacacacacacagagtgtttttgccaatatggtatatgtatagaatatctctagaagaaacacaagaaaattattaacactggttggcttcagggaaggaagaagatagaaaaacataggcttttcactgtataacattttgtgacttttcaattttgaaccatgtgaatatattacctatttcaaaaaataaatagcatttaaatttaaaaaattaaaataaaccaaaacccaagtgattttgtggcagtcattaaggctgttcacaaatacaccgattcttctctcctgaacacagagtaggattatagttctctaaccctgttgaagttagctgttggccaatgtcttatttgacaaatgaaatatgagcagaactaactaacataggtctcattcaggcagaagccttaaaagccagtgcatttattgccattttcccattttcctgcctcaggaagtgtggaagcatctatctagatggagttcctgttaaccagggtctatgatttataaggagcacacacccacccttccacaaccacttcactacaatgaacatgtagcataagtgagaaataaccattgttgctttaaataactgagcttatgggattgtttgttactatcatatacactagcctatcctcactgatacaggattgaacaggtgactcctgacattatttccaaatccaaaatacaaggtttttaagaatatttctatttagcctcttgtattaaaaacaatccacatatttccatccacagaaacattattgattgtaatgatggtatgaatattaatttatgaatattaataccaagcctaaatttagcaacttatatcaga

SEQ ID NO: 199401 - DNA, 1000 bp, Homo Sapiens
cgtatctttaagtcactttagtggtactaaaatgttggtaatctgctggtttaatgctatagtgaattgtagtgatgatttttgggttgaaaaccatagcctgtagttctcaatgcctaaaatcctgacaaatttaaacagacgctgtagaggatgtacattagtcagttagtgctggatgacaaacaatcacaaaatctagtgacataaaaccataagtatttatttcttgttcattcatttgtgtgtcagttctagttcagcttcttcaagctctggctgagggttgggcttgagtctccttcatgaatattccttttgggacttggtctacaaagtaatagctatccagcagaagttcttttcatagcaataagaaggagtgcaggaggcaaactcaatcacacagacacattctagccttggctctcatcatgtatgctaacatcttattggttaaaggaagtcacatggctaaatccatcagtagggaagtgtgttccttctatggaaaggggaagaatgaacatttccttagcaacaatctaatttactgtaagatgctttatatattgctattattcctaaaaattctttaatttcttaacatttcaaattatataagtttgtatttagttgcaagtgacagaaaacccacaggagcttaaacaatataaacttttatttcatacatataaatgaagtccacaggaaagcaagctgaaatggcatggcatctttataattttcaagaatgcagcggcttctcttcagctctattcctattcccaggccgccttctgatccaagaaggctgctcaagttccagccatcaagttcatattccagacagcaaggtgaagaacaagatgaaggaagtcacatctcttctcttcccagaagttgcacacaattcttttgcttgtcttattggccagaaattattcacataattacactagcaaggaaagttagaaacttagactgtattcttggaatt

SEQ ID NO: 199402 - DNA, 1000 bp, Homo Sapiens
taaggccagcaccatcctgataccaaaacctggcagagacacaacaaaacaagaaaacttcaggccaatatccctgatgaacatcaatgtgaaaatcctcaataaaatactggtaaaccaaatccagcagcttatcaaaaagcttatccaccacaatcaagtcagcttcatccctgagatgcaaggctggttcaacatatgcaaatcaataaatgtaatccatcacataaacagaaccaatgataaaaaccacatgattatctcaatagatgcagaaaaggcctttgataaaattcaacaccacttcatgctaaaaactctcaatatactaggtattcatataacatatctaaaaataataagagctatttatgacaaacccacagccatcataccgaatgggcaaaagctggaagtattccctttgaaaaccagcacaagataaggatgccctctctcaccactcctattcaacatagtattggaaattctggccagggcaattcagcaagagaaagaaataaagcgtattcaaataggaagagaggaagtcaaattgtctctgtttgcaggacgacatgattctatatttcgaaaaccccatcatctcagcccaaaaacttaagctcataagcaacttcagcaatggctcaggatacaaaatcaatgtgcagaaatcacaaccactcctatacaccaacaacagagaagcaaagagccaaatcatgaatgaactcccattctcaattgctataaaaagaataaaatacctaagaatacagctaacaagggatgtgaaggacctcttcgaggagaactacaaaccactgctcaaggaaataagggaggacacaaacaaatggaaaaacattccatcctcatggataggaagaattaatatcatgaaaatggccatactgccaaagtaatttatagattcagtgctattcccagcaaactaacactgacattcttcatagaattagaaaaaaaactattt

SEQ ID NO: 199403 - DNA, 1000 bp, Homo Sapiens
gggaggcagaggtgggtggatcacctgagctcaggagttcgagaccagcctggccaacatggtaaaaccccgtctctactaaaaatacaaaaattagcagggcgtggtggcgcgtgcctgtaatcccagctactcaggaggctgaggcaggagaatcgcttgaacccaggaggtggaggttgcagtgagccgagatcacaccactgcactccagcctgggtgacaagagcaaaactccgtctcaaaggaaaaaaaaaaaaaaaaaagtggagcctgaagatgtgactgaattggaattgttgccaatctcatggtaaagcctgaacagacagttgcttcttgtggatgagcaaaggaagtagcttcttgagatggaatctactactcctggtgaagatgctgtgaacactgttgaaatgacaacaaaggatttagaatgttacataaacttagttgacaaagctgcagcagggtttaagaggagggactccaattttgaatgaagttctactgtgagtaaaacactatcagacagcatgctacacagatattttgtgaaagaaagagccaattgatgtggcaaacttcactgttgtcttattttaagaaattgtcacagccaccccaaccttcagaaaccaccgacctgattagtcagcagccatcatcattgaggcaagaccctccaccagcaaaaagatagttttttgtttttttttttagatggagtctcactctgtcgcccaggctggagcacgtctagctctgtcacccaggctggagtgcgatagtgcaatcttggctcactgcaacctcagcctcctgggttcaagcaattctcctgcctcagcctccctagtagctgggattacaggcatctgccaccacacccagctactttttttgtatttttagtagaaacagggtttcactatgttggccaggcttgtcttgaactcctgacctcaggtgatccacccacctcggcctcccaaagtac

SEQ ID NO: 199404 - DNA, 1000 bp, Homo Sapiens
accagtcagagctttctatatggaattttgtctggtctttataacatacctgtgaagttttagaggtgataagatagaggcaaataactcatccaagttcacaggcattgttgagtttaggctgcacggtgttctgtaactttctcctttcagacttctagatgttcatatttatatatatattttcttttaaatgaaagaatgacagtgtgaaatgcccaccctaacctggttccctctcctgccaacctgcccctggagaactgattctattggctctggctgtgaagttgtaatgtagacaggatctagttaaaaagcatcaaaatgaagtttttctgtctgctttgcagccagatgctgacactccgcatctgatctttctggagaaggtgcattctctagctattctggctcagtgcgtttgcaccaggagaggtatgaagtgctctgtcttccttgggacatagagattaaagaatttcaggtcatgaaatgcattactaccaagtttattacgtattgagagttgtcttgttgaatttcttaattttttaaatttcttaactcttagaaagtgaagtgctgattttatacctctgaatcatgaagaaaatttattcttttttttttttttttttttttttttttgagacggggtctcaccctgtcgctcaggctggagtgcagtggcgcgatctcggctcactgcaacctctgccttccgggttcaagcgattctcctgcctcagtctcctgagtagctgggattacagccacctgccaccacgcccggctaatttttgcatttttagtagagatggggtttcgccatattggccaggctggtctcgaactcctgaccttgtgatctgcctgccttggcctccccaagtgctgaccacacccggcaagggtagctattctcgaactttttgtagataaagaaatagatcgttggattattatccatctgtatgaggctagctttccagaattc

SEQ ID NO: 199405 - DNA, 1000 bp, Homo Sapiens
ggtctctactcctgccacctgccttctctcccctagcctgcaccgatggcctcatggggagttccctgtgatcagttgacagaggaagggaagactaggccctggttcagagatggttctacatgatatgcaggcaccacccggaagtggacagctgcaggactacagccctttctaggacatccctgaaggacagcggtggagggaacttcccagtgggcagaacttcgagcagtgcacctggttatgcactttgcatggaaggagaaatggccagatgtctgattatatactgattcatgggctgcagccaatggtttggctggatggtcagggacttggaagaagcatgattggaaaatgtgtgacaaagaaatctagggaagaagtatgtggatggacctctctgagaggtcaaaaactgtgaagatatttgtatcccatgtgagtgctcaccaatgggtgacctcagcagagggggattttaacaatcaagtggataggatgacctgttctgtggacaccactcagcctctttccccagccacttctgtcatcacccaatgggaccatgaacaaagtggccatggtggcagggatggaggttacgcatgggctcagcaacatggactttcactcaccaaggctgacctggctatggccactgctgagtgcccaatttgccagcagcagagaccaacactgagcccttgatatggcaccattcctcagggtgatcagccagctacttggtggcaggttcattacactggacttattccatcatggaaagggcagacgcttgtcctcactggaatagacacatactctggacatgggtttgcctatcctgcatgcaatctttctgccaagactaccatctgtggactcgcagaatgccttatccaccgtcatggtattccagacagcattgcctctgaccaaagcactctcttcatggctaaagaagtgcggcagtgtgctcatgctcatggaattc

SEQ ID NO: 199406 - DNA, 1000 bp, Homo Sapiens
tatagcgatacctatgtgtctgttatgtgatttttctctgtcaactcaattgcttgagtgtaggctcagaaaaggtggagagggttcattctggttggtgttttgccacctgggtgggaagaacgacagtgggaaagggagctgaaggtgtctacaagagaatccaagtaaatgtcaagtaatcaaaccagagtggaacagagtgaagaatgaaagttgcttccagatggagaggatggtagtgggcagtgggttggagagctagataaaatgaaagttgctataggagtctttgagcaagtgaggtggaagacggggcatttttgtagataggatgtttggatgagtggctcagagggtgtgcagttcctgcagatgactgggtggggcatgcaggagtgggagtgggttccagaggtgacatgaagaaaaaagtcaagggactgaaataatggggtgctgtatgaggagttcctgtggatgtagaggtcatttggaatgaaggcaggaggtggagagaagactgaatcagataccagcatctctacaagggagatgagaggtgaggatagtcccatggcatagacctcaagggaggaagtttttataagagttggagagtagtagcaatggggcaatgataatgccagcctgactttctgtcccaagagacatggggagtgtgagaggaactgactgcacttacagggttgtaggtgggggtggtttaggtggggcagtgtcattagtgggtctccaggcttcagaaaggagatagaagttcagatttgaggttgaggatatgtggacttttgttgctcgagtcaatggactttccaagaccacaatggaagagttttggtgggagagaggagaggctgagggacatgggtcagcttaggagaggtgggggtctggaaggtaatggataaaaggaaggcttggcctttgagcagggcccagagttaatagttgatggagaagtgataggcttagacct

SEQ ID NO: 199407 - DNA, 1000 bp, Homo Sapiens
ttcctaagagttattgcaataatcagctgagaaattttattgcattagctgaaggtggtaccagatgtagtcagattctattctacttctgaattttagaattcagaaaattttagaaatttctcttcttaatttgaagatagaactgacagaatttactgatgaattggatgtgagatatattcatcatctagtgctgcataactaagttttattcacttaagaaacacatatttgttatctcactatttctgtaggtcaggaattcaggtaccccttagctgggttctctcctccagggtttttctctcaagaggctgtaatcaaggtgtcaacctgggatctaccctcatctcaagattcaactggagaaagatttgcttccaagctcactcaagtgattgctggcagcatttaattccttgccaggaggcccacttcatcaaagcaaacatacaaggatagctaaagaatataccagcaagaccaaagtcagagccttttacaacctaatcacagaagatcactatatcagctttgtcataatctattggctaggaagaaatcgctaggtccagcctacacttaggcaagagttttacacaaagacatgaacaccagtaggtgggatcattgggagctacatcagaagatgcctcccacctaaggtatgccaggaggttgggaaggggaggggggtggcggttggtggagaagagtcaagaatgactctcatgtaaataacatacataggattattttacttgataaagcctcttttggtgtttaaaattttattttctcccttgaattgcagaattttaattgctataaattttaagttcaaaatctttgtcttagatcatttgagctgctataacaaaaataccataaaccaagtggcttataaatgataggaatttattcctatcagttctgaaggctacagagtccaagatcaaggtaccagcagattcagtgtctggtgaagacttgcttc

SEQ ID NO: 199408 - DNA, 1000 bp, Homo Sapiens
tatattatgttctgaaagaagtcaagaaaaataccaagaaattgatatcatacatgaagctgttttgaaccctacagaaaacaatttaatattttcatttactttcctatttaagttgaaaaatatttgtttattaatagtacaggcatcagagcatggaagttaagatccagcatgctgagctggctgccttttagcttcacttgccactctccatgtagtcagaaaaagttacttagcatctctgtgacccagattcttcacctgtaaaatgagaataattacagttcccattttataggattgctataattataaaaggacttaaaggagttagcatatgtaaaatacttagacgaacgcttagcatatagcaatgcggtataaattttagctattataattatcttgtgctagacagtaatttaaaatagaatgcggtttattctccaataataatataaaaataaaaactatatattcattaaaattttcttcaacacaaattactaaaagataataaagcaataattatggaatatttcaatgaatcatgaagagtcaacagttttatacccagcccagctaaaattcatgcacaagtgccccaaaaacacattatctgatattcaagtatataaagattttttgtctgtctcaaaaagtgaaataaaataaaaataaatataagaatagaaaaagtatagtataaacaatagttaaaaatccttatactatatataagaatcaattcaaaatggattaaagacttaagtataaaacttaaaactattaaaacaagggaagataacctaggagatatcattctgaacataggacctggcaaaaatttcatgacaaagatgccaagagcaattccaacaaaaacaaaaattgacaaatgagacctaactaaactaaagagcttcggcacagtaaaagaaactatcaccagagtaaacagacaacctacagaatgggagaaaatatctgcaaagtg

SEQ ID NO: 199409 - DNA, 1000 bp, Homo Sapiens
agggtctagtaggggatccaggaggaggaagcctcattaacttctattctgcagcaattgatggccacccaacttgacagtgggggcttatcacctcatgtactaagaccggagatagctgatgccaaggttggctaaattagtagcttgagatgttaggtttttcatttgagctttctatgctgctatagccttctgctcttggtcccaggggctgccacaatttgcatgtcaagtcctcatgtgacaatatccagagacagcaaggaagaggtacagtgtattcctgcatgtttcttaaaaaattgtttttgacagagaataattgtacacatttatggggtccatgtgagattctggtacatgcatgcaatgtgtaatgatcaaatcagagtctttaggatattaatcacctcaaacattgatcatttctttgtgttggagttatttcaaatcttattgctatttagaaatatacaataaattcatttatcaggatacaaaatctatgtgtacaaatcagtagcagtgctatacaccaacagcaaccaggctgagaatcaaacccttttatgttagctgtaaaaataaaatacttaggaatatacctaaccaaggaggtgaaagacccctacaaggaaaactacaaaacactgttgaaagaaatcatagatgacacaaacaaatggaaacacatttcatgctcatggatgggtagactcaatattgtgaaaatgaccatactgccaaaagcagtctacaaattcaatgcaattcctatcaatataccatcattctttatagaactataaaaaacaatgccaaaattgatttggaactaaaaaagaatctacaaagccaaagcaaaactaagcaaaaagaaacaatctagaggcatcacattacccaacttcaaactatattacaaggttatagttaccaaaacagcaatggtgctggtataaaaataggcacatgaccaatgggacagagtagagag

SEQ ID NO: 199410 - DNA, 1000 bp, Homo Sapiens
aaaatgtggtgcatatacacaatggaatactactcagccattaaaaaagagtaaaatcgtgtcatttgtagcaacatggatggaactggaagtcattatggtaagcgaaataagccaaacacagaaaaaaaaaaaaacccagaaaaacaaatattgcatgttctcactcatacgtgagagctaaaaaaaaaagttgatctcatggaggaagagagtactcatagaatgatagatatcagaagatggcagggggtgggaagggtgtaggtggaggaagagaggttggttaatgagtacaaacatacagttagatagaagcgataaagtctactgttcatagcagagtagggtgattatagttaacaacaatgtaggctatatatatatattttgtttgtttgtttgtttttgtttttgttttttgagacagagaaaagtatatcaaaaacaaagatggtctataaaatctaccatttttattccctaaattatcaatatcatttttacacatgccttattacatatgtgctgtgaatacatccaccataactcatgttttgatgtgtaaatacatgagtgtaaacaggcaattcccctaaataaaacctaatatacagaaatctaaattaacaaataaaaaagattatttatggccaggcattgtggcttatgcctgtgacccagcattttgggaggccgaggtgggagggttgcacaagcccaggagttggagatcagtctgggcaacacagggagatcccatctctacaaaaaatgacgaaattagttgggcctgatggcatgcaagccgatagtctcaggtacttgagaggctaagaggatcacttgagtctgagagatcaaggctgaaagtgatacctaattgatggtgccactgcacttcagtctgggcaacagaacaagactctgtctcaaaaaaaagaaaaagaaaggaaaagattatttaaatttgagttgatatttttctttgcaaagaatt

SEQ ID NO: 199411 - DNA, 1000 bp, Homo Sapiens
ctatctatctatctatctatctatctatctatctatcatctgtcacctatttatatccactttaatttgatatttttgaccaggaaaggaaaagaaagttcatatggccatatcttttaaacaaaataaggtacataacaggtgttcattgtattttttttaattgaggtgaaatttcacataacataaaattaagcattttaaagtatttttaagtgggccaggcacagtggctcatgtctgtaatcctagcactttgggagtccgaggcaggaggattgcttgagtccaggagttcaagactagcctggccaacatagtgagaccctgtctctacacaaaataaaaagaattagccaggcatggtgacacatgcttgtagtaccagcttgtagtatccctgagattagggtatcacttgagcccaggagttcgaggctgaagtgagctatgatcaggccactgcaccccagcctgggtgacagagtgagaccttgtctctaaaataaattaaaaataaaacaaagtgttctattcaggggtgttttgtatgttcacacctctatctagtttctttctttttattttattttatttatttattttttgaggtggagtctcgctctgtcacccaggctggagtgcagtggtgtgatctcagctcactgcaacctccgcctcccgggttcatgccattctcctgcctcagcctccgaagtagctgggactacaggtgcctgccaccacgctcagctaattttttggaattttagtagagacggggtttcactgtgttaaccaggatggtctcaatctcctgacctcatgatctgtctgtctcagcctcccaaagtgctgggattacaggcgtgagccacatgcccagccacctctatctagtttcaaagcatttaaaacatagttaaatgaaatctgcatgaaagtaaagttaaagattccttgagtggttcataagaaatttctgtcatttattgaattc

SEQ ID NO: 199412 - DNA, 1000 bp, Homo Sapiens
taatgggaagcccctgcaggctccctcaaagaagcctcattatagatctagcttttggatactgtcacacagaggttatcaaaatccagttaatgaggactgcatccttacccagtcaagtaagaaaataatcgcccttttctctgtacttggggtcgggggagagtagaggggaatagtgtaaagagctttgaattgagctggagattgaagctttaaagttaacaacatgattctttaatatattgtgattgttctaataactttaaataactgaaaaatcagagaatctatgtaggatataattaaaggagtcatccctctttttttctatttgattttaaaacttaagtaaagccagggctgggcgtggtggctcatgcctgtaatcccagcactttgggaggccgaggcgggcagatcacctgagatcagaagttcgagaccagcctggccaacatggtgaaaccccgtctctactaaaaaagtacaaaaattagccttgtgtggtgataggtgcctgtaatctcagctactcaggaggctgaggcaggagaatcgcttgaaccagggagttggaggttgcagtgagccgagattgcgcccctgcactccaggtgacaagagcaagactccatctaaaaaaaaaaaacaaacaaaaaaaaccttaagccaatgctaaagtggtagttcagactcagttgctctctaatcctacttttctgtttaaaatctggactggctgacaatatccagattgaatgattttgctgcctatgggtaacaatatcaggattgaatgacatagctgcctgtctttgtaatgggtagcaaatgcaaaaagaagcaggacttttagtaaaccagatagatatttaataacatgtatgcttacattatatagttcatttcaaaatgtgctttcagtctttatcaacttctttggtgaactttataaagttctgcaattgaaaacattctgggcagaattttaaagata

SEQ ID NO: 199413 - DNA, 1000 bp, Homo Sapiens
catcaaagtgtatactaaaatgtgtgcattttaattgtttgtaaatggtacttcaataaagttcagtcaaaatggaataccaacagaaaaagcaaaatggaataccaacggaaacagatacttactttatagtcaacatattttttcttttgtatatagcaggtaaatataaaaaaaatccatccttttaatttaatgaagcttgggtagggctactgtttgggggtactgaaaaaaggtatgttagaataaactacaactttattctcttattgcatgaatatattatagcattaaaacagtgagatttatacagcagtagagattagtaaaagagaagtcattttttccagttaatttctaaaatcttttgtttagtaattttttaaaacctgtagaggtaatataaaaagcaaatcaaataagactaaatgttcaagagtgcacttacaattgaattagttcttccctggggactgagataagtgtcactagtttgtgagttagtcattggccatactaattctgaagttattttagtagctatgcttgatattatcttatctgtttagctactctttttctcccaaaaatattaaatgctaatgaatgatccacaaattgctatattggtatattattaaaattgtgaaggttctggtaaggtaaggacatctataattttaaatgaaatataattttaaaatatatatgttatctaaattcactgcattggtactagcacgcattttgtaatactgcaaggatatcttgtcttaaccagttatcagctattcaacaaatactttttgtgtatgtgcacttaaaagtattcatcactattttaggtgtcctggaggtgaataaagtatgaaacttttcatatgccttcgaatcagcttcaaattagctgcagatataactaagaaagaacaagagccctgagctatttcagaagaaaggggattatcattgtgggttcctgtagatgaattccgcg

SEQ ID NO: 199414 - DNA, 1000 bp, Homo Sapiens
tgttaacacatcagcatcacccaaaatccatggtttacattagggctcactcttgatgttgtatattctatggctcttgacagatgtataatgacatttattcactgttatagtaacataaagaacagtttcactgccccgtgaatcctttatgctctgtctaatcatcctctctccaccctaacacctggcaaccactgtttctatagtattgcttttcccagaatgtcatatagttggaatcaatgcagccttttcaagttggcttctttcacttagtaatatacatgtaagtttctttcatatcttttcatggctttgtagctcatttctttttagtgcttaataacattccattatctggatgtaccatagtttattcatttatgtactgaaggacatctttgttgcttccagattttggcaataatgaataagcttctgtaagcatctttgtgcatgtttaggggagacatatgttttcaattcattgagtaaatatcatagttgaattttttaactgcaagataccaaattactgaaggctcagcctacttagattgtggaccacaggcccacagcctctcttagccaagtcctattccttctacctcgagtttgagttgatctgcgtcttcatcctaacattttggttaatgtttcaggcttagtcagcatgggttctgccatgtaaggattgtttaacaccatataactaggttcactagctttccaggctgaaaattcaaactcttagtatctttctgcctacttcctccatgaaaccaaagccacaatttagattatgatatactctgtatacagtcctgataaaaatgactagttcctacaatagtctctgactagtttaatgagaaaggagtcattttaaatttcttgaagtgccagaaaatgaacttagatgctatatagtgagaagtaatacagcaaagagaaatgtccaactatccaacagagttgcattagcaaaaatcatgct

SEQ ID NO: 199415 - DNA, 1000 bp, Homo Sapiens
aagccaggtatctgtagctctcccttgattaggagaccggcctaatcatggctgtcattttgtacctcactttgaaatgtttcagcctgaaatatgaaagagttaaaatgaacaaatacttgggaaagggtgacaaacttggaatgaatttagagaattgtttaaaaaaattgtcctttatcttggcacactgtttgcactcaatgtattttaaaacataataataattcttgataataattataattttctcattattcagaggagggcagccgctaccctggagatagcaccgctgctgccaagagcttttggaaaaatacaatgctttctgattgttcaaggatattcccacttttaaggcaggctgaggcccaaatgtcttccctttcacaactgggccactttggaacacagtggccagaatccctcttttctggggtctgcaactggtgaataatgtcttagcctcctctcacctgccacgtaagagggaggcataaaaccttaggatacttgttactcttttgctggactttttactctgccaagaggtttgacagctacctaaaaatagtatagctgaatgccagtggctaattatacgaagggaaaccctcaactctgaaaatcaattctgagcctgatgttggaatcacagttgcatggatttctgatttcatatttattttttccacatctgatcttagatcctttatagcagcaggtgggttaaaccgtgattgttcaggtagtttctgatgagttgtggatgtgggagatgaaagcaaagatgagtgagatgctagattactctctatccctcagctaattgtttcaacttcctccctgcttagattttttttttttttttcaaaccagagttgcttatataacacagaactgagctgggctttcttctttcttttcccctctgttagatatgctaacagataggaaacgggtctcaggtaagaagaagcaaagagcctagagaatt

SEQ ID NO: 199416 - DNA, 1000 bp, Homo Sapiens
ccccttcaatctcttgagcaatgagaaaaggcactgggctctttccttggtgacacatagtctgtgccctcaaagaacactgacaccccggcaacatccattcgaagagcttatctgtacctcccctcctttatccccaagatcactgggccagagctcacggagtcattcacaacatgatgtttaacaccgagaggctctggaagtgctccttcaagactcagaagaagacccattgctgagacaatcgtgttctctctctctctctgtataaccacccagagacaaggacttccggagaccctggcttccctggctgctgcctctcattcctgcacctgtgggatgagagttcgaagctgtgcgaccttgaccaagttacttaccctctctaagcatatgtttccctaaatgtgaaatagggatgatggtgatgtgtttatctcacagatttgatagaaggattaaatgagagatgcatcaaaagcagtgggcacagggtcaatgctcagtgagctttctcttatcaatagacaggtctccatgaggacagaaactggcttcatctcgactgtagcctcagggctggccacagtgtctgcacccagcaggacttcagtaaatatctgtttatacactaaccacagacttaggcataaaagccttttggaagaaagttgaccatttcatgcaccttcagactatgaagatcagtgatgacaactttagcttgagagggtctcagtgcccattcatcaccactgtgaaaaggcagaaaccagagctgtgtgtttaactcccagccccaaaacctgtcggctttgctttatcactatgagcttccaatggcatccctttagaatggggcctctctctccttccccaaggcaccagccttcaccccagacctatccttgtcacctggttcctcctctctgtactctgagcccatgctgtgctcgtcagatagcaacatgggagaatacaacagcccagaatg

SEQ ID NO: 199417 - DNA, 1000 bp, Homo Sapiens
ggaagaaaagatgttaagttataaatacgtttcagttttggtaccagttgaaccaatttacgttttgaagaggagagtcttgcctacaaagtgaccccccgggttttccttctgcttatggaatccaggcaatgggcaaagagaaaaagaaaactaaggaatcagccaggtgcagtggctcgtgcttgtaatcttggcactttgggaagctgaggcaggtggacttcttgagttcaggagttcaagaccagcctgggcaacatagtgagaccccgtttctacaaaaaatacaaaaaagttgctgagcgtggtggcatgcacctgtagtcccagctacttgggaggctgaggtgggagaactacttcatcccaggaggctgaggctgcagtgagccatgatcgtgccactatactccagcctgggtggcagagtgaggccctgtctcaaaaaaaaaaacccaaaaagttaagaaaaagaaaactagggaatctagacagaataagtttatatatataataaagaactgagctagaactgggttgactgagtaattatttgaattgcttttgactgaatttttcctattgcagtctacctttgtttttgtgtgtgtgtgtgtggttttttttgttttgttttgttttgtttggtttggtttggtttggtttagtttcgtctttgtgtttttttgagactgggccttgctctgttgcctaggctgctggagtgcggtggcgtgatctcagctcactgcaacctctgccttctgggttccagcaattcttctgcctcagtctccccagtagctgagactgctgggcatgcaccaccaagccaaactaatttttgtgtttttagtagagatggggtttcaccatgttggccaggcctggtcttgaactcctgggctcaagtgatccgcctgcctcggcctcccaaagtgctgggattacaggtgtgagtccctgcgcccagctagagtctacctttctttgaatt

SEQ ID NO: 199418 - DNA, 1000 bp, Homo Sapiens
tccctcctcctgagggtggactgtgccaaagtctgcatcaagaatagccaatagatgatcatctgtaggtatgaggcttggacatgggtgctgaagcatccacacatgcttgaggcctgtggtgcagagctgagctgagagtgagaggacagatttgaaagatctagttggcaaggcgtagtggctcactcctataatcccaacactttgggaggccaaagtgagaggatcacttgaggccaggagtttgagaccagcctaggcaacatagtgagacctccatctacacacacacacacacacacacacacacacacacacacatacacacacacaaattacctgaaggattgctcgagtccaagcatttgaggctgcagtgagtcatgatagagcaactgcactccagcctgggtgacagagcaagaccctgttaagaaagaaagagagaaagaaagagtgaagaaagatctagtttgtgcttagtaggaattttaaaagagaatggaggagagtcagtgttcacaaggataaataagaaatacattccaagaaacagccagatcttaaaagcagctagagagaacagccaaatcatctacaaaggaaagacaattagactgacagcccatttctttgtttggcagaataatgtcctccccacaccctgcaaagatgtttacaccttaatcccctaaatttatgaatatgttaccttacatggcaaaagggactctgcagaagtagttaaggttacccttcagatgggaagagtagccaggattatccaggtgggcccaatctaatcactaaagtatttaaaagtagagaatgctgactagctgggtcaaagagatggcaggatgggaagaatttgatcctgagatgtaggaggctatgtgcaaggatcagaaaggagcttctaagagtaaagggtagctcccagttgacaaccagtgaggaaacatacctcagtcctttaactgcatggaactgaatt

SEQ ID NO: 199419 - DNA, 1000 bp, Homo Sapiens
aaagatttgtacgagtgtcaaacttagatgtgggttgatatcccagataatttagcaataatttataatggattaaatttattattttattgtattcatgtatttttatttttatttttttatttttttgagacagaggttcactcgttgcccaggctggagtgcagtggcacaatcccggctcactgcaacctctgccttccggtttcaagcgattctcctgcctcagcctccccgactagctgggattacaggcacccgccaccatgcctggctaatttttgtatttttagtagagacggggtttcaccatgttggccaggctggtctcaaactcctgacctcgtgatccacccaccttggccttccaaagtgccgtgattacaagcatgagccaccacgccaggccctattttttttgaaacaagatctcgctccgtcacccaggctggagtacaatggtacaatcttggctcactgcaacctctgcctcccaggctcaagtgattctcctgtgtcaacctcccaagtagctgggactgcagacgcacaccaccacacgggctaatttttgtatttttaatagagatggagttttgccatgttggccaggctggtcttgaactcctgacctcaagtaatccacccccaacttggcctcccaaagcactgagattgcaggcgtgagccaccacaccccaggctaataatggatgaaatttagatagattgggattccatttgtacctaattgttcttaaattttattactattattattattattattattatgacagagtctcactctgtcccccaggcttgagtgtagtggaacgaactcggctcactgtaacctctacctcttaggttcaagtgattctcctgcctccaccttcagaataactgggattacaggtgtgcaccaccacacccggctaattttgtatttttagtagagacagggtttcaccatgttgcccaggctggtctggaattc

SEQ ID NO: 199420 - DNA, 1000 bp, Homo Sapiens
ctcacattggaataatcctgcagcactggcctcagaagggcattgctgattatgtttacaggccagcaggaaactgaactgctattgagagaatctctatgctgaatcattttatctgcataacaaaagtggtttgctctatcttcttttctttccctggtggtgttgtcataacagtgtcttttagcaggattaaccagtaactaacttatttgctttggtttccaataaataactgcagcctgttaataattgtgcatgtgttttatgtggcctcagataaactgagacaatcttacacatctgcattccagattgggtcactattccttcatacttaatctcctattatgtaactgtccattaacaaaaaatagatcacataaggaaaaaacttaaatacttaatttgctagtgcattaataagtgatactaatacacatgactttttattgttacctaaagataggtgtttgctcagaaatataaaaaataaacctagtgtatgttttcttgctttaaaatgtaccaaatctgtcacaaatgctttgaactgtattgtgtttacttcttcatgtgagctgtgtctaaacattttttagtgtttttaaattgttagctcaatgagggtaaggtgtgtcctaatttatctgttagcacgttgcagtgccaaacacagcaccatgcaggcagtagatgctcactgaatgtgattgaattagtgaataagttaggctgtgctaggttgaagagatttgaagtcctaaattattcttgccatcatttcactctgcataataagtaaagaagttttactaagatgatttaaaaatgtgttattgaattacttgtgtagattccaaagcactgggataaaaaagaccctggctatgcccctttgaggaagcagtgagggtgtttctcactgtaggcacagttactgggttttatttgtgactgaattaatttatttctcttaggaaggttacatttatgaatt

SEQ ID NO: 199421 - DNA, 1000 bp, Homo Sapiens
ttgaatgcagcttcacagattctctgggacccagctggtactctcagaggaaggtatatttaatgatgtgaagatacatgtattcatctctctccgagttatttatttatttcacaagaaaaagtaaacaacaacttataaatattttcttgttgttgatcttggtaaaattatttacttaaccagcatttatgaaggtccccctgtagcctaggtacagtgcatgtagctaaagatattaacatgaatggagcccagcttcagctttggaaggagcaggagcatagctgagtggggaatatggatgtaaacaagttattacatcagagtcatttatgtatttgttcatttgcctgggagaagtgaggcctcaaacagcattttgttcaaaaaaatgactggcttatattctttatcgcatgcatgtctgccattttgtcatagccatgtgtgttcaatacttgaaatccatttgccttatgaaatgcttacggaatcctgatttctagaaataatttaaagtttgctgaatgcatatgctgtcctataagtgataggattgttttatcatttctgacagaaatgatacatgcaattaacatgtgttcttttaaaataatactattaacaaagcaagtttatcccctctactgatatctctgtctgtgtacccaaatcctgcaggtattttaaagtctagcttggtgcccaccttttccattcagctccgcttgactgtgtcagtttgtatcgatttcctgcctgtctgaactctctttgcatttatgttatgttctgcttgtctgacttgttagagcagagatcccaaactccatcctttctcctttcttgagcagggttcttgagaaatggatgatggaggttcctccagcaaatgtttcctctgtgttcctcgtcagagtggctgccacacacctccgtctagtctcaggcctctgccctgacagtcgtgagactcccttctgatttctctcttaac

SEQ ID NO: 199422 - DNA, 1000 bp, Homo Sapiens
agagctgtgcacaattcaccacagtcttttctttggtcccagtgatcatggaaggatgcgtggagacgaagcctctgtcagtgtgggttgctgttggactccatgatcagagactctctgcccacgtatgtaagcaagaattgacttttcttagtaaaagctgctgagaacctgggatgtctgttaccattgcacaatgtagtctgtgctactgatacaagaattataagaaagacatggtcatttggaaactacagaattacgtaaaaatgaaaacaaaaatcaatgattgccccggtatcttggtatatatcccctgtttttttataaatttgtgtgtatgcttgtttgtataatttgaaaaaatgcgattattctccaactactcttttttgatctgttttttcactcactagtagtaaaagattttatgtcatttaatatccttctacaacctgaattttaatggctacatagtagtataccattctgtcttgcttatgaatctcctcactctgtgtgctatgtttatgggaagatttctttctatggccacttggtaggtaaaggcttttctccctggagaccttactaaaaaggaaagttccacttatgctgcactgtgacacctcttaaccaatactattaaatattctccaggtgtcagtagctcagacatcatcattcactcatttaacgcttactattaaataggttacatcatacaattaaaatactctgcagtaaatcatttctgaaggcaaatagttatttggtaatattaataaaaagtcctaattttttataaataacatttttatgtattaggttttcttacagtgggccacagctgttgtaaccaatatccatacattaatttttataactcagtgctattattatgatacaaataatgctttgccgtttaaagctcaaagcaataaatggaaaatgccaagttgaatgtaagagttacttctacttcagtccttgggaattc

SEQ ID NO: 199423 - DNA, 1000 bp, Homo Sapiens
tccctctcccacactctcctagcagatcaaagataacgtgcctggaaataatttcccttttgattctgagagttttgtggctataaacaaaattatttatttacaaagaaagaagtgacaggtgagaaagacatctgagaggacaggaggaaaaggggaaaaaaagcatgttttaatttaaactcagatcctgtaaagaaggcatttcatgtatatctaatatctagtaagagtctaaatcttgtaaagatttcctctgtagaaagagagtgttctttcctgtctttcagggctaagtttaatacttcatgttactatctaaaaaccatatatgattgtgcagaatatgtttctctgcatattactctgattgcttgccatggctaagagcagacagaatttcaagttttgcatgtctactctctgcaagaacattatcatctttattagcactcactgagcacctactttttgctttatatatataatttccctttactcaactagtttgtaagatatgtattattatacccattttacagatgagaaaattgttaccaggttaagtaacttgcctgtggtcaaatagctaatatgttttactgtgcttgttaaagctgtagagttgctaagtaataacattaaatacattgtttgattttattttattttttgaagaaaggattaaagcaccagtcatacatatactacggtacatggcattttcccccctctaaaatcacctcccatttctatctttctatgactgctaattgcaactaacatttctctgccttccaacctctgaagagtcaagctaccaacaaatattctattaaattattttatttgcatagaccttatcttgagctttttatctcattgggttagtgtttctgatatgtcccaattcctgctatttcttaatctttaggatttttttttttttgtctagaatcagcacccattttattcctttctcatagctaccacatgaatt

SEQ ID NO: 199424 - DNA, 1000 bp, Homo Sapiens
tctctttcctgagtctggttgtgggagctgggtaactcccaatgcagtggacagagatacctctctggtatctctccttgctttccaccctcagccttctatccctgtgacctatgacagcacaccccctccactcctcatagggctttcttggttacttccaggatgtcttcatgttctccccggacgattcgtgcagacaggcttttcttaaacacctttgcttcttcccgcctgtggaccatcttacactgattgtagatgtggctggcaggaggataatggtggccccacctgtggaccatcttacagtcactgtagacgtggctggcaggaggataatggtggccccgcctgtggaccatcttacagtcactgtagacgtggctggcaggaggataatggtggccccgcctgtggaccatcttacagtcactgtagacgtggctggcaggaggataatggtggccccgcatctgggactggtggtgggttcccaagtggaatagttctctgtggatccctctctaaaccatggcttgagacgttggaaagagagttctgctctttccccccctaaatttcaataagttttgggaatgccacattttctgagttaagtaatctcattttaactaaatggctctccaaggctgctttcccttccatggtcattgagaatacatctccctttgccccacatgataaaaacctgcaatcacagttagaacaataaacacagagttcttaatatgcaccaggcgctgtgtctaagggcttacaggattgatttgtttcattgttcacaacaactattattatcaccattttacagatgtggaaatggaggcacagagaggccacaccactgctgaacagggcatttttgctcatagaacaaagtctatgtgagtctgtttcttttacaaattttctattaataattttcagccaatccatgtgatcaagaggaccctagattgaaagaagtatcatttca

SEQ ID NO: 199425 - DNA, 1000 bp, Homo Sapiens
gaatctcactgtcaccccagctggagtgctgcactggcgtgatctcagctcactgcaacctctgcccccccgagttcaagagattctcctgcctcagcctcctgagtagttgggattacaggtgcctgccaccatgcctggctaatttttgtacttttagtagagatggggtttcaccatcttggccaggctggtcttgaactcctgacctcatgatccacctgcctcggcctcccaaagtgctgggattaaaggcgtgagccaccgcgctgggccttacccatctttaagtgtacagttcagcagtgttatgtacattcccattgttgtgcacccgatccccagagctctttcatcttgcaaaactgaacctgtacacacattaaacagtgtctctgcattcctccctctccccgctgcgagcgatcgctgttctaccttccgcctctaggaattccactgctctagatgcctcatgcacgtggactaatacggtatttgtcttctttgtagctggcttatttcacttagcataatgttctcaaggtccaaccatgtggtagcacgtatcagaatttccttcctttataaggctgaattaaattccattgtatgtatgtacctcattttgttcatccattcatctatggatggacatttgggttgtttttattgttggttgctataaacatgtgtggacaaattatctcctcaagaccctacctttaattcttttgggtatacacccagaagtgaaattgctggatcaattgctgatggtcattctatttttgtagcctccttttaaaactttgctttttagtacttattttccccaaattaataatttctcaggtaaataagaaaccaatcttttacagaatagtttttttatcatccatagagtgttttatcaaatggccatacttattaaattggttgcttccagatttccattatgaaaaaccatgctagataaacaaatgtttatccataagat

SEQ ID NO: 199426 - DNA, 1000 bp, Homo Sapiens
ggaaagcctcaggcaagttttcaggccagtcttgccctctgcctggaaacagaccctaggtgctattggggggatgcatggtgagagtgagacggctcttcagtttgtgtgggagctgggtgaagcccgtgatggctggctttcccccaactttcctgacaacgtgcatggctcagcagatgcatccataatcctcctaggtatacaactacagtgatctgggaatctcacccccatcctctgcagcagccacagcaagacccgttgaaggagagtctgagctcagacatgcctagccttgccctgattggatggtccattcctatccaacctggtagtgaaagacaaaggtcatataatcttgggagttctagggccctgcccaccacttgtccctctccacactactgtagttggtgctttctggaaagtgtcacctcctggcatgaggccagccagcataaaaatagagcattaaaccaccaaagctaagagccctcctggagtccactgcaccctctgccacctctgctgggataggcaatggtatccatggctgagagacccatagatggttcatgtcacaggactctgtgcagacaacctacagtatcagcccagagccgggtagacttgctgggtagctagacccagaagagagtcaacaatcacttcatttcagctcacaggaagccacacccataggaaaaggcggagagtactacatcaagggaacacctgtgggacaaaagaatctgagcatcagccttcagccctagaccttccctctgacagagcctacccaaatgagaaggaaccagaaaaccaaccctgataatataacaaaacaaggctcttcagcaccccccaaaaatcacactagttcaccagcaatggatccaaaccaagaagaaatccctgatttacctgaaaaggaattcagggggttagttattaagctaatcagggagggaccagagaaaagtgaagcccagtgcaa

SEQ ID NO: 199427 - DNA, 1000 bp, Homo Sapiens
tattcaaggtctcttgtgagtctgtacaaattttatgatttttttttatttctgtggaaaacatcatgggaattttgataagaattgggctggatctgtagattgctttagggagtgtttgggaaatttaacaatattaatcctttcaattcatgatcacgggatttttttcatttatttgcattttcttcagtttctcagaaagtttatttcttaccatgtgtccacacttgaaatttttatatgtttattttattaatgaaggaaccaacaggaagacaatagagttggttccaaaagcaaaacaatgaggaacagagctttataaagccagttgggaaataaatgccaaaatgagtttccctagttagatacaagatcggctaactttctacaagacaataagatatcaccgttggagttaacatctctactaggttacagcatcctaacgacttaatcctaaaaggttgtgaactgtcttcccctttatatttgtttatatttgttcatcgaatatactgtggcccaaaagtgtcagatcagggttgtagttggctgaatggtggccagatatagcaaaatacatgattaaattacaggactctggagaaggaggctttcctgaactatttgggtgggccctaaatgcaaccacatgtacctaataagagtaaggcagacggagttttgagagagaagaggaggcaacatggagtgacgcagtcataagccaaagaatgcctgaagccactaggaactaggagaggcgtggtgcagattctcccccagagccttcagagggaacgtggccctgctaatgccttgattttggaattctagtctccagaactttgagagaataaatttctgtcctttcaagtcaaccagtttgtggtagtttatatttgttacactagccataagaaactaacacaagggtcaagaagacttagaaaattctctcacatgatatcaagaaatcacacaacctcaattt

SEQ ID NO: 199428 - DNA, 1000 bp, Homo Sapiens
aatacctctctaataagattattgggaggactaatggagatggggcatattaaagtacttagcacaaaagtaagtaccagataaatggcagctatcaataaaacacaatactaaggtgaagagcatgcaggggcaataacatatcccctgtgtgagctaatttttgaatagcaaaactgtctagtaacttgagtttcatttcgagattacactgtattgcctgtcaattttcacttgtatgaaactttattatttaaccacaaaatttaaacctttttatatttgcattttaatacttgaagttctgtaatttaaattaaattttactttatgacaaaagctataaaaaacccataaaatattaacaagcattctttaaaaaaactatatactttacctggccatttccaagcagagatgtatctttccctattagtaaataggatccaaaaaagaaaataaaggcatgactgaagcccaggatggtccaataaagaaatgttttaatacttaagaggcggtttttactaatgtctctgttaaaaagaagagaaaaagaaacatattagggatcatttattatttgcccactaaacaattaatataatatgataattaaaaaacaagatagatttttaatttaaaattgcttgaaaatattagcacaaagaataaataaatccaaatttataaaccactgcttataatatcatacatctgtttaatagcttatagttcacatactacattcaaatatatttcttcatttgataaagaaataggaagactgggtgcgatggcttaagcctgtaatcccagcactttgggaggccaaggtgggcggatcacaaggttaagagatcaagaccatcctggccaacatggtgaaatcctgtctctactaaaaatataaaaattagctgggcatgttggcacgcgcctgtagtctcagctacttgggaggctgaggcaggagactcactttaacccaggaggcaga

SEQ ID NO: 199429 - DNA, 1000 bp, Homo Sapiens
ctgtgtgcccgccttacatttactctagttgatcgtgattgtcttcaggttttagttttggaactgtggtgtgtgtgccagaagtgcaacttttgccatgattcaaaaagcacaccggaggctgctataccactctggctgttactttttgggaatgggagcaagcagaaaaatatacgtttggtaaaatcaaattgagtaccgtgtttatttggtactacttgtggctacaatagaaaacatttctttgcacgttttcctcttgaatacaatctggagtttagttttttaaaacacttttttttttccctgagactgggtctcactgtgttgcccagtctggcttccaactcccaggctcaaagcaatcccctggcctcagcctcccaagtagctgggactttaggtgcataccactgtgcttggctgcagttattgtttaatatgacattaaattatatatgaatgaataatttttcatttatggtataagttttaatgaacttttccatgagaatagaatgttaaggtttagaattatgtcctggttacaggttagggaattagaaaccaccttttaaaaaatttcttttattcaagattataatttctccacacaacccccttctctctcctaaaaatgggcaaaaatctgttaacagttttatgatttgaattttaaggccatgtaaatatagcaggtattatatatgatattttttatatttaacaaacatgcaaaagatctttttaatactcctttttatttgcttaatacaagtattgatgattttgttttgttattcaaatggcatatatagactgggggtgtaattcctaaaatattttttttcaggcctagggaaaagccgaaatagaaaccacaaataacaaatttttataaattgccatctctggttggctagttcttctctgaaagaagtactacaaaatagaatgatgaagagaatatgaatttaagatttacttcataagaatt

SEQ ID NO: 199430 - DNA, 1000 bp, Homo Sapiens
catacaagtgtgagaaccctttctttgcagtcttccctggcctattggttaggttttatttatttatttatttatttttatttattttttgagacagagtctcattctctcacccaggttggagtgcagtggtgctctctcggctcactgcaacctctgcctcccaggttcaagcgattctcctgcctcagcctcccaagtagctgggattacaggcgactgccaccacgcccggctaatttttgtatttttagtagagacagggtttcaccatgttggtcaggctggtctcgaattcctgacctcgtgatctgcctgcctcggccccccaaagtgctgggattacaggtgtgagccaccatgcccggcctatttatttattttttaatactagtgactctgttttgattctggctactttcataggtgtgggtcaagattcctatttttacatatgaatgtccggttgtttcagcaccatttgtttaaatagaattatttctccattgaattacctttgcacctttgtaaaaaatcagattagtgtttgccggggttcagggagggattttgggggtgggagatgactgaaaggtgcagcacaagggaggtctttgtggcgatgggacagttttgcatcttgcttgtactggtgggtacaggaaacaacatatgtgggaaaatgacagagctacacacacattataagcatatcaaattcctggtcttgatattgtactgtaattatgtaagatgtaaccattggtggtgaaaggtgcctaggacctctctgtactgcctttgtaacttcctatgaaactataattatctttgcaacttcttgtgaatctataattacttcacaggataaaaaggtttgtgggtttttttttgttttttttttttttttttttttttgagacggagtttcactctcattgcctaggctggagtacagtggtgtaatctcggcccactgcaacctccgcctcctgaattc

SEQ ID NO: 199431 - DNA, 1000 bp, Homo Sapiens
tctcagggctttagttcttcctccacctgtgaagtctgcacacctcattcgtgccctcccctgagttctggccaggaggctagagaattccttctccctgtggagttttaacccctgcttatctggccaccttcctgatggatccctgtggtgccaggcaggaatgggttgcttggggacccagcgagctctcacggcctttctgctgtttcctctacccttgtatttcactcagctctctaacttgactcagcttcaggtaaagtcagaaacttctcccacaaacagaccttcagcttctccagtgggagtgtgtgttcagaagaggagggtctccctttcccaattctgcagttatggcactcacagtatttggggtgtctcccagatcctgtaggagcagtccacgtccttcagagggtctgtgggtcctcttgggattgctggtttgttcttacagtcagtctggagctaaaatttacaatgcaagcctctacatactgctctgtccagagctacaagtctagtcctgcctcctgtctgccatgatcccctgaatcctctcaccataatcttagattcaaagaaaggcaaactgaatgagcagttgctcctattctgactaggactgacagaaatactggtttggaaaaacagataagtggagaaagtgacaaaaggactgactgaggagaataaaacatgtagcactacacactgaattggaacaattagctgaaattttttttctttattccttcttaaaaaaaaaacaggatacatgtacaaaatgtgcatggtttgtcacatagatatatgtgtgccatggtggtttgctgaacctattgacctgtcctctaagttccctaccctcaccccccacccccaacaggccctggtatgtgttgttcccctctctgtattcatgtgttctcaatgttcaactcacacttatgagtgagaacatgcagtatttggttttctgttcctgtgttagttt

SEQ ID NO: 199432 - DNA, 1000 bp, Homo Sapiens
tttttagaaaaatctccgctatgtctaagaatatagaagtggcagactgataataagggtacattctttatagttttgcaaaattagactgcaaaggaagtgtttttctgctcagaaaataaaattcctttaggcacagagttatgggtagactatatacccaaggtgcctagggctctagtcataagccagaaccttcttcctcagactgtctgctggtgcactggttctcattgatccacacctctggtttcataccacattcacctgggatgctgggatgtaaagtttgcttggtaggaaactgctagaatggacgtattccattttgatattttatttattttgtcaataaattttgtacttctctttccgttcctttccatcactcaaaagaatcttgttggccgggcacggtggctcatgcctgtaatcccagcactttgggaggctgaggcaagtggatcacctgaggtctggagttcaagaccagcctgactaacgtggtgaaaccctgtctctactaaaaatacaaaaaaattagccaggcgtagtggcgggcgcctgtaatcccagctacttgggaggctgaggaaggagactcgcttgaacccaggaggcagaggttgccgtgagccgagatggcgccattgcattccagcctaggcaacagagcgaaactccatctcagacggaaaaaaaaaaaaaacaaaagaatctagtcactgataaaataagtgaaataaaaagaataaaatcagaaatatgaacatacagtcttacataaaaatcatcaaatatattaaagagcaccttcaagtaaattcaacaacttgatcagtttgtgccgagttttttgttcatatttcactacatgaatgctctttgacatttctatatctaagaactttgaatagtctgatagtattcagagattcctggtttgtttttttcttttttttcaacagaggagttggtgaaataaattattttgcctttt

SEQ ID NO: 199433 - DNA, 1000 bp, Homo Sapiens
cttctttttccagctttctttcctgaatttgggacaaaatggctggagttcaacaaccattctgggccatgaggtagaagtcacacaccaaggatggaagagtaataaagtaaaagttgctttggttctttataatcctggagcttctgcagcagctctggactgctcactcctgaacttcatttacatgaaagggaagtgactttctgtattgtttcagctgtgtaactgggtttctgtcactagcagctggaccaaattctagtgacatggttcctttaagaacttgcccacagtgcatacgaaggacccttcatctcagctctgatgggctgtctagcttctgcccctcactgtccctgtcctcgggctctggccttcctgaccattcctctgctccctaagcatctgccctgagtctcagcgggtgccctgcaggtgccctcttgcctactctggaactctcctccctcactgccctcctctgctttttgtcttatgaaggcagaaatagtcatgcacaaaataggaccctttgagaaaagctgtaagttccagcagagagaggaagagaagaggcaaaaataacagaggggcacagactcctaagggcacactcactggaaagtcatgttggaccaaattcaggatccctcctggccattcttgaccctcctcacttcactgtgagcccagacttcctcccattagagccaattgggtttaaaacatacgcttagaaaactacagccagccctacaggaatgaaggggttactttccatttgcagtttactgtgaatttatttaatccaactgttatttttattcacttttttccattaaacaagtatgcattaagcacctactctatatcctaagatagatatagataacttatgtgccagatatggagggcagaaatcccacacaactttcactggactgaaatcaaggagttggcagggctgtgtttccttacggaggctttggggagaatt

SEQ ID NO: 199434 - DNA, 1000 bp, Homo Sapiens
ctcagcctcccaaagtgctgggattacaggcatgagccaccgtgctcagcctatttcttcttgagtgaacttcaataatttatatctttcaagaatgtgtccattttatccaaattatggaattcactggcataaaattattcataattctcttatctttttagtatctgtagaagctatagtgatgttgcttctctcattcctgatatgagtaatttgtgtattttctcttttgtcctgatcagtcctttaagagcttaatatatttattgatcctctcaagaaccagattttctcttctcttttcttctcctctcttctcttctttttgagataggatctggctcttttgcccagactggagtgcagtggtatgatctcggctcactgcaacctccaacttctggattcaagccatcctcccacctcagcctcttgagtagctgggactacaggtgtgcaccaccacacccaactaatttttgtattttttgtagacacagggtttcacaatgttgcctaagttggtctcgaactcctgcgctcaagcaatctgcctgctctggcctcccaaaatgttgggattacaggcatgagccaccgtgccctgccttttttgatttcttctattgagtttctcttttctatttcattaatttctactttgatctttattacttccttccttctgcttacttcatgtctaatttggtcttctctttctaattttgtatagtagacactgagatcattgctttgagaacttttttcttttctaacatagacatttaatgctataaattttctcttagagactgctttagtggcatctacaatttctgatatattgtgttttcactttcattcagttcaaaatattttttgatttctcttttgagttctttcatctctgggttacttagaagggtgttgttttgttgttaaatatttgtggattttccaaagatatttctattattgatttctaatttaattcctc

SEQ ID NO: 199435 - DNA, 1000 bp, Homo Sapiens
caagactcttgtctcaaaaaaaataaaaaaataaaaaagtatgtatttactgagcaccaaccataagcaagacactgtgagggttacacggatgaatcaggtatagaatctacctcaaggagttccaggagagctggaccatgttaataagtccctatgatgcttctggggtgtgagaacgggccccccaggggtagacactgagactgtgcctgggagtttggaaggggcaaggttaggattagaaactcatcctcccttccacggctgccagtcccagtccccttcagacagcaggggcccttcccctgcaggccctctttgcctcataccttccaccaagggtcctccggatgagggggatttcaggccggtggccagcagcgggatattctgggacatgcaagaaccttgggggcctgtgggaaggtggctgcagcctccccagaaaagcagccgcccactcagcgaggccactctgggctgtgttttgaaatgctgctgcggatgtaatgattttgggtggaggacgtttagaagccaaatgagtttgtgtgaacaaaagactcagccctcgatctggactgtccagggctctcagggagtttcgtttccttccttgttcttgctctgaaagaagcagccctaagaaaaatcaagcatgttggaaagtgctagacatgagatttgacgatcagatttttaaaacgcttcccctgcaagcgctctagcgatgaagaaagtaaaatctacctcccctccctgtgaggggtcggctcttgttcagctgagcattctctccgggtgacagacgtctgctggactgaacccagacccaggggaggcctggcctggagctcccaagtcagggtcagccttccagaaatagaactggctctgaggtggcctcgggcatgaaggagggatacagcctatcccagcaggagtgaaagatgaaggaccttggagtgacctcaagctctttgctttaaaaggaatt

SEQ ID NO: 199436 - DNA, 1000 bp, Homo Sapiens
ctttttagagacagtcttgctctgtcacccaggctggaatgcagtggtgccatcatagctcactgcagcctcaaactcctaggctcaagggatcctcctccccaagcctctggaatagctgggactacaagtgtgcaccaccatgcctggctaacattttaattttttgtagagataatgtcttgccatgttgcccaggctggtctcaaactcttggcctcaagcagtcctcctactttagcctccccaagtgctgggattacagatgtgagccactgcgcatggcctaggctccaggtcttaataagaattttaagtagaatttaagctaggactcttgggttctaatctcggcatcaaagaaacacagttcagcaataacaatgtgaattttcaacctggacaacatagagaaaccattgtctctacaaaaaattagaaaattagggccaggtgtggtggctcacacctgtaatctcagcacttcaggaggccaaagcgggaggatctcttgaggtcaggagttcaaggccagcctggccaacacggtgaaaccccgtctctactaacaatacaaaaaaattaggcacagtggcacatacctgtagtcctagctacttgggaggctgaggcaggagaatctcttggacccaggaggcagaggttgcagtgagccaagatgtgcactctagcattacagcctgggtgacagaaggagactctgtcttaaaaaaaaaaaaaaaaaaaaattagccaggcttggtggcatctgcctgcggtcccagctatgggggaggcttaggtgaaggattgcttgagcccaggaggtcaaggctatagtgagccatgatcacaatgctgcactctagcctggggaacagaacaagaccctatctcaaaaaaagaaaaaataaaggtaaacgtaaattttaagcacttcattttttattcagttaaaacacacacacacatacacacacacacacaccaaggagagaag

SEQ ID NO: 199437 - DNA, 1000 bp, Homo Sapiens
acaccacattctacagtacacatcaagcaattcaactttttctttgtaatgtcatgacttttctctgcttcttgaaagtacttccagcatcaggtagtggcatgctaaatgtgtcctttgttgttatccaaagcttatgaaattgcactaaacatgatgaaaaatacacaagaacttcaagatcactttttcctgaagggaagaactgctcacatggccatgattatcacacagtgttttaaggagataatcacaacgcctgagctcactgcaaaagcaacaggaggtagctacaaaattattacatttgtatagtatatattacagttaattttacgtagttacaatttaatacttcttcgttatgtttttttacatctcttgactgcaaatagcaccatgtagtttcttaagtgtctgtgtgcataagttttgataaattttacctttttataatagatttgtgcatattttatggtagtaaatgacaaaatagactagtgtctacatacattttatgcattcatgacatgcctttttcttaattttttcaatatttctaggctacttggttcgcctgtgagttttttcaaaccattccaaatcttcaaaacattttccaatatatttattttaaaaacccacatataagtggacctacacaatttagttccatgttgttcaagggtcatctgcataaaaggggcttaaaacagtgcttggcacacagtaagtactgagaattaatgttggtcaaaccataatagaggcttagaaatccagccccattaaaacacacatggacgtttctgatgcctgcttttcactagggctccacaaccacctggtcaaatactgtactggaattagatatatgtcttcttccatagcagcaaaattcttcatactgaattgaattctacaattctgctcattatgataataattattccctctcccactccaccaattcattcagatcctatgaccaaaattaatg

SEQ ID NO: 199438 - DNA, 1000 bp, Homo Sapiens
aaacttttagcccctgtgtcaccttccaccttccttgcagcacactggattgggtggcagatgttcccagagcccggctctttggaaggagcagaacatctcttccaccagaaagcttcccaactccaaggcaatgggtagagagccatttcctggaaacaataatcttagcctggtggcgtggggagccactgtgctctgtcagcccacaccctccttgtgtgttccctccctgaatgccagccggccctgtgcttcggaggccagcacttcctgccagagcatctagaatccagcctatttggcctgtgtcttccagtttggctgactggctcggctctgtcctcagcactgctgttctctccaactgagttcttcagcatgctggacagcctgtctttctttccaaccttccacctgctgctctggcctgctgtctccccagcctgtcctctgtggagctgcccctcctgtggctgtggccctaggagagctcagtcaagttacttacctgcactggtctcagtttccttcccaaaaaacaaaacaaaaacaaaaaaacaaaatttaaggagagtcagactagattttttttgagacggagtctcgctctgtcgcccaggctggagtgcagtggcgctatattggttcactgcaagctccacctcccaggttcacacctttctcctgcctcagcctcctgagcagctgggactacaggtgcctgccaccacgtttgcctaattttttgtatttttagtagagacggggtttcactgtgttagccagatggtctcaatctcccaacctcgtgatccgcccaccttggcctcccaaagtgctgggattacaggcgtgagccatcacacccagctcagactagattatttttaagactccttctaaatatcagattcaattctgtgacccaaggttgttcccactacccttcccagccagatacctaatttctaggtttgtgatccatgctcgatttggt

SEQ ID NO: 199439 - DNA, 1000 bp, Homo Sapiens
tattattgctatctttatgtccatgagtgcctaatacttagtttccacttataagtgagaacatgaggcatttggttttctgttcctgcattaattcacttagaataatggcctccagatgcatccatgttgccacaaacaacatgatttcattcctttttatggctgcctagtattccatggtgtatatctaccacactttctttatcctatctaccactgatgggcacctaggttgattgtatgtctttgctattgtgaatggtgctgtgataagcatacgtgtgtcttttgggtagaacatggatttttctacaaaagaaatttaaaaacttgctcagaaactagaagttaagtctgactttcacattctttatgctattccaccatgttcacccttgcctgataacattgttgtgcattacccctctcttcttcattgtaaattggtttcaaatttggaggttctaattccttggtagtagcttcctacagtgctattttgaaggcacactggtttcggtgggagagatatacagattagctagatagattagtgatgtctgcagtggagatggggtcagagaagaacaacatgcatggctagtattccctagtctttgtccagcctcaaacgatgatgtctctactgacggtatcatgtcacaggttgttatgaagacttggtgaggaagtacatgatcaattgttatttggaagatggttccagaagaatgacagaagtgaatgaagaggatattcctggctggaaaacttgataaaattgttgaaaagggagttgagtaatttatttgtctttggttaccctattagtgaaaacagctaatgaagtctccccagataactcaacattttacttaatttcatctctaagaaaacacttttaacctgcctctggaaaaaaatatgtttgctcataaataacattcttgaagccatttgcctccggtaaactctcaaatttttttgccaaagaatt

SEQ ID NO: 199440 - DNA, 1000 bp, Homo Sapiens
aattttctatctcttcactctaaaaaggatggaaacaagccctactgttccataaccattcccagggatcggctaaggtacattgctgactgctatagactcagtgttcaaggagaaaaaaatcttcagagacttagaaaactctttgcaatattttggtcaggctgatcgtcttgatactcagtgctagaaatgatgctttggattagtagtttccacattctgaatttataggaacactgagtcaccacagccttttttcttgtaaaggtttaagtgatatcagaaatagcaactctacacggaaagcccttgggaatatgaaaatactctctctcaagagcaagggctcttccgtgccccttttctgcctctgtatgtagcctgagcaccagggtagagattgcttttgaaagtttgccccatgtaatctatttcctggctacctaagagaacagccgttttcttcatgaaaacacaaagaggggaaagaggctgctgctgttccagtgggaagttatgtctagccccagaaggcctggtggctgggtcagctcaagcactctcttcatgcactgcaggctcaggaggcattgggttgctttgctttttctatggaattagggagcctattgaaattctagtgcacccctccttttgtttgtcaccaagtcacatggttctgtcttcagtatcctatttttctttttttttaatttctttttctgaggaacaaaattggccatttaaataaagttcttttctagtgagtaaagaggtttctcagagccagaaatcactgaaaagagagtctgtcgaccctgcccatggaaaagcccagagatttctctaaccacttcttgccaaacttcctagttttgtgattggatgtttcttggtttagcattgtttggtgctgaatacattttgcaattcttttgttctctgccctagagcttccattaccctggacttcaactcattaccaaattaaagaatt

SEQ ID NO: 199441 - DNA, 1000 bp, Homo Sapiens
aaaagaatgtctttgttttcaggaaatatatgatgaagtgtttaaaaataatggagtatcatgtctgaaacgctcaaagagaaaatgataataaaatgttaatgtttgaggaatctgagaatgtaaaggacttgtggcaattttttgtatggttatagcaacaaagatctgtgatctgaccgaccaaaatagatgcccctttatcaaccaagatagaccctaaggttaaggaagcaaaagttacctacaagttgagggttcagagcttggctggcatggcaacttcctaaatccctatggctacaaaaaaaaaaaaaaaaaaaaattctatactcttgctaaactccctaataataggagctaccaggcaaattatcagacccctcctaactctgatttgccacccagaccactgcaatgctgattggacagagaatctgcgttacaaacattctttcctaataagcaactgcagactttaagccagcttcaactagtttatagagactgcgtacaaactgtctttgtgttatatagtttaccttttgatgtaaagagccaattccacctaattctaatgctaaaacccctccccaaaatgaacatgagatatatgttacatacatgtttgcccattgtatgtgtgctcaactcccctcataaatatatatagctattcccctaaacctgctgaacatgtgtgactctattgtgtaatacagaccctgtgaggcataaaaccaacctgacttttccctctttgaagagagcaccttcagtatacaccaaagactgtcctttctcagttttcaaactggtatcactaataaagctcttctttctacagtttagccaccatggtgggcttttggttgacatatctgaaattatgtcaagatgtaaattttaaattttaggcaaaagaaatggatatgtatttttttttatatatgagtgtatacatatatatgaatctatctatccacgtatctatcaagca

SEQ ID NO: 199442 - DNA, 1000 bp, Homo Sapiens
ttttgtgttgttgggaggaagaatagtcctactttcaggaatactaaatttgacatcccaaatgtcatttatttttcatgtcctaaagctgacatgaagttcttattactattttatttattattttctttttgagacgaagtctcgcttctgtgccccaggctggagtacgatggcgcgatctcagctcactgcaccctccgcctcctgggttcaagcgattttcctgcctcagcctcccgagtagctgggattacaggcacccgccactatgcccagctaatttttgtatttttagtagagatggggtgtcaccatgttggccaggctggtcttgaactcctgacctcaggtgatccacctgcctcagcctcccaaagtgctgggattacaggcgtgagccactgcacctggccttgttcttctttttgttagacggagtcttgctttgtcacccgggctggagtgcagtgacatggtcttagctcactgcagatcctgcctcctggattcaagcattcctcctgcctcagcctcctaagtagctgggattacaggtgcccgccaccacatctggctaatttttgtatttttagtagagacggggtttcgctatgttggccaggctggtctcaaactgccaacctcaagtgatctgcctgtcccggcctcccaagtgttgggattacaagtgtgagccaccacaccgagccggaagtgtaaaccttttatgagcaggaagagaagtgattgtatggctgagcaatctgttcatggagccctactccctggtgcgtagttggggctttgaagtagatctccctgcttctcatattcgagggagtacaagcaaagcagtagctgtttttgactctttggaagtgacttaagttctagagataaacattttattcttttttttttttcatacctcatctggcagaagagagataaacattatacaaatggttcttgacttgaaaaaaaatggtctagccgt

SEQ ID NO: 199443 - DNA, 1000 bp, Homo Sapiens
gctggaatgtgcaggcggagtagtagaaggtcccaatacatcttgctttctcactagctgattttcatttagttctttatttaaccacgtgattacttaaataaaagaacaagaagcaaggtaaagaatattgactgtttatttttctaatcatcttaaacatttaaaaattatattaagatttttaaattataagtttttacaactacctgacatcacaggagagcaatataggttcacctaaatttttgtcattaaagtttcttattttagaagctgccacataggactccttattgtattactttccgaagcacatatttctgctagtcaagcaactctttgaaagatttcacttctagaatatcttacagtttacttaaaattcacaatcttatgtatgatacccagtagtataaactgagaaaatgttagttaaaatcttatttttatgttttgttttcaaacaattcatattgttattattaggtaaacacagctattaaaaaaaggaataatgaagaatttaaacaataaattacagtcaacattttcaacagttttaattgtgggttactgacctatgggatatggttttctttataaagatgataactcttttactgggcagatgatataaatttattatagaaaaggcattaagacagtatatttaaagcagaaattacttatatattggccaatgtctacttttatgaattcgaataaaattttcaggttaagaataaaactacagccgagcacgatggctaacacctgtaaacctaaacgcagcaatctgggaggccaaggcgggtggatcacttgagctcaggagttcaagaccagcctgggcaacatgataaaatctcgtctctacaaaaaaaacccacaaaattagctgagtgtggtggtgcacaccttagtcccagctacttggggggctgaggcgggaggataacttgaaccaaagtggtggaggctgcagtgagctgagatc

SEQ ID NO: 199444 - DNA, 1000 bp, Homo Sapiens
ctccagcctgggtgacaagagtgaaactccatttcaaaaaaaaaaaagatatataaacatcccttataagatgagatttagttttagttattcacatctcagcctaaattactttaagcagaaaatatacttgcttttatctttaacatagctagaatgttcactgagaataaaaagtaggtaagtttttaagagcttgactgagttcaatagagaactacagaatgttcatctgtgtcccatatgtgcagcaggtataggaatacagagaaggtggacagagaggacgtatgtctacagtcattaacctacgtaggcctacaaagacacacatttttgccaattctggcctgtgggtaggggaagagaggatataaatgcattgctttgcctcagcaccacatatccatcttcccttcccactgcaaaggtagtaactgaatgatattcatataatcaatccaaataacacaataaaagagtccaagaacacagtcaattacataggaaacatggacacactccacagtttaggagctaaggccagtatccagataagaggacattcatcaggctcacagttctaggagctgggtcatcaaggacatgagtatttattttaggtgcctgtttctaggcttgggtttctctctgggctctttacaatttcacaccttatcctctgcctacagatcccaaattcctgtaaagcaggagttggcaaacaacagctcatgagccaaatccagcccactgcctggtttttttgtttgtttgttttgagaaggagtctcgctctgtcacccaggctggagtggcttgatcttggctcactgcaacctccgcctcccaggttcaagcaattctcctgcctcagcctcccgagtagctgggattacaggcgcccgctaccatgcctgactaagttttgtatttttagtagagacggggtttcaccatgttggccaggttggtctcaaattcctgacctcaggtgatc

SEQ ID NO: 199445 - DNA, 1000 bp, Homo Sapiens
ctaagcgtgggagctgggtctgccatgcacatccctgggtagtgccaggctcacagtagggatggaatgactctaaatcctctctcttctctctgtctctgtcctcccctgcccgaattcatcctccatggcactgtctatgatctttctaaaatatagatctcttcgtatgactcccatgttcaagactaggcaaagactctgcatttcccagtctggttcccaaggcaggatttgaaatctctccccctggcttaactgcatggctacagcaagttctctctttttttattttatttttttgagatggagtctcgctctgtcacccaggctggagtacggtggtgcgatctgagatcactgcaacctccacctcccgggttcaagtgattctcctgcctcagcctcccaagtagctgggattacaggtgcatgccagcatggccagctaatttttgtatttttggtagagatgaggtttcaccatgttggccaggctggtcttgaactcctgacctcaggtgatccacctgcctcggcctcccaaagtgctgggattacaagcatgagccgccgcacctggcctggctgtctctttcttttctttttttttttttctttttgagatggagtcttgctctattgtccaggctggagtgcagtggcgtgatctcggctcactgcaacctccacctcccgggttccagcgattctcctgcctcagcctcctgagtggctgggattacaggcacgtgccaccatgcccagctaatttttgtatttttagtagagatggggtttcaccgtgttggccaggctggtcttgaacacctgaccttgtgatccgcccgccttggccttccaaagtgctgggattacaggcgtaagccaccgcgcccagcccccaaccagctgtctctttcttaaccagacagtcctagtgcatggagtcagaggatgtcaaagctggaggggaattttggacagcctagttgaattc

SEQ ID NO: 199446 - DNA, 1000 bp, Homo Sapiens
actgttgctaaccccaggctacaggggaggcagctgaggcacagagaggttgaggatcttgcctgttgtcactgtctggcagactgtggaatgggaattggaacccagattggtctgattccaaagctgcaagctttggcttcactgctttatggcctcttatattgtggtccctacaactgtgccttcttcctaaccagaaggtagtagattgttgctctttgtaacttgcttatcctctgttggtctataaaccgtttgatttattcaagaatatttgaagtagatcattagaattctgcctggaaatgggaccatgtttaagtttgctttagaaacatccccagctcggccaggctaatcccagcaatttgggaggctgaggtgggcagatcacttgagcttgggggttcaggactagcctgggtggcatggcaaaaccccatctctacagaaaatacaagggctggctgggcatggtggcaggtgcctgtggtccctgatattccgggacctagggccagagaatctctttggcccaggaggcggaggttgcagtaagcccagtttgtgctgttgcactccagcctgggcgacaagagtgaggccctgtctcaagaaaaaaaaaagaaaagaaaaaatttaaaaaagagaaatatccacagctttggaacaatgacctgaaacaatgatctattagagattttaattaaaaaaaattattttagtcaaaattgtgacatggctcaaataatctagtgctgcaaatacaattgaacttgttggatttgaagagacaggtctaacagccatgattgggcctggagtgtcaggtaagcaagttcacatgaaggcctagagatgtgactttatattctttagtcccttgaccagtttgaataagagaaatatggaggtaactacaaagaatcaaatccatattaagttgagtgcttgctctgtaccagacacttcatgtatatgtcatcctattgaattc

SEQ ID NO: 199447 - DNA, 1000 bp, Homo Sapiens
atctccattttacagataaggacactgagcatagaggttaagtaacctgcccagggcacactgaactaggatttgaacccaggtagtctggttcaagagcacaagccatgaccactacatatactgctttggaacgcttaacacagctgcttttccctcaggattgggctagatcctgagaaagaaaagaaacttttaatctaagagatgtgagccgctatgtgggctctagagtgactgacacaagtagctataaagtaacctaacaataccatatgcttgatactctaactcctaccccatagttcaacaatgtacgatcaatcactaatcaatgctacttctggaaacccgtaagagttcccaaaaacaacttttgtaattgcccctctcctgattcatccttttttctttagaaactcgagcaggatgggcacagtggctcacacctgtaatctcagcactttgggaggctgaggcgggtggaccacaaggtcaagagattgagatcaacctggtcaacacagtgaaaccccatctctactaaaaatataaaaattagctgggcgtggtggtgtgcacctgtagtcccagttacttaggaggctgaggcaggagaatcgcttgaacccaggaggcagaggttgcagtgagccgagatccgccactgcactccagcctggcgacagagcgagactccatctcaaaaaaacaaaacaaaacaaaccaactcgagcaactcctttattctcgggatcacttcccagtgttacctgagctgcaatctcaaacttgccccaaataaactctctagattaattttgcctcagtttccttatttaggtcgacagtgctatttcttaactgataataataaatgaagtagttttcgtttagtgagtatgttgtttggaacaaactggactcatgcttcactcacaagtgaagcaagagctcacacgctgagacacataggaaccaacaggtgcaacaggaattc

SEQ ID NO: 199448 - DNA, 1000 bp, Homo Sapiens
tcctgacattcccaagaccttcccctacctaaccaactctgaaaatccaggatccaattgtcactgagaataagtcagaagaggaaattttacgttagaacctggagtgtcttacaattatggcaaccccatgggctcacctgagctgggacacaaaccctgagcttgcacaggaggacggagtctgtgtgtgtgggaaggggaggtgctcacaggaatgcatcagcctccaccagcatctcagcagtggggactaagagggaaagggaagtctggggacatttatggagcacgtgcatgcatgtatgtgaacacaacgtctggtgtggccatgcccatgtgagccacttgtgcagaggtgctgaatgtggtgtctctggtgggagtgcacccccgagtgttcatgcagggtatggcagggtcaggcatgcagtttgcgtctgggtacaagcacctgagggtggcgtgcaggggtgctgtctgtacacatgtgagggtgtgccatcgaggcaagggctgcagactcccccactgaccagcatgttctcctgtgcttggagcaccagctgcttgtccgctgaggctgtctcctcctcacactcctgcttctggccagggccaggagctctgtggtcctggctcgccccatcttgagaaacggagaagggcctggagaccataagccggaagtagtgtgggatctctgtagtgttggtcagcttcaggtggtgggtggtcaccagctcactcagcacctgggcagccacagaggtaggaggcagggaatgcatcttgtctctctcttcaaccccatggctctagggtagggctgggagggctgggggaggggatttgggctcagactataaggcctgagtcccacaagggcacacagagacatctgaggtccaggtaagctggcagggccagagggtggcagcacactcaccccagagcagggctgctcgggaatgaggtcactggcctggcactggaattc

SEQ ID NO: 199449 - DNA, 1000 bp, Homo Sapiens
agtttttgatttagaaaagaggtactcataagctattactccagtagcaaaggaaattctctctctgattttctggtgggttgctggcggggagtgagctgatgaaatgaagaaagtatagcctgcggagaagtccccttaagaatgaatatgtggtggcccctccaggacaaggcaggatccagcagcgtagagagctgcctccatcccagggcagtgcggggagacccagtctccctctgctgagggaggacttgatgctcgcaaaggcaagccagcaatgggcagggagacttggagaaaagtggtccttttgaaagatatgaaggcccaagaaggggcagtggtactgaacagaagtggcatagaatcatagccaagaaattgggctttgaaatctcacagacctggatttgagccccaaatttgccaactttagctgggtgaactagagcaagttagttctttttttttttgagacagagtcttgctctgttgcccaggctgaaatgatcatagctcactgcagcctcgacctgagtagctgggaccataggcacaccccaccatgcccagctaattcgtttttattttttgtagagacggggtctttctatgttgcccaggctgatcttgaactcctgggctcaagcgatcctctcacattggctttccaaagtgctgagattacaccatgcctggccttcatctttgtaaatctccatggcctactgtgtgaagtatttgttcatttaggaaatacctacagagcatttcaatgccttgctcactttagctcatcagagcaaaccagtgaagtagattctattattatctccattttacaggtgaggaaaataggtgacttgcccaaggccacacagctagtaactaggagaactgaaatttgaccccaggcagtcaggcaccagggtctgcagtcccaagtttaaactatgccaagaggctataattgcacctgctttgcctgatggaattc

SEQ ID NO: 199450 - DNA, 1000 bp, Homo Sapiens
ttgacacattgtggtgaaggttttggtatcttttttttttttttgaggtggagtctcactgtcacccaggttggagtgcagtgttgctatcttggctcactgcaacctcagcctcgtgggttcaagctattttcctgcctcagcctcccaggtagctgggattacaggtgtgtgtcaccacgcctggctaatttttctatttttagcagagatggggttttaccatgttggccaggctggtcttgaactcgtgacctcaggtgatccacctgcctcggcctcccaaaatgctgggattacaggtgtgagccaccacgcctgacctggtttttgtatcttatagattcctctttctgtaggatctgtaagatcctgtagatcttatagattcctttttttctttttcaattcagactctttcaccatctgttacaggtgagagaaatatttgtaaacatatccaattaaataatacagtgaagaatggcagagagagaaatggctcataataggagacaacattgcatcacaattaaggaaatgggttgaataaattacttaactcctccaatattccatttactcaactcttaaatgggactaataccacctgcttgttacgaggttgttgtaaggattacattaggtaatatacctaaagctcttagcacagtatctggaacatactaaatattcaatacgtttatttattactgttttttatactctctgggcagacactgagttttcaaaagctggtggagagatttctgaatatgatggcagctacctagaagtgcctgatttgtcttctccaccttctcatttaaataatcttgaaatatattgaaaactagaatattcagcaacaatctgccttacttgagaagaaattttgaccaataaatgacagaaaaaagctataattttctgaaaaaatcctcaaattgattcactgtgagtagaaaacctgaattattcaatgaccctgggggaattc

SEQ ID NO: 199451 - DNA, 1000 bp, Homo Sapiens
aaaagaaagaaagaaaaaagctcaagtgaagagaggctacaaaaggatgtatgcagtgtcatccaaaggttaatagagaattcatggggaaaaaagaatggaaggaaatatgctgaaatgtttacagtgatcttctttggtcggttgaattttaggtgatgttcactttattctttacacattttttaatgtgtttttcaaaatttctctaattggctatgtaatttctagagagaggcgattttgctcagaaaataaattttaaaatgaaattgaaaatgttaaccaaagtgatgactccataataccatggaagccgagaagatgaaatgctcaagcagagggcagcacgtctccctctatctgctctcctatggtctcttccagttgaatgatttatcgctatgatgctatcaataacactgaccattctatcaaacaggctacatttttgttaattaaaaactactatttgataaatgaggtcctgtgatgatatggcaacccagtaagacaattctgctctgctctgcaaggtctattgttatactactacttactatgggcttggtaaatatttgtctagactccagttgaactgaaaagctgccagattcagtggctacccaatatagcgatcagtggaaatcagaaatttctcatggcacttctcatttgcataaaaatacagggttttagatggagtgtgcactcacacgcaagcgctgtctctctccctctctctccttcccctcctcctttgatgtggagtacctgcaccacactgttccctgcagctacagtggcccttctccacatccgccttctggtggaaacctcgctgagcagctgggccagcttgcgttccatctcggcttgaaacacttcattctggagttgcttctccatgacgcccaggagaactacatttaaatgaaaacatacgtggcacccaaaacaagtcagcagtaaaaaaacagtgtgtgtgtgtgtgtgtgtg

SEQ ID NO: 199452 - DNA, 1000 bp, Homo Sapiens
tacctatgtctcagattattataatgctttagtcatgagactttccttcaaccttctatctttcatgcaactattagaataatcttcttataaagtagatcttcatttaattatttagtcacttggctactcttttatttttattcaacaaatatttgtataacaacttctatgagcttaaatttaatattgctttccttttaaggatgcctattagcaaatgtgagtcatattcatagttgacctactgcaaatgtgtaaattcactcacaaatgcaattgtgggctaacttcatttatataccgttccttattttctttttctatttgctctcattattgtcttgtattatgcataatttatataatcatgattaagttatgccataagatgaaccctatataagtcatccatgcacatatccaaacctcatcctactggcttcaaaaatcttcatgggatcttcatcaactttaagataaggtataagcaccttggtatggatacattatctggcccctacaattcttcagcctcaaatctcaagttcttgagtgaaatcaagaacactgatatcacctgtaatcccagcactttgggaggctgaggcaggcagatcactggaggtcaggagtttgagaccagcctggccaacatggcaaaaccatgtctctactaaaaatacaaaaattagccaggtgtggtggctggtgttgtaatcctagctgctagggaggctgaggcaggagaatcacttgaacccgggaggtggaggttgcagtgagccaagatcaccatcacatcactgcactcaagcctgggtgacacacacacacacacacacacacacacacacacacacacacacaaagatatccaaggatttataaaataaatcatagcttttcaacttggcacatctttatatttatgttgatattttcaaacacgctccactctgacaaccacaataattttataacatgcaagcaagaattc

SEQ ID NO: 199453 - DNA, 1000 bp, Homo Sapiens
agtaccagaaagagacaatagacattgggagagggacaatgttcaatatttttgctttttctgagaatgctcccaaactgatgaaagacatgaattctgagattcaggaaataatgaatcatcagcaggataaatataaataaatttacatcaagatgcactgtggggagcactatggagatctgtcaaatgccagccaaggacccctctgccttactcatgtccttttaaattcttgtgctaaattcaataacagcagcaacaataaggataccttattttcatttagcattttatgttgtttgaagtcttttatagtctataaatatgtcaaaggtaagacctttgacagatgaggagatgcatgtcaaagattaggagacctagttcaaggccagttcacttggcagcagatgaaagcatcagtgcttggtctgctaactgggatccttcccgctttgtgctcccacgaaaaagtttctgagttccttggaagccgcttccaatgacagagacagttgcacattaggggctattaagtagggtctgggaaagagacaacttcctgatatggggagggtccctggctacaaggcagattatatcagaacttgccctcagttccaggaaactagagatgcctcctgtcttggatagaaagagctgcctgttgggttgaggaaggacactgaggctgtgggagaacctctttagcttgaggaagaattcagccagtgaatcagttttatagctctttcgctcttactttcctgtctctgagagatgttggtgcgactgtggtttctgtcattggctgtggtgtgttatgaaagaacattgggcaaaaacagaagttatgggtcaggttctggttttgtcctttggactcatactgggctttgtttacttaagagggagtttgcttctaacaggagcagagtgtgtgtcattgaagggggcagtgattatagtttacaaaagtgatctaggagaagaattc

SEQ ID NO: 199454 - DNA, 1000 bp, Homo Sapiens
gagattgcaccactgcactccagcctgggtgacagagtgagactccaactaaaataaattaataaatacatgaataaataaaaaataaaattcctttctgtagccactgtgagccaaaagcacgggcttaaactgcagagtgctgtgtgtgcactcacaaatcccaggttcccagagtggagagccctgcaccccagccgcggccaagggtcagaagtagcaactggtgattaatcaagtggctcctgtcttaggacagtcagcgtttattgtctctgcaggccagactatagaaataagcagacccacaaaagccagcaattaatatttccccggagagattccagatgctgccgggtggactgtgacatgctagcattcttcctgctcctgatttattccattgtgtggaagagcttccacagaaatgactctttggatttttcaggaaatgtttcaagccttcttattcagacaccctttcagcgtccagtgatggacgaagctgtgccctagagtcccaccttcccaaacagtgggcaacttgctttctccagcctcctgtccccttccgagcacccttcacccctcccatccccaggagtcgctgaataggtcccatgggagagaaatgacagcttgaagtgatgacccatcccaccccatcaaatgttggcattttactctggcctccaaaggcatggggggatgacccatggcaggaatacaggccttacagagaggttcactccaaccaaaccatgctgctcccccagtggcccaccatgaaaacctctggaaaaccaacttatttgccaaatgactcccatgagcaggcctttgcaaaatttcagagtgttgtacagctgcatcccaggacaaaactctttcttttcagtactaacagtgcaagtagaatagggtcgtggtggagcatcccattgtcttcattcctggtccactaattttcatctgagttaagagttttgggtttgaattc

SEQ ID NO: 199455 - DNA, 1000 bp, Homo Sapiens
gtctcaacatatcagtggacattctgatgggccacacctgagttttagtttctgaaatcgtcttgctgtttatttacctctgaggaatcagttagaatgacacaaaacccagcaaaatacccccacctgatgtatttgaaatataactttacacaaccagcttaaactctagctgtgaaaacttgaatttaaacagcctgaaattgcatatagtttaagtcttaggtcaggcagtgtgctagttctgggggttctggaggatactagtttaggtaagcaagataatcttggaaaatgaaaaattttgttgtacctcgaaattctagcttcaattctttaagacaatggcgattaaataaggattagtgttatatggccttcctatcaacttaagatatgccatgtgagagaggaaagtggtttttaaacctccgttggtaaattttatgtacctgtttagttcacagccattctttttagtcatctaaacacttttgatgtagaagggagacatatacataagcaatcaggtagagttaaagcagtagcaatggaatcaaagggaaaagagtgtttaagtttgagtagtagagtcagttaactcactgagtcaattaactctattgaaggggttaattaggtcaggtcaagcagggatttgggaatgggatagaaaaacaaaacaattttttttaaatattcaaagagatgatagttttggaacataaattgagtgttgggggtgaaaaagcgttggaggtaataatatctaatgtataatgaatgcttgcttactacatagtgggcaatattctgcatatatatgtacgttaatcatcacaagaacttgataaatgggtgttatgattaacctcactttatatctcaaaatttgcacccaggcagtctctcttccagacccttacatgtaggcacttcccatactgcctgagtgttgtaaatgagactgcattgccatgaaaggtatgagaatcggatc

SEQ ID NO: 199456 - DNA, 1000 bp, Homo Sapiens
ggataaatcctttttaaaggctcttttgttatcaccatggggtttgtgagcactaaaactggattttaagggatcagtgaaaccttagaatcacggtttgctgtatctggaaggaaccatgaccacttggtacagacccttcaagcggtagatgaagaggccaaagcacgaagggatttgatggcttgtgaaggcaacgtgctcttcagagtcgggcagacgtgcagctgaagcttggtctggccactgatctgctgcccggccttgggtaaactcctggagcccctatttccttattgattacatggagataccaatccagactgcacagtattgtgagaggtagtaaaactgtttccctctggtcgaggtcaaacagacaactggggggcagagctaatgccagaaccttagtatcctggctcccaggtctttatcctttccattattctgcaggaggtcttcaggctactgttaaataaaaagtaaagcttctacttcgttccacccaaaattctagttcagtgtttcccagacagagcacctccagcgggtctgaggctcagttctatgtggagactcatgtttatacgatgacagcatctatattttttctggatgaactaataatcgactggccattgtatttaggaaaaaccagacatcacctcatggacgtctcattgaaggggaccgtcagttattccattcattctggcaaattttctttttagctttggttgcagcaggaagagagagacgtctggggggctttttgcctgttggaagggcatcactcgtccacagctggagcccctgggatgacccatcccaaggtcccagcctaagtctgaggttccagggctggtcgcaggccgtccttgcagccctcgccagagcgttgtctgcacctccgacactaggtggcgccataggaacatcctcgcggcccgaggcgcggtcgcagccggggagcactcgccacggtgctgtggaattc

SEQ ID NO: 199457 - DNA, 1000 bp, Homo Sapiens
tatggactgagtgattatgatgtgtcagtgtagttcattggttggaacaaatgtactctggtgggagacgttaatagtagatgttggccgggcatggtggctcacgcctgtaatcccagaattttgggaggccgaggagggtggatcacgaggtcaggagttcaagagcagcctggccaagatggtgaaaccctgtctctactaaaaatacaaaaattagcccagcatggtagcaggcgcctgtaatcccagctacttgggaggctgaggcagagaatcacttgaacccgggaggcagaggttgagtgagccgagatcacgccattgcactccagcctggcaatagagtgagactccatctctaaataaataaataaataaataaataaaatgaagtcaattttaaaagaatgtataaccatttttattaatataaacttctgtgttacatacatgtattacttttattgtatcattttatagcccttaaaaatttcaacaaaatgtaaaaatgtatttttgtgaccaatgaaataagtggagtaaagtgatattgttcagctaaatatatgatagatataagaatttagttacatttctggaatgacagagtggtgatgaattttatagcattatgacgtaagtaagaaatgttaggtctgtcttcggatgtctattgtatgttccagttatttattgctgtgtgtaacacaccacaccaaaacttagtagcttaaaacagtcatttattgttatgttccatttttctgggggttgacgaagctgagcgttactcacttttgtgtccttcaaatggttgcagaaatatgacagatgaggctggaattctgaaagcttctttaactcacatgcctggctcctagactagaatagctagaatacctgtgggctggtcaggatttctccctcttttgtctctccacatagccatagtgtggcttgggtttcaaacagcgtggcatttcaagaccaggaattc

SEQ ID NO: 199458 - DNA, 1000 bp, Homo Sapiens
gcccccaaccttggaatttcagagtgagagcatatacaattcaaaacacttgctttgtcccttttctcagagctctgatattttcctaactcttacagtctctagaatgatctgtcagattttcactcaacaacactggatcagatctcttctatacatgacctcatccttctcatgtctcctctgtttgcagagagccggtcaaagtcttggaggtggaaacgaactgccaactgattaaccattttccttaaggtaagaaatgctgcaacaacttggaaagcaaggaagagagtgaagatgatatgtatcgctttttccaagggcagatttgttaggccttcattaaagagcaagaaaagaattaaaggtaactgcaatagaaggctcaaaagccaaaagccagccaactcaggaacctgcaatgacacatatcaagagtaataaaaatcagtaaaatacagtttctgtttatacagataaacaagtacttatcactaccgtgaacctacattatgggctctgtgagtgattccaaaggaggatgacatggtccttgtcctcagagaacttacagtctagatgagaaaactaattcatgtaaaacaatcctagaatactacactttagtgaacaattaagtgcaatatttagaagtacagactaaatgctacaagaaataagggagtgattagggtaggtgaaagaaagacctcagggaggtaggctttttaagttgtggagaagaaggaagaggcaaaaaggtaagtaagcaaacacgtgaaattagcatgattgggaatcagcacatcagcctggaatggatggctgagtgagaaaacagcaaaacctacagtaagacaggctgggtggggccttattatgaagggcctagaaaaccacgggaatctttaggcattatccctatactctggtaaccacaaatgcttaggcagcatgatgatgcagaaaacatgggcctggcataggaaatgaattc

SEQ ID NO: 199459 - DNA, 1000 bp, Homo Sapiens
gacagtcatagattactgggtaaataattttatctattaaataaataaataaatactgttctttggggaccatgcaatcctttatttttcttttcttttcctttctttttttttgagatggcgtctcgctctgtcgcccaggccggagtgcggtggcgtgatctcagctcactgcaacctctacctcctgggttcaagcaattcttccgcctcagcctcccaagtagctgggactataggtgcgtgccaccatgcccagctaatttttgtatttttagtagagacggggtttcaccgtattggccaggctggtctcaaactcctgaccttgtgagctgcccgcctcggcctcccaaagtgctgggattacagacgtgagccaccatgcccggccatatttttgtttttttttttttaaagagacagggtttaaccatgttgcccaggctgatctcaaattcctgagctcaagtgatcctcccatctcagcctcccaaagtgctggggttacaggcttggaccactatgcccggccaatcctttatctttcctgcttcctttttatttctggactaatcactatccctggaccctgctctggggcagattctcacctttagcctccatgaggaggtcagttctcctactccttctggtctcagggagaccccaggtctcgcccacaccaacccagggacccagaagggcagggcggggcagggctctcaccacaggctttcccagctgagtccagcaacacactctgcacagtggcctttgtgaggacagcgcccccagcccgctgaatcacagggatggtgtggaaggcaatttcactggaaccccctcggggataaaagcctcctttcatgtagtggttgaccagcagggcgtgcatggaaaaggcactgtggttgggggtgacacctgcagaagcaaggaagggtggtgagctggcaagagaaggcaccagcaccattcagaaaggaacgtggaattc

SEQ ID NO: 199460 - DNA, 1000 bp, Homo Sapiens
aagggaagccactgtcttgaaaggaaggacccaatcctggcaggactcatcacctgctgactaaacagccccttgggccctgaatgaccagcagcagtagccaggtagtacatgctgtgggtcttgggtaagactctgagatatgctgacttcaggtgtgacccagcacattcccagctgtaatggctatcagctgggtgatcagcttcttcttgagaaaagcagaagagtaaaaaagactttgtcttgcagcttaggtaccagcttggccatagtgaggaagagcaccaagcaggctattggggtccccaattccagcacttcgttcttggatggcatttatggacctagcctgaactagaggggagcccactgccctgaggggtgagtttcaggcctggtagcattcaccactagctgactgaagaggctttgggccttgactgaacattggtggtagcctggcagtacttcctgtgggcctgtggcagtgctatccgtagggagagactcctctgcctgcgggaaggagaggaaaaaataggaaggactttgtcttatggtctgggtccaagctcagccataatagaaaacagtgccaggtagattcctaaagtttccaactctaaaccctggctcctgatggtatctctggagccacccaggcctagggaactcactaccatgaaggaaaaaaaacaagcctggatggcttcaccacctgttgattgtagagccctagggccttcagcaaatgtaggaggtagccatgtagtgattacagtgggccttggacaagacccagtgctgtgctggcttcaggtctgacctactacattcccagagctggtgaccacagtggtgcttgtgttccaccccttctccagctccaggcagctcagcacagatttgatgcagtctagatcacaaggactgcaacttggagagactccattttaggggagaaagtaatggaaaagaacaagaattctctggtaat

SEQ ID NO: 199461 - DNA, 1000 bp, Homo Sapiens
taccccaaacttttagaaatgtttttacttgttaggtgcaacataaacagctacacgtaaaaatactattaaatttatatgctataaataacagtatcagcaatgattcctacaaacactaccctgccaaaaaaaaaaaaaagagacccaaatgcacactaacgggagcttaagtctccacaagagcttccccagcctttctagaggacggtgaaaacaggctgagagcccgaggctcagaaaaacagctcagaggggctggaggccagtctgaaagctgaggctgcacatgggatgctacgcacagctcaggaaagaggttggcaagcaggagccggaaggagcaccccagcccgcaggccaggagcgcccgcaggccccctcagccccggagcacgctcaaggccctccctcgggttcccagtaccccgggtttccagacctacggccaccaggggaggctcggcctcgggacgggtgcgagagtcacgcggcgcgcgacagaccaccaagtgctgcggtacggcgcccgcacctgtataactcgggacgcgtcaggcgcggcgagccccggctgctccccggaggcgcaggggccgaggaggcccgagggcagcggcggggtccttcacagtgactcttgggccgcagcagcttctcattccctctccctcccctattctggaggaagaacgggcaacagcagcgggctcgagtgctaatggcaggaaggcgtgcgagacgttcaaatggacgcgtccatcttgactttcccgtcttgcctcgcgccggggcggggcatcgcgggaggtgcgcggcgtcctagcagtcctggcgcctgcgctgttgagggaagaccgcggcgggttacaacttgggggctatttccaccttccgtgcgactgatgcgaaccccgaagccggactctgtctgctacagtcctggcgtccaagttctctttagctcatgtcactagggacctgaactgccttatagatc

SEQ ID NO: 199462 - DNA, 1000 bp, Homo Sapiens
ctggtgcccgaccccagctcttgagccccccaagtcaccgcaacgcccaggccttgtgtttttgccgaagctcgtgcctcagagcctggctccgacgctttcctcctagaagcctcccctgatgcgtcccaggaaccctggcctctccccttgtcctcaccccatgcatcgagcgctccctggactccacccctgcgtgggtctcattcctctttgtgtcctgagggcttggctctaggccgcccagtagaggccggctggatgaatgctgatgggacggtctcatctctgtccacaaaacccctcccccacagccataccctcactgccatgtgactgtgttgacagaagtctgctggcctcagaggtctgcggcccaggaaatctcagctgccatcagtgataaacatgacctccctgtgggcgtcacctccacccctgtgctggatgggccttctcatcgatttcagtgatcatgaagttaatcagcagtcagcactcaaacacgtgcagaatcaatgacaactgaaatgattagaatccgcataaggagggcattctcatgaggtatctggggcttttgaatgttcttggatgaaaccagaaatgaaaggctgctaaaatgaaagcctgaaagccttctagctttttttttttggtatatatatatatatatattttaagtggagacgggatttcaccgtgttagccaggatggttttgatctcctgacctcgtgatccgcccacttcggactcccaaagtgctgggattacaggcgtgagccaccgtgcccggccaagccttctagctttcaagacagaaagggggaacctgaagatgatggtgtgtgtgtgtgtgcacacgcgcgtctgtgtgtgtggtgggggttagagggagggtggtcttggggaagtgagctttggcaggtgcggcctgtggaggcagccggggactggatgactgggaatctctcccgtggaggggacagcctgaagct

SEQ ID NO: 199463 - DNA, 1000 bp, Homo Sapiens
ctctatcttcagaagtcacaggatatacctaaataggctttgtgatttcacccagttctccgtgtcacacctctgaagtgtctccagaggattaacgatcacagtgaatatttagtaaatgcttgaccttgatgttgagttcctggcgctcagtaaacactggttccctcccttccttcctgcctgctttgaggaggagaaatccaaagcctcatggactgcagtgatttttaaaataccaaataagtaagtctacaattagatcagagaaaaagacgagtttgaagagaagggagcatgtttactgtgggcgaggaggaggtctgatcattagggtagattgtaacagccattttggaatggccttcggccagcagctgctgagcatttgaactcatttctgcagttctttctcagctgatgtgttcttcccatcagcggtgagtcagattctggccctgaccttagtggcagacactggccgaatgaccgtaagcaccgcccctgccccaaaggcctcctccctctcagagaccagagatctttcctcctttagaaattccacatgtaggttctagaggagtctagctggacccatgggtaagccattctcagcctcctggcaatacgatagtaactggtagatgcttttccctatattcgtgtgctcaggctgccataagaaaatacaacagattggatgggctaaacagcaccagtttattttctcacagttcaagggccagaagtccaagatcaaggctccggcagggttgcttttccctgaggctccttttcttggcttgcagacggctgtccccttgctccctctctgcatggtgttctctctcagtgtatgcattcctggtgtatttctctgtcctaatctcctcatgttcttcttgtaaggacacaaggacaccagtcatactggatcggggccaccctaatagcctcatttcatcttaaaggccctgtctctaaatacagtcatattctg

SEQ ID NO: 199464 - DNA, 1000 bp, Homo Sapiens
ggttataggcactcactaccatgcctggctaatttttgtatttttattagagatggggtttcaccatgttggccaggctggtctcaaactcctggccttatgtgatccattcacctcagcctcccaaagtgctggtattataggagggagccactgtgtctgctcaaatcactgatttttaaattactatttaaagaaccgtttctgtttatacctcattggccacgctcagtcacgtgacctcactcagctgcaagggaggctgggaaatgcattccccattttgcatagacatgtacacaacacaaaattagacactgtgctccccagggagaaggcaaaaagggtcactgggggcctactggcactctctggcacagacagcttttaatatttctagaagttgagaggaggctaaggtctgaaggagaaaataggtaatagacagctaaagaaagggtgaagaagggccaggcaggttaagggaatgggcaggtgcaaggctgaggcttccacaaaggaagaagcttggtggaaggccagtggggaaaagcgggtagtggtggaagagaataaatagaagagggcaaggagtgagccaggcggggcctgggaagccatgcgaagatatttagacttccagtatcatgggagccttagcagcattttaaacagggaagtgacgtgatccaatttacattttgaaaaggtcatgctagctgttgcctgacagttaatttgaagggaaggagagatgtggaaaaacgagctagggagctatggcaacctactctgggcagatcggaaggatgtaagaaatgaggggaggaagggattagtttttgcttcattgctatcttgataattgctttgtacagacatttagctctttcttgttagtttcccagaatgaagcccctgagtgatgatttttctctcatttgggctggttctagtctggttgcaattattatcagtttttgcacattggcaacaacat

SEQ ID NO: 199465 - DNA, 1000 bp, Homo Sapiens
tttctcatctagaggaatacttcctttatagggttattgtgggaataaatgatatggaacagtggtaaagcccacttttaaattactattgttgttgttgttatcgtcatcaggtcattggcccagaaactgatgcaaggccttcaatatagagaactgtaatattaaatgaaccactaaactaaaagagctgtaataattgatgaacaatacaagccttttctattagcataaataacagagccaggaaccagtagcaacaataagaaaaggaaatagatggcctttgagacctagtaatgagactaagcattgatctgaaggccaaataccacgtaggtggcgatctacccttcccttaattgttctcaaggctatatagtttagatgaggaaacaagattagacatgtggatatatatagtttagaaggaactaagactaggacatgtagaccgcagatttaacactttttttccttcaaagaaactcaatccagtaacttgaaggacatctaaggaggatccatttagaacctacaactatagatgtagtaatcccaatctctgtctttcaccctatagatactacagtatctgtctcttcttatcccttactttcatctctcaactaaaactttttgcaggccctcagactctttggttccttcttccccttctttccaggaatgggcaaactatgaccggccagttaaaattgacctgtaacctgtatttgtaccatcctgaaggtaagaatgtttttcatattttaaaaatgctgtacaggccgggcacggtgatgcacacctgtaatcccagcactttgggaggccaaagcggatagatcacgtgaggtcaggagttcgagaacagcctggccaacttggcgaaaccccatctctactaaacacacacacacacacacacacacacacacacaaattagccgagcatggtggtgggcccctgtaatcccagctacttgggaggctgaagctt

SEQ ID NO: 199466 - DNA, 1000 bp, Homo Sapiens
ataccttcaatctcactcaatgttctttttcaaaaatatttgatgaaagaatcaattacgttaagtaaacaactgttggtcaaggaagtaaaaacttattttaccaataaattaagataaattcaggaaccacaagcaactattttctgaagctttccttcaactgcaaaataaacactaatttaaaaattttttttacttcatttgaaagactaggtttgaaacatttggtgcttttgcagaattgtttgaaaatataaaacatcatataaataatgagaaaaaatgaaacacaccttaaagaaatgagctcactacattaaaataacagtagaaaaaaacaaccaaaaaaacacaaatatctttataagaaaactatctacctaacccaaaaaacaaacaaactgtaagtctctcacagtgatctatttcaggcaaagaagaatttacatagtttcttgaatttcattgtactgtaagagaatttgacctcataaacaaagtctcctttttctatcaaggctattctatgtcctaatagccccataaacttatttgctattttaaaaatcataaataataaatgatttcacaagactttcactcaactacaaatcttcttaataaagattttatctttttgctactagtgtagaaaaaaatattacatacatatcagtatatatatgaaatatgtttatataaatacatacgttgtatgtttatatactttatatatataaatataacatttatttatatatatatacacacacatatcagaaatacttccatcacaaggtgtttagtatttgttctggacaatttctctaaaatatttaaattatgtttaggtttcctttgtagaaaaaacacttccagcctgaattaaatggctactgattcaaaggctagtataagcccacttaactccattgttatctggtacaacggggaaagaactaaaatagtaaagatgtaagacaattagagatatatg

SEQ ID NO: 199467 - DNA, 1000 bp, Homo Sapiens
ccaataggacatatgagatggatctcataggcagacatgctaagggcaagtttgagtggatatacattatggcaaattaacagcatccgtttcatagtcaagtgaaatgtgcaactagcccagaatatattcttagattaaaatgttgtaagaacctcacattccatcaactacatgtattttttaattcctttctcattaaacacttgaagtctctttatcatgtggaaactaatgatataaatgaattagctgacacaaatgtcaacaaatcttttgcatgaatgaattctctttttttgtttcaagttatctccatcattaccatcttgaaaagtcagtctatgtgtgcttcatgtagaaaaattccaacatttactgtaattgcttaattaccagttctcagcaccttaataataacaggacatttgaggatttgcaaataacaacaatgtctaatttttcagctgcttattcacaccctattataagcaaaatggcaaacacatgcaacaggttttcccatcagcattagttaattttaggcagaggtttttatagatccaacaaagtaagaaagagaaagagaaagaaaagggggagaatactttccacaatctggtaaatattaataggtgctattatttttattatccaataaaaataaatattacttatctgatatacttctgaaggagttaattattctttcttcagtggttttataagtatatatagacatgtatacttatatatacatgtaaacatatatatatatatatatataactgtaaattactgctattcattggacacttggtgctggcgtcttacatccattatttttttaaattctatcttggattttcatctgattttgcttttgtacttggtttctctctcttcttgcttgatttgtttactttgtttagttgtttatttatgtctcatgattaacttttatcttttctgtttgttatgtggtcttagatccaagctt

SEQ ID NO: 199468 - DNA, 1000 bp, Homo Sapiens
tttggaaaatgatgttttgactgaaaattataaggccatacactaaaggaagtatatacaaacactactcaagtgagtaaacttgatgctcatgggggtacaggttaacaactcagaaatgtgttacacatacactggagttgaatagatacagaaataaatggtggacggggagagccagttttcctgctgtcagggtaaaaagttacatataaacaagacaggaagattagaatacattttgtagtagtagatgagagtcagagacattagtatgaactcatgtttagcttcagatgcatacaaatggatagacaaaaagacaattattaatatatgtaagcatacatcggcgaatgtgcatatatccattacccagaccttgttttttttttgggacggagtcttgctctgtcgcccaggctggagtgcagtggtgcgatcttggctcactgcaacctctgcctcccgagttcaagcgattatcctgcctcagcctcccaagtaactggcattatgtacagacccgcgcctccacgcccagctaatttttgtatttttagtagagacggggtttcaccatgttggccaggctggtcttaaaaactcctgacctcgtgatctgcccgccttggcctcccaaagtgctgggattacaggcgtgagccaccgtgcccagctgaccttggtttttaaatcccattctccactaaaaggaatcacactcctgggagaaacagctgattccaggaccacgggagggagaaaacaaaatgaacctgaaggtagtaccaggaaagaagtcctcaaaaaacagaaggatcagggtattaaatgaacataggaaccaagctaaaagagctatcaatgtctgaagttgaaacggtatgggtggcaaaagaagtaatgtaatatttgattctaccttgaagtataaaacaaatataaatgagtctacactgatatgagaagaaacaaatatgtcttatagaagaattct

SEQ ID NO: 199469 - DNA, 1000 bp, Homo Sapiens
gttcattaagcacctaccgcgtgccagatgcttttctgtgtgctgaggatgtggcaggcaaccaggcattcttgggaaaaacaaaaaaataagtattggctgggcgcagtggcccacccctgtaatcctagcactttggaaggccgagatgggcagatcgcctgaggtcaggagttcaagaccagcctggccaacatggtgaaaccctgtctctacgaaaaataaaaaattagctgggtgtggtggcccgtgcctataatcccagatactcaggaggctgagtcaggagaatcgcttgaacccaggaggcagaggttgcagtgagccgagattgtgccaccactgcactctagtctgggtgacagagcaagactcggtctaaaaaaaaaaaaagtattgaggttgggtgtggtggctcacgactataatccaagcactttgggaggctgaggcaggtagattgcttgagcccatggtggtgcgcagatgtggtcccagctacttgggaggctgaggtgggaggatcgcttgagaccaggaatttgaggctgcggtgagctgtgatcatgccactacactctagcctgggtgacagagtgaggccctatctctaataaataaataaaagagtaagtcaggcagttaaaggggccatggaagttggagagggccaagttgcaattctagctaaggaggtctggggatatttaggcagaaactaggagaggaggagccctctgggtatctaagggaagagcgttccaggcagacggaatggcaagtacaaaggccctgagacaggaatacctggagtatttgagggccaggaaggaagtcagggtggctggagacatatgagtgggggaaagtaggaagcaataaagtcaaggagaggatggggacagattggcaaaagccttgtggactataagaagcctttggcttttgcccagggaggataagagctgtagtaggttcttagcagcagacaggtttgatc

SEQ ID NO: 199470 - DNA, 1000 bp, Homo Sapiens
taggcaggtatatcgtcacccctgtccagcctgaagaagtcacagaagttgtatcttcctccctctacaacccttaggattaaaggttctcttataaaagggagtggggaaatgtcagaggcatgtgaaccagagtgactccatcttgaacaggagctgggtgaaataaggctgagacctgtgggctgcattcccaggaggttaggtattctaagtcaaggataaggccgggaacggtggctcatgcctgtattcccagcactttgggaggccaaggtgggtggatcacctgaggtcaggagttcgagaccagcctggccaacatggtgaaaccctgtctctactaaaaatacaaaaattagccaagtgtggtggcagcgcctgtaatcccagctactcgggaggctgaggcataagaatcgcttgaacccgggaggtggaggttgcggtcagccgagatcgtgccactacaatccagcctgggtgacagagcaagacttcatctcaaaaaaataaaattaaattaaattaaaaaaaattagtccagttgttacccttggggaatttacagtttagctgggaccttgtgttccagagactcagagaaaggaagagcccattctttctggaaggagcataaatcagggagggcttcctggaggaagtgacatttgagggacgccttgaaggaaattattgatgatgaagagcaagagcattggagtcaaaactgggatcaaattccagctgtctggtgttcttgctgtgtgatcttgggtaaatgacctcccctcacaggacctcagcttataaaatgaagcatgccaccctatctccctgggctgttgtgagaatgaccttaaaggagaaactatatgtgaagtgctgttctggagtaatgaccgcagacacaggtatcactactatgttatttatttatttatttatttagcggcagggtctcgctccgtcacctaggctagagtgcagtgatgagatc

SEQ ID NO: 199471 - DNA, 1000 bp, Homo Sapiens
gttggatttatattcaatattgacgtgccgtcatgggaacctcattattgtcgtattacacactatctcctttatcaacattagaatgttaatttaatcttccttttgcttaactcctgtttttttcttgtgatgttctgaatcaggcagtgaaagacatgctattgattggattccagcctagaaacaaaatataatcagaagtaaaaacatcagtaattccataacaaattctagcatattcattctttcaaaaatgaacatccatttgaattattttgcacaataatcagtcaggcatctacacagattaatgaattcacactgtatttatttatattaatttatttgatcttgtgcttgaacacaaatgttggaatatggagcttactaaccacacatatatcaaactttcatgtgaaccaagcaaaacatttttggttacttgcaaaaatgttaaaaataataaaatctcacattagaagctcagtcactcagtagtggtgtattcagtttactcctctggtctacaaacgtatttaagaagaagtctgcactattagccctcctttccccattagtagacatttcttctattctcttcatccaagtctcatattatacatatgtatgataacactaggggatcttgttttaaacgtgttcatctttttataatttcattgcactcatttttttttctccttatttacctccttattcatgacaatctgctgttttacttagactttttctttctgtgatagttttatggatatcttctatttcttccttgatgttgccatttcacatttttaacgccactttcacatcattttttattctatgtttaaaaagccaaaatgttcctttatttctttgatagcttgcagaaatgtatgttaatatttatatagtttgtggtataattaacctcttttgaacattttcatctttgttatccaaatttttcttcatatcattttcaagctatgaattc

SEQ ID NO: 199472 - DNA, 1000 bp, Homo Sapiens
ggtggggggaggaagtcttgctctgttgcccaggctggagtgcagtggtgcaatctcagctcactgcaacctccgcctcccatgttcaagcgattcttctgcctcagccccctgagtagctgggactacaggcgtgcaccaccatgtccggctaatttttgtatttttagtagagacgggctttcaccatattggccaagctggtctcgaactcctgacctcgtgatctgcccaccctggccccccgtagtgctgggattgcaggtgtgagccactgtgctcagcctatgtgtaatttttgactcccccaaacttaactactcatagcctactgttgactggaagccttactgacaaacagttgctgaacgtatatttagtatgttatatgtattatgtactgtattcctataataaagctaggcaaaagaaaatactaccaaaaatcatagagaggagaaaaaatatatttactgtacattaagtgaaagtggatcatcataacggtcttcatcttcatcgacttcatgttgcgtaggctaaggaggaggaagtgggcgaggtgggggttggtattgctgtctcaggggtggcagaggcacaagagaatctgcatatacatggacctaagcagtttaaacccacgtggtttaaaagcaactgtacttcctaggcttactttaagggtaaatgtgtaagatgcttgcataaatgcccagttcactgcctggcccacagtagcggttctagaattgctacttacccgttagtatgattattttatgaacatgtactgagcacctgcaatgtgccaaacatcagcaaccaaaggaaactgaagccccagaaggcagcagagtccctggttactcttacttagaataatctggattttcaacaatcaatcaacaaccttttctgaaggtcttcttcaggggagacatggtgcagactgaggcaagtcagggctataaactcaggcgtaactaggtttgaattc

SEQ ID NO: 199473 - DNA, 1000 bp, Homo Sapiens
tttaataacttttttattaggcagctaatcagtttcactgaggtagaagagttggaaggcatggaaaagtataaaactttattttgaattagttggatttccatggttatttaaaaactaggcccacttattttctaaggcacttttcatttgtaatatcactgaaattgaaattccttttggtttgttagaactctgataggaaaaggcagccagaagaataggaaaatttaccttcaggactttctgccagataatattgttgaatattttagtttatttactcttagaatctttattctgggaattaaaaaggtaagcgaatctttcatgtacctcatcaattttatgtatctgaatgttataatctactttagccagttacataaataaaatcaattctatatttaagctaaaaaataaaacatacaaatctggagacctgcctaaacagtggcactttagggaaaatataacggggagttttaggtcattataagttgaacatattgtactacacagtactgtaagaaggaatagttccatggtaatatgtttctgtttgttttgatttcctcttgaacattaccttttaaggagaatgttgactagcttagatgctattagaaggctgcaaaatgcatttttgcccactgcactctcacctcccaatgtcttgctaaagccttcaaaaaataaagaaaagaaagagaaaatgaaaagaaaaaactaaaagagaaaatcagcaaagcacatattcaaaacctacaagctattgtgtcagagtttgatttatggatttatggcagaatctaagtaaatgttgtaatttgaataattggacaactattagggagacaaaaatagtgtcatctaaaagctaagtagaaactgtatgtttgctccacaaaagaaaccaagataattcctctaacctgtcatatataggaattctgaagtatctactgtctagaaatatgtcatgtgataatgaacttat

SEQ ID NO: 199474 - DNA, 1000 bp, Homo Sapiens
tgcttgataaagaaaaacaaaagagaaaaagatgcaacaaacacccggaaaacaaatgattcctgtttttacccctaacccactgagaaattttaagttaaaaaaatctagctgtcacacatatcatcactataattagactcttctgtgcacaacagcaaattatcttagacaattaaaaatataatgtattagatttatgggttgtgtttacttttactctcttctgacttgcatgtattttgtgatgaagaaataatggagaaatgattcattaggatacatagattttctaatccatatatattattgtatcttcatttgtaatttgaagcaggttttaaaaaaatcacttgttttactgaatcattttagttctcagtttaaaaaatcttcattttcttcattcatttcctaagaaaaagtagtaagatcttaatgtgatgtgcactgtacctttaaatgattgtttgcaacagcatcatgtaagggcagaattccatctatattttcacaattaaccttagcaccagcttttaataactctacaattatatcaatagatccttcattagatgcctcatgaagtggtgtccaacctaaaaaaagaaaaagaaaaaaaaaaaccctgcttcatgcgaatcaatactcatgtaatatctgtattactaaggttttgttgcattaatgcaatatccatattgattcatatgtatatactaagtattgaacaagaaataatacaaaaaactatggacttataatttatgtttaattttggaaacaaattggtctcatcacaaatatttgttgatataagtgccaaagcaaaagactcacagaatgcaaaacacaatgagagtaaatactactcattttgatttgtttcaactcagatattaaaacgtctgactttcctatgtgtatctttgcattgccacatttctctttaaaatgacacctggtttaattaacctttgagtttttccctgtggaattc

SEQ ID NO: 199475 - DNA, 1000 bp, Homo Sapiens
gggttgttatgatttttaggtcgtatgtttaagtctgtaatccatcttgagttaatatttttataaggtttaagaaaggggtccagtttcatttttctgcatatggctagtcagttttcccaacaccatttattaaagaatcctttccccattgcttgtttttgtcaagtttgtcaaagatcagatggttgtagatgcatggtgttatttgtgaggcctctgttctgttccattggtctacatatctgttttggtaccagtatcatgcagttttggtaccagtatcatgcagttttggttactgtagctttgtagtatagtttgaagtcaggtagcatgatgcctccagctttgttctttttgctgaggattgtctttgctatgcgggctcgtttttggtttcctatgaaattaaaactagtttttttataattctgtgaagaaagtcaatgatagcttcacaggaatagcattgaatctataaattcctttgggcagtatggccattttcacaatattgattttttctatccatgagcatggaatgttattctagttgtttgtgtcctctctgatttccttgagcagtggtttctagttctctttgaagaggtccttcacatcccttgtaagatgtattcctttgtattttattctctttgtagcaattgtaaatgggagttcactcatgatttggctctttgtttgtctattatttgtgtatagaaatgcttgtgatttttgcacgttgattttatatcctgagactgttgaagttgcttatcagcttaaggagattttgggctgagacaatggggttttctaagcataaaaccatgtcatctgcaaatagagacaatttgacttcctctcttcctatttgaataccctttatttatttatcttgcctgattgccctggctagaactcccaataccttgtttaataggagtggtgagagaggacattcttttcctgtgccggttttcaaagagaattc

SEQ ID NO: 199476 - DNA, 1000 bp, Homo Sapiens
agatatggccctgttcccctaaagcaagactaggtctaaaatcttacattactttttggtggtcgtgtgtatgtgggtgtgtgtgtgtgtgtgtgtcggaagtgagagggattgtcttaagctttccaacatgtggtcgtgtgtgtgtgtgtgtgtgtgtgtgtgtgtgtatgtgtaggaagtgagagggattgtttgtgttaagctttccaacatgcggccggggacagctttgaatgcagcccaactcaaattcacaaactttattaaaatgtcatggccgggcgcggtggctcatgcctgtaatcccagcactttgggaggccgaggcaggcagatcatgagatcaggagatcgagaccatcctggctaacacagtgaaaccccgtctcttctaaaaataaaaataaattagctgggcatggtggcgggtgcctgtagtcccagctactcaggaggctgaggcaggagaatggcgtgaacctgggagttggagctcgcagtgagctgagatcgcgccactgcactccagcctgggcaacagagcgagactctgtctcaaaaaaaaaaaaaaaaaagaaaattgtaaaaaacactgatgacattttttttttaaagctcatcacttagtgttagtgttagtatgttttatgtgtggcccaagacaattcttcttccattgtggcccagggaagccaaagcattgaacactgctgttttaaatgatagtgactttttctgaatctatttgtgttagatatgttacttttggattttaataagggatgttttaggaaaaacgtggtattttaaatataagaaaagcagacaaaggagacagtaagattcacttaataatgtaagaaaaattatctgagaagacaaattaaatatagcaaagtggatttaaatacccatagataaggtgctttgactgccagtttgccctggatatcttttgtcctggttaatttaaaatgttcacgatccttaagaattc

SEQ ID NO: 199477 - DNA, 1000 bp, Homo Sapiens
tcaatatcactgatcattagagaaatgcaaatcaaaaccacaatgagataccatctcacaccagtcagaatggctattattaaaaagtcaaaaaataacagatgcctgcgaagttgtggagaccctgatacattgtcggtaggagtgtaaatctgttctaccattgtggaaagcagtatagcgtttcctcaaagaactaaaagcagggctaccatttgacgctgcaataccatcaccgggtatacactcagaggaagactatctaccataatgacacaagcacgtgaatgttcactgcagtactgttcacaacagtaaagatatggaatcaacctaaatgcccatcaatgacagactggataaagaaaatgtggtaaatacacaccatggaatattacacagtcataaaaaaatgagataatgtcttctgcgggaacatggatgaagctgaaggctatcatccttagcaaactaacacagtaactgaaaaacaaatactgactgcatgttctcacttgtaagtgggagccaaatgatgagaactcatgaacataaagaaaggaacaacagacactggggtctacttaagagagggaggtgaggaggagggcaattagcagaaaagatgactattgggtactgagcttgatacctgggtgatgtagtaatatgtacaacaaaccctgtgacacatgttatctatgtagcaaacctacacacgtatccccaaacctaaaataattttttaaaaaaaggaataaccaggaaaaaaaaaagaatactaaagccctccccgtcatagtgtaaataatgaataattacaaaatgaaactttcctcctgaaaattagctttaactatgttatatcataggaaataatattaataattccaaagtaaaaaaaaaaaaaaaaagtcagagtgtcttcctacctccaaatgactgcaccacctgccaaagaatggttcttaaccaggctgaaattatagacatagaattc

SEQ ID NO: 199478 - DNA, 1000 bp, Homo Sapiens
cttgaaacaaatggaaatagaaacacgatgtaccaaagcttatggcacacagcaaaagcagtattaagaggcaagtttatagtaatacatgcctatgccaaaaaataaaaagatttcaaataaaaaacctaacaatgcacctcaaagaactagaaaatgaagaaaaaaaacaaacaaaccccaaattagtaaaagaaataaaaacaatcagagcataaataaacaaaattgagactgaggcctggcatggtagctcatgcctgtaatcccagcattttgggaggccaaggttggaggatcatttgagcccacacgtttgagaactatggaaacgttctcaagtttcctgggaaacacggtgaaacttcatctctacagaaaaatacagaaattagccaggcatggtggcacatacctgtagtcccagctactcaggtggcagaggcaggatgatcacctgagctcaggaagctgaggctgcaataagccaagatcaagccactgcactccagcctgggcaacagagtgagaccctaaagaaaaagactaaaaaatacacaaaagatcaaacagaaagttagttctttgagaagataaacaaaatcaacaaaacgttagtgaaactcagaaaaaaagaaaaaaagagactcaaatttgaaaaaatcataaacggaagaggatatgtcacaatggacaccatagaaatacaaaggatcattagagagtactatgaacaacaatatgccaataaatttgaaaatttaaaggaaatgaataaattcctggacacatacaacctataaagattgaacccagaaggaaaagaaaacacaaatagaccaattacaagtcatgagagagaatcagtagtaaaaggtctttcaacaacaaaaaagtccaaaaccagacggctttactgctgaattctaccaaacctttaaagaagaattaataccaattctttccaaactatcccagaaaataaaagaggagggaattc

SEQ ID NO: 199479 - DNA, 1000 bp, Homo Sapiens
aagctacagaaaataacatattttttccaattcaaagaaatttcctcctctgcagccttctccctcccacagaaacatctcctgtttatcaaaggtcccagcacccttgaactccattcataagttcagtacagaaaattgggatcattaaattccttggaaaagaatcctgaaattgcagtatttagagttggattagtatttagagttgaatgtggatagaaaatgtatagttattggtaaattaaggataccgtgctacagtttttctaatttatgagtttttgatatttggcaatatttggatatttctgttataaatgtctatgaaaaacatgcccattgtaaaaaaaattagaaaaatttcaaaaaatgtacttagcaaggttagtataaaatcataattccataatattaaaaaaatcataatcctgtcatcttaaggcaaggtaactggcatttccttgtcccagtgttggtttagataatattttctttataagagatggatatagataccattttttgtttgtatacatttttatctaactttatgtcataagcccaatggctgcatagaattctcccatatagaggtatcatagttttcttccagcattcctatagtaatggcagtttatgttgtttccagtgttatgctataaataaataatattacaacctttttcataaatctttgcctttctgattatttctttaagataaactttcaaacaagaattgcttggtgtcaatgttttaaaatttcttatgctgggaaattgacatctggaaaagcagggtacccactggatattggtaccccctggacccgttctttgccatctcttaagaaatgaagtgactcaactatttagttaatttttaaattatgaataacattgaacaatttttcacatgcatttagtctttacctgtatcttgaagtcacgagtgcattttcaccttagagcatgtggaatatctttgcctggaattc

SEQ ID NO: 199480 - DNA, 1000 bp, Homo Sapiens
tgccatgacagcatgagttggttggccaccagccaggaggtggcactttcaagacagcatcagctgtagtagtatggggagaatacaagcttgccctaaacacctggataagtattcgggtttctcaggcgatgggcagggtcaaagagatcccacgagttaaggtcttttgtcttcagctaccagggtgagtagagaaaaacaatcaggtgggggcagggctggtgtgtctgagcttaaagcttttcttgggcaggggcttgctgtggctgctgtggggattgagtgtaggtctcaggccaatggagttatgttcccagggggattaaggctacctctgccgcatcatacaggttgccagggaagtcagggaaagctggccatgacaggcctcagctcccacgcagccagcaaggccagtctcactccctccatgccccaccaacaacacacaaagtttatatccagtcatccagtgagcagggctgagatcttgccccagactacaagcctctccactaagaaaacaagcagggctttgaggctttgcccttctctgcttgctgcagcttctgtgctcacatctgcacttcccatttgccctcctcctccctgcttgattctgccctggaaaattcatgcttggtcaaaattatgacaaagttcagctggatgtttccttctccctgtggtccttccccaattccactggcagccctccccaaggaccccatgagagaaagtcagaaatggcttctcggggaaccaggagtaccttgagggctctttctgctgcttcttctactttcatattttgctcaggtccctaaattcattccagctctaggtaaggttatatccttttcctgcgatctcgattttcaggtttcccagtgaggatgtgtgtttagaggtggactgcctccctctcacacgttgggcactcacagtttttcggccgtctcacagtttgcagcagcaagccgcttcttttgaattc

SEQ ID NO: 199481 - DNA, 1000 bp, Homo Sapiens
tgaacaaatatctattgttttctaaggtatatgaaaaaatatatcttttgaaacagttattcctaatcattgtcaaataaatcccaagtaactaatttaaggcattatgagaatgtacctttcttccttcttttttttgagatgaagtctcgctctgtcacccaggctggagtgcaatggcgcgatatcggccattctatgggtgtattttattgtattcactgcaacctccgcctcctgggttcaagcgattttcctgcctcagcctcctgagtagctgggattacaggcgcccgccaccacgcccggctttttttgtatttttagtagagacgaggtttcaccttgttggccaggctggtcttgaactcctgacctcgtgatccacccacgttggcctcccaaagtgctgggattacaggcatgagccaccacacctggccccttttttccttcttaataaatgcctaggccaggggtggtggctcatgcctgtaatcccagcacttggggaggcccaggcatgtggatcacttgaggtcagaagttggagaccagcctggccaacatggtgaaaccccatctctactgaaaatacaaaaattagccaggcatggtggcgcacacctataatcccagctactcaggaggccgaagcatgataatcacttgaacccggaaagcggaggttgcagtgagccgagatggtgccactgcattccggcctgggcagcagaatgagactccatctcaagaaaaaaaaaatgtgtaatttcaaaagtcatgaaactacccttgtctgtaaaataaggtcttgataaatggttaaatatcaatatttggataagctgattctggcatatctgtatgatggaatactatcagcaataaaaaggaacagactactgatgtactcaggaaaactgataaatctcaaattcattacgctaaatgaaaaaaaaaagcctacatactctctgataacagttacatggaattc

SEQ ID NO: 199482 - DNA, 1000 bp, Homo Sapiens
tctttgaggagggaggcatatattagggagagcatatattaaggaggatttgaattttagtctacatacttttgtattgtttacaaagaaaatacatttagctactactcaaattcagtaactaagattaaaaaatatatatgctacatcagtattgtaacacactatatggtcattaatatgttaagatatgttgtaagatacactttttgatttggaaattttcccattaagtagaaaaaaacccaccaaatttcagagaaatatgaacagtatgtatattgctttataaaagttatcacatgtatagcacacacatacagatgttagggaaaaacacacactaaatggtatttttgaatggcgagatgatagtgccttttcttttcctctttatacttgtgacagttaactttttccatagtaatgacgtgtaacaaaccactccaaaacccagtgccttaaaacaacagtcattttttttctcattcacgaccatatgtctatggggtcagctgttttaagttgagctcagctcagctaagattggcttccaactgtagtttgggtccaggtctgctctctgtatcccatcttccttagaccagagggctaagcagggtatgttcttttggcaataacagaagtgcaaaggggcgagtgggaacctgtgttatctcttaaggtttgattagaggttattacgctgccctttctgttcccatgtcctaaatcagtgggggagaaaaatagactatttctagtggaagggtctgcaaagccacatggcaaagggcatggatataggaagtggtgaaatttggaaactatcatgtaatctaccacaacttaaatgtgttttctaatttacctcactgtgcatgtatgttacttgtggaataataatcttattatttaatgtgtggttcctcatgttaccaaaaagcggtcctgatccagacccccagagtgttcttggatcttgtgcaagaaagaattc

SEQ ID NO: 199483 - DNA, 1000 bp, Homo Sapiens
tctaagtataaaagttgcacatgtactctttttctgtttataaaagaaacttcatgtttgcttagtttggtgaccatccccatcataacacctcgagttgtcaatttgtttctatgtttacacacaccggtatacatatcatacagatgtatttttaaattatattaaaacttgaatatataactataactttattttttccagttaatccaatagtgatattttcctgttagcaaatatttctttttttaatgattacaaaatagctcatctaaattacttaactgtccccatgtttttagacatctaggtcacttagcagttttaccattataaaaaaggttctctcttaattattggcatgtatttttaagtacatccctaattattaacttaggagggactcaatatagaactgataatgagagtgaatatatattgagcattttctattggtctgaccctgagctaaaccctttgtaagtattagctcatttatctctcacaaaatacctatgaagtaggtataagttactatcttacgttctcagggtcaagaagctagtaaggggtaaagtcagagtttgaacccaggattggccctttccaaggcctgtgctcttcatctcaatgaaattagtgtgtcaaagaatgtttgaactattttaaggtttaatactgagtggctgtgccaaaaagctatgccaatttgaacatcttgtaagaatcagtagtgttaattggtttgacagaaaaataaaaatgtaaatgtttataacatacatgaaaatattttaacttctatatctttctcattaaggcagctgaatattgctgtttatatatttatttccatttccatttctgtaaaatctttttcggcttttgctttttagaaaaactcacagtccttttctttattgatttaaaaaaacttcattttttccattttggcatttgtctttaattttgcatatatttttgatttacagaagaattc

SEQ ID NO: 199484 - DNA, 1000 bp, Homo Sapiens
tataaggggtttattgttatttttaaaggcactaaaactgtttcttttaatatctctgttttgaatttagtaaggtaaataccagtgaatataaaccatatgaacagaaactctttcaggttcttaatattttttaagaattcaaaagctgctgaaacgaaagcagtcaagaaccattactttaattttaaaatatatatttgcaacatttctattaatatgttgagtatttaattgactcataaagagcatgcatatattttaatttttaaaaaagttcaatctcttatttcacacctttaataaattatattacaatacattgtgattactgatatatttcaacatatatttccttttttttgctgtttttcatatatttttcatttgcctttctcagcattttactatttccatagcacctattgaattaaccacattttactctaccaatctatctctaaaaatgcaaattgtcactctttatattcttaatacaaaatataaactaatacatttattttttaaaaaaatcagtgtttctaatttttttaaaaaacatatggagaattttgcactattttacttcttagcatgttccactctgtcccattttccagcatcttctatctttgccatgaaaggtacaatttttaaccatatgttaattctgccaccctgatttaaaagtccagatattttttccaatgacagacaatttttgccctaacagaaactctggtacccactgttaatataaaattttctgcccttacaccttcaatgacttctgatttttgttttttttaagtatgaagagtttaatatttaagactgtgatcaatgttaatccaagacaagtagtctagtctgattcaccactgtttccctacctaaagcacacacttcagctcaactggattacaggacactccctggacatatgccatcattagccatctctatgtctgtgtccatttgctatttctgccttgaattc

SEQ ID NO: 199485 - DNA, 1000 bp, Homo Sapiens
gctagctagttttctctcctactttctttgtgtccttttctcctttcttactttacagtgtatttttcttttcaagagcacctgtgatttctgaatcaggtatcttatgtatttctgagacttcagaaaatctaggatatggaggaggggaactgaaactttgactgaaaaatgcgattttaggctgttataagcaattaaattacgtactagttagttgtctctccaaacaaggttatgattaataatatttagctttccatttttatataggatataaaaaagatgaattgttctaggccatgcagtatgtattttatagcatactcttgatcttagatctgtcactaaaaaaacaaatgaatatatgtataaattaatatgagtgttaggtccttgaataagaatgagatatatattttctccccttttggcaatctctatcacagaaatgggccaagttgtcaccacatttagttcatgggaaatttgttttcttttgaaagtgctactctagttttgtcgtatgaaataacaacaatttgtatttaattagtctagtacttcagaataggccttcaactgtttcaactatttggaaaagtcactctaatttttgttatcccagaaaatctttgtattctattaagaactaaaatataatttgccagtccttttattattactattgtttttttaaaactgcaagatatggtcatgagtatctggaaatggctcagaaaattaaaaattatagctaataatattgcattatttctcacatggttacattaagaactcacatgatactaggtgccacaagttttacagaaaaaaaaggcccctaaaacaaatttgaaagagcagtttctcagtgattattaaaagaataatacacttaaaaataattgtgtaatgataatttttaaatataaaagtgatatttaacaaattcagctaaatcacagttctatgaataatttatttcctatgtgaattc

SEQ ID NO: 199486 - DNA, 1000 bp, Homo Sapiens
ataaaggtgtgtgatgtggtgccaagatgtgcgactaaatgattttataggtatatataaaaattatggaaataaaatgaaaaaaaaccggaacatttatttcagaagatataactaagggtttctgagataggattacagatctagcccctccctatttgtaacaaagctatagtgacttatcttttactagaagagctgggggatttaaacatagaataagtggatgatttatttcagaagcacaaatatataaacattgatgataactttttttcagaagtgaagcaatatttaaaattcataacttcaaatgttagacatgagtgttatcatactttcacgctaaagttatgtaagtcttactctttattgtatattcccagtgaagtgtaatctttatttttattgtagctattttcatgaaagcatatttttatacaaaacaaaatttcctaagtaaaaaatataattaattaaattaagagcacatttgagttggagtgtggctattgaaactaggaaggcataattagggcatgatccacttcgtgggaatttagtctaattgaaagccaattattttatttacttgtaattcacatgatgcacttgttaatagatgcagcttctaaccaagtatctaggagggaacgaagagtcttgggtcggtgatatttgcaaattcagtggtataaagcaaggaaaaagaacattttcatacgttaaaaaatgtttgaagaaatatttatatttctggttcctgattggtaaattgcttccattctaaactttttatattaattcaacagtaagtatctttataccataaatcactatcaattataaataagtagagttttactgttcaaatatttgtttttatcaagtaatatatgcatgtgccataaaataatcacatggtgatgaagatcttataaagaaaattagcactcttgtaaaaccttctcacttccaagtttagcctccagaggaattc

SEQ ID NO: 199487 - DNA, 1000 bp, Homo Sapiens
ctgaggtaggtggatcacctgaggtcaggagttgaagaccagcctggccaaccctctactaaaaatacaaaaattatctgtgcctggtggcaggtacctataatcccagctactcaggaggcggaggcaggagaatagcttgaacccacgagacggaggttgtagtgagccaagatcatgccactgccttctaccctgggtgacacagcaagtgtccgtctccaaaacaaacaaacaaacaaacaaacaaaaaacaagaagttatattagttttctattgctgctataataaatcaccacaaatttatcggcataaaaacacaaaattattatcttacagttgtctaggtcagaagtctgaaacaggcctcacaaagctaagatcaagtagtgagcggagcttcattcctttttggagattttggggataaatcattgtttcttttgcatgttccagctttagaggctgccctcattccttgacttgtggcccacttcctccattttctagctagctatatggattgagtctttttcccactgcattattcagatttctttttctcctccctcttccacttttgagaacccttgtaattacattgagacaacttggataatccaagataatctcactatattaaggtaaactgattggcaaccttaattccatttgtaaccttaattccccttggccatgtaacataacatagtctcaggttctacgtattaggatgtaggtatctcatgggggccattatcctgcctaccacagtactcattgtatttttttcaccattacacactcagaataatgccaggtttgcttatgtcttcgataggaagtaaaaattacttttatttttatttatttatttgtttatttatttattgagatagagtctcactctgttgcctaggagggagtgcagtgctgcaatatccgctcactgcaacctctacctcccaagttcaagtgattctcatgcctcagcctccc

SEQ ID NO: 199488 - DNA, 1000 bp, Homo Sapiens
cctcccctccccctcctccccctctcctgtcctcctccccttccttcccccacccatcctccccctcccctccccttcctccccgtccacctcccctgcccctcctccccatctcctgtccctcctccccctcctgtccccttccttccccctcccctcccctcctcccccaccccctcccctcctcccccaccccctcccctcctcccccaccccctcccctcccctccccctctcctccttgcctaagcttaagttttcttgtttcctgtctctgtagtctcatcggtcttgttggagttcctctgtgtatttgtccttgtctcgcccctctagagggtatgtttcccaggatcaaggaggcgtccgtcttgttcacatccattccccagaccccacacagtgcctgactcagaggaagccacaatcaagatctgttagatgaatgaatgaactaactaaccatgcaattaagaagtaaatctatgaatccatgaagcaatgattcactagatcaattacttaatgagaccaggggacataggcaggagagagactgagtttcccctttagcaggaatccttgccatacacatatatacatatttgatcatctgatcttccgcattcacctctaagcccttccagagcagtggtggggcaggctcctctccagggtacccagaacgcaccatcagccccaggcctggcacacaccgctgctcgatgaaccttgatttaatgaatatgccaaggccagtcccatggcctctcatccatttttggggtcaccctggctttgtcccacctcaagaccttcacacctgctgttccctgggcctggaatcctgcccctggctttttcacgtgaagatcgccctccgctggaacacccacttccctgggcagctgccccgccgcatttggatcgtcctccgctggaacacccacttccttgggtggctgcccccgccacattaggagctgcttccctggaattc

SEQ ID NO: 199489 - DNA, 1000 bp, Homo Sapiens
gtttttcacaatgacaacaaagaaattgagtgttcgagtactagattggggctggtttgtgtggtaaggaaacttacaggaatctggaaaaatgacaacctatggtaggcaatcaggaaatatttggcaaaacttttaagtgcttttgaatatatgagagactacgcgtgcacttaatgtgtttggtgtttggagtttgttgccatttgctctatttctaaagctaatacacaaaggacaagctcagatatgaactataatgtttgtgagaacggagggttatatagagagtctaagcaattttggaggactggagaatgaagtagtctctcatttccgttagtaaaagataaaattgagaaatcccttgagccataaatatggattactattcaagacacaacctcagagcaaaaacaaatcaaggtgcgtgccaatcacacatttctttaaaacttcagattgtggcctccaataattcctttcagttggaaaaaagtggctgaggaaaagtgacaaaggacttggtccctgagagcattgataagcaagaagtacttgtaattaagtctagtgacagatacctggctcaaaaagaattttggtatgactacaggcctagaataaagaacataagtcaataaactttctgaacaagttggattgcttaatactactgctagcctggattttttttttttaaagagtatcactatattaaacacaaactgacacttgtgtgccaattccatggccaggaggcaggctgagaaagcatcccaaccaccctaaatgtcagaaaccccaatggcctcttaagatctgaccgaagaactaaagaggaagggcttcccagaaggtggttccaagagccatggagaaaatagactgaggagccattcgcaggaagacaaactggggcctaatcacaaaaacaggtgctatcttcagtacagaggatgtctgcaacatttgcccagcaaggtttcagaatttcatg

SEQ ID NO: 199490 - DNA, 1000 bp, Homo Sapiens
cggtaaggcttgagggcagcccggaggctgtcccagccacactgggctcctcacctggggccctgctggcatctggggtggatgattgtttgttgtgaggcagaggctgccctgcgtggcggggtgtttggcctccacccactagatgctggtagcataccctgcgttgacaaccagaccgtctgcaggcattggcagatgtcccgtaggggcaaatcacacctcattaacggcccttggtctagacacaggagtactagagaggaagtgaaagctgccaatccatttcctagtatacttggtggcatcacagttttcataaacacactttttatattttatttattatttattttttttatgatgaagtctcactctctcacccaggctggagtgcagtggtacaatctcagctcactgcaacctctgcctcctgggttcgagcaattctcctgcctcagcctcccgagtagctggattacaggtgctcgccaccacgcccagctaactgttgtatttttagtagagacagggtttcaccatgttggccaggctggtctcgaactcctgacctcaagtgattcacccgcctcaacctcccaaagtgctgggactacaggcgtgagtcactgcccccagccaagacacttttttttaatcaaaactctacttttaacaaactgtagaaatgatccctgaaagtatagtcttaaaactcaacttttaaaacaataatttgaaagaagggacaacactcaggagtagagactgactggaggtgggaagttacctcagtccttaaaacaagtgcctcctgggcggcagctcttagagatgacacggaagcatgaacaatggaagaaaccacagatcagtgagactattaacatggagaacctttgacactgtcgagaaagggacagacaacccggagaagtggtgaaaatatttgcaaatcacatctgacaaagatcatgtatccagaatatgtaaagaattc

SEQ ID NO: 199491 - DNA, 1000 bp, Homo Sapiens
actccagcctgggcgacaaagcgagactccatctcaaaaaaaaaaagaaaagaaaaaagaatatgcatttataaaacagccaaattttactttttcaaggggaaatatttgaaaaggcagtacagaaaagtggttgaaagcacaggatttaatcagacttagattaaaatcctggcttaatcatttactttctgcacgatcttgggtaattccatcatatcctgcctcaatgtcctattttatttttttaattttttttgagatggagtttcgctcattgcccaggctggagtgcagtggtgcaatcttggcttaccataacctctgcctcctgggttcaagcgattctcctgcctcagcctcccgagtagccaggattataggcatgcgccaccatgcccgactaatttttgtatttttagtagaaacggggtttctccatgttggtcaggctggtctcgaactcctgatctcgggtgatccccccgcctcggcctcccaaagtgctgggattacaggcatgagccaccgagcccggcctattattattattattattattattttttgagacagggtcttaccctgtcacacaggctggagtgcagtggcgtgatcgtacctcaccataacctcaaactctttggctcaagcaatccttccacttcactttcccaagtagatgggactacaggcacatgccaccacacccagctaatttttttcaaagagatggagtcttgctatgttaactaggctgctctcgaactccaaggctcaagtgatcctcctgccttggcctctcaaagcactgtaattacatgtgtgagctacctcacctggcccatttcctcatttttttaaatgtaataaataagaaattttaaaattaaaagaattttgaaaaaaataaaatgtaatacaaccaatctggaggactaccccaacatctatttatttacttataatcacatattctatgagtatattacagaaaata

SEQ ID NO: 199492 - DNA, 1000 bp, Homo Sapiens
aattcatatttcaggttgccaaagctatttaaaaagcaatgtaatacaacagttgtaatggaagaacagtcagaagataaaagtaaagcactgataaaatatcatatgagtctatttcaaagttgcaaaattcaaggttaaaatatttctctttagagcttttgaattagttgaaggggatgaaaggcaagctttatgtaaccacttttccagtgaaataaaacctgtttacatcttggtgactgaaacaccttccagctaatttagaattctcaagtggccacatgaaaagattagaatttctataaaaagaaatgtcccagttgcgttccagttcaggtatagagaacgcagttactgaagggtcttcagttcatctgagctagctgagtgccacccatcggaagctgctgcgtttggacactagaacattagaagatgttattttattcaacagaaccagcttggtagaaatgttggaatttaataaagacaagctctctttgtggtgttttactgaaagaacacagtatctgcaaacctagagtccatttcccaagctcacgtttgttgttgccagttttatttttacactacagaaaaggtagaaaattcctttggaaagtctgcctccctcccttccttccttccttccctcctctctctttccttccttccttcctctttcctcccttccttcctccctcccttcttcctcccttcccttccctcccctccctttctctctcctccctccctctccttcccttccccttccttccttcctccctccctccctctccttctcttccccttccttcccttccctttccccttcctcttccttccttcctccctcccttctcccttctccctcccctcccctcccctctcctttcctttctttcacctttaaggtcaggggtacatgtgcaggtttgttatacaggtaaacttatgtcaccgggtttgatgtgcagattattttgtcacccaggtg

SEQ ID NO: 199493 - DNA, 1000 bp, Homo Sapiens
acacacctttttcagtttaacatctctaaaatcagaatcatagtggtacaaaaaataaggtgcatcttacaatgaaataatttatgttgctatgctcttatacataagaaaaataatagttatcaaatatcttaccaaattgttttgaggtgactttcagcatataaagaaaatttcaaatatcttacctatcagaaactgcctcagaaaaataaaaacagaatctggtttaggaaaaatagtttttatgctaaaattgtaataagtaaattgaaggcattagaacaggaagcaaaatgctggggaggtaattaatgatttaaagtttctagtctgactggaagcattcattccacacactgaagcataaaaattatgtttatgattatgatattatatcagaaaataataaatgtatgaaagttatgttttataaatattttagataaaatgtaaatattacaatataattttccatagaattcttatcttaggaagttgaatagaggtcagcttaaacccctttgatgaaaaatcttagggtaaaccaaaatacttgttctattaaaatgtcaccaataccaatattactagagcttctacaatacttactgtattatgtgttctgacccaggcatccgtcataaggaacatgcttgtggggacaatctccgctagatgccagcaagacaattttaagagactccaacttactctggggatgtggtatatttgtcagtagactcaggctcaggaatctgcataatgaataaatatgtgggatttattagcatattcattttttaataaaagtacagtcaatccatgtaacagtaaaggactaaaagtagaattagatgatagaggaaatgtggagaaggtatagctggttgaatagtggtctccaaaaaaatatgcccaagtcctaacactggcactaaatgtgaccttacttgtaagtctttgtagatgtaattaaagattcgcaaatgagatcatc

SEQ ID NO: 199494 - DNA, 1000 bp, Homo Sapiens
ttgatctgcttttcttactgggcaagatgggaagacaggggttccagagacagagaataatcccctgatctgctgaaatccactccagacggggggaacgtgaaccaacacagctacagctctggcagcacctgccacctccgagtccaagagaaaccacatgcacgcatccgtggcgggcattcctctgactgctcccaccaacacctaagctttcactccagcaagaccccaacctcaggatggtccggcaactcttgggtgggacaagggtccagccccgccaggctaccagcccctgcccatcgaaccagtcaaagtgcgctctctcttgtatgctccaatctgtccctcccgaggctgtgtcccaggctggagaggctaagtgggtgacaaccaacttggcctcctacaagaacccacagggaggtcgggtgcaatggcttgcatctgtaatcctaccactttgggaggctgaggcgggcagctcacgtgaggccaggagttcgagaccagcctggccaacatggcaaaaccccgtctgtatttttaaaaaatacacaaactgttgtattttctatttgtattgtattgtagtggacagggcctgttatcccagctactccggaggctgaggtgggaggatcacttgaacccgggaggtggaggttgcagtgcggccgagatcacaccactgcactccagcctgggcgacagagcaagacatcatctaaagaaaaaaaaaaaaaaaaaacccacagggcatgccagcgacccctacaatcgaaactgaaaaagcaagaggagaccgttctcgcttcgacctccgtccagctcagcaactccctgctggacacacccctacctccttgtgaaccctgcactctctctgacccagaattgcagaaaagcagattataaaaaataaacagaggagcgctctgcagagccaggtgaatcccacagccaccgtcctgctggagccaggcccactgaattc

SEQ ID NO: 199495 - DNA, 1000 bp, Homo Sapiens
ttaggccacaaaacaagtctcaacaaatttgaaaaaatcaaaattatgtctgagggctctgttctgttccattggtctatatctctgtttttgtaccagtaccacgctgttttggttagccttgtagtgtagtttgaagtcaggtagcatgatgcctccagctttgttcttttggcttaggattgtcttggcaatgccggctcttttggttccatatgaactttaaagtagttttttccaattctgtgaagaaagtcattggtagcttgatggggattgcattgaatctataaattaccttgggcagtatggccattttcacgatattgattcttcctatccatgagcagggaatgttcttccgtttgtttgtatcctcttttatttcgttgagcagtggtttgtagttctccttgaagaggtccttcacatcccttgtaagttggattcctaggtattttattctctttgaagcaattgtgaatgggagttcactcatgatttggccctctgtttgtctgttattgttgtataagaatgcttgtgagacacaggaaggggaacatcacacacaggggcctgtcgtggggttgggggaggggggaggaaaagcatcaggagatatacctaatgtaaatgacgagttaatgggcacagcacaccaacatggcacatgtatgcatatgtaacaagcctacactttgtgcacatgtaccctagaacttaaggtaaaaaaaaaaaaaatcaaaattatgtcaagcattttctcaggtgacaatggaataaacctagaaatcggtagtaagagaaatgttggaaacaatacaaatacatggaaactaaacaacatgctcttgaataacattgggtcaatgaagaaattaagaagtaaataccagcctggccaatatgatgaaagcctgtctttactaaaaatacaaaaattagttgggcatggtggtgggcacctgtagtcccagctacttgtgagactgaggca

SEQ ID NO: 199496 - DNA, 1000 bp, Homo Sapiens
gacgaatccactaagactcaaactaccttccaaagatgccaaatacagtcatggttagagtatagatccattcacaaaccatttcatcaatatgaagcaagggcaagaaaaggctttttggttttgatttggtttagtttgctactacaaactgtcctgccatcctatgggtatctcatttagtttgctgtttcagaaaagaacaatgaattttgtgcttcaaaagaggctttttgcctgttctgtccctttaaagtcaatagctttttgaaattgtcctgctgaccccaaataaaaaattctgaaagagatgctcctgactcttcagaaacccattatgtgacaggactgactgagctaatcctgtgagtgttttactgcccagcagagatgtggtggctttggtggattattgtctggctgccctaatggaattcctctgagcccagtgggagatggggaacgattttctgctcccaagaaattaactgctctaagtctgcggaatgcggtaattttttatttcctaaacaaactctttcacctgtttcagttaacttgtacaatgtcagaaaagcatgagggctcagaggagtgaaactaacctgattttattctttcattcaactatttattaaacagatactgagtgccaagtactttgctaagtaactgaaaactaatgaaaaataaaaaagaaggcagaactataaagcgggatctgatatggtaatacgttatgtttttatttggtttatgaaacgctttctaacatgaaatttcagtaagcttaaaggacaaccctgtgaaaaaggaagcgtggttattaatatcattttatagatgaaggtcacataactagtaggacacagtgccaggaataggactcaggtctttctttcaattccctcttcctcatatcataccccctgacatttcaatgcagccacttttgaaagtggaatatttgaaaaatagtctattatattggttgtcccac

SEQ ID NO: 199497 - DNA, 1000 bp, Homo Sapiens
attgcatgccaaccaaagccatagagatcggtcacatggccccccacgcttgaaaagtgatgatgccaagatgtcatgctctctttcaaagcaaaaggatcaaggacttcagaactgataaattcactttttaaacattgaagcaggattatataatgtgggggccacatttattgtatcacaatcccgggagaattgagaaaaatcattatcattaaccattagtgatgagggcaggtatctaccctaatgccacaagtgtttttcccaacctcgaagcttttcttccatatttcttccgaaattctacactgagttttgctgtctgtcttgcaaacaatatttctcccaacctgcttcatcttacaaagctatgactaattggccaacaccccatctaattaaattaatgtacaatgccaaaaaagtaaatgttagtgcccacatgactgcactggcatgcgtaccctatactagggacagatggagtaacacatggcagagtgtgtcctgaagacatggactggtgacaacagaaacatcaggcatttatgcttgaggatataagagcaagattgggagaataattagtacacagtagtcttaattaggcaattattgacattccttttataaaaaccatggtggagaaattgaagaataatgatcacaacgagttatttttaccatttcacaatctcttttagacttacctaaatcttctaagatgcacttccatctgtttcttacttcccttcgaacctgccgcagggtatggatatcatagttgagcttctgccactcctgcaggaaaataaaagtttagttttatttataccccttggcttaaacctctatctcattcccaaacttcatgttgcctaaacacctggctcttctcttttattaatcttcaaagcaagcctaaaagaagagaaggagatggatgagataaagttgataggaatactatcagctaccactgctggagaatctgctc

SEQ ID NO: 199498 - DNA, 1000 bp, Homo Sapiens
ataagcaaggttcaaagaactcctagagactttagtaagtaaaatgaattgcggatactcaagaaagagttgaacctttcccaatcttatttagggaaagagcactttcttcaggaccactcaaaatagggttgtctggaataccaagtttggaaaagactcaatgctttacggagaatctttccaagtagccacctcaacattatttttctacaaagttctgtgccaatgtgttaattcacaagaaaagcaactaaatataaaactgagttcccctaaaatgaaaatactatactgctaaatatactgtctcagacagtacgagaccactcagacagagtgggaccaaagaccattttatcagttaatatcatcactgactcccaaggtaacatccatagagattagaattatggctatgaaattacaaacaattaaaggtattctatacaaaagtgatcaatactctactagaactaatcataacagccaggtgtgatggctcatgcctataatcctagtactatgggaggccaaggcgggaggaaggcctgaggccaggacttcaagaacagcctaggcaatacagtgagaccttgtctctgcaaaaagttaaaaagaagaaaaaaattataacgtatagatgttgtctgatgccccaccattctctgacatcaacttaagtctaaggattgagagaggaatggtcaactgcaagagcattgcaataaaattttatttcccacacactgtgtaaaggtttagaaatacctttctaaatttgaaaggtttaatttgaaaggtctaaatttgaaaaggtttagaaataccaaattagcaaacatcagagacattcatcagtataaatacattcctactttttgagggaagacagcattctggaatcagaaaaattgctagaaaatctaacatgggcagaaaaagcaacctatataagctgaagacagctggttattggttaacataaaactcagaattc

SEQ ID NO: 199499 - DNA, 1000 bp, Homo Sapiens
agatgctgtctgagaaccagggattggagtcaaaaaccttagaaatttgcctgatgttctattctgctgtgactaagctgagactcaaaccacaatataaaatccttcctgcttttccttcccctttccacaggcagaggggcctccctgtggacaccaacacccagccactattgggggtgggggtagttctgccaggccacctccaatgtacacttaaagcccatgggctcttcattttagtcagctggtggggaatgctgtccggcctgggatcacccttcagggcactgggctcccctctggcccaaggcaggtccagaaattctgttcaggaactgaggcctgaacctggggaccccaaaagcctgcttattcctccaccccactgtggctgagcagtaactaaggtgcaaaacaacaacatccctttacttttccatctttttaaacagaagaagcctttcaccatagccacctatagctgggaatgtgcttgggaatgtgctgggtcacactgtagtcagcacatctcagagcccaaggcccatggtgtactactacccaggcattgctgctggttactcggggcccatgggctctttagtcagcagctgatgaatcttgcagggactgggtccttcctttaaggcagcaggttctgttttgtccagatggtgtctagaaatgtgtataggagctagggcctggaatgggggcctcacgactctgcctggtgccctgtcctactgtggctgagcaggtatccaagatgcaagacaaagtcctctttactcttcactttccatcccttaagcagaaggaaggagacatttttgcccctgagctgtactgcctaggtttgggagaggggtggtgcaatcactcctttagccaccctgggtgtctccctaggtcacatgccacccgaagtcctctggctctgagtccagcccagcactaggagttgtttaggagttgaagtccttgtgtacctagg

SEQ ID NO: 199500 - DNA, 1000 bp, Homo Sapiens
tttaaaattggattatttggggttttttgctattcaattgtttgagttcctgatatattctggttattaatctcggtcagacaagtagtttgcaaatattttctctcattctatgggttgtctcttccgtttgttgagtatttcctttgctatgcagaagcttgttagctcgatgtaattctgtttgcctattttttctttggttccctgtacttttgtggtcttaccaaaaaatctttgcccaaatcaatgtcctgaaacgttttcttctagtagtttcatagtttcaggtcttagatttaagcctttaattcatcttgagttgatgtttctatatggtaagatatagaggttagcttcatccttctgcatatggttatccatttttcccagcacattttattgaagagactctcttctccccattgtatgtccttggtacttctgttgaaaatgagttggctctaaacatgtggatttatttctgggttctgtattctgtgccattggtctatgtgtcttttgttatgccagtacccttctgttttggttactatagctttgtaatatattttgaaatcaagtagtatgatgtctccagctttgttcttttcgcccaggattgctctggctattttgaatcttgaatggcttcatacaaattttaggatttttttttatttctgtgaagaatgtcattggtattttgataggggttgtattgaatttgtagatcactttgggcagtatggacattttaataatattaattattccaatccatgaactcttaaatttctttcatcagtgttttatagtttacttacatagatttttcacttcattggttaaactgattcctaggtattttatactctttgtagctattataaatgggattggtttcttgatttctttttcagattgtttgcttttagcatatataaatacaactgatttttgtatgttgatttttgtatcctgcaactttactgaattc

SEQ ID NO: 199501 - DNA, 1000 bp, Homo Sapiens
ccatgatctgcccgccttggcctcccaaagtgctggggttacaggcgtgagccaccacacccggcctcagaaagtattcttaaaagcagtctattataaacaaaccaaaacctgtcaaaagaagggagaggtaacaggattgggcagaagaaaaagctgaatcacaatgcaggaccatggaaatctcagctaacccctggggagctctggagagactatcgtccgactgtgtttcccacattgaacggagctgtctgggcctttatcctgctgcctcactccatcactaggtgtggactatgccaggaaggcacagtcttgggcaaagtggctctttctagctgaggctgacattgaagaaactgacagctgaaggccatctgttggtcacactccttgcagctgggcagcaagcccctccttgacagagaatctgggtggcacatgtctgtgtccactacatcagcagtgtctacctcagtgaatctctgtagtagacatggagatgtgccacagatgatcttcagcaaggacttcctgtttcagctgctgggagggcagccattctgatactgggaaggaagggcctaggcaggagagacaccagtgaagatgctaggaatttcctatcaaccattgcagccatctcacagtcacggggtatgtgtgaccatggaaacaatgcaagaatttccaagaactatgctatggggtcatagtctcaggctatttatgaaatgcatttattctgaaattgcatgtgcaagttggttgtttggaaccctaagtacattttttttttcatagaaatagtaagtaataggtttccttgtaagcccacaaaagaccacaatgtacctgaagtatagcatgatttcagttttaccaattgttatttgtaaaactgtgtcttcacagaaaggtacattccaggaagggacacgccttccactataggtggtcatggatagatccacacagaaggcagcactttatctct

SEQ ID NO: 199502 - DNA, 1000 bp, Homo Sapiens
gatagagatgcacaatggtctggagtttgctgagtgttctcatgaccaggtttaggttccccgagaacacgggctgcaggagagagaatgcattccactttccttaggggtggttgctaagagtatgtgagtgggcagagtcagtcttctgcacaaagggcagttttgaggtgttgaacactaaccagacatgatcatctggaaaaacgggtgaaaaaaatgccagtcagtggtgggaacccagagccttctgtgtctatgtccagtggctgcacctgctggctgttcaaattctccatctggttcccaggcgaagctggagattcagcacagatggagcacatttctccagcttgggagagcattcctgggctgcagagaaaggactgggccctgtgggggaataactggatccaggagtgccgtgtcttggaggtggttgtgatgcgtcaggcttttgtgggctgtggagttgggaatgtcagccccagagaaggggcctgagtcctgggcctttgttaatgtagtgtcatcggcagcactcgagggtgccgtgcacaactttcccgatgggtcagtgtcgaaggaggaactgacctggcgcatcagtacctaccgcagcactgttacaaaggtctcttggttcatggttttcattgtccttgtctccgcttgggatttggtcctcagtatccatggctaccccacgcaggcctcctgtggggtcagtctctctgggtggttctcctaatagtggggtaccagcatcaccccaaggctggccatggacaaagagcctactcacgttctctgtattttggggtccttttgccactctgcccatttctggggcctgtcccgtgtccctctgccatccccagctttcttgtatcatctgagctgcctagcagtgtctcttacctgacacctttcctgcttgctcctctgtgttatgccagtttatgcatgtgccctaccttctcaactaggtcaggaattc

SEQ ID NO: 199503 - DNA, 1000 bp, Homo Sapiens
gagctgtcctgtgcattgttggataattccttgttgtgtggggagctgtcctgtgcattgttggataattccttgttgtgtggggaggtgtcctgtgcattgttggataattccttgttgtgtggggagctgtcctgtgcattgttggataattccttgttgtgtggggagctgtcctgtgcattgctggataattccttgttgtgtggggagctgtcctgtgcattgttggataattccttgttgtgtggggagctgtcctgtgcattgttggataattccttgttgtgtggggagctgtcctgtgcattgttggataattccttgttgtgtggggagctgtcctgtgcattgtggggtatttagcagcatccctggcatacccactagatgctaatagcgctgaactagttgtggaaaccaaaaatttctccaaaagttgtgaactgtgtcttaggagacaaaattacccttggttgagaaccactgggataattatacctaccgctcagaggttggggtagatagtttgcaaaaacgcccactctccaaccctccctttaactacatcccttgcagttttgacttcgcagctactcccatcacgaggtagattttattcccccaccttgaatttgagctgaaatcatgacttgctctcaccaacagaatgcagcagaaatgatgctgtctgttccaggcctagatttcaaaaagccttggaacttctactcactcttttggaaccctacaggagcctgggccagcctgctggggatgagagccactagctaaatcactccccttgttccagacaacatttgggttccagctgacctgcagctaaccacagacacatgagtaaggttggccaagaacagccgagcctggcccagaactgaaaaactgcctagctaacccctagagttatgagcaaatagaaatgattgctgtattaagcccactagatttgggggtggtttgttatgctaatgaattc

SEQ ID NO: 199504 - DNA, 1000 bp, Homo Sapiens
ctcactctgcaccatttgacactgtttgtcattctctcatttggatcctctctgtagtttgctttaagaataactctcccctctggttttgtttttcaatttcttgctgctcttctgtctccgtcatgaatctatttcctctacatgtacctcaaggttcttgttcccaggaatgcatctttggctcttcccatttctcattccttactgcatgatctcatccattctcatgccacatgctgatgattcccaatctatagcccagacatctctgataaacctgttactaaacttcttgtgtgttgctccacttagatgtaactgagacaactctcattcagcatgtcccaaactgatttcattgttcacttaatacctgtttattgagcacctaccatgagccaatgctaggtaatggggatgcagtaataattaagcatacccctctcctagcttctgttgtttacatggaggaaaggcatatagacaataaacaaatagatatcaggtggtgatgagggtatgtgaaaaataaaggtaagtaagggagagagaaggtgctggggtcagtgttattttattggtgatggtcaagaaaggcccctttaggttgggggtgggggcggtggctcacacctgtattcccagcacctggggaggctgaggtgggcagatggcttgagctcaggagtttgagaccagcctgggcaacgtagggagaccccagtctctacaaaaaatacaaaagttagccaagcgtgcctgtggtcccagctactcaggaggctgaggtgggaggatggcttgagccagggaggaggagattgcagggagccaagattgcataactgcacaccagcttagaaaacaaagccagattctttccccctcgcaaaaaaaggaagaaataaagaaaaagaaagatctcttctttgataagctggcctgtgagtaggagctgaagaaagggaggaaatgagccatggtggggagagaattc

SEQ ID NO: 199505 - DNA, 1000 bp, Homo Sapiens
accctaaatctgataagaaacatattcaatctattctctctgaagtctactacctggaggctccatctgcatgatataaactttggtttccacaaccccttattgtaactcagacattccttcctattgataataactctgtcaaacaattgccaatcagaaaaattttataaatcatctacttataactggaccaaaccagtgtatatcttatatgtattaggttggtgaaaaagtaattgcagtttttgacattactttcaatggcaaaaatggcgattattttacaccaacctaatatttgattgatgtctcacatctccctaaaatgtgtaaaactaggttgtgccccaaccactttggggacatgttctcaggatctcctgagagctgtgtcacgggccattaattattcatatttggctcaataaatcacttcgaatattttacagagtctgtctctttttgtcaacacagttcatgttgagtgtggcttagaggtcctttcaccattggcttcgtctctatcatcccagcctgtcttcccttctcctcattcctttaaatgttatctccctgaacgtatttttatgcctttgtgccttttgttcatgtgtctactgcatttctttgcttgatgaaccttagaggcccaattcaaagattaccttctctgtgttcctctgaggcagaattaagcgcttcatgttgtattttaaatgtatctctctcaaagaactaaacacacactgttgtatttagtatatcatctctctacaattaaaaactcctcagagaacggcctaggaaaatgtgaaatgctcaatgtccattgaataaatgaaacagaaacacaaatgaaataataacttttgtcaagtatagaaaaggtattttgactacaaaattatgggacactgaggaaatctggaaagaagcaacatgatgaaggcaggagattaggagggaacttccaccagctaatagtggttgagaattc

SEQ ID NO: 199506 - DNA, 1000 bp, Homo Sapiens
atcaaaatgttattttatactacttctccaaagacaaatcataatagtaataatagtagcactaccatttatagtgtttatgatatgggctagatgctatagtatgccaggcacacacattatcttgcctaagatcactcagctctcaggtggaagagctggattcaaagttcaggatgcttgaatctgggagacaataaagtgcaccaggagctagaataagtttgtacaaggtacaaatgtggagcataaaagaggaggtaattaatcttacctggtgggagtggtattgagttgtgggttactggaaaacttcacaacttcacacaggggtgacttttttttttcttttttttcttttttttttttgagacaaggtctggctctgttgcccaggctggagtgcggcggcacaaccacagcttactgcagccttgacctcccaggcccaagcaatcctctcacctcagcctcccgaatggctgggaccacaggtgtgtgccaccacacttggctaattttttagtagagacagggtcttcgtgtgctgtccaggctggtctcgaactcctgggctcatgcagtcctcacgcctcagcctcccaaagtactgggatgacaggcgtgaaccactgcaccggcaagagtggggtgacttgtgagctgatttttgaaagatgattgggtattcatcagacagaatgatagggcagtgttccatgcagagggaacagtgggaataaaggaatggaggtttgaaagagctgtcacattcaggaaactgcaagcaatgttgatggcttgggaattgagtgggtggcatgacaataagaaggaggcagggggctgcatcacacagaatcttacttgcctttccagaaaatctgagctattttttaagtttttccaatgaagtaaatgtaatggccaaaaagagtaaataaatatccctagggaatctggtggcttagtctgaagctgttcagactagtaggaattc

SEQ ID NO: 199507 - DNA, 1000 bp, Homo Sapiens
aggttgtcaggctgtgtcttgtgagaaggagggaaccagaggaggggcaacggcagaaaccagacctgaagcctgaaccccaggaacccaggggacaaagactccctggccaccacttgtcccaagactgcagacacctcactggccaggagcatacaagcaggagtatacaatgtggccgggggtgcataggagtcaggatacagagccatgttctgtgtgtatgatgttcacatacaggagccagacttgaccatgggagaccagtttttaagtttccaaggaattcttgctccctaaacatgtacttgacccagaaaactcttcagccttcaaggcccaactccctccacgaagaatctgtccagtgtctgatgactaaaggccctggattcagatccagcttaggcaccgcctggtcattatctgacttctctacagactgtgcctctagtaggctggagccctggactcaactcaatatttcacccctgcccctagcaatagggggtcaatggacatttgttcaataagctctagacaccagaaagggtgaactgtctcttggcttcagttgttctgtgacttcaggctaaatccaaaacctctgcggtcaaagaaggccattgccacccctccccaccctgttccctcttaggtggaaggcaattgtggcccttagaaaccctctgaagaagcatctaacagcttttctcaggccgaaatgggagagggtgaaggtttaggaaagaaaacggtcattcttatgtctttccccaaaccagatgatttccctttgttccaaacagttggcaaagacgtctgggcagagaaagggtcctgacttgatgcactgctctgcaggcagctgggtgactccggcctctgttggtttgcagcctgggccagggctggggagttgctgaggggtgggctcaggctcacagtaggtaggctgctgcttgggctttcaactattacctctgatcacaatgaattc

SEQ ID NO: 199508 - DNA, 1000 bp, Homo Sapiens
cataaactatcatcagcctttctgttgcagtataactgctggactttcctcatttcccaaagtgaccctaaaatcaatcagacctgacctggggccagatcagacttccctgagctcggattctctgggcccaaattgtggttccaaacagctccagcccacagtctcctctctgcccttcatcacctcctaggtacatgtgagagactcagatctatggttttacatctgttctaaagggaattcaactcatcccaggggttggttcacacacataaaaacaaggaaactaagctcctaattaacatgtgcatattatttgtcttccacttcttgcaggatcacgggatcaaatgctatatatatatgagtagcttctgcaatgccaggaatctcatgaccccctctccactggcaaaaataatattaatagctagcccttattgagcattcactatgtgtcagacactgttctaaatactttagaatagtgcactgcacttattcattcagcaagtttttagtgagtgccactctttgccaggcacagtcctaaacactggggctagagcagtaagtgaataaaaatacatgccttcacagagcgtatagcctaatgagagaagaaaaataataaacaaagtaaataaactatatagtatattggaaagttataagcctgtaactgaacacagtttcagtcactgcttgcagagtccaattaacaagagcgaggtatggtaggggaaaattgactttatttccaaagttggctaaggggaagtggctggattcctatccaaagcaaccagtttgaattttgaggtggaaaggcaagcgtttaaaaagggaagacctgatatggaagggatgcaggaattgcactgagttttattccagtggctatcttgggtcccggtccacctggagtgtgggctggcgttcatctcaacaatggccaggttgttgattagccaccttgaggtaatctctggaattc

SEQ ID NO: 199509 - DNA, 1000 bp, Homo Sapiens
caaatctttcacagcagtgtcaacgcctacttctgtttaaaacaaagtattgcaccaggggccttgaaagtcacatctgaatgttctctgtggtacattttggtccaaaccaccctgaatattggagttggattcatttcatgtcttttttggtgtaaaatcccggtgcagggagacatttcatattacactggaagacatgaatgtcttttgcaggtgtcaggtatgctcatgggccctgcatgcatacttaaggttgggtccaattggatttttttaggagcagtctgtggtctaagctgagaattttttctcataagggcccattttcctctagcatttttctgttttgagactttgcccagctgcctctattccctagtatgtagacttaataaaaaatctcttggttcataataaacatggaaaggagatggtacacgttttccatttgctagtagaggtttacctgaatacagttggtcatatatctcagtgtcgtcagagtacaacaaaatgtcatgccttcccatgatttcagacaccactcttcagtaatgacttatctgaatatcagccctgtacctctcctgagctccagccttaagggcacacttttcattgggtagccctacctgctgacccatagacaccctaggctcaactcattttccctaaataaatttgcttttctttctgtgttttctatcatggtaaaggtgctgtgatccaataactcaaacaagaaaccttgatggcatgccttccatatccattactgttagctaagtgggggacaatctatatattgcctcagatatcactgggatccattgccctcctaactaggctccctgggtccagtcatctttgcctttcctccaacttctcccccatgtcacctacctcctcttttctctacccccaccaaaacagtacttcatacatccctagtattgtctttaaatgtaaatctgatattatttaactatttgaattc

SEQ ID NO: 199510 - DNA, 1000 bp, Homo Sapiens
gagaggaggacttcatccaatcagttgaaggccttatgagcaagaagtgaagtttcctgtagaagttctgcctcaagactacagcattaacagctgcctgagtttccagcctgctggcatgccctacacattttggacttgccagcctccacagtcttgtgaaccaaatccttaaaataatatattctggattctcaccttttgttgttaactgtattatgagtgtattctcctacagtgtgatgagtcattgtgtttatttgtgggattttgggtgaagagaagtttttcattttaataatatcaaatttatcaatctttttccttaaaatgtaggctttttgtggcttaagaagtcctttcctaaacaaggtcataaagggatcttatttcatctttcaatcattctaaattttttccatttacatttcagtttttagtgagtttggagttcatttttgtgtgctgtttttttttcccttttcccatatgggaaaatagtttttttttttcctatatgggtaatcaactattaggacaccataattgtattgtccatcttttcctcaatgatctgcagggctgtctctctcatatatcaacttccaagatatacatggatatttttgtctcttgcttctggttctattggacattttgcctattctgtgctaatattatactgtcctaaataaagctttataaacattgatatctgacaaaacaaatcctcttttttattgctgtacaatattcattttggaatatacaacaatgtaactcatctcctgttgatgggaatttgaactgtttctagtttggggctatcaagaatgaagctgggagtataattgctgagtagaatatactaaggagtagaattgctaaattacatggtaggggtgtgtgtgtgtgtgtgtgtgtgtgtgtgtgtgtgtgtatttttgtttttttgagatggagtttcactcttgtcgtccaggctggagtgcaatggtgt

SEQ ID NO: 199511 - DNA, 1000 bp, Homo Sapiens
cttcaggaaaggccactgccgttccctccggctcctcttctcaggagtttgtgcattcatgaggtaagtgacagagtcactctcaagctcctgctgtataaaatttctgtaacaaatagatgcttgtcccagatggctccagccaggctgatggggaggatgtgggttccctagcacttcccagtttgcagcataagtgtattaaaacttccatgtcttacttaaaatagaactcctaaaggcacacacataacttcaagttttctcagcatttcatgactttttttaaaaaaagcttggaccaattcagttttcactcttgcaaacagggtataaaagcttctgtttcttccccaatgtcaacgcttggtaatcttattcttcttcccagttttattttaaaagtaatgcccacatgtgatggaagttacactcaaataggacagaacactatgcaaagtctccttctccttgtcctcactccctcccactcccaacggcaatcaactttaaccagttctggtttcagttcgttaggtggttgccacaaaatactgagtaatatgcttatacctctcttttttgatttatcaactttcaacagtatttattgactcctgccacatgagggtgtgtgttatcctccactgcctctgtgtctttccatcttcataattttagactgtattccacttgattccttacaagaaaaatgaggaactcattaccccattttcccctccacccttcctacttccttcaccttctaacttctgcctttcctggattctcttttgtatttactgggtttgtaataattatattctactctgaaaccatagttaagtcttccctgctttgtttaaaatttgattctaaatattgaaaaccaatatacagtttcttccccaatgtcaatcctgtgaatatataaaaattatttactgaagaatgaagtaagaaataaataatcctaggcaatgcaaaagaaaatgaattc

SEQ ID NO: 199512 - DNA, 1000 bp, Homo Sapiens
tttaccatgtggagattcttgggattttaaaaaaagcaaaaacaaagacaaaaaaactttaaaaacggtctttgaactaaaaaagattggtagctactgatctcattttgtaaatgagaaaattgagtcccagagagattaaatgactggctggaattcacacatctagttaacgtgagagctaaattacgcaccttactgtcttttctccagtgctctctccacccaactatactatctccctaagcaataaaaaaggtcgatctagtctcaaaggactgctgtttagattcagaagatcctgtctgaagttagatcccaaaatgctctgagcagtggacaacatattaaagtgaatttttaattttccaaatgccctattttgtaagagagaatgcatttagtttcacagagaatgcatttagtttcacaagttctgcgctgtttatttcaaaatctttgtttttcttttctttttttttttcttttgagacagaatttcgctctgtcacccaggctggagtccagtggcacaatctcggctcattgccacctccacctcccaggttcaagcagttctcctgcctcagcctcctcaagtagctgcgactacaggcatgcaccaccacgcccggctaattttttttgtatttttagtagagacagagtttcgccatgttggccggactggtctcaaatgcctgacctcaggggatctgcctaccttggcctcccaaagtgctgggattataggtgtgaaccaacgcacccagcctgtttttctttatagtcatctccttataactgtttcccatgcatgtaaaagagtttttaaatagcatgttgtctgcttcttttctgctgagtaaataaatttgcatttaagaaaacaattttgaatttatataggagaaacatctccttaaaagtaccataaacattagagcaaattattagagccaatcattgattcttcttgtctgaaaagttttaggaattc

SEQ ID NO: 199513 - DNA, 1000 bp, Homo Sapiens
gcagtgtagtatattatcttagatttttttctttgtaaaaattttggctttaggttaggttcatcatagaagctaacccatgtgctgcttttagcactggatgcggatgagtaacagaatttctcaaagcttcctgcttatagcaacatctggccctaccacctgctctttctctcatcctcttcccaaaagaacaaccaacagctctccttctgcccctccctccacaaactggtgctctaagtagaagtgggaacagatgcactttggtccagcaacagcagccagtgggatctggggtggaaaactcagtcactagtctacatttcatgctgtatgagaactccaagttctagagaagagttatttttcaagtattaaaactttggcttctaaagcttgatatattgtggattgctcaaaaatcctcataattcatggttagattattgccttatccctttatgttcttggaaatgttggccttaactagttaaacaggtttaggactttaagcattgcatttaaatgtgaccatggtaccagtatcttacaagtaatcaaagtgtgcagttattaattctctgattttggatattttgttaggtttatgaaaaaagctgttaaagccacagatacagcttgcttgcattggctttttctttgaatcctgagacaaagaagataattgttgagatattgctggaaattaatgttaaaagctacaaggagagactataccagtactctaggaatacattaaaagggatacttgagtatagtcgcttcacaaagtcttacctcattaaaataattaacattgcttgaggaaatatagccaactttttaaaagtttagtaccttggaaaatgcattttaaagttctggtaaagtattattaaaatgctcagctataagcttacagcaagcatgaggatttgttttttaaagtaagaaaaaatgctcagctattttgttactatttctttagtgtgaattc

SEQ ID NO: 199514 - DNA, 1000 bp, Homo Sapiens
ctcggtgtggggaggtccggcacgttaaccacgcacagtgctcagcatggtgcctggagtgggtgctcaacaggctgctttgtcattacgattcccacacccctctgctagtggacaagcagtgtattgagtagtgaagagcaaagacctggggccaaaccgtggggattcaagtcctggctttgtcccgttctgtgtggccttggacaattgcttgacttctctgtgctccaaaccacatctgtgaaaggattacagtacagacctcacaagagtttctgtgaggattaaatgagtcactactagcgcagtgctttgaatagagcccaacccacagcaagctctccaggcacactctaagtgaataccgtgatagcggcaccagcacagagaattctggcagggcaaggagggaagatgacttctgcccaggctcagatttgagctcagctttattttaatttaatttaatttattttttgagacagtcttgctctgtcacccaggctggagtgcaatggcacgatctcggctcactgcaacctccgccacctgggttcgagtgattctcctgcctcagcctcccgagtagttgggattacaggcacccgccatcacacctggctagtttttgtatttttagtagagatggggtttcaccatgttggtcaggctggtcttgaactcctgacctcaagtgatccacccgccttggcctcccaaagtgctgggattacaggtgtgagccaccgcgcccaggctgagctcagcttttaagagcagatgggttagtgatttcagatggagaaagaaaacgtgaggcatccttgagtgaggaggaaacagtctgtggcagggcttggtgatgtggcggctgtggggtgtgttactgacatgagggcaggtgaaggcctggggcctgatcacatctggtccctccatggttcaagccactgtcagccctgcacaccagacatcacgcaagaaggttatggaattc

SEQ ID NO: 199515 - DNA, 1000 bp, Homo Sapiens
cccatctctactaaaagtacgaaaaattgctgggcatagtagtgggtgcctgtagtcccagctacttgggaggctgaggcaggagaatcatttgaacctggaagacaaaggttgcagtgagccaagatcgtgccactgcactccagcctgggcaacaagagtgagatggtgtctcaaaaaaaggaaaaaaaaaaatcataatgggtacaatgtacactaattgggtgacaagtgtactaaaatcccagaattcactatatgtaggatggatatggattcactatatatagtggattctgggattttatatattgtataattcatccatgtcaaccaataacctcttgtacctgtgagaaacaaactcatctgtccaaacccaaagaatggactcagagaccaggagaacagcgaaaagtgagactttgaatggcagccttgcaagataaggtgtctggtggacaggcacacccagcacagtcacaacaagccatttatcccctcgtgtgcaggtccctcccccagttgctcattggctgagtactgcaggtttacaatcttcccagacttcgcctattggtagttggattaagatttcaagtatgttctttaggatctttctgctgcattttattgtagcccaccatgcattgcaacagtctcagcactctccaaacatttgtcttttggccctagtggctgcacttagctgataagaaagggtacaattatttatgttgcaagatagcctaaactaaattatttggtggggtggggagagggtagttaagggggccccaactgataggcgcctggctgctgggtgaaaggggaggcaggaaggaggagggagcggtgttggctcagtacactctgcttctttatctctttatttccgtgaaggctgtttaaacctatagtaaggcacttagaattgaaagtggactgccacatataggttattttctacatgccccaagaactattgaattttttttta

SEQ ID NO: 199516 - DNA, 1000 bp, Homo Sapiens
cacctcagcctcccaagtagctaggactacaggtgcacaccaccacacccagctaatttatttttgcattttttgcagaggtggggtttctccatgcaggctgtactgcatggcctttattgaagaggttttatgtctttgcttctagcctatgaagtgtccggaatttttcttataattttattttttaaatgttagaaatgtttattttgactgtcttctgttttctttcttcttttataccaaagtttatgctccaaaagaaaaaaatgtttatgaacacacattttcctgtcttggccttcttcagattccgttgctctgatattcttgctgcaaaaatttagacaagtgttgtataccttcattctttgctttgacgtaaggtctccatcctagtattttgacagttcgctctgataatctctctactgcattagttccacctggaagtttctagtcctaaaatactgaagtagcctggttaaccaagttacattcagggattagaaaaagcattggaaaaaactttagtgttccaatgtagtgcaaatgttaatttagttaaatcacttatgagcaaaaaaagtatcactgatcaaaacaagcacactctaaactaatgtaactcatttcacagactatctgtcgtcgaagggatcttagagatcacctgatctaagtccctgataccacagatgaagcccggagaggagaagtgaattccccagagtcacagagctgggtaatagtgacaaaagctggaacttgaagctaggtctcttgattcagaaagcttggtactctgccacataaccactgaattccttttactttctctccaaatcactccatgaaccaagagaattttcttgactcagtactttggtgaccacagttattttaacttcattgctctgtcaacctcaagtgggtttctggcattcccagttcctaattcggttatgcaatccatcagcaaaatttgaccaacgcaatt

SEQ ID NO: 199517 - DNA, 1000 bp, Homo Sapiens
tgttgcccaggctggtcttgaattcctgacctcaagcgatcttgctgcctcagcttcccaaagtgctaagattacatgccagagccactgtgcccagtggttctacataaatttagaatcaactagccaagtttcctggaaaccttgaggattctggttgggactgctgtgaatttataaattaatccggagagaatggttagcttttcaatgttgagttttccccaacaaaggtgatgtggtttggctgtgtccccacccaaatctcatcttgaatcgtagcttccattatccccaggtgtcatggaggtaattgaatcatggcggtgggttttttcccgtgctgttctcgtgatagtgagtaagtctcacgagatctgatggttttgtaaggggcacttccctgcacatgctctgttgcctgctgccatgtaagacatgcctttgctcctccttcaccttctgccatgattgtgaggcctccccagccatgtggaactgtgagtccattaaacctctttttctgtataaattacccagtcttgggtatttcttcataacagtatgaaaatggactaatacaaaaggcatggtagatctccatttctttaggtccccttttatgtctttcagttgtgtttgtaattcccccataaaaaattaagcatcttttttcaagtatgttcctacttattggttttgctattaccataaatattaccttttttaaaaaattatattttctaactgtcacaattaaaccatacagctctttttttattaccttcttcctggtcatgtttaaacatgcttagatttccctttgcctaaaaaaaccctccagttggccatggagctgtgtcttctgttcttaaatagtgtaacctcagcttcttcgtttcctacttaatccctaccctcaccttgctttcgcttagctactcaggcggaaagtgctctgtcagagatgaccatgggcattcggttatggaattccgcg

SEQ ID NO: 199518 - DNA, 1000 bp, Homo Sapiens
tgaatgttttcacttaccactgcatttctgatgtccagcacggtgcctggcacacagtgagtgattaataaacatttgttgaatgcatgaacaaatgaatgaacaactcccacctcttacagtttctgccgttctcccggaagcctttggcaaagggattggctgcaatcttcagttgtgtgatctggggacacacatgcagggtcaaagcaactgcggtctgggcagggggccaccaccccctcaagcagggtcactcacctgtgggttctggtaggctgtcacggagatgaatgtggtctcggggaagcggaaggaggccatgcccccccagtgctggctgcagagctgggctgcccgaactaggtgtatgcggggttggtacttgtgcatggagtgcaggatcagctgggagggaggaaatgggagtgattccctgccctgcgcctcacccttggcctcccttccagcaccccccaaccctatcctggagtcccagcctgggcctcacgtggccgtgggggtccagcgtgctgttggtgagcttgacacgatggaaagacacaggctgccgcatccaatgtgcaccagtggcaggagagtcggggtgaatgtagacacggtcaggcaggcggggctctgccttgccgctgggctcccagcgccggccctgccagcggtagcgagccccatccaccggaatcacatccagaagaaacaagtagcgggcctcggggtccaggccagtgactgacactcggcaggcagggaacatgcgcctgtgcaagggaggggacaggagaggcctggagctacccactggccaggggtgggcccagcaccagtaacgggacataacaacgggctccccagagctgtcagagaaacatcaaaggaggtggaattagaacccagagggcaggctggaggctgtggctcacacctctaatccctatactttgggaggccaaggtgggaggatctcttgagtcaggaattc

SEQ ID NO: 199519 - DNA, 1000 bp, Homo Sapiens
tgttttcccctccttttccagcaatttctggtgaaaaaaaggaggtaataaaccttgtgggagctagtggagtgcgaagactgacgcatgcatttttttttatctgagcttcggtcattggaattgcagaagcaattggtagctactctgggattagacctgcattttctttatctgggaaaatgaacatacatgtaacgaaaaaggcgtcactccaattgtcccggatttcacactacaagccagattggttgtgcctggatctctgtgacaagggtaaattataaaccaagagctgcatttgttcctcattcctctcccctttatgccttgctgcactcccaggtgcccatgatggagatgtgattgcagttgcacagaaggaaatattttaagacctgccaaaacccttggctcagaactcacttttccaagcaacctgtctgagcatggtgactgcggtgaattattgagattctggagggttcgccaaggggaatgtgtcaccgggagggtggggctagaggctgcagctggaatcctgttgccttccctgtttcatacaccagctggattgtggattcagtatctcctctgggagctgactcctgggtctagacaggaagggcagaatggcatcaggccgggggcagctgaaaatccagggcatcacatttatcctccatggtgagaagcaagacattaatagattattatccacatacatctgacttcatgtctcagaagcagggttgggtaattaaaacacatgaaatccccgtttgtatatatcacaaacagatacaccttctttcccatatggaaacaatcccaatgactgtccctcattccaggcacttcccatgtatgtgtgcagttaatcctcacaacaatccattcaggaaggtgctatttttatccctcagtcatggggaaactgaggcagggaatataaagccttgcatgaagtcacatatctagaaaaatacagacggaattc

SEQ ID NO: 199520 - DNA, 1000 bp, Homo Sapiens
caaataagcaaaacacacaaggtcccttccctcacagagcttttctttctttctttctttctttcttttctttttggtagaggtgggtctcactatgttgctcaggctagtcttgaactcctggccttaagtgacttagcctctgagagtgctgggattacaggcgtgagccacagtgactggcccaaacacaaatttttctttctttcttttttttttccaaggcagagtctcgctctgtcacccaagctggagtgctgtggtgcgatcttggctcactgcaacctccatctcctgggctcaaatgattctcgtgcctcagactcccaagtagctgggattacaggcacacaccactacacctggttaattttttttatttctcgtagaaacggggcctcactgtgttgcctaggctggtctcaaactcttggcctcaagcattcctccctcttcagcttcccaaagttctgggattacaggcatgagccttcacacctggcctcgcttgtctttttttctttgagagaatttgtttctcataattgcaaccatagtggatttattgtttgatgtgattgttgtctcttatgagtattgcttatttcattaaaaaactctttgatattagatctcacactatttgattcgcaaagttgcgaatcatggtttcgcaaagttgcaaaagatggtttaagggtgaaggaaaagcgttcattcacacagcgaaagccatttctatccattcatccaggccttgggcaactgaacagtgggcatttcctggttcttgagtcctttcctgaaacacccagctacacccgaaccttgctaaattctctgctctgtctcaactccgggacaaaagccagaaaaacagtagcagcagtttagattggccatgactactttcaactttactaatacaagcctcccttctgaggatattagagtcacattctacccccatccccacccccaggcaaacgcttcagaattc

SEQ ID NO: 199521 - DNA, 1000 bp, Homo Sapiens
taacaatattttaatagttttgtcttctgatcttcatattaaagatacaagtgatttgcacacccccatttagagtattaggagattctaaatttgactatgtacttttagcagtgagttttgtcatttattttagtgttaaaattagtgttcttttctttcaactcaaagaactccctttatcatttcttcttgtaagacaggtctggtggtaatgagctctctcagcttttgtctgggaatgtttttatttctcttcttttctgaaagacaactttgccaagtacagtattcttcattggcattttttttcatcaacactttgaatatatcatcccactctttcctggcttataaggtaggcctttactgagaaatttgctgctagtcttattggaactctcttacatgttatttgcttcttttctcttgctactttcaagatgctgtctttgtccttgatttttgacagtttgattatgtgtctaagtgtagtcttctttggattgaatctcactggagacctttgacctccctgtacctgggtatttatgtctttcctcaaatttgaaattttttctgatattatttctttatgtaagcattctgcccctttgtttttctcttccccttcacaaactcctgtaattcaaacatttgttcttttgatgctgttccataaatctcataaatttaattcattccttttcattcttttttctaatttctctcttctgactatatattttcacataacctattttcatgttcacagattcttctgtttgatcagttctgctgttggtgttctccattaaatttttatttcagtgtatttttcacctctagaatttaaatttttcatatatgtaattttagtcattctgttaattttctcattttggtattttattgttttctttatattattaatttgtttctgaatgtattttgaaattccttaagctttctgaaaataattatttgaatatttgaattc

SEQ ID NO: 199522 - DNA, 1000 bp, Homo Sapiens
tgttggggctaagccagaacaaaaaggtggaggacaatagcaaagatatggaatcaacctagatgctcattgacagtggatcggataatgaaaatgtgcatatacaccgtgcaatactacacaggcataaaaaaggaacaaaagcatgttctttgcagcaacatggatgcagttggaggccattattctaagcaaacgaacatagaaactgaaaaccaaatattgcatgctcccacttataagcaggagctaaacactgagtacataaagacacaaagatggaaacaacagacaccaggatctacttgagggaggaggatgtgaagagagctggggttaaaaaactacctgtctggtactatgctcactacctgggtgatgggatcatttgtacaccaaatctcagcaacacacaatgtaccatgtaacaaacctgcacaggtactccctgaatctaaaataaacattaaaaaaaaaagaggtgaaggagcaggaaaccatatcctatcacataattgtcaggcctcaagaagttgggtggcccccacctacagtctagaaaggtaacgatggggacactttcaggcaggaaattcttttcacaaaacgcctttggattatgctttggaaaattgcattagctgtggtggtgataaatagtcttttaaagtcacaaaacattcatcagctgaacactcagacccttcaggtagcacagagagtgaacattgacgggaaacatgaaatatgggccagtccaccatccactaactaaaatgttttatctggtaatcactctggagcaagatttatttttggtttcaaaaacatctttttagtttaaattagattcaagggatcctctctctccatcatctgacgtcctggcgtttagcatttttgggggctctttttttcattaaccctctcataatcatcttccaatcaagtgtttccaaaaagaaaattacaagtggagctgaacaataattatgaattc

SEQ ID NO: 199523 - DNA, 1000 bp, Homo Sapiens
acattaagtcgtttttaaatgacagccagaatgggcatgaagtttccttttacccaacactttgataacaattaacatttatttagcacttactatgtgccaggcaacatgctaaacgccttaggtgcattaactcatttatttaaccctcacaactaccctataaggtaggaactattcctgtcatccacattccagagacaaggaaactaagggacagagaggttattggcccaggttcacacagagaaggcctctcagcaggctgactccagatttctgcaccaacaccgttctatgcagctgctccagagaaagtgtctccaacacagtaaagctgatatcagagaatattgttggctaaaattccaggaatcctgaagtttggagaaatcctttactagtggtctcaaacatgagatttcctttgattagacaaacgtacaccattattcacaaacatacactcatagattctcacaattcaaacatgcatacattctcacattcacacatactcacacatcctaaactcacacacacatcctctcacgcagtcacactcatatatctcacacaaattcacactcacatcctctcacacacattcacactcacatcctctcacacacacatcctctctcacacacactcatcctcttacacacacatcatctcacacactcacacacatcctcacacagtcacacacatacatcctctcacgcactcactctcatacatcctctcacacacacatcgtccacatacacatcctctcacacacgcacacacatcctctcacacacatacacacatcctctcacacacatacacatacctcctcacacacacacattctctgacacatacacatacctcctcccacacacacacacatcctcacacacatcttctcacacactcacacacatcttttcacacacatcctctcacacacatcctcacacacacatacatcctcacatacacacataca

SEQ ID NO: 199524 - DNA, 1000 bp, Homo Sapiens
tgactgcttaaaattaaagaactaaaaaaaaaaaaaaaaaaaaattcccagaacctcaaatcaccccctaaaaaccaggaagtgagattcatgttagctttccctaagtaagtttatggaagagataatggcaagaggtaggggcaaagtatctgttcattcataatcactactgtgcttcgtttctgggcaaggtagtctgatgaaattaaaggaagttctgtgttacaagtcatgtgcttttatgggggaggaggtgagatgaggtcaattaacaagatatgatctttctcttctctccctgcttgtctcacccaggcctcgggtgtgccattcaacatgaaaggtgttgatgccattcattaattgagggtcagattcctctatcagcatattcctcccatctgagactgccttacctccatccacttccacccccaacaggtttcattttctgcagctgctgtcaagagctacgtggaggaagagagtggttttaacaactgcatgctcaaatttattctcactggcctcttgtttgaaggaagtccaatgtctagaccctggatgttgaaacaggatgtaaaaaaaacaccaaaaaaaccctgtatatttgagagagttttgaaacccatcccaaatacactccagcaatggagaaaaatttgattttggcataatttatataccacatttctccccgtacccaacaaaagtgtatgctaatgtctctatatcacatgatatatcagtttaaaatattctttctctttgcctttgttcgtagtctcatttccacttttacttaaaattttaatatcttctccccaggttctttatttatttttgctatatgcctgaatataagacctaattccatgtcaccaatatctcccttgagaagcactgatgttaagtagaataaaatgtaatcaacactcattgtttcctaccaggacaacagtagggtttaaaacaaaaccaacctcgttatgaattc

SEQ ID NO: 199525 - DNA, 1000 bp, Homo Sapiens
ttttagttaggttattttcctcaatttagtaatttggtattaccaaatacctttttttctttttttaaaagagacaacgtcttagtctgttgcacagactatagtgcagtggaatgatcatagctcactacgtcctagaactcctgggttcaagcaatttccctgcttcagcctcccgagtagttgggactacaggcatgcaccccacatctgtctaattttatatatacataatatatttatacagatatatgactggggccttgttacatacccagccttgtctggaactcctgacttcaagtgatgctcctgcttcagcctcccaaatttatgagattacaggcatgatccaccacacctggccaacttattttcttaatctattcatagaggctactttatcccattttcctatcttacctagtaagctaaaatttgatgggtaggagatctgagtgttatttatttcaatacctccctctccaatcttcaacatttattatgaattctagagatcagatggttaccagaagaatttttccaaatcaattccacatattatgtaattttgttctgtctgtatgcactaattgcaaacctcagatcttctccttgggtaacagaaattactgctttttttgattttgaggcatggccaatgctaaaagattgcttaagtcaaaatgccactacctctgacatgaaatagaacagtctttggaagcattccctgatctggaaaagactcactgaatgttttatgtagtgttctgtaattaacataaatcattatcattctctttcttataagaatacaactggcacatgttagtaatccggtataactcagtccttaaaaagttgtatccagaaaatgatcccaaaagtcccttggtcaaaaaatacacacaaatcccaaaggttcggtggcaagtaaaagtataaggcaaaattaaagcgtttgcaattttttttcaggtgaaacaaactggaattc

SEQ ID NO: 199526 - DNA, 1000 bp, Homo Sapiens
aagcaagagccataactgtgatgaatgcctgttgtcattttaagcactgcaagttattccacatgaatactgaactgtggtccaagcatacaggggaatgcatccccctttcaatcacacgacatccaacacatgccataggtgggtaatgtcaagcaatattcaccccccgcccctgaatccttcacttggtcaggagacaccctgtatctactgcaaagacttctgttttctcctcggttctgtattttcccaaattcctaccctggtacgtactatttttttctaattacaaaataatcattaacttttaaaaagccatgtacaactagttgacataataaaaatccacctaactcatcttttagtaactatggctatgttgtaacaattttattttgatttttaaaaaaggaatctcttgatttaatcagggctttggggtcatagggggattagtcactgtcacagtcataataatgcatttattcagggaaaactttaattttctttgtcttctccaaaaacagctgctggaacacctcaaattaagggatgttcatctaaaacacctttactgaaacttgattccttgggccagaggaaggtctttactgtagttgatagtactagtgggaaaaaataacagaattaatgacagtacatacataacagaagattttcatgcccacttttaaaatgtagcagatctgtatatattaacaaggcaagatctccaagttacaactttttaagacaaacctttaagataaaagacaatgttagtatggatcccgttttatttaaaagaaaaaagacagaaacataaaaatctggaaagacataccatacatggttttttttgttggtggtggtttttgtttgtttgtttgttttgttttgagacagggtctcactctgtcacccagactggagtgcaatggcacaatctcagctcactgcaacctccgcctcccaggctcaagcgattctcctgcct

SEQ ID NO: 199527 - DNA, 1000 bp, Homo Sapiens
ttttttttttttttgctgttttacttttccctccctcctcctaatggaaaccaattagaataatgagggcaaaaggttatatatacatctggtccctgcatttaacatcctgatttatcttttatgctttgttgagaacaatggtgaaaggtgggcaaggatacccccttgcatatattgtcaatgaaaattttttttaaaggcatcctgcattttcacaattttcacatatgtgacatctgaaataactcagacatggcaacattaaggaaagcattgcttcttagtttcatgtttaattgtcagagccaggaaagaaggaggtgaagaaagaaggcaggacttgtatgggctgacgctttaagggactaagctggggcaggcatggctttcattatatttaagtgaattagtctgtttcctttaaacaggagagattaacaagctaccaagggcctgctgtgggattctgacacttttagtggcttgtgacatatgatttgtgaatatcaatttgccttcaaaagcaaaaaagcaaatcttccattagtacaaggttcgccaaaagctgattctaggttagtttggttgaaattcattggaaaaagcgtttgctaagatggggattttatttgatagtgtctggataatttttaatttatactttagacttaaaaatggctacatatagatgtgggagtttaatatgaatactttctttaataaagataatatttcaagttctgaacttgggaactatgggaagattaaataaagaagaaaataaatgtcagcaaccctaagttaacttctcttaaaattttgctttctttgtaaaagagtatgtcttcaggcagtttggcatcaagacaaatatttctcaaactgcaagaaaataaaataaatagtgttcctcatatgtgagaaggttaaaaatctttgatattaaacaaataacaaaagaaatttcaaactgaaagaactgatagaaaatgaattc

SEQ ID NO: 199528 - DNA, 1000 bp, Homo Sapiens
tgccatgcactggaacttggaaacagaaggtggtcctggccaggtgacacttgctcacactgcccttcaagctagttccatagtggtgcttggtgcacacgttaacaaaagcctaaaacacaaagcatcttctatttcatactcagccaagaaaaagcgagggagataatggaagctattctagactagaatctatataatttctcccacatctcccacctccacagctgagctgattgtgtatccagcaagaataaagatctgcccccttgtcaaacacagcaattacttgagttgtggacccaagccactcattgcctggcctgtcccacactgatcctctgcctctgggtacagttcatctctgtctcctctatgatcctgagaaattcaactctgcccccaaaccagcacgtctcaaacctgagtgaatgagaaccatcttcctcaaagttaggatgaacatttgtagtgactgccactagaggtgctactccccaccccaccccactcacactccaccccaagccactcaccattccttccatctacaaagactgacttcatgggaaggaggttgataggtaagctcttcccaaagtcttatactcctgagtgctcattatagattacagtcccccaacaaggcctggctctgtggagagatgttgagtaagatgtccaaagaatatcactggctgaggattactcttcctcccatcaccaagactcttggcagctatgctgcccaccacagttgccatcaacaccttggcccctcctctggcccaagcaccctgtcagtgacccctttttgccaaggggacaaagcccagtttcctctgaaaatagagtcaggattcaaccaatcccaaaactgccagccaggcagaattatccaaggccacatccaggatgtactatgggttcatcctgacttcagatcagacataccctgcattgggaaaaataaaccaaatttgaaatacattttgaattc

SEQ ID NO: 199529 - DNA, 1000 bp, Homo Sapiens
tggaaggcaagccagaaacaaagatgtatgaaagcatgtattttcctaaacagactttcattatgtgtgttggacagtaagcaaatgcaaacactgagctaggtgaagcagcatttataacacacatgacaaaccaatacttaaaccatttaaataccaagacactccatgcaagttttttgaaagtgaaccacatgaaaactgggcaatgattatgaatgagcagtttgccagagagaaatagccagtaaaaaggaaaagttaatctcagagaattgctaagtaaaataagataggtttttctcccctgggatgtaggcacaacttaataatatatgacatccaatgctgttagaatgtggagaaatgctaggagctatatatattgcttagcagtttggctgtatcattttaaataaaaaaaatacacatagcctttaacacagtaatctctttgtgaattattctgtatagataaaaatatatatacaaaattatttattgcagcattgttcacagtggcaaaaaaatgaaaacaaagaattttgatcacttgagactagttgaatgaactgtgttatacatgctatggatgattattaggtcattaagaattagaatgtatatctgctatggatgattgcacatgatatattgtaaagttagcaaagcaagttacaggaaatatgcaaagcatgatggcctttagtaaaaaagcctttatatttgtgattttaggtgtatatttacgcacaatgaaaggtattcaattaaaacacatcagacttaacattttgagtggtctgggaagagagaataagaaataaagcaagattcagaattgtctagaccccttgacccagaacctttagttatgtacatttataaggactagaaggatgtagaatagacttttgacatctgtagtgggattatgaatggttttatctttgtttatttcattttttggtctttgtttttctaaaattgacatgaattc

SEQ ID NO: 199530 - DNA, 1000 bp, Homo Sapiens
ttgagtgatagagatcaattattatagtactggataaatgcaggtataagcaataaagactttaattaggatgtcatcagtaagaccagaaaggcagggaaattttgaaaaatttggacctggtagtcagatatgggaccaggagaatggaaacttaaagagtaaatccaaaattttaagcaagagcagtacttttcaatcttttttgttgtgggaagatacatttattaatttttataatataactatatgataaaagataaacatatctgtatatttattaatgaaaatgtattttgttaagagaattaacacagtagtggaaaaacaatactgaaagaaggaagaatgatgtaatatacacgcatgtatggaacattatgattttgtattaccagagattaattcatagcatagtagatagagatttcttccttatagattctgaatgaattctgaataaaattaaccttatttgaattatttaattttaccctctttatgctgtgttgtgggaagttggggaccccaaacggagggaccggctgaagccacggcagaataacataaattgtgaagatttcatggacatttattagttccccagataaatacttttataatttcttgtgcctgtctttactgcaatctttgaacataaattgtgaagatttcatgggcatttatcacttccctaatcaatactcttataatttcctatgcctgtctttactttaatctcttaatcctgtcatcttcgtaagctgaggatgtatgtcccctcaggaccctgttatgattgcgttatctgtacaaattgtttgtaaaacatgtgtgtttgaacaagatgaaatctgggcaccttgaaaaagaacaggtaacaatgattttcaggaaacaagggagataaccataaggtctgactgcctgcagggccgggcagaacagagtcatatttctcttcttgcagagagtgaataggagaaatatcgctgaattc

SEQ ID NO: 199531 - DNA, 1000 bp, Homo Sapiens
agaactctgagagagatatttgcattttataattattgatcgggtgaaacaggatggagggaatttgttttttttcattatgggggacaggggcaaggatggggaatccaggtttctggttgggacagctgaggcatctacaggtctgagggagacagaaccaccagagtgatgctgtcatccagggagagggtgtagcctgagcagagcctgagatcgaattatataagataccctgaaatttaaggggcaaactgaaaggaaggagtaccaagaggcaggaaaacttccttccaatggggtaccttctccccctactctgctaatctcaatgccatctgagctgaaagtcccacctcctctgcaagcacctgtggccccaagaccaggcctcctcctgggtcctcgccttttcttctgcctgctctgttgctgatcatctcaggtgtggcgtcttgtcccccagcatcactcacaggcaccgtccaggtccacgttacctccgtgcccgctgcggcacattgaaggtgctcaggagatgactgtgggtgacgggcttgccggcaaaaagagggaagtgtcagaaaccagcaaatgccagactcctcctaagcactcctctttccccaccacccggaatcagccatgctgccagaacccacacacctccacccctgttccagcctctccttcctccagaagccacagcttctgcctcccaaatccagaggccttgcgcaagtggtcaggaggaaacgtggcggaccaccctcccaccttctctccatttcagggagttgtgggactggagccacacaggatcctaccaaataaacatctcaacagggcgtggaccaagcaggaagaaccactcagcccggagtcagatcctgatctccctaaccacttactatctcactgtgtgaccttgagccagtcatttcacctctcaaagcctccatttttgcagcgtgtcctaatgaagatgaaatgagaattc

SEQ ID NO: 199532 - DNA, 1000 bp, Homo Sapiens
ttgttaatggctttattggagtggggaaagtggagaatagattttggtgccaggcaaatcaaagtttgatttctgactctacagcttgctagctttatggtcttgggaagtcagttaacttttgtgagcttcaatttccttggcttcaaattagggattaacagagcttacttcttgagttattgtaaggatcagcaataatgcatgtaaaccataaaacacattcctggtttagagtaggtgctaaataaatgcaagttcttgtttcatttaatctgctgcaaacaaaattgtcattcctttatagtaactgcattttcactttttaattttttaaaagaatttttttttctgggctttccagcaaaaactagaaagcctgctagacaaattctaaaagagctgtaacactatattttcacttttaatattttagttttctcttccatcttctgctggtttacattatattttaagtcactgctcaaatctcacctctttaatgagggcataccatttaatatggaccatcctgattaatgtggtaatctgttcctcccccagcattcctaacccccttaccttttctactttcttttctcatagagtttatcacctctgacaatctagaaaactgactaatttactatgtttattgtttactttctgtcttctgcactctgatgtaagcttcttgccacaagagcccttgcttcttttatgtaattatattctaagtgcctaaacagaaactggcacacagtcggtgtccaattaatacttgttgaatgattaaatgaaaaaagagtagatgaggattaaaaaaaaatcctgctcaggactggatatgttccttccatcttgggactgggacttgtcttattcatctctgtaaaattctcaactattatctgttaaaaaataactgtaaaattctcaactattaactgttaaaaaataacctcggctccatcacctccattctctctttctggaattc

SEQ ID NO: 199533 - DNA, 1000 bp, Homo Sapiens
gctattcattcattcattccaacaaatgtttactatgtgtctactgtgtgccaagtactgttctagaaaccaggagtatagcagtgaacaagacagacaaaaaaaaatccccactctcatatctaacaaaatgttgtatgcatttatcctctgactcagcaatcacacgtctaagagtttatcctgaagatgcatctcccacagtgcaaaatgaatatgtataaggtgatccattgcatttgtaattgcaaaatgctggaagttacctaaatgtttagtcattgtagattggctgaataatttatggtacagacacacaataaagtcttacgcaactataaaaaagaagaagaaaagtctcagtaaactgatatggagatatttccagtaaatactgttaaatgataaaaagcaaagtggaaaacagaacatagagaacgctactttgtatgtaagaaagaaggaaaaacaagaaagtaaacgtatgtctgcttacctttgcaaatagaacgtagaaaggataaaccagaaaacaatgaatttggtgatcaacaagaagaaaatgggaagaaagaaaaatgggaggaaacagtacttctggggatatatttttgtatagttttaatttttggaagcatgttaatgttccacatattcaaaaaaaatcagtaagaatgggaagtaggcaaaaatgaaaacaaaaagaaaacctaacactgacagcaaactaaataaagtaacccaattttatttcaaataaatatcataatcttgcaaaagggggatagagctaacacaaacaactgctgaacacagtgtttgactctatatcctcattcttgggcagggtggagcgggggagaagaactacaaataatttctgagttctttttagtttgttttttatagtggtataggcaaagtgattctgaaaattttagatgtgttacaggattaaataaattaataaatgttttgatgttattgggacccagaattc

SEQ ID NO: 199534 - DNA, 1000 bp, Homo Sapiens
aggatcttggccaggctggtcttgaactcctgacctcgtgatccacccacctcggcctcccaaagtgctgggattacaggcatgaaccaccgtgcctggccttgtttttgccttttaatcttacctgttgttaaaaagcctgttgctttccttcctcgtaaggaagtattaagataattaaaagtaacaagttggctaacaagttcacatcttttaaaagttggaaacaaacttgtttcttaccttgcagaagcactgagtctgttctgtaattcaaatttctcctcagtaccattgttttaatatgaacattattttaacattaattcactaacagtatccttttctattagcacataataaagacaataatcattaatatgtatttgcattctcatgattcttattatgacactacacacatactgtttagttcaactgacattttttgtaccgagatcacacaccaagcagtgtgtgattttctttctggtgcaagctgcttaatctggggaactactccagaatgttttcttgtcattgcagctgtgctatcagaacattcttgtatacaaaattccagaccagttttgttgccaacataattctcatcgttttacccagttcagaactagttgtgtttgttggatgtaaaactgagaaaaagagttagttcttccttcacatcaccatcatctttggatagcacattagcaatatctgtgcgcttgtcaaggtacaatgaaaagcactttgcaagttttttttttttgtaaattggtcttctgtatcattagtttccaaaggtagcaagctgtgctttcattggaaagtgcagatttaccctttcatgtaagtgatattcacttgttcttgacaatagcattttcattttagcaatccaaagtgctgggacaggaagcatgtaaaacatttatggataaaatactgatcatctgcttctattagcctttaaaatgtagtatctttcaaagaattc

SEQ ID NO: 199535 - DNA, 1000 bp, Homo Sapiens
aggtagaagccaagatacagggaatagaccacacacacacacacgcatgcacacacacacacgtgcaaaaggaagtacgacacaggagaaaggcagggggatgatggagaagggagattttgtagtgacactggggcagcctgtctagactgggctctggatggaatgtttatgaaaagagaaaaaggaagggggagaaagaaaaggagaaaggaggggaagaaggaaaggaggagggaaaaaagaggatcatctcattcaataacccctgtgctagctgcttctattatcattattattttttttttttgaaacagagtttcgacccacccatgctggaatgcaatggcatgatcttggctcactgcaacctccacctcccaggttcaaatgattctcctgcctcagcctcccaagtaactgagattacaggtgtgcaccaccatgcccagctaatttttgtattttagtagaaacggggttttgccatgttggccaggctgatcttgaactcctgacctcatgatccacccgcctccgcctcccaaagtgctgggattacaggtgtgagccaccgcaccctgcctattcttaacctgttttgtttgtttaactcaaggtgtgactttcccggaggcaatcagtctgtcaaagggattggttgggcctgggaagacagtcagtgttgttctgagatagtcttgctggcaatgtagttaatttttaagatttgataattcgataattaggaatatctgagttactgaccaggggaagtcaattactgatcatggtccccagtgactcttccagcttggattttgtgttattttaagggaaagctacagaagattcaagaaaaaatgacattgtgattattttagaaaaatgtccgtggagaatggagattcatctcagcttccatggagattgcatcaaagcagacaaaagcaacacaatggtcaaagatatagaagacctcttgggttcattggaattc

SEQ ID NO: 199536 - DNA, 1000 bp, Homo Sapiens
tattggtagaagtatcttttattggtgaaagcatctttatggaaagttttttgggatgatgctttttaactcatttgattatttaactgttatttgatttatttaattggttttctatgtcttttaaagtttttatgtaatcttttttctaggaatttgcccattttatttaagttttgaattttatttgcacaaagctattcaaaaattaatgttactgatgatacaatgcacatataatatatatataacaaaatacttacataccatttactatgtgctaatgctattctaactgctaccattaccatatattaacttatttaatctcaacactatttattgatacagattctgttattttcccttttttataggtggtgtaaatgaaccagagaaagatcaactaacttgactatgaagtcactgttaataagttgtggagtttagatataaacacacccaatctgatcaggggatctggactcataactgtatacattacatgacctcttactcactacaaatgcagtcgtagttatgtgctctttttctttgctaaaatcatttatttatgtctacatccttcgtgtcttgatcaaccttgccagtggtttgtcaattttattagatttttttcaagcatccatatttgcttttttcatctttttcaccatacattagcttatcattaatttcttttacttattattttatatctataatttatttcctcctaatttattttggatgataattcttctgttttcctgttctgaacttagtaagatggttacttagaaaactaatgtttttctttctattataaggattcatgctatatatgttttattctaccaagttctaaaaattttcacctgtgtatcacaagtttttaaatgtagggttttcattattatttcattctaagcatttttcaccagtatgattttttaaagctatttgttagtttataatgtcttcctaaattttttaactt

SEQ ID NO: 199537 - DNA, 1000 bp, Homo Sapiens
agatgataggttaaaattcaaccatattgataattacattaaatgtaaatggtctaaaacactctaattaaaaggaagagatttgtcaggctggattaaaaaaaatcagtactacacttcttttttttagcatttacaagaaagacaatcaaggccacagtcattaaggtgtggtaagggttttgctgaagatttcacaggaagccagaacaagaagccacaacaaatgctcagactgcagttttatcagtgttgtgcccactacctatacacatctcctttcttcatggctcccctggtgggatgtggggatcattttgtgcctcaagcagaggccagcctcacccccaggctcatccccactccaggatcttcccctccatacatgcatcagcttctctccttcctcacataggacagcctggccctgtccagcccaggggcttccagccctattccagctcactcagccaagaaagggctcatcagaaaccagagatgttagaaggcagagggcagtataaatgataaccaacatttttttggtcacctttacaaattgctgctcctgtgtgcagccttatggcttctcgtggcccatcacacacagaagtgtcacagataacacttcatgtcagtatcacacaaactgacctgtcttccctgtgagtctcttctctaagcaggtcacctgcagaggtggggcagtgcagacagagactttccttatggggcccagcatgcagccaggaccccctaccacactaccatgttccaacagctgtgcctgtgccatgggtcaggccagtcctgggagggagtcggctgtgggctgaggctgaagtgtgcaggtcctgcatctctgtgtggaaaagctgactcccaggctaaggctcaccctgtcagggaaggtgggactgcttctgctttggggaacacacggtgcagaaatgtgctggtggccaagaccatgagcccaccatgtggatgtggcacagga

SEQ ID NO: 199538 - DNA, 1000 bp, Homo Sapiens
atcattccccatatcaacagactaacgaaggaaaacatatattattataataacaaatactgaaaaactatttgattactcttttatgattttaaaatagttttataccactccttagtctaaaccaccaccatctctcacctacatgattattacaatgcactaactggccttcctaacatctattcccaatatggaattcaaatttgatgttttcaaaactttcatcagatacatgctgcttttctggttagaacactccatggcttcccatagcactcaaaataaaatccaaagtctttaccataacctgtaaggtctacatgatttgtaccattaactctttgacctcaccttttacttctttcctccttgatcacaaagccccaatacgatggccatcttttgttttaagagagttgtagggccaggtgtggtggctcacgcctgtaatcccagcaatttgggaggccgaggcgggcagatcaaaaggtcaagagatcgagactatcctggctaaccccgtctctactaaaaatacaaaaaattagccaggcatggtggcgggcacctgtaatcccagctactcaggatgctgaggcaggagaatcgcttgaacctgggaggtggaggttgcagtgagccgagatcatgccactgcactccagcctggccaacagagcgagactccatctcaacaacaacaacaaaaagaaagagagttgtaaaactgttgaaaaggagaaaaagaccatttctcctctacagagcaataagactagttaatggctgattttcaatgtaaatgatgaactccaagagacaaaagaatgaaatgtccactacttcaagtagtgaagaaaaagggaaaatatctattaacctagaattctatacccagtgaaaatacccttcagaaatgaacacaaaatactctctcatataaaaactctttggttcttaccaaatatgcaccaaaaataatactaatagggaattc

SEQ ID NO: 199539 - DNA, 1000 bp, Homo Sapiens
tatacgtggtggaatttgagtagacgagcacatattactgacattaatatcgtttcattatgtgtggtcaaatgaaactttttgttttatagctctcccttgagagcagcctcaaggtgtaagagaagctttttccgtttatctttttagaatgtcttccagtgaatagaatgttcatgacaataaatcagcagcaaatttcatcatttactatacctttcaaatagggcaagcgtagtcgtcatggtggtgctgagaaggggcagggcattctgaattattaaagatatttcaggtgtttaaattgaggctgttagctgaaaacataatctgttcccaaggatcactggtgtcattttttaaatgctcataaatctggtttaaattcggctctaaaatctcacatgaacccagatatgtgagtttgttgctaccgtaaccccaatagactcctgtgtcaggagaaatttggtctcaggattagatatgtagtcagagttgtttcaactggctacataaaatccaactgggatcagttgaactgagcaagctaactatcctgtactgaatttgaattttaggcatttctaaagcatggaaggtttaaccatccaagtgctgtgttcttggcctgtgtccatctggtggaggttaagttctttcagttccagcccttcatgactttattccacgtagacagacttaccttattgaagactgaactaattattatttttcacctaacaaatcaaatcagactgacatggagatgaatcaggttaagattatatgcacagcttcaagccatgcgttttgttcttttctctagtatgacttctgagattcagcttgaaactcagtcaacagtgttaatgacattggctgcccctgacagttcttgtcgtgaagggtgggtgttactatccagtatctttggggggaaaaacccctataatggatttttaaatgaattttaatagtcataaaaagtcttgtattg

SEQ ID NO: 199540 - DNA, 1000 bp, Homo Sapiens
ttctcttgcctcagcctcctgagtagctgggattacaggcgtgcaccaccacacccagctaatttttgtatttttagtagagatggggtttcaccacattgggcaggctgctctcgaacttctgaccttaagtgatccgcctgccttggcctcccaaagtgctgggattacaggcatgagccactgcactcggccacatttgtgcatctttaaatacctaaatattcatctttaaagttctgcttcaactcaaaatcatcatgactattaccaaacttatctgcttcatcagtcttgccttcctcaaatcatatgtgctaccatcaccatgaacaagcgtcaaaaagcagaatattttacctaactgtgcctctccccttatatgtcatgtaagataatatatagtaatatggtttatacaagccctttctgttcctgttgctactaccttgttttaatatttctcaagccatccttcaactcatactacaatagctagtcttcctgtctcatctttccccctacaattaatcctatatccaactgaaatactaattgcatggtactttctttttagagacatggctcactctgtcactcgggctggagcgcagtggtactacaatcatagctcacctgtaacctcaaactctaatctcaaaggattctctggcctcagactctcaagtagctaggactacaggtgcacgccaccatacccagctaatttttaaattttttttttaagagatggagtctcactatgttgcccaggctggtcttgaattcctggcctcaagagatcctcccacctctgcctctgcctcccaaggtactggccccctagtatttcctacttaaaaccttccaaatctttctgcttccttatgagcctaattactaactcttgagatttaattcacaacctagtcatagcacttaatgaaatctcctgccaatgtcttatttactcaagatcttctgaacaagtattgaattt

SEQ ID NO: 199541 - DNA, 1000 bp, Homo Sapiens
aatatagggttcaaaaataggttaaaccatatcaatatgagatgtatgcataggagctgaaactaaagaaaggcaagaaaatgattactataaaaactagtcactcggtcttgatgggagaaggagaaggtattgtgattgaaaagagatacatgaaggcttctggggttctatttcgtgacttgaatggttgttatacaggtttacattttgtttgttttgttttgcttttttgagacagagtcttgttctgtcgcccaggctagagtacagtggtgtgatcttggctccctgaaacctctgcttcccgggtcccaacgattctcctgcctcagcctaccgagtagctgggatgacaggcgtgggccaccacacccgactaatttttgtatttttagtagagacagggtttcgccatcttggccaggctggtcttgaacttctgacttcaagtaatctgcccgccgcagcctcccaaagtgttgggattacaggcgtgagccaccgcatctgccctatacagttttgtgtttcaaaatcttgtattaaactctgtaaacaaagttctgaccatttttcccagttgcggcgtattttatgatcaagaaaatactaattaacaaaaagatcccaggtaaaaagattttaaaatagaggcagaggttaacagaaaatgcgacactcccaatatgagaagagaagagtaaacacttggctcttcttaccctgctgttctttattccaacctgcagtcttagtgggactctctgctctccctgattgggagagcagatctgctgaatgtctgctctaccactgagggtaataagagacttcagttcttctcccattggtgctgagaagtaacagggcatccgagaagacctaggaaatttctcctcatatgaaactgtgcttggtggagaggatgagaaaacatggagttagacgagtgctccagagggctggggaagcaaaatttccaacagcattctttaag

SEQ ID NO: 199542 - DNA, 1000 bp, Homo Sapiens
tacgagcgtcttgtctgattaatttttacattccctggacctaaaataatacctgttttgaaacagtagctccatgagtatttaccgaggtcagcagaatttcattaactgaatttaaatgtagtaattgaattacccacacaagtaatttagtttgagtagttttacttagctaatagtggcaagcataacattaaaatgggcaaagaaataagcataccagagttctgcaagcattttctataaacagccagataataagtattttaacttacgagggtttaaaaataaaattaaggatattatgtaggtgcatacataacaatttaaaatgtaacaatttaaaaacaaaacaaaactatttgtaactcacaagccatacaaaaacagacaactggcactttggctagtgggctacagtttgcccttccctgaaacagatttttgtgcaataaattcaaagattttgttcccgtagttgacctaaataattctgtagatttggtcctccatgatgcaaatttacatagacaaggtgattagacagatgatggattgaaatcaatttcttgtgagttaaattaaacaattgaaatgaattgttttattatgcctttgtctctgcatataagttagcaaattctgggagccaagtggaaaatgtggataaaaggatttaagcatgtctggagcccctagggagaatggcatctttggaagaaaaaagttagtggagttcaaagtgtgccttagaaaaggatagatttagatagaagatctcatccctggtaacaggaggaaggtcatatgcagatgggctttgggaggagtgtgagggtgagttagttggagcaggtgagggcagtggagctcactctactaacctggcagaacactgtggtcctcaaggcctgatgtaagtgcatttagctctgggagacattagacacaagtaagatctattcaggaaaatgttattacttgttcccaaaaggaattc

SEQ ID NO: 199543 - DNA, 1000 bp, Homo Sapiens
aaacattagaaaagtcatgttatatttgtatattattttgccttccttcaggtgataccaagtggaatattttttatattttgattagctgttgtggtttattttctgcctcagaagtatattaaaagttttttgtttttgtccttttcagtttttgaaaataaccatgtcttttgtaactgttttgtatcttatttcagttgctgctctgtcttctttttttaattaaggcaatattagccttatttttccgtgtttttaatgacaatgcagttgtgtttttacttttttagaaatgatattcctagtttcttaggaacttgtttttcatcaacagtggtaattcatcaaattggtaatgaaatttatcaactgaatttttagtatctttccagattaccattgattttacttgatgatatatgttattacatttattgatgttaagccactttgcatgttaagcgtaaaacctttttctaaccaacttatatttggatgacataccattgtgttttattttctagaattctcatatctatattcaaatctcattgcagtttttgtgttatatttctgttttttaatatacaggtatttcttgcttggcaaagtgattagcatgttttgatattttttctattgtaggagagtttggtttagaattcataatttcttgaaagtatggagatatttcagtgtaaagttgtctggcttttcagattattttgagctaagtatttgacataattgttttttaattttttttttttttttttgagacgaagtctcactctgtcaccaggctggagtgcagtggcgcaatctcgactcactgtaacctccgcgtccagggttcaagtgattctcctgcctcagcctcccgagtagctgggaccacaggtgcatgccatcacgcccagctaatttttgtatttttagtagagacaggatttcaccctgttggccaggatggtctcgatctcttgatcttgtgatc

SEQ ID NO: 199544 - DNA, 1000 bp, Homo Sapiens
ggactataggcctgcaccaccccgcctggctaatttttaaatttttttgtagagacagtggtcttgctatattgcccatgctggtcctgaactcctggcttcaagtgatcctcttgccacagcctcctcgagtgttgggattacaggtgtgagccattgtgcctggtcaaggaacttgttttgaacctggcaggctacaggaatcttcagacacaggaaatagtttctatccaacaaggagaggaacacagagctgacagtgctcaagtaacagaggagtaggtggaaaaaagtggttacgacattagtaaaaataattaaacccttcactgactgacacagaataactcagaacaaaaaagaaacagaaaacaatgctggagaccaggtgcagtggctcactcctgttaaatcccagaactccaggaagtggagacaggtggatcactttagcccaagggttttgagaccagcctaggcaacatggcgaaacctcttctctacagaacatgtaaaaattagctgggcatggtgatgcatgcctgtagtcccagctacttgggaggctgaggtgggaggattgcttgagcctgagaggtcgaggctgcagtgagctgtgatcgcagcactgcatgccagcctgggaaacagcaagaccctgtctcaaaaaaaaaaaaaaaaaaaaaaatcatctagtacaaagagcaagtaccaagagaaattataagccccatttatgcctgatcaaaaatagaacttgatgtttcattagtaacatccttcatgttcacgctttattcacactccctttgccctctccaggtagaagcttgctgtggacctccctattgctgtactcacgtgagggcttctttgcagcactgtcctgaggggttaagatccagcagagacaaatggaaatgtctgccaacagtgtcaccttgtcttatctggctgatgcctcttgaacttcctcgttcttactacacatccaggaccc

SEQ ID NO: 199545 - DNA, 1000 bp, Homo Sapiens
accgccgacggaatggtgtttttctgggggtgggaggagggagggtccaaagcgggtttattatttttaaagaggctcgtggtcccccccctttctccccccggggggcactgtgagtcccagagctcgagtccgaggacccgagacgtggcattctcgcctaaggactggaaagaatcctacaaaacaagctttggtttcattttccaacgccctggcctgagctcctgcagcccgaggacctggcctggcgtgggggatttgggggatgtcaagaggggaaggaaagggatcaagggtctcgctcctactctagcttccccccccacaaccaccccccaaaataacctacaaagaaagcctttgcaacgcgggcctgccaaggggcgcctcccccacctttgggtaaatccccctgtagttccaggttaaagctgtttgtttaaaagatttgtcctttgccgattctcgtgaggatgggagggggtcttggagcccacccttccctcgatctctgtctgcagcagctcacattcctgattccgggaggcctgggctctcttaagagaagccgatcacgccaaagccaccggctcccgggtgcccgcccggcgccctgcactccgcgcccagccccccgagcaggagaccccctcggctgcaaaacccctagccaaacccgccggccttcctctccagcctccctccccaactttgctaagggtgcctattttaacccggttttggttacaaacaccccctccctccctctctcccatcaggctctggttaccagattcgcgtttactttggaaaaatctaagatcgccacatccgaggatacatgtcttaaggaggcgatgagcttcccgtgatttttttttgtaagagattctttgggtagctttctttaaaagccagcgcctcgtagtatgcccaggcgccccagtttggggaagtcggggtgaagccccctggaacaccctcacactggcaaaga

SEQ ID NO: 199546 - DNA, 1000 bp, Homo Sapiens
ttagtccatttacattcaatgttaataaatgatataagagattttgttcctgtcatattgttaattattacctatttgctttgctatgtcagttgtgtaattgctttataagtcctgaaagttttatattttcatgtgttgttatgatgatgagtattgttttccatttccatatttggaactcttttgagcacctttttagagccagtccaatggtgaacaattcctgtagtgtttgcttaactggaaaagacattatttttcctttgtttatgaagctttatttagctggatgcaaaattcttgaattgcatttttttttctttaagaaggctgaagataggatctcaatatcttctggcttttacagtttctgctgagaggtccactgttagtctgatgtgattttttttttatatatgattagatgcctttctcttgccactttcagaaatgtttccttcctgttaactttggagaacctgatgactacatgctttggtgaagttctttttgccctgtatctcccaggagttttctgagcttcttgtatttggatttccagatttctaacaagaccagagaacttatcctgaattatcctctcaaacaggctttccatgctttttgctttttattcttctccctccagagtagctacaatttgtaggtttgagcacatcatataatcccatatttctcaaaagctttgtttattaaaaaaaaatcccttttctttatttttgtctgactgggctaattaaaaaaaaaaatctgtcttccagttctgaaatttttttcttctgcttggtctaacctatcgttaaagctttcaattgtattttataatcctgcaattttttttatgtccaaaagttttcttttttaaaagtaattatcttctcttttaatcctgaattgtttttcacatttctttgtgtgaagtttcaattttcatttcaatctcattgagcttccttaaaatccatattttgaattc

SEQ ID NO: 199547 - DNA, 1000 bp, Homo Sapiens
cagaattataatgaagtaaaatgaaatgtttaattgatctaattcaagcatttaaagatactaacatttttgtctgagttttgatgcacgaatttaccacttaattctaattagcctgatcattgccagcactttcccatgcatccattcaggaggaagctaaggaaaccttccccaccgtaactttttccttctccatgaattcacctgttaatcagatgcttctttgtgctggtacacagttctgtggtagcacttattatatggttcttgtctcttcagtgtctcatttatttactgcactgtgagcatgtgaacagagcaagtatcttaatcacttatggagcttccaaacttgaaccacttcatggtttagccccaaatgcagacactaaggtagtgtatccttatgctatttgaactgatctgtttttaaacattctggttattttctaaaaagctcatttgaataaagaaattataaaatgagaactcatttttactgtctatatgacatttagagaattaattttgtctgagagaatgaaaacatttacttgtgaaataaggcaaataagaattttatttaaaagatttgattcacacagaaaaatttctgtttaattgatcttggggaaaaatggggaaaatttggtatgcttttgagtaaaaacgtttttatattgggtaaatttttattttataaaataaaaatgtaatgaaagttatatatagtgttcaaattattgtctagtttttgtgttttacaaaattgtagttactgaaatttgtaacatggactccttgatcagttaactaatttaaatggacattttgttacattggtgcattaggtagaacaatgttggatgcaaacagaaaatttcaatacaagcttacttgaaaaagaaggacgtttagaatctcttttaagtggatgttcatgtagttttgatgccagaggtgattgatacagactagaagctcaataatgtcattc

SEQ ID NO: 199548 - DNA, 1000 bp, Homo Sapiens
cctcaactcttaaccattactggaaggtagctggaggaaatgagaagctgaggagaaaccagtgcctttttctgtgtttaggatatattaagcataagcacaattagtagttttatctgagaataaaagtatcctaaatagatcctggctgtgtgatttcaggcgctcgaggagtgccctcctggaacgtcagtttccttcctcaaagccccgagggcaggttcttaacactggctggaggtcaaatagggtactgactatatttccatttcaccagcgaactccaaggtcaaaaacaaggctacacctgacagaacatttaaaaaagaattacactgctgtgcaaatacaaagaagtgtccactgattttcaccaaccctgggtgcactgcctatgagttagcccagctcctcaaggaaatttacgattaaaaaataattcattgcctttccaccttccagcatagtacttcaagttgagatgctcaccggggcctcctaacccctctctttggatgcaacccctttcttcctaggtggtccatcctacaggactgttaaaccaatatttcttatttgccattttgaatcctcaaggattcactgagtgcctactctacaccttcgcttgaaaactttcagagatttcctgtattctgcttcatgcccagctccaccttcccatctaaacattgcccacttaccctaagccttccagtcttgccaacctccaaagcaccatgccatggggcctaaaatgccctcttctctcccctctgagcctgttcaaactcagctcagtctctcgtcctgggttttggtgtctctccagggtaaaggggtggggagggtgccttcattctgactggctcccagtgaggcagccccccttgaggaagaggctgagatgccaagtgacttgcctggagtcatttgccagcaggcgatggaatagggactacgagacaccctgcagcctctcctgggaggacaacgcccc

SEQ ID NO: 199549 - DNA, 1000 bp, Homo Sapiens
ccccatctctaaaaataaatgaataaataaaagttttttctttgtgtttacctaggagattatgttttacatcctaaatttataacactatggtttgaattgatacccatttagctggaatatcatacacaaactccagtctatacagctccaatcccctctttcatgttgttgtcacagagtacatctttatctattgcataaccaagaaaatagatttataattattttaattcatttgtcttataaattttgtataaaataaaacatggagttacaacaaccaaaaatacaataagacatttttatatttgtccatgtagttatctttagttgagatctttatatactcattaactttaagtttctgtctaggtttcttcctcttcaacctgaaggactccttttagtatttcatgtagggcagatactggtaccaaactcccttagctttcgtttttctgagaatgtcttaatttcttcctgttttttgaaggatggtttagccaaatacagaattctttttttttttttttgagatggagtcttgttctgttgcccaggctggagtgcagtggcacaatcttggctcactgcaagctccgcctcctgggttcacgccattctcctgcctcagcctcccgactagactagctgggactacaggtgcccgccgccatgcccagctaatttttgtatttttagtagagacagggtttcaccttgttagccaagatggtctcaatctcctgacctcatgatctgcccgcctcggcctcccaaagtgctgggattacaggtgtgagccaccgtgcccagctgctaaatacagaattcttagttgacaatttgttttcctttaagcattaaatatactaccttactatatttagcctacataatttctgataaaaaattgacagttgatcttatgagaatcccatgtatgtgacaaggtgcttctcttttgcggctttcaagtttctctctctgatttttg

SEQ ID NO: 199550 - DNA, 1000 bp, Homo Sapiens
caactagctaaacaatattttcccagctaaggttataaacagcagctaagtgggtggaaaatgtctaaaacgactatacataccagttcttttataatgcataaaaagtgggcattttgttttcaagctggtatctttgggatggaacttttagcaagcacacagtacatctcagcagtgtatattatttaaagtgcattctctctctctctctctggcattgtgaagactttttaaattttagctttacaaaggggggaaatcattaaaatgtggtttgtaccattacattccattatttgtcatctttatggctattctatagttttcattgacctttaatggtaagcttggtcaggagaggtgagcaggaatgttcacatacttggctgagggtgctgcttgagagtgtctgttagctgggcttcaatccacgtccctgtagattttaatgtccctacagactgctggcagcctgcttccagctgtggcaggcatgatgcagtgaattgcttttgaatgttctttactcaaataggcagtaattacaagcttaaagaggtttagtggtccagtaaactacataatcacccctgaattagcctgggctcatcagttgcagtccagcaagctccagtctgctgtttgtatgccgtcttgatcacatagcaacctgatcagcaggtgtggagcagccagagtcccccataaacacaactgtctactggggacaatgatctctaatgagatgaggctacatcatcactgtaatttaagtgggaaaattagcactagagaatgggtaccagttccaggggtctttagtcatattgggagcagcacgaattctccatctcattctccctgtctctatctttttctctctcaaaaatatctcctcaccaaatgtaccattttgcttctaacttacggatactttattctttagacaaggatttttcctgaataattaatgctagacagggcatctgtaaaggca

SEQ ID NO: 199551 - DNA, 1000 bp, Homo Sapiens
agtgcatgcctcccctgcagagaaatcctgtgtttcaactagatatttgtaacacctacatccttacaatgcagttaatcagatgatttatgtatttttagttgcgtagcctagaatgaatccagtttttttatgatcttagctttaacgtcgtccacaccccagtttgtccccaacaaaacaaaccagcaagatatttaataaatatttgtctttgtcattacttcagcaggttgtaaaaaatgtcagttaacggtgtctcaggtatacataaacagcttaaattattagcattgctacaattttactatactctcatctaaatctaaaaccagtcttcaaaataaaaacaaattgtcctttgccaaaatttttttaatcgcacaattaattgacattaactgccaattctttttggctaattgactaattttaacttctgtgttgctcttccagaggcatggctattgcaccttgggagaaacctttaatcggttagacttctcaagtgcaattcaagatacccgaaggttcaattatgtggtcaaagtaagtgttctatttcaaaaactactttgatgactcttttgaacaactatattttgaagattgtaagtgtacaacgtttaagatgcttttggcagcttgaaggtgtgcctgtttgctgtgtattaatcgaaaaacagaagggaacaagttcaggagaaaacagtgagattggaggatttctccagtattggtggcagaggttgcagagcctcagtgggagcaaacactcatctgccctgtggctctgtggttgctgaggatgccacaaggtggtcccttaggggtcgtaccatgtacctacatactgtgtcagtgatagaacggttgtgggatctttacctgatgatctcacgaatgttttctgcttcgtgtttttcacaaggagtgaggcttgtgtcacagaggaagaagtagctaatagaaaacaggaatttcatacaaaatagaattc

SEQ ID NO: 199552 - DNA, 1000 bp, Homo Sapiens
ctatgtggtctgttttactgtttcttccccggtaatttggatgctatgcatttcatttttaatttcctagtcacttcttttgaaactttaacattcacaacctctgtttctcactcaaccatttcagaaatcaaaatttaggagattagcatacctcgcatttcctttccaacctcttcctcccactcatttattctatgggggtttgtcacaaatgagtagtagatacatgaccttgagtatttcgttttttcatagaaatagaacattttcattcctttttttaattgtaattaccacagtttttagtctttggtctgtttttccgtggattcagtacttattgactgcattttaatagtttagcctccttatttgtatagttttgaaaaaaaaaatctttagttaagtggattgtgagtagatttttttaaggagcatttttataatatttttcctgaatccttgcatatttgacagtgtctttctattgtgtttatgtgtggcagcaatttactttatatcaaagttttttgtttttgttttttttttgtgagacacagtctcaccctatcacccaggctggagtgcactggcactatctcggcttactgcagccttgacctcccagactcaagtgatcctcccacctcagcctccccaatagctgggtctacaggcatgcaccatgacactcggctagcttttgtttattttttgtagagacagagtctcattatgttgcccaggctggtcttgaactcctggttcaagcgatcctcctgccttggccttgcaaagtgctgggtacccagcctcaaagcatattatttttctcaattctatagatgcaacttagttgcctttgtcccatgcctgtagtgtcagaatgcccaatttttttttttaaccttgttgactttttgttaatgggtagatgttttaaaaagctcactctgactgcaacagaaaaatagatcagaggggtgggacaagtagt

SEQ ID NO: 199553 - DNA, 1000 bp, Homo Sapiens
tctgctttggacctacgtttgggaagtaaatgccttctaaactcactatccggggtcattgtgggtaataagggagaagcatcagagaacagttgttggtttaaagtaggtactgcaactggagtgcattgtgcttgtcataggttgtttcctggcagcaaactgtctcttgaaactgctggtaaactgaggcaggctacggaagaggctcttgcaagcctgactgttcgctcctttgaaccaggctgagactacttccgtgggtggtttgtggtggggtagttgagcgcttggggaaggacactttaagccaacactaagtttgtataaaatattcagattaaaacccatgaagagagaaaggaggcaggatggggctgaagtcagactgggacgtaagacttgtcagtcttgctgagcctggtggagagggtccagagcatacaaaaaaggcattcctgtactccagccagtggaccctctcccttaaaccttctgtgctgacctcattacaaagtatctccttgatctatatttaaatttctgtctttaagtttttagattggcacacaatgtgaatggacgaattctgtaatgtgttctaggtggttcatggtataggcttaagacaccaattgtgcaatgtgaaaagtcacacggtgacacacgtgtcctcttgggaagaccaggtggaccttggactttacacaactaagtttataacaaccagtctaacaccaatgtgtactagcaaacccaggggacttctgcctacttccatactggaggagccaagtgggttgtttgactttctacagcgatctgagaatgaaataattgggtatgtgaagtcaatttgtgttccctagaggcagacttgtagatggaaattgtttaaggtgttaggtttactggtgaagtgagctctcacacctgaaagcaaactggaacagggtggaatgcaaactgtttgttttggaaaagaagcttaaatgaggcc

SEQ ID NO: 199554 - DNA, 1000 bp, Homo Sapiens
ttttgtttcttttctgtttttttttttgtttttttgtttttttttttttgagatggagtctcgctctgtcgccaggctggagtgcagtggcaccatcttggcttactgcaacctctgcctcccaggttcaagcagttctcctgcctcagcctcctgagtagctgggactacaggcccacgccgccatgcctggctaattttttttttgtattttagcagagatggggtttcaccatgttgcctaggctcgtctctaactcctgagctcaggcaatccgcctaccttggcctcccaaagtgctaggattacaggcgtgagccaccacacccggccaaaacaacatttttaaaaatgtgaaactcaggccagatgtggtggctcactcctacaatctcagcactttgggaggccgaggcaggaggattgcttgagcctgggaattcaagaccagcctgaacaacatagcaagaccccacctctaaaacaattttttttaaatgagccaggtgtggtgatgcatgccggtagtgccagcctactcagaggctgaggcaggaggattgcttgagcccaggagttggaggctgcagtgagctatgatcgtgccactgcactccagcctgggcaacagagcaagaccctgttttaaaaaattaaacaaaaaaaacccctcagctcctcaagccacatttcaagtgctcaagaaccacaggtgctagaacctagagtactacacagtatggagtccttctagaagctcctctatgccatccctctagtgcccaaggctcagggtcccctcccacccacagctccggattcagatggccagcattggagtgtgcgaacccaggggctctctggctctcattagcagggggctcctcgaatgtgttcctgagaacacctgttctgtaagaagctccttggggaagagaagggttccctgtcaaaagagtttgggaagtgctgggttaaaccacgttagaaatggaattc

SEQ ID NO: 199555 - DNA, 1000 bp, Homo Sapiens
atcagagccacatggagttgatcagaactggtcaaaaacccatggcctgaatttaaaggccaactgaattcagctaagattagcacagctgcctaactagcctactgttgtgtgaattctaaatttgtaatattggtcaaaagatgcacacataaaacatactggatgattccatttatatgaagtttaaaaatagacaagccatataatttagggatgtatacttaaatagtgaatccatataaaaacacgcggaaaaccatttaccatgaaagcgaagttaagatggtctcaagttgtgatcccgtgggtggaggtggttctgcagtgcttgcaattttctgtttcttgagctccactttggttacctgttagttcactttgtaataatacattaaaatattcatttgctttatgcactttcatgtatgtgggttatattccacaatgaaaattttccaattttaacaaatgaagacaaaaagaagcaagaatgatttgtagactttatatcttaccttgtttcaagtaacggcttgccttgttaaacaaggaacagattgtggttattgccacttactttgcatgaaaaagaaaaactttgtggtgattcttaggcctgtaggggctttcccccgacagttgtgtccctatcagatgagctcacttaggctgttatcaaagcacttggtaaatccccaggtaccatctgataccagattgattcccttatatttccttctgtatgggggcagagcctatgcttgctttatgtaccactgtgtagtatgcacagtgtctagagcatagcagatcctcaaatatcttctgatgactgacatttctctgtaccaggaattggccaacttgcttccctccatttgcaactgcccgttgcctgaccagggtcccatgcaaagaaataaagttatatgttttcttccttattcttgaaagaaacatgctatttgaaggttgtgatttgtcctagtttgaattc

SEQ ID NO: 199556 - DNA, 1000 bp, Homo Sapiens
gcatgtgaatagtattaacagccagaggaatggatggaatttccaaggaggtatgtaactagataggacggtttacggctgagctgtgagatctctgacgtttagaggtagaagttaaggattcagcaaaagagagagtatgatgtcttggaaactgaagaaacactatatctagattttgaggttgtaatagggttccatcaaatgaaattatataaagtattagacttactagtggtcactgactgtcttctttaatatacaatacgcagaaaattcaacaaatgtgatattctgttaaagaatcttttaatcattgatacctgcaaattgatactttcagagtctttataattctaggtagggttattttatgttaactgcacaattaactcatgtcatcaatgaaggttttttcatttgaattaagtccccagtccctataaaatgagaattttcctcatttgctgaagtcttccaattactttctaagttgaattagtagtgcactaaacttttatttccagagaaatgagttcaagtagaggtcatccatgcaaatgagttgagtgatctcaaactagcttataagggtgtcagaaagttctatctatattggtttatttttaaaggcaaaggaaagattaaaatatggatttgatgtatttatttaaagtgagatttgaaaatgactgtacttttgtctaaatcccagcacccatccagctacttatcagggagcaaagttcatgacaggcctgagaatcccaagatcaagaggcaacaaaccaaaggtgtgaggcgagtatcaaagatcccctgagttaaagatactatggacagtggggctataaattatcaaagtttataccaagatataaggttcttattacaacaaaacccaaagctctcaattcttgtttaatctctgcaatattttgagttagttattcttcagcttaataacggcgcaaattttttttttttaaagctaagcaac

SEQ ID NO: 199557 - DNA, 1000 bp, Homo Sapiens
aagtagtcattaattgtattgttctcatgtgtgtgatgtgacatttatcttttgctgtttttctgatttttcctttatatttggctttctgcattgtgtttatgatatgcctaagtatggtcttttttttttttttttttttttgtctatcctccttggaatttgttgagcttctcagatccatgtcccatggtcattttccagtgccttcagctacttttttttttttttttttttgagacggagtcttgctctttcacccagggtggagtgcagtgcagtggcgtaatctcagctcactgcagcctctgcctcccaagttccagtgattcttctgcctcagcctcctgggtagctgggattacaggcaggcgccaccacacccagctaattttgtatttttagtagagacggggtttcaccatgttggccaggctggcctcgaactcctgacctcaggtgatccatctgcctcggccttccaaagtgctaggattacaggcatgagccactgtacccggctagctacttatttttgacattttggtccaggttttgtcagtgttttttgtggaagggatcatctgaccttttctgtccagctttacttgctctcttgtattgcaatcacattctctgtgatccttttttccttctttgtttcattttctatgttgttttcctaccacacattaagatttctgttgaatttattctcccttgggtgccttgtacttttctgcatcactgcactggaatcatttttgtctttttctttaattttttttctgattatgattgattctttgaatttcttcatgctttgtttttatctacttctgctcttggtttttagatttcttactgtagaatgtttttaatattgccaaatgttctttttaagttattgtatttaatttggagtattgtgtgttataactatagttttcttctactgtaaaatgttttgattttcattttccttcttttttctttcctg

SEQ ID NO: 199558 - DNA, 1000 bp, Homo Sapiens
ttttatttagtgctgaatttttgtttgacagaaagcattattttctggcattttcctgctacatgtttgctttcaacatttctaaattctgaataactttgttttatgtgtataatgtatgctgtatagaattagcaaaacatataattagattttgctttgtaagtcaatttgaaaatattgttcatttaaataaatgacaaggaaatttatatttgtttttatgataaatatatatggtaaaactatcatattattttctgttctgtttattgtttttattttttacagttttttctttgtgcattaaaaaaatatttaagaaggtttttattaccttaataattacaacattatatagtactcttaattctctatttatttatagggtggctactgatactctagtacaataaataaatgataaaatgtttttattttctcccctcattccttttgtctccgacctgctatttgccagtaaaaattatttgaaaaatatatatttttttattttttactttatacttttaaatgttcttatactttgattatctggttggtcagcttttaaacatttgttgattcctgttattacatattaggcagtcaacaaactttctcatctttgccctttctcattctaattttggtagttgcgttatttctgcatagtaaaagcaaagaccatttacatttgtctgcgttttagtctgttttgttctgctatagcagaatatcacagactgggtaatttataaagaatagaaatttatttctgaacagttacagaggttgaaagtccaagatcaaggtgccagcatctggtgagggccttcttactgcatcatctcatgatggaaggcagaatggaaagagagggcaagagcaagacagaagtgggctgaacttgttcatttagaaggaacccactcctgcaataacagcatgaatccattcatgagggcagaggactggtgtcctaatcacctgttaaagg

SEQ ID NO: 199559 - DNA, 1000 bp, Homo Sapiens
acgaggagctggtgatcataagaaaaatacttttttcccttctttaaataaactgagatcaaacaccgcttttaatttttgccagttaaggattaaaagaaacagacgattttctgttgtcattataaattcataagagaaagacgatcttggcaccaaaacaaacgaagtgaaaacaaacaaaaacagagaatgggagaaaatatttgcaaatcatagattggataaggggccaatgtacagaatatataaagaactcctacagctcaacaacaaaaaaacaaaaaattgataaaatggggcaaagacttgaaagacgtttcttcaaagaagacttacaaatggccattagcgcctggaaaggtattcaacatcactaatcagggaaatgcaaatcaaaactacaatgagttaccacttcacaagcatgaagatgagcactaaaaagaaatcccagaaaataacaagtgttcacaaggatgtggagaaattagaatccttgttcactgttgttagcaatgaaaaatggtgtatctgctgtggaaaagttcggtgtttcctcaaaaaaataaatgcagaattatatgatccagcaatccagtttctgggaatattcctaaaagaattgaaagcagagtctcaaagagatatttatacatccatgttcatagcagcactattcacaataggcaaaaggtggcaacccaaatgtctcttgacagattagcaggcaaacacagtgtggtgtatacatacaatgaaatattattcagccttataaagggagtaactctgacatctgctgcaacatggacgaacttggaggacattatgctaagtgaaatgagccagtcataaaaagacaaatactgtatgtctcctcacatgagctactcccagtagtcaaattcatagagacagaaagaggggaagggggagttttagttttgcaggacaaagagctctggaaattggttgcacaacaatgtgaatgtactta

SEQ ID NO: 199560 - DNA, 1000 bp, Homo Sapiens
tgttgcaaaattgcaaacctgtagaaatgttgaaagaacagtatgacaaacacccatatacccttcacctagatccactgttcttaacatttttctacatttgctttagctctcttttttttagataagtcatttcaatgttaaaagtatcatgatgcttcagtattcatctgctgcactttctgcataatctcataccattatcatacctccgaaagttagctgtgattctgtaatgttatctaggatataattcatattgaactttccttgcttgtttccaaagtgtgcttttttacaaaatagtgagcttttttttttctttcatttttgaatccaggattcaatgaagaccacacctttttggttgatacgtctctttgacctcttgaaattaaatatagcccccagtcccggccccaaccccttttaaaatctttaaatgacatcagcagtttaaagagcccaggctggttgtcttttaggaagtcctactttgtgaatttcctcatggtggggtttgttacccaattattttttaattaaaaaaaaattccattttcagtctgtgttcacactgctttatgagtccagtttgcttagattttttgtgggggtacttagatgtagctgctttgggaagagggacacgtggaaaatatagagggagatggggaatatttagttcagcattttatatgctataaataattatagctgtatagccaaatgagcttttagagctctggattccattggaatttaaggatttttctcttcccctcttttcttgtagagattagtttgttgccaacaaccctggaactggcgaactgcttaaggcataatgttttcattaagaaaggatttaactaattagatttgactagcaagctgacaggttaatcaataagggaagtggggctcagcaccccttaagttgggagtctccattaagtcattatggtgtctgctaaaacattcttcttcacaatgattc

SEQ ID NO: 199561 - DNA, 1000 bp, Homo Sapiens
ttttatttattggagaaatagatgaataaatagtttacaactgtgataaatgcttggtgaaatatggtgagagtggtaccaggggaggtttctaagatgaaagggtaattggtttgttttatatacaaataatgcaaggggtgaatgaaagtgtgctatgtgtggtctgaagcttaggagagaaggacacatgccacatggcattcagggagaaatgtttctcaaggacctgaagcaccatattacataagttataaatggaagaattttgttagtattcattgatttttaagtttctcttggatatccatggagaagagctgtcaaagtcttgctcaaagccacccttcttagtcttatgtcaagtctctaaaatagtacacagaaagaacatcactaccagtgccgccaccacaaaaagcaaccacaaatgccataactgcctttactattaccactactgtcacactgccactctcataactgccaccataataaccaccatgaccaccactaccaccaatgttaccacaatcaccaactatcgccattaccatcaccgccccaaacaaccactaatatgttgccaccattaccaccactgtcaccactccaccactaccatcatttttacataacccttccattacgattgccactaccaccaccatcaccacagtcattagtactaccatattgccattgcagccagcaacaaccactaacactgctgccactactaaccaacatcactgtcactactgtgacctcaatcaccattatcatcatcaccactgacaccattaccagcgctaccaccaacagtctcattctcattcctgaaatatgttcctaaaccttctcaagcattttagtagtcatattggtcccaggtcagagttctcacatgtgtaaaatgagtgatattggtagctattgttaatgtcaactaaaggggcactttaataaaagcccctttccaaatgtttaaggagaattc

SEQ ID NO: 199562 - DNA, 1000 bp, Homo Sapiens
tactggggaatgggggggccctatggatatcttccagtgtgcatagagagaatgggtggctgctgggtgagattgcactggggaatggggcccgtggacatcttcccgtgtgcatagcgaggacgggtggctgctgggtgggattgtactggggaatgggggggccctatggatatcttccagtgtgcatagagagaatgggtggctgctgggtgggattgcactggggaatggggcccgtggacatcttcctgtgtgcatagcgaggacgggtggccattagagcagtgcagacgggacctgtttccagaagaaggactgaactgaccagatttgcatgatatgtttttattgcactgggaattggggcctagaggcccactggggtttgattgtgctgttggtttcatgatggcctggatttcaggggaggggcaggtgtagagggagatggagggaaggtggtaggtgggagagggcttagcaggtgagtctctgagacttgtccacggtgtggggtgactttggggtctgtgccaggatgcccccgcctcagccggcttcatgggcatcagagggatcagctctcagtgggtccctccccaggctggggttgggcaggctctgactgacccctgtccactggaggcacgggaggctgcatctgggagggcgtctccgtcagtcccgtccccaggacctgtgcccacacgcctgggcttctcccaccaatgaggtgagcttcccaagcatcgtgaactttggtctatcttcaagaaaacccaaaattgcacctttttttcaaggcctggcctgtgtcctggctctgccacctgctggccccttcctgggtgggagggcaggggtgacccgatcagtgacaggagggtgggcgtctgtacctcccacccatcccgatgagcaccgaaggcctgagacgcagggcagcttgtgtgtcggtctttgcaaggagactgtatctgattttagagcagaattc

SEQ ID NO: 199563 - DNA, 1000 bp, Homo Sapiens
cccacccgctgccatccatacccctccagccccctgtgtggacaccttgttcccaggccagccccacacagtaggcagtcattaaagtttggtgagtgcaccaacggctctgtccttccggctctcccctctccatcccctctgggcctctgcagcactgtgtgaattatacacaaagacaaagcttgggtgtcatggtttatcagaggaatgtgtctgctttctgggcttggggactggcagttgtgcagccagccaggaacagagctggggaagataccctgagcaggcgacatcttccctgaacttactgatcatcacagccagaagggtcttcagaagtcatctcgtttctaccccgttactcccttcagtgtacagaggacagaactaaggcccaagagttaaggaaacatgcaaattagaaacagcaaattaggaacaaacctgggaacttggagccaggcctccttgtaccatcacacactcgcttagctgaaacacaagatggctaccgtcggcttggccatatcaccaggtttacagtttggtttagcatggtcctgtcctgatggccttccacacagggaagcagggcccacgcaccacccacagaggtgagggcaagagctggcctgggtgctcgacctgacaccctctggccttcccattccaaggcgaagccactggcccctcctgcaggacacacacatgattttacagggcctctcacctggtcccttagttcccctcgtggctattggagcccatttttaccaggtgagcgcaaaagagaaccatccctgggcccttgtgaagactggtgaggagaagtcgtgcctctgcttcctgtgttctctggcacccaggaatgttctcaggaggctggagatcagctggaacagacctcccatcttgcctgtcagctggaggcctgcccaactctgggttttttcaccgtgtgggtactatgccccctaccctgaaactttgggaattc

SEQ ID NO: 199564 - DNA, 1000 bp, Homo Sapiens
gagaagagtgctgtgaaatggagacatgctttttatcacttaaatgtatgcagacccatatactcagaattttcaggattctgaaagatatgagtgaaaacttgtgtcagagaatatatgtttatgtggcacttatttggttttatgaatgttttagagggaaagttgccaggcgagaactcatcctctaaggacgcttgatagcatgctggaaccattcgttctggatctgcgccaagcctcagtggtcagcaatgatgatgagcactattggcaacatgattttcagaaagaacaatcaaaacagattctgtttgttgccctgtggattggttccaagaaacatctttgtctctggatgatcaaagcatggtctgataggctaagaatgcagtaattgttataattagctaataattttggagcaaaaaaaattattagtggctgctaactcgtttgcatgctaatgtttttggagggaggggaaaatcttttgaggcttgacatttaaaaaatggatctgagttaacttttggcagtagttgttgttagaataatatacaggagattgtatttaggtgatgccttcagagaatcctaaaaggtggctggtagaacctgtgtgtggtttctggtatctcaggtaaagttgtccagagtgagcttcctcttgaggacaaaggacaagaggaagaacaggaggagccttggatttacagattctaccatttactcacaagaataataaaaattcaaaacacctgctgtctctcaggatcaaaaagcaacacagcgatttcttttaaacaaaagcaaacacagggcagcaatgagaaattcattatgaaagaaaatgaagcaagtatctggacttgggcccttcccaagccctgaaaactaaagtctgaacatcctgatagatgagtcactgcctccttcctgctaatgtttgtacctgagaattcttttttttcttttgtcaccatgagggaaagaattc

SEQ ID NO: 199565 - DNA, 1000 bp, Homo Sapiens
agggatttcctgattctttcccggacaacacccgcaccgtccaaccgcccacttcccgaagcgaagagcccagtctggatgccaacctgttgacgtcttcccgcttggaagctgagcaggtgctcacaagcatggaggccacactcggaggccggatctgagtcactccctgcccgaggaacgctgcgttccggccgacgcgtcctcccgtaggccctggcgaggtcaacatccctgccacgcctcgcgctgcttgcggagctgcgcccaggggatgacctttttcctttgcgcggagaagggggcttgagaaacccgagctctgaaccaggtgggattcattcattcacgcatgcattcattcatgtagtcagtcagtcaatcagtcaacaaatatttgtcaaggccccacaatgtgctaggcactgttctaggtactgagggacacagcggtgcccgaggtagacaaggttcctgctcctcttgtgtttgtcatgcttgctggggagacggacaaggaaaatgataaagttaacagtaaatagtaaaggctgggccatggcgggagatgtgatcagagaaggcttctcagaggtcgtggccttgacagacgaacaggccaccgcacgcagtccctgctgaacctgcattcccagcgtctgtgtcaaagacccggggcggcaaaacgaccaggaggataaaagagcatcgcagtcgtaacggctgccgaaatagctcagttgggagagcgttagactgaagatctaaaggtccctggttcgatcccgggtttcggcacttcctctttttccttccccccgggggaaaaaggaggtgcatagacgaagccgattccttccaattgatcaaaggcttttactttctatatttaacaaagccccgagcagtgtccgcgaggagccagagggaaaggaaactccccctccactccccgtttgggtaaatcaaataaggtcaagtttttcccgtctccacctcc

SEQ ID NO: 199566 - DNA, 1000 bp, Homo Sapiens
aatcctttgcggcatccctacgacattggctgtgtcgtttatttagaacatatcatgtaccattttccattgtctgttatctaagctgactaaaatttctggtaggcagatcctaaatcttggattatcaaggacctacacccaatatcatccctaagactcaaagctaagcagttactcgattttataagctctttagaagaatcaaaactggagtatataaaaagcttttctaaatacaattttgaataatagggtcatagatttactatcattaatacttgcgtataaagaaagaaaaccaaaggatttatttacttttgcatcttataattatccaactcatatctatcaaaagtaggtactgattacagaccaatgtttcacaagccccagtgagcaccgattgcttaacacagagagaaattgttattccctgatacacagactgagaaacagaaatgattaagaaaggcctacccgccagtagccaacctctttggaagtagaggatatctacatcatgtttcctttgatgttaggaatgaggactccagactaacacagactgtattttccctgatactaatcataatttcctcaaattttccagttccaaccactagatgtcatgcagagaccacaaagtagaacatcttagtggttttcattgtttttttttttcccccacgtcgagcattaccaattttattaacttcaacatttaaggtggtttggaaaaattttaagtgacaggcactaaagacacagatcagtgcaatttatttcacaggctgggtgcatagacattatggcaaaaatatatagaattaaaagtactacctcattcattgcaaagcattatttctggaatctgaaaaattcatgcaagtgggttccaaaaaaataaaaaataaaaaagatagatagagagagaaattctaaagcctcccttctttagcaatcatgtactttaccctggtagacaaaactggaattc

SEQ ID NO: 199567 - DNA, 1000 bp, Homo Sapiens
tttatgccagaggaaaagttctaacattatagaggggacttacgtgagcccagaaggttataaagatggtagaaaatgtggtcctaagtgtacaggattttgataggaacttaggacacttttgatgaagtgtgcacctctgccactaagttgtgcatgccatgttgcctgctcgtttctgccactgcctctgttgaacagacagcaatagggagtccatcttcatgatgtcaatttcatcacatctggtcctttcatttctaagaggtaagcaaacacctcagctctgttgcctggtttccatatctgagagcgagtgccacaggccttcaggttcccacacctatccatcgaagactttcccttgagtggatgtgcggaatccaggcctgtcagtgtccaggctcagcctagcaggtagactgaggtggctcctcataaagctcctgcttgtcttttacaggtgaaggactctgccaaacagccccagatggtgttcacggtccgccacgccaccgtcaccttccagccagaaggggacacgtggcgggagcagaaggagcagcgggccgccctcatggtgggcatcctcattggcgtgttcgtgctctgctggatccccttctttctcaccgagctcatcagtcccctctgctcctgtgacatccccgccatctggaaaagcatcttcctgtggcttggctactccaactccttctttaaccccctgatctatacggctttcaacaagaactacaacagcgccttcaagaacttcttttctaggcaacactgagggagaggaccaggattgaaaaaagtttcttcccataattcagtggaattcccagttcatccatttcccatccccacccaacagccatgtggacgggatgaatcctcaccattctccagggtcatcttcagaactgcactggcctcttttccacctcctcagtaggaatatgactcctcatagagttacggtgacatgatgtat

SEQ ID NO: 199568 - DNA, 1000 bp, Homo Sapiens
ttttatctatctgaaagatgatatggcttattccctgcatggaataggaaataaaaggtgtaaaataggaagctctactgtttcaaagtttcatttgggtttctgtggattcctaagcaagacatgcaaataggtaaacataactacccataacatccaagcaaatatgaacaattttatcccaaataccttaaccccactgacttctcaattagcacagaattcagggctgcaatggtgtaaatggtctgtctacatttgttctgtccaatatagcagccactggccacatgtgtctagtgagtacttgaaatgtggctactgcaaattaggaactgaatcttttattttattaatttaaacaaatttaaatagccacatgaggctagtggctactatgctggacagcagagaagctaatcttttttaaaacatgatttcctacattttcctttacttttattaggctattctgatattaaaataacttcttatttaaaaaaggattctttcaaattaaattctctttttttattcaaaatcattttcttttgttttgtgttctactcagtgacatacttgtgaaagccttttgaaacaattttcagaaagcctgacactgttgtctttgttgagctaggtaactttaagtcacttagacattttaacctttcctatcttttactttccctgctcttttccatattcctcaactttctagatatgtgaagccaaaataagatgcaatatatactgaataacgcaatggagttgtgtggaagaggaggaaggagagtgaccttttaagaatagttttaaattttgagaaaagctgaaaagatagtagagttgctatatatcctacacccaattccctctatttttaacatcttacattacttcaatatggtgcattagcacaaccaatgaaccaataccaatacactattgtcaactaaagttaatattttattcgaatttccttagttgttacccagta

SEQ ID NO: 199569 - DNA, 1000 bp, Homo Sapiens
gctgtaaaataacaacaacatcaatggcacaagcaataacagcgaccatatcatcttcaagttttgagcattcccgtggtagacactttgctcattctcaaaaaatcccatgagtaaagaacaatttttagcaccattctatagagaatagattcagatacagagagtttaggtgattttccccaagtcaaatgagtaagttaagtaggattaaacctgagtcttcctgacttcaaagaccagatttccccacactgctacctctggtttattcagtggcatccatgatggccaagggacagctgccaggaaaaatcagggggatctcatttggggtcaccatgtgacaaacacctcaatctctcaacacttttcacctccaaatagctaatgaggtaagtccttattcaaaatggaagctttttgtaaacaaattgtttaatcttagttatcaccccataccaccaccaattcacttaacaaagtcatttgtaagtctatcagctttgttctgaaaaacaaaaacaaaacagctgattaaactcgtgagcatggcattaaaaaacaaataaaatggaagcttttgctgcaacactagtcataatccgtagcaatttacttataccatcacctattttgcgttgtttctagcctgggaaaagaaagtctttctcaaagccagcctcatcacttatttctatccattgtttattcatttgtcattcattcactcaatatttattgatcatctcctgggtgccagatgcagtgccaggctctggaaattaacagtggtttgtcctttcatgccaatctttccaccatcttcagatcttccttgtgtctaccatcccctttcctgtcacttgtacccactccctcttttgctggtttgttccaactcagcctataaaaatgccgaaatcatttccatcctcttccactcccttcttcttatcaccttccttctgctcttctaagccaagcttccaaagaattc

SEQ ID NO: 199570 - DNA, 1000 bp, Homo Sapiens
gggaatggagcccatcagtggagcagccctaacggttcttcagggcgtgctctctggtgtgtggccagcccagcaaggccctggcctctggaagaaccagggccccgaggcaagagggattgggattgggtggggtaccctctaattaaaatctgttgatgtgaatacactatgaggggtccccaagggagggacaaggggcagcctctggagacagcgcagcaagttgtaaacagcttaatcagctgtgccagggccaagtagaccaggggagtggggagcttgactcctgggccctcagctaaactgagcttctggcgatggaggaagcagccaccctgcaaaagtcacacccacacacttccttctgcttctcctctctcgtgaccctgggggattctgccacagtggagcccagcccatcttccttgtcctcttagtccaaaggcctctgcagccttcaggctccagctccaatgcctcctccctcaggaagacttccctgaccacaccagcagcatcgacctagcccctcttgagtgcccataacactcagatgtggcacttgtcattccactgtcctggtctctgaagtggtttagtggctcagctgctcccactcctgtccccactctttctcctccttgtggggagaccaggcacatagtcagtactcaaaagttgtatgttaagcactcagttatgagggcagcctgttcagatgccccagcagcagctcaacagcaaagcggagagggagagctgaggctgagagagccaaatctctgacccctccccctaccagccatctgcccctgggttcaaagaccccatttcctctgctctctgccttgggaatctccatttcaggctgtccccagggactagagcccgcatttctctcccatatccaggaagcctggcttctctgtgtttaattctctgatcctcccaagttctcatctccactagagaaaaaccagagtcctctcactcagaa

SEQ ID NO: 199571 - DNA, 1000 bp, Homo Sapiens
ggcatcttttagcttttttagtgacttgtttgtagatatttcgagctgtcactcctacccatagtactgtggcaagggtggaatagtgaagaattatcccaacctacaaggaagatcaaagaataaataaaagaaaaaaaatgttcctactaaggcttacctcaaaattggtaagtaactcagaagtctgatttgaaagcagcaggaaggcctatcctaataatcaactctgttgcctgctaaggcaacactgtgttctaatagacatgtgacagggaatcacaatcctcaaatacacaaaccaacaattggctctaggaagcccacaaactaccatttataccaaagacgacccttaatacaggacagaactggctcccagacattaaaccaaaagtgtgtttttcatagatgtgacattatacattagagttcattttcttttttttttttttttgggacagagcctcgctctgtcacccaggatagagtgctgcagtgtgatctcggctcactgcaacctctgcctcctgggttcaagtgattctcctgcctcagcctcctgagtagctgggactacaggtacgcaccaccacgcctggctaatttttgtatttttagtagagagagggttttgccatgttggccaggctggtctccaactcctgacctcaggtgatccatccacctcagcctccaaaagtgctgggattacaggcatgagccaccatgcccggcctagagtccattttctaacattctttttaaggaggaatatacagagggcacaggttaactacagggtgaaggccacagcacacacagaataagttccagagtaagagacctgagatatgattcagagcttttatacactgtaacaatcacaaagcaatataataatatattgatggttaagagggtgaactcagaaatgaaattttccttgatttttaaactggtattcacctcttacctgctgggtgatctgagcaaagtc

SEQ ID NO: 199572 - DNA, 1000 bp, Homo Sapiens
aaaataccacaacctgctgaggtgcttgctgaagataaagggaacacagaacgggtagtgaagaaggtagtcattaataccagctatgaccgcgtgaccagctgcaaaaaggaggtctgtaattttcatgagtatttcctccttttgttaaaaacgtgtttgtgcatttatacacttctacttaagaaaatatcttcatgttaggccaggcgtggtggctcacgactgtaatcccaacactttgggaggccgaggcaggtggatcacctgaggtcaggagttcaagaccagcctggccaacatggcgaaaccccatctctacaaaaaaataaaaaaattagctgggcgtggtggtgcacgcctgtaatcccagctactcaggaggctgggaggattgctcgaacccaggcggcagagattgcagtgagctgagatcgtgttattgcactccagcctgggcgacaagagcaaaactccatctcaaaaaaaaaaaaacaacaacaaaaaacatgttatttcctttcttctgtatcacatgacatttagatttattgacttcacatcagcatttaagtattgttaactttatgtcatagtatttgggttggggattggtgcgtttctggttgtacgaaggatagttatattatgttaggcataattatgaccctattattatctttatttgaagattatatatgatctcaggagatgtgtattgattcaagttgacaaggggtggatttgtgatggttaaaactgagtgtcggccgggcgcagtggctcatgcctgtaatcccagcactttgggaggctgaggcgggtggatcacaaggtcaggagatcgagaccatcctggctaacatggtgaaactatgtctctactaaaaatacaaaaaattagccaggcgtggtggcgggcgactgtagtcccagctacttgggaggctgaggcaggagaatggtgtgaacccgggaggcagagcttgcagtgagccga

SEQ ID NO: 199573 - DNA, 1000 bp, Homo Sapiens
gcagtggcacgatctcggctcactgcaagctccgcctcctgggttcacaccattctcctgcctcagcctcccaagtagctgggactacaggcgcccgccaccacgcccggctaattttttgtattttgtttagtagagatggggtttcaccgtgttagccaggatggtcttgatctcctgaccttgtgatccgcccacctcagcctcccaaagtgctgggattacaggcatgagccatcacgcccggcctcctgatttttaaaaaatgtcatttcagaattggatttctgaatccatattaaaacaggatccatgtgctatatttggttggtatgttattttaagttctccctcttttttctattccaggccatttcattgttgaggaaactgggtcatttatcctaaagaatatccgctttctgggtttggatgctatatccttgtgatgtcatttactatattcctttgtcactaaattttcagtcaagtcgtagtcagatttacagatttgataagcttcaggtttaatatctttaggcagaatacttcataggtggtaccataaacttcctattgcatcatgtcatgagacacataatttctgagtgttccacatttagcaatgttaaaattaattagtgatttcaggtattgtcagcctgatgtaccctttacaaaattcccaaagagctaatggttttaataggcattaattgttgcctagatcctttagcaccctagggctccaacatttttaagctaagaaagtcttactctattaaaatattagatcattaaacaatcaccagtattttttccaaaatgttatttatttatttatttattaacattcaattcttggaattcattttggtgtacaaggttaaatgaagatttaaattgatttcttccagaaaggatgtgtcccaagaaagtctgaagacaagtagtgaaaatggcctttatctagtgaatcacccatctagtgatggaattc

SEQ ID NO: 199574 - DNA, 1000 bp, Homo Sapiens
aactgtttaagttcaatggacattttgggaaccacttgcaatgaaattactgagggtagcggggataatcggaggcagagcagaggctttacatgtggctcacagaatcgatctttttatgtctctgtagttacactgtatacatcatcctggatcacagcagagccaaagtgacaacatcccacagaaaggaaaggcaaaatccctccatatctgtgtacatttctgtttggaaagcctagaaacaaaatcttggaaccatataactcattctcactgcagtgttctcagaaatctgcccctcccaactacttgtcagcccacatagttaatacccagggagaaataatcagctcaaacaagatgattctggccatatgttacttttcaaagatgccaaaactatcaataatctctcattgaagtctctaaaccaaacgaagaacaagaaaaaaaaatcttctgaaaaatatcaagttaattcttctgataaaaatttgcaatagttaagggatacaaaaagtctttacctttgctttctgagatagtaggatctcccaaaggctagaccataaagcagaacagattcccttaagaaccttttaaagtcttactgcttgaaaaattgtcatggccttcaataatgctgagagaaaaatttatcttgctgctagtttaagggactacatttcaaactcttcttaaagaaaaataaaaagagaaagaggacagacttctaggactgctttgaaaagcttgagcaattacttcaaaggaaagggtgtctttgtccagagagcacgtttatgactactgatgcaaatcctaaccaaaggctgaaaaggatacccagtgcatctttatggatggccttaaaggaagatgaacaagtcaaatgagattaaagacagcccaaattctgctgcaaataccagggcacatcaggttttacagaggcacttctctcagtacgtaatactagatatcaataccaacttac

SEQ ID NO: 199575 - DNA, 1000 bp, Homo Sapiens
atgctagatcaactaccatatttacatttcagcatgagatgatgatcagaaacagaaacttaaaaggaaggtgaagcaagtgataaaaaggaatgtcggctattgggggtgctagtccagatgttccactgactttgtcaccctgaacaagatgttcaatctctctgcctgcttttttgaatgtgtaaaagaaggaagttggagtagactatctctaaggtttaacattctctgatatattaatacatttatctctgtatccacagggctcaagcacctcttactgcctcctcactctggaaccaaatgccttactgtaagtggcatctagatcttgccagtgactttcctgtacagggcctaaactcaatctctggttttctcagcatttaaggtacatggacaggtgcaccttggcagttaagattatgttgtatttttcatgctcgattccatacacatcactttggtcctgcttcctcacaggtaggaggagggatatttcacagctcctggcttaaatggaggacactagcctctactgggttaaagtagtggagggttagactcaatatgtggtagcctctcttcttattgcaataatgttctaaattttaaaaactgacttttctgaaattgtcatttttttttttcagggatgggggaagtgtctatgtatttgtcatctgtttttaaggttaattaataatctctctcacaagagagaaaaagaaggctctcttccaggcctctttgtttcttctctgcctagaatgcatattcccatgttttcacgtagctaattctttaactttttttatgtctcagctgcatcagggaaacattcactagtccttgtgatagcaaggctccattaacatctgtttcaacctttttctagtgagtcttcatcttccgaagaggctagacagctaacaaaaatacatttccttgactctcttgcaacttggattccagatagatttggtttcggcaatga

SEQ ID NO: 199576 - DNA, 1000 bp, Homo Sapiens
tatttttatgctttaattatcaccctgtgcccttttttctctttccttttttagcactaattattccccaaaaggaaaatggggaaaataaatccaagcaaagcagccctgaaaacttttttgtttgttccaattttaaggatatatcattgactaacgacttaaaactatgtcaactagtcttttgcttgatttccacccagtttattcattagttgaccaacatttttgctcctactctttcatggctgtgtttttcttaaatgcaaaacacagtattttttagaacttttctttgcttttcaagtcaggaaaaatttccctaccatctcattccaaaagcacttggcaggtaaactctgttatatccttatgtatgcaggtccttagctaagtataatggcattttgccaagtaaacaatttacagtctattatttccactggaaagccccctttcaaattgaagaatttcacaataaaaaaaaaaggccactggtcagagaacccccaagttgttcttagcattggtatttggggtttacaacttaatggggttgcattcatatggtcaggttgataccaacacatcaaatttacaatagaaattttaggacaaagtagttctgtcaacagtaccattgttcccccttcccttgtcttccccatctccttcatctttaaaattatttacccctctgtatggacctctccagactccacccttgctatcctctcggctttatccacacccctgaacttttatcattgcttcttcttatcaacactgcttgctggcttctttcaagatttctttccaaactccattaactgctacatacttcttctttcttctcaaatctctccattagtggatttcccttctcccaacctaaaaccaagccaagagatgtggttggcatacttttcactgaagcttccagaccttagttccaatacgtcttatcaagaatcccattttctctgcccatacagaattc

SEQ ID NO: 199577 - DNA, 1000 bp, Homo Sapiens
acgtatgtacttctgattatgttgcagactatgttctaaatggtctcatttaattcttaccacaactttatgtaatagagacttctattttccacatttttaagatgcagaaactgaagtccaaagatgaaagaccagttaatacagtattagtaatggcaataagctttgaaaatctcctgagaaaaagggaagcatgacccaagatccaggaagtgcatttccacgtccaaccatgctggagtaactctctacaagcaactctaaaactaaactctaaaagcatatatggataaatggttttctggcattggacaataggatcacatgctttatgcgatttctgagagaacggggctctaggagatgagatgcgtggctgccccactctcagcctggaatgatttcctaaccaaaacacaaggagttgaagtccaggcagagaactatggtctcattgggatgagaagtggagatcagaatctgaggctgctgaaggggctgctatctgcagggcaacggaccgaggagattcaatactgacgtgatgtctgttctccaaaaatctatacactcaatgcaattcgaatcaaaattccaactgactttttaaaaattggcaaattgcttctaaatgttgtatgaaatcaaatgacctagaaaattcagcaattctgaaaaaaaagaagtaactacaaagttggaagatttaacctacttgacttcaaaatttattgtagggctgcagtaaacaaaatacttaatgttgcataggatcaattaaatacaccagagtccaaagtgtgcccacacatatgggcaattgatttttttataaaagcaccaaagtaatttaataagggggaaatggtctattttcaacaaatagtgatagaatagttagacatctgtatgattacgaacaaaaatgaaccctgaatagggtagcatgctccctcacactaacacagtaattaatttcaaatagatcatagaattc

SEQ ID NO: 199578 - DNA, 1000 bp, Homo Sapiens
tattctccataagcattctatgtgatagctctataccaacccagtgctgttaaatgtcaacaaatataaatgacctcagtgattgtgatgtttaattgaaattgaagtttctttatattaagtacacctagaagtactgcatatttaaaactgtataacatgtttacgaataaattatattcctataccagtgttataattttagttcctatctttgtgaagtgtttttggattgatttaaaaatgtattgcaacatattaccttctagataacagcatttcacagtttgcttctaaatgccacaagggtaaaacacatgctacgtgactttccactgtgatgatgcagagtgaataatatgtgatttttatttaatttattcaataaatggtcattgaatacatactgtgttgttagggatacaataattgataaaagagaaattaactctgccatttgtgaggcagatattaaatttttaaagataatcttgtcaagaactacacaggaaactttcacaatgactgtgtgttatttcaggatttactgagtttggaggcatgaggcattttggctcccaacagttatgcttgatattagaaaaccattaatattattttctcttttaatagatataaaaataggccaggtgtggtggctatgcctatatgatcccaacactttaggaggcggaagtgggcagatcacccctggtcaggagtttgagaccagcccagtcaacatagtgaaaccctgtctctattaaaaatacaaaaattagctaggcatggtggtgcacacctgtagtcccagctacttgggaggctgaggcaggagaatcacttgaactgcagaggcggaggttgcagtgagctgaaactgcactccagcctgggtgacagaatgagactctgtctcaaaaaaaaaaaaaaaaaaaaaaaaaacaacgaaagcgaaactaccaatctgcatatttccttctaaagccagaaagaattc

SEQ ID NO: 199579 - DNA, 1000 bp, Homo Sapiens
gctgtcctccaatttaatactttctgtgttgctgttttattttctttcttctggaacctggcaaagtgcgtcaaggtgggtcaccagatgtctgactcaatcttctatattaataggttttctctgtattgttaaaattaattttaaattgattttgtgaaatttataattataggatttttttcatgttcagctccatttaaattttttcctgtttgcccattcttcttttttcttatcactttgaacatactgatctcacacagaaaagacgcattgatagaaacgaatttctgaactgagtccaaagatttaaagaggttacatataaattgtaaaacacctacatctggttgtaccctgatgaaaaaagaaagaagacaatctctttatcatgtctgtcttttgttttgaagttgttacttaaattttgttaaaataaattgtggtttattgcattattttcctcatttcttcacctcttcttgcgtctgttcccttgctatggcctcgtcatcacagatggcatgtactcatttcatcttgtctctgggcttggctatatgacttgctttggctgatgacacatgagcaaaagtcacagtttgtattctaagtgcaagcctggaagacctcacatgttcttgcttgttttcttttctttctggccgatcatggaaataacataaccatgggtagcctgctggtcagcagagccaccctaggtaattaatagacatgcagtgacaaaaagagcttcccagttgagccaagcctatgtcaatcagattctagtagattcacagatgcatgagcagtaagaaaagtttacacttattggagtgatttgttatgtagcaataagtaaccaatacaatacgttttaaaatattttctctggtaagtcattttcaaaagtaattctttctgtgcttcttgcttaataaattttttttgtaaatcttacttttaaaactttattcttttttgccttgaattc

SEQ ID NO: 199580 - DNA, 1000 bp, Homo Sapiens
tgcaggagtttctgcaccactgaggtgagttcctgctcattcttggggtcagtctcggctatatccctggtgcccatctaggtagtgattgtaaaacatttttttaacctattctgggaccttaagttctttgtgtaaaatggaaggagatatgtaatgagggggctattaatttatttcaggaacaagtatagacttgctagtgggaagatccatcttctaaaatttatagggtattggccaagttcaggaatttcacagtgctctctatgttgggatttttgggttatgttcttatgtaatccacgttgcatgacccttctagtaagtttgatgagacaacgtagcacagcttaatttgatttttctaagtagccggcatgagttttctctaggttgtttaccaatagactctgtgtatatggacaagattttttggttaggcagactttactttttgcaggaggagcctttaatctggggacatggaatgtccaaataccagaatggggaggacttcactctgtggcctcttcccatcctagaggtcttattccctctaagtaatctatttttttttttttttttagagacaagatctcatcctgtcacccaagctggagtgcagtggcacaatcatagctcactgcagcctccaaactcctaggctcaagcaattttctctcttcagcttcctgagtagctaagacgacaggctcaggccaccaaacccagctaaattttaaaaacaagttggttttgaactcctgacctcaagcaatcctcctaccttggtctcccaaagttctgggattataggcatgagccactgtgccctgcccctgtgggtaatttttacaattcttattaatatttatttttttatttacttgtttatttatttatttttgagacagagtctcactctgttgcccaggctggagtgcagtggcacgatcttggttcactgccacctccgcctcccgggttcaaggaattc

SEQ ID NO: 199581 - DNA, 1000 bp, Homo Sapiens
ctgcaacctccacctcccaggttcaagtgattctcctgccttagcctcctgagtagctgggactacaggtgcctgccaccacacccagctaatttttgtatttttaatagagacggggtttcaccatgttggccaggatggtctcaatctcctgacctcgtgacccacccaccccggcctcccaaagtgctgggattacaggcataagccaccacgcccggcctccatttctttaactattaaaataaagaccttaaaagcttctcctatagcattcttgtgaaatcaaatgatataactaggctgcagatacttagaggatactcagaggttaactttctatgcctttattccttttcttgatggcattaataacttacattgttactgtccaaaaactggttctcatgtgatgtccctgcttgaaaatgtttggggctgtctgctgctggtcaaaatgcttagcttcttaacagaatttttggtccccttgcaatctcaggccaaccttcttctccagcttcattttataacactgttccctatagtccactcacactgaagttcatgagttcatatcattccttggcacacacttttctgctttgtacaagctgctccttttatttgaaatgcttttccatcccttctactcctgacaaacttctctttaccttttaagaccagcttgttccccctttgtgaagctttcttgagccctcttgttacctgttctttttcaatactcctacaaaatttcaataatgtctttgttatagcattcatcctgttcattttaattgtttacataggtgtcttttacgactgtttttagattcctttgaggacagggaccaagtcatactgatctgttttacagcatctaaacaatgcctggcacagtttataggccctcagtaaatgtccccgagaaagtgagtgggtagagaagtcagttgtcttatttaggacatcatacgatctgaaggatgcagaattc

SEQ ID NO: 199582 - DNA, 1000 bp, Homo Sapiens
cattcccctgagtatatggtattgtaggtataaaataaatttgatgagttttatttctgtactaggatctactcataactcttctatcctaaatttgtatcaaaaggaaacctttgctgtcttgataataaacacagactaagtccagattccacagtctagtgatcaaggaaattcaggaattgtatttagctacaagtaacgtgacacaaagaacagtgccctaaattgctaggatggtgatttagggttaatattatgacttcttgctctaccctctttccattctcaagatcgcctcatggtcataaagaggccactgtggttgagtcatgacatgcacgttctaggcgagaacacagaacaagccgtgctcttcagcccccttcttacacagcattccaaagccccaccccatcacttctgctttcatcccatttagccagaacttagtcatttggctgcccatatctgctaaggagaatagggaacatagttttccattactaacccatcccccactcaaaaaaataaaaattttaaaagccattctatattaaagcagaagggaaagagatattggtaagaatccagctggccttttgtgatctgtgtcagcctttcttttgatctcatctgctgttttaagcactttacactgtagccccacgagaacactttgcactcactaagaagcagtcccctttgctgcgccccccccccaccactttgcttatattctgaaagtcttttgtttcctattccactgctcttacctctaacacactgcctctaacacaccaacctgcagttgtagttattacacaccctccttggttctttcatctctctatcacagcccttgttgtggtttagccaatatattttagttccacagctaaattttcataccctctatgactctctaatcccctgccacacttgcctactataatacattatatatataacaaatgtttgatacgtatttattgaattc

SEQ ID NO: 199583 - DNA, 1000 bp, Homo Sapiens
cttgcttctaacctccaaactctctttgtccattcctgggcataggctgaactagccttgggaaggaatttagtttatagtttaaatagcccttcccaaaagctagactgttattgtaaaatgaatgaaaggccactagccaccaagttaggataagaggggctggaattctaaatattaccagccatttagtctggaggtcgtaagatttgcaacttccccaattactcttgaagataacattactagtgtgaacctaaaattgtccttttaagatgtctttccaggtttttgcatttctgacagccggatggccccacctggacctgccaaccgtttctgtggcccctacccaggaactgactcagcattaagaggacagcttcgagtccctacaatttcatcctcgagccaaccaatcagcactcctgactcactggccccctacccgccaaattatccttaaaaactctgatccctgagtttttggggagactgatttgaataataataaaactctgctctcccacaaaaaaaaaaaagaaaaaaaaagaaaaaaatgttgtgacagatgtatgtgcagtctacagtcgaggcacacaggaagaaggcatgtttggtactacaggagactcaagctgagtaatctgtcaaactgaataatttggattatatcctataggcatttagtagccattgaaggagagtgacatgatcggacatattttagaaagatcactttgataacagtatgagaaaggaagatgggtacagtaagctaatttagaggttactactgcagctcagatgagaaagtgatgaagtgaaagatcagagagacatttataaggtagagttgggacagaaaagaatttatgatgtctcctagttttctgaatcaggaattggatggtacaattcacaaatatggagaaaagatctgagagataatgataagcttactttggagcctgctgcttttcaggtgcctctgagccat

SEQ ID NO: 199584 - DNA, 1000 bp, Homo Sapiens
ttcttggattatcacacaactggacatagttttacattcttgaatgtataaatttaataagtatttgaatgaccgaatgatacctgcaagagaaagtcaacattttctgttcacaactattatagaaaaacaaattttatcacttgggcgatactagaaaatctgctgaagcctcttttagagcaacctttagttgctgctaccgtaagggttgtaactactgtgacgaccgctgtcctttaatcacactcctgagaaagttgagggctgctccctcagtctgggagaggaagaaggccgcaagttttattgaagttatggtctccataagggaatatctcccatatttactttgaagaaatagcctctcaaaatatattttaatgtctttgtagctacagtatcacttcattattatgttaggaattgtgtttttatttttctttgcattctttccattaaaaaattacagtgattttattagacgtgaactgacatgccaagcttttaataatctaggattctttacattattacgccctcactaaagcaaaatcttcagaacttcagaagaccccattccttccccacctgaccatcccacatgtggatttcaatgcacaacccaaaaacaagatggcgtacattgtggtacataaagtcctgtctctgccaccagctttgagacgtggttaaaatcatgtactctctctgggcctcactgcctcgtcttcatgaggagcagatttcaacagaggctgtgacagaggtggagaagagaataaccattcttcacttcttctgttaacaaactaattcattagagtcggcattgtgcccatcttaaagctgcctttccaacctttcttggctcaggtgtacattgattattttccagcaatgagatgtgagccaatatctagtgggacattaagtttttgcctttctaatgtaggtattgtcctttccttcattttctgctctttgctacctggaattc

SEQ ID NO: 199585 - DNA, 1000 bp, Homo Sapiens
aacggtggcctcctaaggttacagtggagctgaacaactcctatagcctattgctgtctgagccttcataatgtcagagtgcggtgcattttaccttttctatgtttagctatgatcagatacacaaatacttactgttgcattacagttgcctagagcaggggtgtacaatcttttggcttccctgggacacattggaagaagaattgtcttgggccacacataagatacgccagcactaacaacagctgatgagctaaaaaaaaaattgcaaaaaattctaataacattataagaaagtttatgaatttgtgttgggctgcattcaaagtcatcttaggctgggtcacgggttggacaagcttggcctagggtagtcagtggagtagcatgctttctaggtgttgcctaggaatagtaggctgtaccatttagcccaggtgtgtagtaggttatgccatctaggtttgtgtcagtgcactctgtgatgtttgcacaacaatacatgtgcctgatgatgcatctcacaggatatgttcccactgttaagccaaacaccactgtatttgaaagttttgttgttaggtgtatacaagtttagaatttttctttctgaagaattgactctttcagtaggaaatgtctctttctagctctgatgattcttcttgccttaaaatctgtcttgtttggtcttgtcataatgcacaaaaattcttttggatagtacttaaacaaaatttttctcatctttaatttttagcactttaatggttttctatgtttatgtctgggattattttgcttctacttaaaggactccctcctttagtatttattttaatgcagatctagtggtggtgaatactctttattttaatttttttaggagtatctttatttaacctttgaaagggtttcactgaacacagaattttctatgggtaattatgttgtttaaagaagtcattgccatttcttccatttctgtggagaattc

SEQ ID NO: 199586 - DNA, 1000 bp, Homo Sapiens
aagaagctgaaggaaaagatggtgatgccagcaataacctttccctggccctttccctcctttttgctcctagacttcagacttagtctgccttttagccctgtttcccaagttccaggctttgattctacatttagctatgctcactcctttctggcttctcactcccagctgttgggatagcagacagccatttctccctctccttctcctcccttccttctatcctctggctaactgacatgcttcctgtacttaatatgttaaattggttatatttttatcaagtttacaatactgtggtatgattaaatgctattttaaaattattaggtttttgcgatctgtttaattcttttcaaattttgtcttttgacccttagttttctcttatcattttgatatccagtcttccccctctatacattcattcttttgattgtgcattagtcagattttttgtttggtatttgttttctagttcatcttttttttaaaaaaatcggtatgcaccttataaaatttttctcttgtattcaaataaggtcatcacaattaaaacgaatagtaatttcttaatatctcctgttgtccagtttattgttctcaattttccttaagatgttcttcctatctagtttgctcaaatgataatctggtacaggatcagtcacatattgtatctggccatgtattccttaaattactttaaactggagtagacttttgtttatgatgctcatgtggtgaatatagtaggcaagccctcttgtagaaagttttgttttttgcacttacctgtttcctaggggtgccttagctcctgagtttcctgttaactagaagttagacttgaagtcattacagattgatgttgaacatctttgtgaagaatatcatagaaaaataatgtctggttgtcccatcattaaataagtttggccagtgacaacttgatggccccattgtgtaactgttttccccttgtgctggagagaat

SEQ ID NO: 199587 - DNA, 1000 bp, Homo Sapiens
tatctgttgccaaagtctccctgccaccactcttgcccctgctaccatcacttctcacacgacatccagagcactctgaaaaatgcaaatcagtttatgttacttcccagaataaaatcttccagtggattcccatagtactttgaataaatccaaactccttccagtggttcagtggttctcattcctgaggagtgcttggaatttcatgggagcaatttttattgttgaaatgattggaaaggggggctgcaactggcatttagcaggcagggtcaggaatgctagatatcccactatagtgagaaggtccttcattttgcctgccaatcattatctgagcctggatcattatgcaatattatatattaaatacaaagtacttacatggaattttccaggaatgcaatgactgtgtcaatgtagaaaaggatgtacttcgttttgtttcaaaatttgtctagaaatgtttactatttcagaaaatcacctcacccttagaggagctactggctgtatctgagccactattgcaacattcctgcacatgcacagcgattccacctaaacgggcaatcatttgatggcttctcattctttctagtgaagacatgcctgagtattgacatgtggcaatacgaagcactttattataaatttctttatgaaattactcctttaacaataactaatggttgattgacaataccagtccaggattatgagcaaaaattttggactagttatactcatccattgagggatgagtgcatttctgtatgaagccacagattatttcccaatgcatagagtatggttgtcataacaatcttaaggcaaaatcaacagaaatgaatgcaaaccacaagggagcagtctaaatctttgcgcaagctatttattccctcttcctacagtgctcctcccgacagtttgcatggatggctccttcatgagtatcaccctgaggcactctccatcccatcacctacttgaattc

SEQ ID NO: 199588 - DNA, 1000 bp, Homo Sapiens
atttgtgaaacttttctacttattttaaaacaaaacaaacttctattccacaggcttgaaacatagatatagtaactgtgtatttctatgatttcactttaaagcaaatgggttttcaaatgacctagaataagtctaatttcattactgtataaccataccacttatgtccccaaatcaataaacatttcattacaagccttgtgcttattgattaaataattctctaagctgttagaaaaattacactcatatcataaccagccacatcttgaggacctgctccctggagagagctggacgttcaaataactgtgaggcacaggcctgcccaaatcttcagagcttttatgtacctctgatggatgatttgagaacactttcacctccttgcccaagttaagtttggtggatctttgtcaatatcattgtaatactattataacatgttataattaatgttaaaagctgaagaatccttcttattaaaaaccatcaggttaactatattgctaaacctacaaacttgctctgaatcctattttgatggtttcaataatattgactaggggttaaaaaagtaaacactgagagtagatttattctttttttttttttttttgagatggagtctcgctctgtcgcccaggctggagtgcagtggcgcagtctcggctcactgcaagctccgcctcccgggttcatgtcattctcctgcctcagcctcccgagtagttgggactacaggcgcccaccaccacgcccggctaattttttgtatttttagtagagacggggtttcaccatgttagccaggatggtctcgatctcctgacctcgtgatccacccacctcggcctcccaaagtgctgggattacaggcgtgagccaccgcgcccggcctagatttattcttttattgtgttcaaccaatcaggattttatgactaaaatactatcattagcattttagaaaatactgtattgttatagtgaattc

SEQ ID NO: 199589 - DNA, 1000 bp, Homo Sapiens
aacaggaggatataatgaataattaaaggaatgtgtgacatccaagtcagggaaaaactaagggaaaacatgatgccgcaatcatttgttagaaaggtggctgccaagtagaagacaaattaaattaaatttagttggctgtagtctggttattaatcaaacactttcatgttgtttatcatgtgccagacactgttttaagtaacatacatacatatatatatatatatatatatatatatatgtatttttttttttgagatggagtctcgctttgtcgcccacgctggagtccagtggcgtgatctcggctcactgcaagctccgcctcctgggttcacaccattctcctgcctcagcctccggagtagctgggactacaggcatctgccatcacgcccggctaattgtttttgtatttttagtagaaacggggtttcactgtgttagccaggatggtctcgatctcctgacctcgtgatccgcccgtctcggcctcccaaagtgctgagattacaggcgcgagccaccgcgcccggccgtaacttattaatgtttactctctgaacaattcttgactaggtacaagtgttatcccactttttgtagatgaggaaatggaggcatggaaagattaaggtcaaaaagctgtaaatggagttgaactccagaatctatacttttaatcttaatgctatactgtcttggttataagaagggaatgtggttacctgtaggcagatgtggataactgaagctgttaatttatttcactggtgtgaagttttattgtatcaatataccagattctattattgatgggcatttgagctgttcctattttttgctcttataaacattgttagcatgaactttcttcatatatcttgttgcacatatccaagaaactttctctgaggcggtggttctctttattactggtccactggtggaattcttgccacttactaatggtgctcagatatattacttggaattc

SEQ ID NO: 199590 - DNA, 1000 bp, Homo Sapiens
tgagggcaggaccagaaagcctagccctgggctaaggacattgagaggtgagttagttaaagtaacattagttgctgtaacagataaacctcacaggctctctggccaaacacaatagaagtagaagtatttttctttctcgaattagaggtggggtgcaggtgtttggttcgggctcctgagtctctgccaatgtcaccagctggctccaagggcaccatgggcatcactacccacctgataatgtgtcagagatgggaggatggacggggaggtttgcatggaccaggtcctctcattccactggttggaactcagtcatatgaccctatgtggccacgcccacctgcaggggaggttgggagatgttgtccctggttgagcagcacaaaagggaagcacacatcttaaggggacaagagtccatgttacatgtatgtgcacctgaaaccccacactctgatcctgatattgagaaaggggcatttgaaacataggggctttcttattttgtattccaaagctgaacccacttggggggattttgagtccaaccccttctatgagtctgttctctttcctggactgcctgtgggatgtccgctatgaccctattttggggaagttgctggaggactcatatggtttggctctgtgtccccacccaaatctcattggattataatccccacgtggtgagggagggacctggtaggaggtgactggatcatgggggaggtttccttcatgctgttctcataatactgagggagctcccccaagatctgatggcttaaaagtggcagtttcccctgcgcgctctttctctctgctgccttgtgaagaaggtacttgcttctcttttgccttccatcatgattttaagtttcctgaggcctcccagccatgcagaactgtgagtcaattaaaactctttcctttataaattacccagtctcaggtagtttttcttttcttttcttttttttttttttttttt

SEQ ID NO: 199591 - DNA, 1000 bp, Homo Sapiens
tggggcactgagccagtaatgtctccaggagttcagggaccatgcaacccattagggataatcatgacatcaagtaggtctctcaaaactatgccttccggagatgaaattccagggaagagaaagcagaggcccaataatcagagtaacattgaatttcctcagtgaacctgaatttcccaccagtatgtgagatgggaggttgaagtcagattaagactgatttagcgaagttaaaaatatgacattccttacgaaaccaattagtaaaatttgtaccagctacattatgtacttgtcaaaaatacagtgaccatgtaaacagtaaaaaatagtctggtcctggtggcccacttgctagtagagtgactctgggcaagtcacctctctaaacataaagtatctcatctataaaatcagtcagggtgtgctacgttacgctgcagtaacaaatcatccccagctctccatgtcctgaaatatcaatgggggtgttccttgatcatactgatgtccaccatgggtcagctcgggagctctgttcctcgcatcaacaggagctcaggctggtagggcttgtaaatttctggtggctgtgccaaagggaacatgagttctagaaggcctctacgtggcaatcaagtgccccactgccactttagctcatagttcatggccagaactagtcacaaagccccacccaccaatatggggatcaggaagtgccatgataccatgttccaagggagaaaaagccaggatatatttggaaacacattccatagggtaggcatgagggtaaaatgggacaatgcatatactgcattttgcagtgcctgatacataaaatgtacacaatatttgaaaactatgagtagatattatcggatcctgagagttttgagggtcaggctgagataagactcatcctgtgcccaatgccttagctcctaatacctcctaataggcattcctttaataaatgtcattaattgaattc

SEQ ID NO: 199592 - DNA, 1000 bp, Homo Sapiens
ccttccaccaagattgcaagcttcctgaggcatcaccagaaggtgagcaaatgccagcatcatgcttcctgtacagcctgcagaaccataagccaattaagcctattttctttataaactacccagtcttaggtattcctttatagcaatgcaaaaacaaagtaataagtaagcacagcaggatttggcattgtctccagtgaaaccaggcaggacagagcctgatagtgaaggtaaggcactatttgagataactaacagctattgtagaagagtttatgttttcccacccctaacccttggcagcatcattcctgctcccactgatggctgcccttccagattctgccccagcctgttttccaaatggtagacagattgccgtgagcagtatcagtgatcatggagagacctcatccatgcctaggtagataatgttcacaaatcaggatccacccatgggtatcaagcatgaattcaggaacagcagctttgaagaatgttctggtgagatgaagaatagctaattcacattaagaaagcatcttcctggaaaactaagtgtggctctatgctttcaaaggctgcaagaaatgtgtttttgaatacactgactaaaagaataaggagacaggtaaaacagcactaaaaccaaatcactgtttagagaactgtcttttcctctaagttgaagacttttataagtggtaaaatggaagacttttttacagttggagagaaaaaaatctttgttgcagtttaactacttaaaggaaataaaggaaatcacaacataaaggaatcaaaatcaaaatcttaataactaatgtctcatttctcttttttgtgtctaagtagcaattggcaggctgaattcagttaattttgtcaaaaggaacagagattgaaaaattaaagttaaaaaattttgttcttctcttgaaacacatcctctatccctaaattttgacctgctacttgatgataccagtgtgaaaaa

SEQ ID NO: 199593 - DNA, 1000 bp, Homo Sapiens
gaaatcatagccttcacatatcaattattttacattaaatgtagatcgtctcaaaacaccaattaaaaggcagagcttggaagttaaaaagctatgacccaactataagctgactataaaaatttatattaatatggaaaagttgaaaataaaataataaaagccatgtaccatctaaacattggttaaaggtaagcaggagtgactacataaatattaaagtggactttatagcaaagaaacttcaaaagacagagagacacagagggaccttaaataatgataaaaagtcagttgctcaagaaaacagcaattccaaatgtgtatgagccaaaaacaaggctataacatacattaaacaaaaactgatagaaatgaaagaagaaatagactctcaattagagttggggactttagaacctctctctcaagtattgatagacaaatgagacaaaaagcaagagtatggaagaactcaaaacgccattaatcagtaagatataatcgacacttacagaacactccactcaatcacgacagaatatactttcaagtgtccaaggatcacatagtaagaacagaccatatcctgtaccataaaacaaatctcaccaaaagtaagagaattgatcatgcagaatgtgttctcccaccacagtggtatcaaactcaagatcagtaatgcaaagataacaggaaattctccagacagttgaaaactaaacagcaccctcaaaaatagttcataggtcaaaaagggagtctcaaaggaaataaaaaaaaaatccaaataaataaagctgaaaatacaacatatcaaaatgtttgtgacagagctaaagccacatgagagggaaatttatagcactgaatgcatacattagaaaagaagcaaagtatccatttaaaaatctaatctcctccctcaggaacctataaaagaggagagcaaactaaactcaaaaaaggagaagaaagaaaataacgaagaactgaattc

SEQ ID NO: 199594 - DNA, 1000 bp, Homo Sapiens
aggacgtctgcccagcaactgcttgttcaaccttggactaattccacccttgttattgacccttgtagtcaaggattattgtctcaaaacaatgatgtaattctcctcatttttctttaaaaaacttttgtcttcctttaccaccctgaatgagaacctagtttactatggcacacatattcccattgcaatgcctatttccaaataaatatcatttccatttaaagcatctccctctctgtttgttatttaggatgatgggagtcacagtccacttgcactccaaagtttgagaagcactagtctacgctgtatttgcagctcttgtggactccagcaagaattgtgtaactattgccttctagtgaaagccactgtatgccaggaggcagattctgaggagggtgaatcatcgtggatatagcagagaaaagcaggcaactggtggacaatctagtgccacctcacttcatttccaaagctattcccaccaagtttagcctacgagaatgataagtccacttgctgcgtatgtggagttcaggctgtgtcctcaaatcctctactcactcctttctaggctttccctatcatgtccacatcttccttcctctgccacttcatgtggggtagtggagcgactcctagcggaatctgtgttccattagcattacagctactcactgaaactattgcactctcctcccttctactggctccatcacctgtgttaggagctccctgtaccaagtcttccactttattgagtaaatagttagagccaaagggaacactgtgataaagcctgtgtcagctgccatgttgattttctactgctactgtcataatcacaaagttagcagttaaagcaacacccattttgcaggccagttctctgctctgggtttcacaaagtgatggacggggtgtgttcttttccagagcttctggggatgaattcgcttccaggctcattcatgttgttggcagaattgaattc

SEQ ID NO: 199595 - DNA, 1000 bp, Homo Sapiens
agtgaccaagatgttactcaactccagagcaagggttcccaaacctggggtaatacgatttgactgtgtccccacccaaatctcatcttgaattgtagctctcataatccccatgtgtcatggcagggacccagtgggcggtaactgaatcactgaaccatgggggcaagtttttcccatgctgttctcatgatagtgagtaagtctcacgagatctgatggttttataaagagcaattcccctgcacacacactctttcctgacaccatgtaagacgtgccttaactcctcctttgctttccaccatgactgtgaggcctccccagccatgtggaaatgtgagtccattaaacttctttctccttataaattacccagtcttgggtatttcttcataccagtatgaaaatggactaatacactggggttcttacataaaatacaaagcccaagtactctgcatcatttttcaactgttcccagatgatgctaatacagccacggttgggaaccactgatttactgtattttacttaatgagaaaaagtattggaatatttttattataataatgggcaactgttttctgaacttaaatccccaaatttaccaataaattgtgtaattcaagaggatgtgaaaaacatgtattaagtgttgtctatttagagcattggggaagtagcaggttaggtgtctagttattttgattaacttccaacttaagattagtaaaaggcatgcttccggtctcagggaataaatgttccttcatcaaaactagactacctagaaagaagctggaaacagtgaagtctagatcattaggaattattgccaaagctaacaccttttcacaattccatgctgtcattagtgtcattccttctatctatactgccctgccctactactctgtcaattcttcattcctcaaggtccagcccaaatattactgccctcatgaagccttccccagtatagcaacagaaagaattc

SEQ ID NO: 199596 - DNA, 1000 bp, Homo Sapiens
tcctcagggcactctgaaaaacacagaattagagtgtaagttggagattttggttctgactttttaggcttcttattcttaggacagaaaatagcatttaaaaagcaaaattattgtatttcacataattgaatagttaaattttttaaagaagtctgtttgattattgttatttcatactactttgggtaataaagcactgttatcatatagtaatatcctctgcttttattagaaaatgagaattggctggcaacttatttttacttgattattcaactattctttattcattcagtgaaaattatgaatataaaacatttcttggcatattatgagaagaaaatcttgaactgtataaactacattgattgaaatgaacataaaggattataattttaatcttaagagaaattttaacttaatccttagtcaaggaggatgaaaagaatcgagttgttatgggcagttttgtgatgtgcttatcaagataactgagaagaaccagttatggggttctatgtgaaaactgtctccagtgcctgtaatatactgtttgttattttctgaaagtttactgaacttcgccccactatagtatgctgcagtattacatctgctgtttcatgctattatagtgttcactgaagcattgtctgctttggtcactaagtctcagaaatcatagctgattaaaatgaaactgtattgttactatatacatatatatgtagactatatatatttttatatataatcattttatatatataaatgatttatgttacggatcccagacactttccttagtcattgtataatctgttcaactaattacttcagaaatattaggactacaataaactaaaagaataaggcattctggctcaaatactctagtgaaaaaacagctttatggattattttttaaaactaaaaaattatctaatactgaaaatgtaccacacatacattaatctttctttgattaagagaattc

SEQ ID NO: 199597 - DNA, 1000 bp, Homo Sapiens
tccatagctgtatggtacaacagcccatgatcttaggtaaacacagatcattcaatgtctgctctgcataatgagccagagactcatggtcaatgagtccaatcacgttacaatcaccaccaaaacaaggtacaaatcaaatatgaccttccagttgtccaaactagaaggaaataggcttacccctaacatttgtgggctctggagaacagtgcaaatggaggtctatttaccatagccctaaatatctgaagcttataaatacaaattaacaaactgttatataaaagatatactaattgcttgctttgaaaaatacaccttcacaatagaaaacatgaacgtatgtgtaaaactatggtttttatatgattggcagcaaaataatgaagatgactcaatttaattattaattgcatatgcctcagtgtcttcttgataaaataacgatgtttggatgagtgataaaatataaatttgtaaatttttatgtatatgtttcctaaatttttttttcttttctccatttcaggagcatcaacaattatatgacaatgaatattttcccattttatactccactgatagcaattatctaaaaggtaaaaatttccattttattctaaataaatgcatttcaatgttttcattaaaatacaaattaaatgtaagatatcaaaaagtcaaaattattttcaaaaacttatttctatcttaggttacttaaaatataaatatgaataacagacacaaaaagtttaattcaaaattactcattaaacctgaaattcatttatttttaaatacatttacaaaaatgaaactattcacattccttgtattcctcatccatcaaattgctaatgtaaaggttgtcattaagcttcacacatgttatgtctgagataacataatacaaattcgagataatattaataactattacaaaatatccaccaactgccatgtgcaatattgtaaatatcatgctaatgaattc

SEQ ID NO: 199598 - DNA, 1000 bp, Homo Sapiens
catattctcaagaggaaaaaataacaaaaaaaaaagtcccatccaaacgacagcaaattcagaaataagaagtaataacaccttcagatgagaataaatcagtgcaaaaactcttacagtaaaaaaatacaaataaaaagaaagaaaaagatgatttgacacctcccacagatcaaactagttttctagcaatggatcctaattgaaataaaaattctgaaatgacagattaagaattcaaaatacagattgcaagaaagctcagtgagatccaagagaaagtagaaaatcaacacaaaccagaaaaataattaaggatatcaaagataagatagctatattttttaaaaaagagcttctggaatcaaagtacttactaaagtagtttcaaaacacaatttgaaataataatccgagcagaacaaggaatttcagagcttgaagatcagtcttttgaatttacccagtcagacaaaaataaagaaaagagacttttaaagaatgaacaaggcatttacgaaatattagattatttaaggcaaccaaactacatcttataggaattcctgagaaagaagaagaaaaagtaaacaacttggaaacatactggagggaataaattagagaaattttgctgatcttgagagagaggtagacatccagatacaagaaatttagagagacagcacctacaagacactataaaagatgaacatcaacaagccatatagtcatcagactatccaaggtcaaggctaaaggaaaaaatcttaaaggcagctagataaaagagctgaatcacctataaaggtgataatcccatcagactaacagtggacttctcagtagaaaccttacgatccagaagaggctgggggtctattctcatacttcttaagaaaaaaaatgtcagccaagaattttatatcctgccaaatttagcttcacaatcaaaagagaaatgaagtctttctcaggcaagcaaacgtgaagggaattc

SEQ ID NO: 199599 - DNA, 1000 bp, Homo Sapiens
ttgttgttattatcaagagtcatcttttgtgcccaaatgaagtattattattattttttgtttcctactcactccttacctgtaaactttctttcctcccttcctttttaagtttctaccttctcttccttcactaaatatttttgagcctctactcagttcccagaactatgctagagactaaagatacagaggtggacaaggcacagatccaatccctgctcttatgaagttttcattctagtaagtgttaaactaaataaatatacatttcccatatggtaggcgctatgggaatatatttaggagtatttggaggctccatggaagcatagatggggatggcataacccagagaataatgttggaaaatgcattctgggaaaagtagcctcaaagttaaggttttaacaataagtagtaattaatcaagctaagaaagggaaaggatgtcaaggcagagtgaacagcattcaaagaggcccagctggtaagagagccagatgcatttaaaggactggaagacagccatgtgactggctcgtacaatttgagggaagcagaagagggaggagaggtaagtagggtcccttttatgtaggattgatgccttgtctttattccaagtgcaataaggagccattgaagggcttccctagcttcgccatgttagtaatcatggagatgtctacttctatcatctaatacagctactccagttcccttcgtgtttcaccaattatttttcacagattcaaaagtgactcgtgctcagaaataaactgagtcgtgtgtctgaaatcccctaaagcctccatctattccatcccccacctttgggagcactgtgttccccagagcattgttcagcctctgtgtggggttgcttccaagtatactcctaattctcaaaacattgaactcaacccttccacccaagaactcaaagcattgaactcaaagcactgaactcaagtctctcagaaagcaaagagaattc

SEQ ID NO: 199600 - DNA, 1000 bp, Homo Sapiens
ataatatctagatctaaaagtaacttgcttctccttattgaattatacagtccatgcttgaaaaagtaattatgcattcaaattcctacacatgtaaataatttcagacttaagagtaaaatttagtgaggatgctagacaatatatactacgtactaaaatatgtattcttcttctactctttttgattatcaggaaggtctctgttacaaaaggttaacaagagaaaagcataaaaatttaaaagttttacataacacaagggccttcataaaacaacgaagacccaaagaaattgttaaacctgagtgtttttatactaggtttgatgaagagtggaaagtcctggaaaaatatggtaggacaaacagggcatgagctaagagtaaaaaactggggaaaatttagcaatccttgctcttttggatttggatctctcttgacatccttccatctttagagacaggatgctcctttcctccaggtattgggagggaatctcttacatgagggtcctatgacccacttaaggggagaagggagaaagaaggaaagtcagagactcctttctgcatctgccttttgtttctcaaattccttcagcttaaaatcttcaatatgccaatgtgccacattttggagtagcatatcctgaacctcatcaaacaacttccactggaaaagatctaagaagacttcacatttcaaaacttaaaatgtcacaagaatttctaacaaaggagtgtcagtagacacaacaaaagccagattaacaacctgattaacaatcagaaatatattatacaggccgggtacagtggctcacacctgtaatcctggcactttgggaggctgaagcagaaggatggcttgaagtcaggagttcaagatcagcctcagcaacatagggaaatcctttctccaaaaaaaatttaaaaaacaaaaaattagcaagccactgtgacacatacctacttgggaagctgaggcaggagaattc

SEQ ID NO: 199601 - DNA, 1000 bp, Homo Sapiens
ttttctgcatcctactccagatacactgaatcggaatccctagggctagagcctagaaatctcactttttaaaatgcttccaaggtaagtctgatgcctaccctaggttgggaaccactctttcaaagtaaacagtgatgacacagcatttgctaaagtaacatctgtaggttttggtttccacctatttaaagtcagatttatagactcgaggagacagaaactgaatcccacacctggtgcaattagaagcataattagaagcagaagaacaaaatgccacgtaaccaaagcatcagagccatcattgcacgtgtctttttttcttttttcttttttttttttcaagacagggtctcgctcttttgcccaggatggagtacagtggcatggtcaaggctcactgcagcttcaatcttctgggctcaagtaatccttccacctcagcctcccatatagctggaactacagttgtgcactaccacacccagctaattttttgatttcttgtggagatgaggtctcagtatgttcccaggctagtgttgaactcctgagctcaagaaatcctcctgcctgagtctctgaaagtgctgggattacaggcgtgagccaccacacatggcctattgcacaagtcttgacaaacaacatatattttctaaaactatccagatttcattatcagggaaaagtttgcttaggtttattacagcagtccttggcatttgtatggtaatttgtactttacaaatactttgatatattataactctattggtctttgaaacaaagcgatacagtgtaggtggtatcattctctttctcactcagtgtggcccagagttgctcagaattggagcagagcctgagacgtatctgcagatcctgtcatcagctggcaagtccaggagactgtgtcatttagagactgtgttgttagttatccctcaacatcttctaaggtggcaggaaataatattggaaataacattttaaa

SEQ ID NO: 199602 - DNA, 1000 bp, Homo Sapiens
gtgattgtccccttcctggaaagaggtaaagagtagagccaagcctcaatggccaggcacctgctatctcactctgacctagcaatgcttaatgacatttggagaagtgtcaatgatatgaaattggcctgatatggtttggctgtctccccacccaaatctcatcttgaattgtagtttccataatccccaggtgtcatgggagagacccagtgggaggtaatttaatcatgggggcagttaccctcatgctgttctcctaatagtgagtgagttctcacaaggtctgatgattttataaggggcttttataagtgcccttttgctcggcacttctccttgctgcctacatgtgaagaaagacgtgtttgcctccccttgcaccatgattgtaagtttcctgagccctccctagccctgtggaactatgagtcaattaaacctctttcctttataaattactcagtctcaggtatgtctttattagcagcatgaggacgaactaatacagggccttagcaatcttctagttcagaactcccaatttacagttgagaaaatgaggccagagaaataactgacttgcctaagatagtgaaataaatccagagcagtgttcagaattcaggtcttctgattctcaaatcctttcactttgtatccccagtagatttcaaccttggcttcacattataaattcctagagagctttcataaaaacaaaacaaaacaaaaaaatactcagccccagtattggtggtctggggtactttatagctccccaggtgattgtcactgagaacccctgtatgctggcctagcctgactcagtggtctgttccatttcgcaccataatgagccaagccttgtgctaaggactggagctgtgaaaatgaatcaacttgcttctgaagctgctcagcatgtggcagaggagcatgctgtgaagagctcattccaacagcagcgtgatgagtaacactatcaacataaataagt

SEQ ID NO: 199603 - DNA, 1000 bp, Homo Sapiens
tttaaaaagccattttcttgggcttttcccttcaaactgaacattctttcacttttttcatctcacaaacttgtgattccaaactctttaggcatcattggtttttcagatgtacagcacaagcttcaataaaaacaccctcaagttttaaccatgaatggtttaggggcatagttcatgaaaatcatttttcttgttctggatagtgaagcaaatgaagcatcatttcaagaattgcttggccagtttccaaatattctacaatgagaaatattaagagcatatgttttaatgcagatttcagctgtgaccaaataggacatgattaagataaaggcatttttaatgaatcaaagcagaatatgaaatacataaaacagagattgtctcagactacttcaccctatcagtttcttattgctttaacaactattatttaatccaattgttgcagatatattttatttattgctctgttctctttttattcatatgtactgaaaattgcaaagcataaactgaaaatgaccattggcttggataaagtcataaagtcataagggaattctatgtttccagatcacaatacctattaaagtaagtaaaatgagtcacttcttacattatgcattttcttcttttttatttcagccatatttttattggggacgggttacatttatgtaccagtgcataagtagacaatgatgcttggtgactatatcctttttattttctaccctctcttctcctgcccttgctctcttcaatttgcaaaagaaatatcattacaacccattgaaggacctattcaaattgaacccaaattcaaattagtaatgtacattttctgaaaaatgaaagaatttaagattaagttttacttttttgccacattagttacataacaaatagagaataagcattaaaaaccacaggacacaaaattcttgaatcaaaacagagatgcagagaagctttatatctaagtcatactgaa

SEQ ID NO: 199604 - DNA, 1000 bp, Homo Sapiens
ttacagtcacaatgcatgcgtggtcttgtgcatattttgaacatgagatccctaggatcatagacagcattttatttgctgtacattatcatattattgtagaaaataagcagaagcaatcagcattagattctttcagcctcaagtcccaaattcctagtcagataatttgctttccattgcactcctctctaaggagaaaaagggcaggtagcaaggggaactaccatgctattttggctttgtcattactaacattgctgagatgcttaattaatttggatgttgtacatatgaacttttgtgcgtctatcaagtagatctgatcctcatttctttaattgaagcaaagtgtgagatgataaaatgaaccaaccaatgaggcattttaaagcattgtactattattgccaagtcatgttcatgaaacctagggtctgcttattgtgaaatcatttgttttaaataacatgactgacactgatgtaatgcttactctgtgtcaaatactgttctgagcactgtccacattttaaatcttttaatgactctgtaatctatcttatagatgagaaaacatgtgcctcccaatgagcaagtggcagggcctaaatatgaatcaaggcagtctggcttcagattatgtgctttttaaaatcctcatgcactagtgactctgttgctaacttaataattatattaacttgagttggtaagataatttcttcaaaataaattcgtcattttcagtattctttctaattgtgtggaaattcacaactcatagaggagaaagttttaataagtaaaacccaagtgttctgcaattttaattatacaaatgtataaaatattaaaaacagaaaacaaaaatagtgcccatatttgaaaatcttgagtattcataagacttgaaatattttgatttataaacttattctgtaccttaggtattttgtaattaagtaaaatagaaaatctcctgtgtgcattggaattc

SEQ ID NO: 199605 - DNA, 1000 bp, Homo Sapiens
atttggaagtcaaactagtattgtgcttggaggtatgttgatgctttttcataaagccaatgtgtgaaaaatgtttcccgcatgttagatggtaggaataggggaatgtggaaacaaaaggccaaaagatggacttagaaagttgagatgtggcttttaaaatgaaaaagtcacttacatggtgtggaagaaccctagcatcctgtctttttgcctccctgtttgtgacagatctctatctcaccatcctctaagctgggattgccgaacttttgtgtttatttgttgctctatcctttgtacattcaaatcagaatggcatagtgcttctaaacagtaataagacttaatcctttccagagttaatgtacactgttgattttaggattttccctttccttcctgccagatgtctccatccttatgaagataaatatataggagaaatcacactctgtcatccaagagagagttaaaaatttaaactcgaattctagagagttggtgacatgtatcagaggaaggcctatgtgaagtgaccagtcaagggtgataaatgggtagtcagctgtgcacagccagccctgtgggccgtgagttgccatggaagcaccgaatggcattcagcaatcccgcatgactaacctagtttagcagcagggcccatgggctccagcctgggagaaggtgcttacagccagatgataccagagccaacacactgccccacgtctcatgcccaacttgggcctttctgttactatcttttcctcatccacatatgctatttccttttttagtgtgaaggaaagagaaaaaggaatcactctcactaatccttacagagttgtgatttcttacattttaccacaatattttaaacacatccatccctacccccaagaagcatttgaaaagtcagtaaatgtgccctgacaggccccagcatggggttgactaaatgactgtattgaggggctgaacaggcagctctgaattc

SEQ ID NO: 199606 - DNA, 1000 bp, Homo Sapiens
taacctggttctcgtactttagtgtgctgagccatgtgtaaacatcaaggacattttagctcaaggtcaggtgtgaagccaacctgagtatcattgcttcttttccccagattagttcaaaggagacacattagaaaggggccactttcagaccctggcctactaaaccagctgcactgaagtgaagaaggggtgggaaagacacacaaagggacaagcaaggaaagatcagaaatacgacagcaactgacctcacgtggttctatttatatttttctttcttctcttataaactctcttcctctggctggccaatttttgagtcctggtggaccccatattctctttgataacaaaacatatccttcttgagatttcatcgtgatggatgggagagagtgattatttcaactcccttatatagcaagtcacccaaacatgagaactagaaagcatcttattcaacactttaattttaccagtgatgagttttaaggtttatagaattttatatgcttttctaaattcacaaaactattttaacttgaattcaccatgttgctcagttctgatattatttttctagactttttttttttttttttgagatggagtcttgccctttcacccaggctggagtgaagtggcacgatcttggctcactgcaacctcctccccgcaggctcaagtgattctcctgcctcagcctcctgagtagctgggactataggcgcctcccactgcaccgagctaatttttgtatttttagtagagatgggttttcgccatgttggccaggctggcctcgaactcctgacctagtgatcccctgtctcagcctcccaaagtgctgagattacaggtgtgagccaccatgcccagcctatttttccagactttctcattgagtccctaactgagactcagttcttgcaggaaactacatagtacaaggtaaataaagttgtgttttaagttcccaagagaagctgtggaattc

SEQ ID NO: 199607 - DNA, 1000 bp, Homo Sapiens
tcagtttatagaaatatactctcatcaaggtagcatcatcttcaatcaaaaatatctcaaaagaaaatagtagtttaatgaaaatttggaaaaaagtaaaacagatatccaaataatgcttaacattaattaattaaggcaaaaatatgaactcccttacatgcgcacaaacaaaaattttaatttctttaattcacttccaagttttttcttttggaacttctactagtctatttttctaaaggttatttcaatttaattgtttatctttttaagcaggagaaaaagtaataaaacaataaaatgtatttatttataagatgtatctacattacatgtctaaagttagagctagatatttaacttggaaaatttttctattattttctaatccacatatcagcataaaattaggacatctcatttattatttctaacatttataatatgcacagtttactaataaaatttcagaatgtataaaagagaagtactatttaacacaacaatgagaaaaaaattatgctttagcagccctccagaattgcagaaatcagaattcaactggttttacattacagtagaatattttacggaaataaatattagtctacataaatctctaatgagtacattacaatcagcagtgtatagtcatgaaaataaaatgttattgatgtgcctattgactatgaatgtaatgatagaaaagaggtatttagaatccaccaaagattaataatttttgaaaaattcactaaatgtaactttcaaacagcagtctttgaagttcagatattgaaaatagtgtacttgtcaaagaagacagtcgaatatattagtactaaataagagacttaatctcatttgttagtgggaatacttcagtcttcctttataatcactcttgattctgaagggtaaaaagaatgctcagatatgcaaatttggaagggctagctaggcatgcttatcttatctcgagcctcttttttcttgc

SEQ ID NO: 199608 - DNA, 1000 bp, Homo Sapiens
taaaacttgcattcttttattactagtgaagttggaaacattttttggtgtttactagtgatttctatttattttgtgaattgcattcattgttcacagttaacattatccccattattatcattggcccttagctctgaaacttggtagagatgaattaaaaggtgcaaccagtcttctaacttctgcatcagaaattgggttgaagatgtcttacatgaacctgtggcttctgagtatttaacaaacttttatattaaccatctgaacgtttacatctcatctttaatacaaattctggaagtggtggtgcagagttgccagtctgagagattcaggctcagctggagaatgtgttgggcctgaagtaacacaactgtaaacctatttgtggagaacctaaatgcacatacagtgatttgcctccacatcaaagacctctctgtagtgccttagggtatggtgagggcagtagtccagatagagggccctcagtgactgtcccatcttttagaacagagcccacagggttgggttcttgcaagatctatctggggaatcttcctaaagccatcatgacagggtctgtcacttcattaactcaacaaatactaattgagcatctactctgtgcctcattttgttctagatcctgtggttatggcagtgaacaaaatgaatagaaatatccctgacctcagagtttcccttcggggacaagtttagctcccctggaggctctccatacttgactttctcaagtctaactctttctttgcttcctagctcctcgccttaatcctctttttcctgtggcccttagatcaagcctggcttcctcttcattttcagtgttctgctactaagttcaacagcttctgttaataagggacttcttttattcctggcttcaccatgtcctagctgcaaccctcagtcccacccaagtcagactggtaagtgcgggccccaggcccccagtgtcctcttgtgagaattc

SEQ ID NO: 199609 - DNA, 1000 bp, Homo Sapiens
ctgaaatgctgctgtggtgtcctaggtcatggtacatgtgtcttcagtttactactctaaaacctggccaggcgtgatggctcacacctgtaatcacagcactttgggaggccaaggcagtaggactgcttgagcccaggagtttgagaccagcctggccaacataatgaaactccgtttttactaaaaatacaaaaattagccgggcgtggtggcgcacacctgtattcctagctacttgggaggttgaggcaggatgatcgcttgaacgtgggaggcggaggttgcagtgagcagagactgcactccagtctgggcaacagtgagaccctgtctcaaaaaaatttttttttgccaggtgtggtggctcacgcctgtaatcccagcactttgggaggccaaagtgggtggattacctaagatcaggagtttgagaccagcctggccaacatgatgaaaccctgtctctactaaaaacacaaacaattagctggatgtggtggtggacgcctgtaatccagctggtcgggaggctgaggcaggagaattgcttgaacccaagaggcggaggttgcagtgagccgagattgtcactgcactccagcctaggcaagagcaaagctccgtcttggaaaaaaaaaaaaaaagaaagaaaaaaaaattaaagataaaagaaaacgtacatacctattttatactttgtttttacatataaacatttattttgaaaaagggaggagcactaaaaaaaaaattgcagcctgaaaaccaactatatttgaaaaagtgttttatctgaccaacagggtttaaaatttttcaatccgttgtcaaaacatctactttatagatatattatctcgtgtatggaatgatacagggaaaagtttatttatcccagtaatgtttgaaatagcaaatggttggaaatgacctaaatattaatatagaaataattatgttaaaaccaaatagtgtaacatataccatcagaaaaaag

SEQ ID NO: 199610 - DNA, 1000 bp, Homo Sapiens
agaagtacaagattataaacaaaatgcaatcaaacttttcttaagcttacctaaagttattttatctgaaaatttcaagcaactttgatcaacattaaattgacaatctaaactaacaagtcttttgaatttatgtatggtagtaaacattctctctattaattttattacctaaggctaaacctaaaatttttaagcaaaattagaaagtcttcacttatcaaaaaataaagtttgttacatttagtattttcccaataaaattggtcattcttggttttttatttggagaatctgtgcaaaatttcactgaaaataaattagaactagaaattatttctaaataccaaaaaaaaaatgaagaatggtttcacaaagaaaaaaagaaaacttgcttaattagcagagtatcatctctgtgatttttgtgattatttgatcagtgtcctgagatggatacaatggcaagtaatgacaaaattaaaataagcatgcagatttttttaaattaagtgccaaaaaataattggtcatgcaaagcccttaaaaatattgtggcctaattctaaagttttttgctactatgctacatcacacgcaacatcagttaagtgctcattctgtgacaggtagtacattacattttagcaaactacacaagacccctatgtgataatatgcttcagggttgtaaggttgggtgcatttactagtcttgaattttctgggagtatacaaacccaatattagtctagatgcccacaaatctatttagacgtcacagtagaatggagagtaatcttgaccacaggaagctgtgttgtggcatttattttgaaattattttttcttgatttttttgccttttgttttgtgagttttataatgtacagaatatttttaaattattatatatatcaactaattagtcttcatttaaacttacgcctctggggtcttacttgggtttctcctaacaatattatacacatatttgcaa

SEQ ID NO: 199611 - DNA, 1000 bp, Homo Sapiens
catggctcactgcagccttgactttcttgagctcagatgattcacccgcctcagcctctcaagtggttgggactacagttgcgtgccaccaagtttgggtaattttttgtattttttgtagaaacacggttttgccatgttacacaggctgttctcaaactcctgggctcaagagaactgcccacctcagcctcccagagtgttgggattacaggcgtgagccatttcactgcatttctaggaacaggaactaccatcaattttctacaactaagcattataaagtagctcaaaggcaatgaaggtgcaaattttcataggatcaggtaaactagaaggatgcattaaacatctagcatcccactgaaaagattttcactaatctcttctcacccatttcaatctctttcacaagttttcctggaatatttcttccctatgatcataataatctcatattgttgtgatcataaaataagactcatcaactttggtctagttatttatataagtgctgtaagagtgttgattatattccaacagcagcatctatagatttggctacattattctcttcttgaggtccccaaaatttagtgaggttgctgacctgagaagaagtgatgttccttaccatctgaaaacctggaactttgggagccagatacaaggccagtttttgggaaggagagtggaggtacgttttggtggtgaaagtaaagtcaacctttctaccttaaatcatgtatgactggtcatacatgattaactgagaatagaatcattcattctccaatacaatactgcagataaagccttggctacacaatcgatttgcctaactctatcttggttttgaaaaaaaaaaaaaaaggcggattcttactaaacctatgcaaataattatattgtcataaaaagttaggagactcagtaagagtgtctgatttgagttcaaaataggcaaagaacatagacaaataaaagctcaattgaattc

SEQ ID NO: 199612 - DNA, 1000 bp, Homo Sapiens
tggcaatattgtgatgaaactctatacctttgttaatcagtgttcctaaaattatctgcacatgtgagatgagggagcactccagtggactgtgttctaatttcagatgatctcatacaaaaaggaaagcttgatgccattgctagcaaatgtcatacatgaaagttcaacaattcctttgagctgaatttagaaaaaaatataagaatattgctgagctcttgaaacctgctaaatgcgaatcatcagacacttaaatatgacttgtgctgaaggcccccaagtggagcacaatataattgaaatcaactgtaacaattaacaaaaagagaattcaataaatagtccaacaaaaagtccttgtgagtatcctgccaccgccaaggagggtgtttatatcatcgaacgcaaaatctcattaagccagctagagtctgtactttgaatttccctttttgtggaggtcttctgttcagtgacagcagggtttttccaagacatttttccctgtctttttctcctttaagtatgcatctctaggcagtttaccagtcaattcagtgaaaaatgggaaaaagcagttgtttcaccagattgactgactgattgttaaaacagttggtcccatgacccctctatatgtagacacggacatttgtgtgaacctgaacatggcctcttttatttaaaataaagcaacaggatgtggttttgggtttgactcaaaataacattgtcaagatgggaagagaaaaaatatatatatgcacatatgcattcatctattggattgacttgtaccacatggaataccatcagacttttaaatgaccttggtagattggaagagtggttaaaaataagtagaatgaattaaattttaaaaaatagggcaattcatttggggtgtgtggaagagggaaaatgagcacaaattccagccaaacatgatgcagtgcttgagctgaggtgggtaaagggagaggcttcactggaattc

SEQ ID NO: 199613 - DNA, 1000 bp, Homo Sapiens
attgctacttataatgtttagaaaaatgtttttaagttccaaaaaccaaactaaaccaaaccaaaactcaatgtggaaaataaaaacaagatactatttggagagtatctttaacctagattatatttataatttaatatgaaaaaaattaaacattgtaaaaattcagtcttgctattatatataacaaattatttttatcttttcctcagtaaaatttaaaacttttatgggtaggaatttctcacatatcatgttagggttatttataggtatttaatattttcggtttattgagtgttgaattttttttagttttacaaataaaaattatatatatttctcaagtacaacaagatgttttgaaatatgtatatatcagcaatggctaaattgagctaggtaacatatgcattagttcacatatttatgatttttctgtggtgagaacacttgaaatctattctcctaacaatttccagaatacaagatgaaaattgaatatttttcggtggttagtgttggtatgttggaacgtccttgaatgtatgtatactttataagtggccatcgtattgaattcttgtattacttttatacattttttcggtgaatctcttggtattttcttaaaatgcatcttccaaaaaagatcttttttgcctttccagcagtcatacctcttatttgtttatttttgtttcattgtattgattcaaatttccatgacagtgttcataacagttctgatatactcattcaacttgaatggaaatctttctattgttttgccattatgtgaagtgtcatctttaatttgagaattacttcttcaacatattaagaaataagttgtttattcatagtttcaaatgtgtaagtcagaactgtatctctttaatgcctttctggccattgattaaaatgtatatatagttttcctgtttttgcttatttctgtgataaaacaatgttaggatactgaataataattgaattc

SEQ ID NO: 199614 - DNA, 1000 bp, Homo Sapiens
ttaaacataactttgagtatcatagctgatacttttattgctgtgtggtggctgaactgctgttagaaacactgaatttaacattgttcattgttctgagccatgcaggtgctctgcagcgtgtgaataaatgcctaagttgtttgtggttcagcaacgaaataatctcaggctctgacccaaaatatacacaaacgtgaattctttattttccaaaatttgtttagctttcatttaggagatgaggaggggaggtattaaaatgtgggaatttggctgcatgtgaaaataaggaacattgaaaatgaagttaagcatcttctgaaactctcaaacctgttttggatatccaaataaatgcagcaaaaataatttattgatttagagaattctggaagactccaggttgatggagcacatgttaattattagatctttgtcttcataagactttattgataacagaacatctaagacaagtttcctcactgtcattggagaagacccaaattctaggaactgggccttatcctccagaacttaaagaaagatatcagtgctaaatagccacattgagtctaggaacactttagtcattaacttatttttggctcccctctgtgtaacggcaacaacagtctttttaagggaaaaacatatttttgtaggtaaaatagctatgtactgaaagtattataatcataaactccacatatctgggctctgagtaagtctattagtccattttcacactgctgataaagacgtacctgagactaggcaatttacaaaaaaagaggtttaactggactcacagttccatgtggctggggaggcctcacaatcatggcagaaggcaaggaggagcaagtcacatcttacatggatggcagctcacaaagagagtttgtgctctaaaactcccccttataataaccaccagatcttgtgagacttactatcaggagaagagcaggggaaagacctgcccccatgattc

SEQ ID NO: 199615 - DNA, 1000 bp, Homo Sapiens
ggggacaggagggactgtgtgtgaaaaggaaattaattcaatgctcgcaaaaggaagattctatcaggaaatatacctaattggtgtaaaaggccactgtggttgttggcactaagccactcaccctgccagcctcagtgcttagtgtatttatgtcctttgtcaccttcctaattggaaggagtcactctactgactcaccatctttctcccctttatggaagagccgtgggaggtagtgtcactcaaggtcaagggctcagaattggtctgggtctgcagtgagatggtgtcattaccctgagagctgcttggcagcgtttggaaggtaaattagtgtcttcagttgaagacttgctgcacagatggccaccttagttggcgtgacatctcacttccttgtctccccctcagaggaaaatgcctgggctggctgggcctcatgactatgaatttccattacttttttttttttttccaagatggagtctcgctctgtcacccaggctggagtgcaatggcgtgatctcagctcactgcaacctctgcctcccaggttcaagcgactctcctgcctcagcctcccgagtagctgggactacaagcacgcgccatcacacccagctaattttttgtatttttagaagagacagggtttcattaagttggccaggttggtcttgaactcctgacctcaggtgttcctcacctgaggaacctgacctcaggtgatccacccacctcggcctcccaaggtacaggaattacaggcatgagccactgcacccggctgaatttccattacttttgaaacacaataaaataactagaaagagaagcttaaaatcagcccagtactaagaatgtacccatgaggacgacagaggcagcaggatgtcgaaactgtgcttgggaagcaggcagctgggcgggcgctcagacacgctgactcaggagctcagtctgcccctcatcgctcttcccttcactcagagaattc

SEQ ID NO: 199616 - DNA, 1000 bp, Homo Sapiens
ttaagagatgaaaattgtgcttaataatttttctgtgccctggaaatatactgaatattatttatttgggggaccattttcctcactaggttgtgggctccatgaggagagggaccccatgttatttatgtcatatacccactgaatagaaacatatttggcccagggattgatcatacttttttttccccgggcatggtggctcatacctgtaatctcggcactttgggaggctgaggcaggcagatcacttgagatcagcagttcaagaccagcctggccaacatggcaaaaccctgtctctactaaaaatacaaaaattagccgggtgtggtggtacacacctgtagtcccagctacgtgggatcctgaggcaggaggatcccttgaacccaggaggcagaggttgcagtgagctgagatcatgccactgtactctagcttgggtgatggaataagattctgtttcaacaataaaaataataactataatttttgtttccttaagtgtcagtgtatactcactacccacagaaaactaccaaactaatcacacagtcaaccggatgttattgtcttttcaaaaggaaaagtcacactgatttttcagtgagacacacatcacacaaagtgagacctacgtgcatgcctctgtttaaggttggttgagttattttccatttccaaggcagttgagtttcaaccacttttaaagagcaacattctttctgtagtttggagtattctttgtttgctaataaagttccccttaaagaaggtgataatcaggtttccttccattatgcatagcacaaagcacatgatttataaagcccatggtaccataacaatgtaaaaacgtcctgtcagatctctgggaagaaactctatatcccagttcaataacaaagacactggaaatgcaaccagcccctggttcttctgtgcacagtagcctctcaaagaaagagagagaacaatagacctacaagttgaattc

SEQ ID NO: 199617 - DNA, 1000 bp, Homo Sapiens
atgaagccaagggtcaacctgggcagcactgattctagctcatttagtgctctggggcctggggttgagaaaaaggggcaaaggtgaaccactttcttcccaataggatgattcattttagtggctaacagcctgctccactttcctaaggtgagaaaaagcaagcacattgacattcctgcccacaataccttctgttatgtccatgtggttagctggcatcaagttgcctcctagaggaaataaaaaactaaagtgcttgttctgctaaagtttactgttttcttttctactttatttagctttttaggcattttatttcacccttatttctcatgcatatagatgtattaatttatttgagagagatttcagggtcattaaaattcatcttttgaaggtcacaaacctgcactgttgaatccatagttatgaaggagtctgcctttaacctttctaatacatagaccataaactctataatggcatatcgtatggagaaaatgctttattcagttatatctttgaaaagtaataatcactgctagcactgttggtagtccatcaatagagatagttttctaagagtgactaattctacctagtaatttaaataaggcttatgttcagaatgactgataaagattaagtaaatgctatgtaatattttgtacaatactgatgttttgttctaatcacacagtttaagtgtgcatttgccaaaggggaagaaagcacattaccatttttggatatggatctatctaaatttttataagcattttaatgcagacataaatatatatgtataccaaaagcaaatgcaactgaatatcattctggctgccaaaaaagctgtaggcaagtactattgaaattaaaaattagactttaacctctaatgtatttttaaacataattaaaacataagaaaccagctgggcttattataggtccagaaccttctgagttaaacagcatgtgttaaacaaaagaattc

SEQ ID NO: 199618 - DNA, 1000 bp, Homo Sapiens
aggtcagtctactgtccctccttcccctagggcagcatatcctcaccagcagctcaactgttctggcaagagcagcctgtagcctgagccgggccttccctctcacctcctcttcccctcagaaaggtgttgcaagagctgctccctgctgccctctgtcttccaaagctcaatttggttaattcctccacagcttgtcttttttccccctatctttacacacctccataaacacagtttttcctcttttctcccatccttgcccagttacctgagagaaaaaaaatatggcgctagagtggatactgcgatttcaggaccgaaaccaattccaccaatggctgtggtgttagtggctgtattagtccattttcatgctgctgataaagacatacccaagagtgggtaatttataaagaaaaagaggcttaatggactcgcagttccacgtggctggggaagcctcacgatcatggcagaaggtaaaaggcacatcttacatggcagcagacagggtagaatcagagagccaagcgaaaggggtttccccttataaaaccataggatctcgtgagagttattcattaccacgagaacagtagggaggaaactgcccccatgattccattatctcccaccaggtccccccaaccacacatgagaattacagaaactaaaattcaaggtgagatttgggtggagacacagccaaaccgtatcagcgaccgtggtactcaggagacatcgtccgtgggatttgctctcagcgggggagttgcatgctccaagtcacacctttcctgaagtggcccctatccactcactgatcaatgaggagatagacaactgaaggactgtgcctgcttcagggctgccctgccatcagccaagtcatttgcggtacctgcatctcctcttctccagttctgcttctgttactccacaggggttgattcagagcggctccccagtcaactacactatctcagagtctgaattc

SEQ ID NO: 199619 - DNA, 1000 bp, Homo Sapiens
aaggataacaggtgtaaattggcaatgtgacctgggatagttggacaccctcttcatagcatttatcacttcattgcatttagcattccaagataatggacattattttgtccacttatttgtttacttgtaagttccatgaagcaggaacttttcttgttctaggaatccatcacccagaagagttcttgacacaaaataagtaggttcttaataaatattggttgactgaatggatgacccaaccatgccccatattctgtggtagaactgagcatcctttggttggcactggtaaattgaaatgccatgaaggcacatttgctcagagtgctctttccctaagcagaggggaaaaaggagccaacgtttaatattcagattttgatttgcagtgttttccgtgaagacatgagtctggtagatgggtactagcaacatcaactgttttgttacttgcaaggagactgaggtgctgtggtctccaagataggcctggtctaaagagcagaccagtgggatgtgaacggtaataggccagttggatctggtggtcggttagtccatagggaaacctgtctccaagcaatggaacagctgaatccgcatgacttggtccataggccaaaaaggaggaacagcttttaagtggcctgctatgtaggcccattcaattcccaaggaggcaggaagccagtgggatacaaaggaaaaaacacctttctgtgtctgggaagttgctagtctgatcacgtgtatgtacatttcacacacacacacacacacacactctctctcacattatgagagtccaagggccccaagagtctgttctgatagagaagtctaacataattctctaccaccgtacctaaaaccagaccaatcttttaaatcaggggcctgggttttagtggcttagtagctcattttaagttttccttctccttccaaacagagaggtctgtgtcctgtgttatgctgatctatgggagaattc

SEQ ID NO: 199620 - DNA, 1000 bp, Homo Sapiens
accatttgtcttatttgtagccatacaacatttttgactacttacctttatgttttgtatttttcacattatgtatctcatcatcttctcaaaggtaaagtcagaaaaccatattatcatcacctccttgcaggaaaggtaggtttcgccaatcacaagcatttctgcacgatgtagcagctaatgctctgtaaaagataattgaattaaatggagcctcagccattggccacttcacttccaagtggatttaactaaaccttagcagttatactcaatccacctatttatgtcttataaaaatgttttacaatttttttttctttttttttttttttttttaaacggagtctcgctctgtcgtccgggctagagtgcagtggcgcgatctcggctcactgcaagctccacctcccgggttcacgccattctcctgcctcagcctcccaggtagctgggaccacaggcgcccgccaccacacccggctaattttttttttttttgtatttttactaaagacggggtttcgctgtgttagccaggatggtctcgatcttctgacctcttgatccgcctgcctcggcctcccaaagtgctggaattacaggcgtgagccactgctcccggcctacaatttttaacaaataaagatttatcatatttatattttgccatataaattttgtcaaatgtggtgcctcttttgcttcttgtagactaaaatttagaaatgtatattttatggtagaacttgaagagcactacagacatttatcataagtgatcaggaaagccaaggtgcatgtcagaggaaagaacatcacacatagttttatctggaaaattcttagtagatttaatttaatatttgtacagaacaattcaatttaaaatagaataaaaaaagtcctgctgaaaaatatattttattttatatcccgaatgaggctaaacattttgctaattatctgtattaccaatagattgcaataggaattc

SEQ ID NO: 199621 - DNA, 1000 bp, Homo Sapiens
gaacttaagatacagcagtgaataaaaaagacaaaatccctgccctcatggaacttaaagtctagaagaggaaacagatatacaaataaacaaatatacactgtcaagttaaatgttctatgaataaaaagtaaaacagggtgaaagaattaaagagtgatgaagggtactctttgagataaggtagtgagggaatgcctctttgataaacaacattttaacggaggcctgaaatgaagatacctcaggcaagaatatctgggcaattaaaactacaaatggaaaagccgagacggaagtgtgcctggagttcaatgtggctgcagcacaatgcggaggcgtgccagaagagttcgggtgaaagaggtaggggccaaatcctggaggactttctaggcaataggaataattttagtctttattatagaacgggaatccactggagaattctgagaatagtttgtgacccaacttaaggcctgtcatttggaaaacacactgcagagcggggaaagtgaatgcagggagaccacttagaaagctactgcagtttcagatgagatacggaaggcttggactgtggtggtatttgcagaggtagtaagttgtcaggttctagctatatattgcaggtgaaccatctactgatatctaaccattcatttaagaccataaattctttgttacattttatttttctaaaaagtttccacaaaacatctggctttaaatgtctttttaagcattcatgacaacgtttagataattaggagctccaaaaatgtacctcaaaagggcctcaataaatttgtttgcttcagtgactcacaaaaaaaaaaaaaaaaaaaaaaaaaagcttttcgatttggcctataaacaaaagaaatccaataaaaatgaaaatctaagagacaaacatgaggccgggcacggtagcacacacctgtcatcccagtactttgggaggctgaggcggaggattgcttgagcctgggaattc

SEQ ID NO: 199622 - DNA, 1000 bp, Homo Sapiens
cctatcattaagctacatataagcatatggagtatagctatttcacctgtatcctactgatggatatatatctatgtgtatatatgtgtgtatgtatatatatttataaatgcatagagtatctctgaatggatacacaagaaatgggtaatagaggaaagggaacattattctcattattcttgtttttttttttttgcatatatttacgaggaattattcccatttaaaactattaataaaatatatttttaaaaggaccaaatgttaatttcttttaatattctgaagtttttacatttatcctgtggcttccagaagccaacacctctgtctctcaaatacaatcatcaacaagctgaagaggtcctcctccagtttgtgggtcaccactcctccatttttccttcttaaaataaaaggcctctcgaagtttatttagccaagatccaacggtgaatctggaaaacttactgagttctttcctaccctgcctgattgttggattccaggttctcttctagatggttacgtttcttctttttccaggcaaatcaggaccttgcttttctctcctttttttcatctgaataattatcatgtgccaaatactgtacagatctctctgcttgcattggtttatttaaatcattacagcaaacttattacagctccattttacaggtgaagaaatagagtcacaaagaggtcaagtcccttgctcaaaatcatactgctaataagtggcttttcactagacagagaaattaacagaaaataacactatggtatggaaataattaaattggaatgagacatagaatatttaatacaagttgtcagtttgggggtgtttaagaaattgcttagaaatggctgggctcttctgtttgtgtttctcctggcagggaaacatataaaacggtttgcagataacaatctgggtggaaaattaacgtgacctgaaaacactgcatgtcctggggacgatctggaattc

SEQ ID NO: 199623 - DNA, 1000 bp, Homo Sapiens
gacactcatagatgatcaatatgagttaagaaatgaaggaaactaatgcattaggctgaaattcctacatttagcccaccaatttttatgcctaaattttccaaatgatttataaaattttatatttaatataattcttgaaattacaaaaataatttttagtctctaaaaacaatttacatgactgtaagtatattgtgtttacaatagataaactaatataaaataagaaattaaaattgaactagttatggtacttgaaacagaaactctcacttaacttccctgaagaacatttaaaagtttcagaaaaagaaagaacagggagatacaaatttgaggccacatatgaaattggttctcaagtaaggtcttagcatttattcctaggataagatttggtaatagctgggttgactttaacggcataaatcctataaacagtaatagcaaatgaagatccaagcttccgcagaatatattaaggtcgtaaaaaataatgatgactgtctttattcttaagttaatcaaactgccacccaaatcctcgttgtaaaaaaaatgctggctgggcatggtggctcacgcctgtaatcccagcactttgggaggccgagatgggcggaccacgaggtcaggagtttgagaccatcctggccaacatgttgaaaccctgtatctactaaaaatacaaacattagctgggtgtggtggcgtgtgcctgtagtcctagctactggggaggctgaggcaggagaatcacttgaacccaggagacggaggttgcagtgagctgagattgcaccactgcactccagcctgaccacagggtgagactctgtctcaagaaaataaaaaaaaaaaaagaaaaaaaagctatataaaatgacataaactttatatgaacaattcaatatgttaggcaatgaaaacaataatcatattgactctcccacccccattatctcctcagtaactttcatacgtggctatacctact

SEQ ID NO: 199624 - DNA, 1000 bp, Homo Sapiens
gcgcattatccagggagatggtgttgtcctggttgtccctccactgaaagttggctgacacaaagaatttgtcctgtatggaaaataggagactttgtacaattgcctctttaaatgtacaaagcatttgaaagagaaacctgcatacattttgatattaagaaataattctgaggatttttccactctggaaatgaattgatttgcagataactcatgacttcttgagctaaatgtcactttttcctccaactcttccaataaatataatcaccaagatgcaaaaaccaaaacaaaaatgaacaaacaaacataaaccagagctcagttgtgttcaggaaatagtaagtattctgttgatgctattggggccctgcaggaaatggcaggagttacatatgtttgggaaattggggccatttactgtagagggctgtctcccatgttatagaagtggagttttattccactgaagtatgccaggcaataggatatgagggaaggcattgaatagtagagtggcatgatcagagcccttgacacatcccaaatcttcccgagtcaccttggaaaaattattgaacctcttcatgccagttgcctttcagcctttgtgtcagttatttaacatggggacaatagaccctacagattgttgtatttcatccttttcagcactgcaaacagtacgtgacccagagagagaagaacaaagtgtgtgagaaagaaatggggggaagagagaaaatgaagaggaaagaggggaggaaagaaagaaggagtggaaggcagaggaaggaagggaggaggaccatgagacagggaggaagagagagaaggaggaatatgtcactaaaaaatactaaggcctgaactgatttagatgagacctctgggtgaggaagggatgaagcaaaggctgtcactgtagcatttggaatattctggttcaccgacaatgtcatgcctcctgagaatttcaagccttccttaggaattc

SEQ ID NO: 199625 - DNA, 1000 bp, Homo Sapiens
acaaaattatttgcagtatgactatttttgatcaactttaatcctattccaaccagcttgaaatatcatagattgcgaattagttaggtacacagccacaaagagcactgtacaaatagtgaggaaagctccctagcctctatcttgctcagaaactattcctttttcaatccaattccaacaaactgctttccaagtctggagaaattttaaaaaattggctgctctcccagacatactctatacctattctcaggtatgttcagaacctagtctagtgtctggcatggagcagacacttggctgaaagactgagtgagaatgatcagcttagagcaagggagatgccagaaattaaagcaaaaacaatctaactcaaaaagcactgtggcacagcagtcacttagtgtggaggcaaaaactcagtagggttagaagtcagcatggttagcatgagagccatgcctagtatgcttgtcaatagagtaatgaccaaatagggtcaccaacaaaaggttaaacaacagagaatttcaaaagactggagagtatatgacgtactttaaaatatttgtatttaatataataaaaaaatgtttagagagttgtttaaaagaataaatcctgagctagctagaaagcgtgaacacattcgtttcttcacctgactctatttgagaaactctgctaggatatcaatgagcctcagcccttgctctccaagaacttacatcctggtgatatcctggtgatggaagacaggaatcaaaaaaaatttcacaataattacttaaagttctgataggtgctttaaaggaactgcactacttaccaggagagtattcagaaagagaatctggtctttctgaatactctactagaaaagaactcagaacttacaaatgtcttcccatctcatttggatttaaagccaaaatcttttcaatgacccacaaggtcctaactttataatctggacccttattacatatctgaattc

SEQ ID NO: 199626 - DNA, 1000 bp, Homo Sapiens
ggttctaactcaaaaaaaagcaagtatgtgaggcttttaaagggccacagagtgaggccctatgcaggtgaaaaacctgcttccaaagccactgaaaaacttacccctagagcataacaggaacaaaaagcatatgacaagtcataagttgctggcagagccagggttccaattaatgtctgtccccacaatgtgccaagagacagggaaagggttggaagtcatccaagttggtagggtaaaaacaagtataaatctcaggggatacctgcaaggaagcccatgtctttgttgccatgccaatgcagcaagagctgcaggaacatgaattacagggagtatgtgtttaagaagtcacgtggcatgcaaaagtgaaaacaaagaggtggacttgcccctgaggcagacagtctggcaggtgtgcaaggccatttcagaaaacacacagagaaaacaggagaataggcagcatcagttttttggggaaacaggtaattttagttgaaaaagcagaagaaaccccaagcattgcatgggtttaggctttagtcccaccattctcatgagctccctatttaggagggccattagtgtctcagttctacttgatgtgggcccgaaggtctttcccacccctacaagctacctgccagggtgagctgagagatcagccaagaggagcagagccacttgcagctgagaggaatcattctgggggttggttagtaagcaggagagtaaaaggggcgaataaaccatgcacagaggttgaatgtctccagctgaagaaggcaagatgtagaagtctcttaccacaagggatcatatctgagtcatgcaacaccaaaatatgttagcagtggaacgtacctgagtcacagcaccaaagtatgttaacagcagaatgtatttgagtcatggcaccaaagtatgttaccagcagcgaatccatacagatctgcagcagtctcaactcttgccttctcaaaagaaagaattc

SEQ ID NO: 199627 - DNA, 1000 bp, Homo Sapiens
ttttcactgtcccctctgtcttcaacaaataactcatttttaacagccatagaataggtcacgggataaatatatctcaacacattcactcattcctgtcttggttaatatttagcttttttccagttttttgcccctgtggatacttttggaagtatatctatcatataatattctagaaatagaaagctacatcaaaagttgtgtgtgaatttaattgacatatttcccttcaagaaaggccactgctaagtatgcttttaccaagagttcatgaaaagtgcccagagtgcaacataaatgacagatgttccatatttgttccacttttttattttttatttttttgagatggagtttcacccttgtttccaaggctggagtgcaatggcgcaatcttgcaacctcctcctcccaggctcaagcatttctcctgcctcagcctcccaagtagctgggattacaggtgcatgccaccacacctagctaattttttcatatttttaatagaaatgggtttcaccacgttggccaggctggtctcaaactgacctcaagtgatctgcctgcctcggcctcccaaagtactgggattacaggcatgagccaccatgccaggcctatttgttccccttttactgttcatgatttgcaaaggcctttgagaacaaatttaatcacactaaccaccaataagttagaatgaaagtaatgcctcttctgcagagattaaagtaagagctcatggagcaaacagggtaagccactctatgatctgcatgcaaaagtgtctcagagtaggaatagtgaaagcacagaaacactcttctggtaaagaattagaaagccactggaccagaagccagacttgggctcagtggaaaatgctaactcaagaggcaatatgctgactaggagtaaaatgttctcaccttctatgctgattaaattatacccaattgccagagactgactaaattgtcatgtgatcaaggaattc

SEQ ID NO: 199628 - DNA, 1000 bp, Homo Sapiens
ggcctaactatgctcagatagtatggtgggtattgggaggaagaggctgttctaggatgggaagaaattgtgaaaaaaaaaattatacaaaggttggagtgagaactgcttgtatgggagagagtgaggcatgcctggctgaaataaaggcagccactggggcaccctgacgaatgaggacagttgctgggacattgggctacctctcactggctgtggaccagggtgagttattcacgtgctatggtcctgttttagtctctgtataatgaggggggaaaatgcctcccttgacccatagcagatgctattctgaagtagcagagctaggtctgtgagtaggataagaagggagaaacaaaccttatttcatcttcagagcaattagtataatgaagagaggtgatgacagcttcctggcctaccaaccccgtattttctattcaaccattagaacactcagaaaagagctactttttctttttttaaaaaaaatctcttcctgaaacactgcagctttgaaatggaaatctgtggtaaagggctttttaaccttcaagaaaatgaccaccacccatatcctgggctcacgtgtgtttcaggttcatgaggcagtgtagggtcatggttaaatgaggcagctctgccacttaccagcacaccacttagtttgccccagcctcagtttccttctgtgtaaaatggagataataatgtttgcttcattgtgtggttgcattaaatgagctaatgtatgcagagtgctagcacagtgctaacacactgtaaagttcacctctgggagctgtgggtgtgtggggagggagtgaggagcagagagcaagagcaaaagagagctcagaagccatgctacagagcactgtgctagtggtaattatggctctggacttcagctggggaacacagcagggagggctcagtgcctgctggcctttgtacagcttcccattgcttcccttctcctttggagttggaattc

SEQ ID NO: 199629 - DNA, 1000 bp, Homo Sapiens
tgtgaatgggagttcactcatgatttggctctgtttgtctgttgttggtgtataagaatgcttgtgatttttgtacattgattttgtatcctgagactttgctgaagttgcttatcccaaatcaacagaatatacatttttttcagcaccacaccaaacatattccaaaattgaccacatacttggaagtaaagctctcctcagcaaatgtaaaagaatagaaattacaacaacctggctctcagaccacagtgcagtcaaactagaactcaggattaagaatctcactcaaaaccgctcaactacatggaaactgaacaacctgctcctgaatgactactgggtacataacaaaatgaagacagaaataaagatgttctttgaaaccaacgagaacaaagacacaacataccagaatctctgggacacattcaaagcagtgtgtagagggaaatttatagcactaaatgccaacaagagaaagcaggaaagatccaaaattgacaccctaacatcacaattaaaagaactagaaaagcaagagcaaacacattcaaaagctagcagaaggcaagaaataactaaaatcagagcagaactgaaggaaatagagacacaaaaaacccttcaaaaaattaaagaatccaggagctggttttttgaaaggatcaacaaaattgatagaccactagcaagactaataaagaaaaaaagagagaagaatcaaatagatgcaataaaaaatgataaaggggatatcaccactgatcctacagaaatacatactaccatcagagaatactacaaacacctctacacaaataaactagaaaatctagaagaaatggataaattccttgacacatacactctcccaagactaaaccaggaagaagttgaatctctgaatagaccaataacaggctctgaaattgaggcaataatcaatagcttaccaaccaaaaagagtccaggaccagatggattcacagctgaattc

SEQ ID NO: 199630 - DNA, 1000 bp, Homo Sapiens
tattctcatgctatgcatcatttattttaaaatcaccttaactgagtacttttcagattatctcgatcagctggttgccagatggaaacttactacaagtgtttataaattatactctggcttaggcttcaaaaaatagctattacagccagattataatgaagcccccatcttgcttttttattttaatcacttgaccctctcttcaaaaaagctgtggggaagcccctgctttagtagttcatcagtttggggggattctgtacacacatatttgtcttcaaaataagtaggagtgcacagtgactaaattgttttattcacattgcatttcaaaatccagtccgatgtgatagaacatagaattagtcaaatggccctttaggcttgctttggccaccctacacttctgtcctcatagtctctttaatgtcagtcagcgacatttattgagtgcccactttgtgttgggcattgcgtggagtagccttcggaaagctatgcaagctgttagcactgtttattaaagaatgttgtcctttatgtaccagaagtcaagaggcagcagtgtggaatgaaaataatagctggaaggaatgtaaaattaaattggttaattgatgtttgtgggcacatgaatagcttggcaatattcattttgattaatctgtgtaaagcataaacagtaaaagtcatttatattgacctcaattagaaaaattatgccacaagtccatatagggaatttagtgtagatccataagttatgcaacagtttccctgattgatcagttataaacagggccaatttgtaaaaatcatgatgtgtttaacttttagtcaaataaattgtattgaatgtacccaaacacggaagaaaatagcatgctgccttgcttattgcacagaatgttccaattttctttccacaggtcagtaattcccaaagacaggagaacttgtccttggattcatgtgactatgtcggcatcgagaattc

SEQ ID NO: 199631 - DNA, 1000 bp, Homo Sapiens
ccaaaagaaaaaaaaagatcaaatgtcttcatatttcatttgggataaaaccaaacactttactgtggcctatgagactcacaatctgggcctgtctacctctctgagctctcacaattctggaaacttacaggactgctttctgtttctgaaacatgccaaattcgttaataccccacaccttttgcatttgatttctctgcctggaacactttatcctagactgtctcaagcctgtttctttttcatcattcaggtttcagctcaaatgtcaccgactcaggatggcatttccttaccacttattcaaagccgttctcacctcttctcagcagcattctgtcccatgatcctgtttaattgtattaatagcatttatcacagtgatgaaagtttctgctttatttatttttgcaaaggggaaataattctctttttaaattatgaatgtgatcttgcctttgcttaccaaaaataaatcttggctcttttctggaatcatccacctgccgacaggattacttccagtaggattgtgctgagaaagtcctaggaaatatttagcttttaaaattcaaaggacaagctttggccctcagaaaggattatctaaattcctgtatctcctccttcagcttatataggatcaggctttgtggaagagacaagagttttatgtatgtaagggaagtccagacataacagaaagaggagaaagcctgcatttttctgcccttgggaaactatggaaagagaaagggaaaaaaatcccccctttcctgtgtttgtggctcctcacagtcttccctggggtggactgtagcatagtaatattgagggtgcagcataactgggcagcaagaggccctgagctataattatcatgaatccttttggcttctacattgtgaaaacagaatctataaccctgaatgtccagctacggagctgatcagaggggattcccttagtagtgagcaggtaggtttgtagtgaattc

SEQ ID NO: 199632 - DNA, 1000 bp, Homo Sapiens
gccaccttaagaatgtagttacatgttggctttttctgatgtgggtctaaaaacagtgttaaattggtaataggtcctggctggtcatcttacctttaagtcaaacattctgcccctttgacctagagttgttaggcgtgggtgaagcaatcaattgccaggaattctttcagcacggaggttttctctgcaaactcatcctccttttatcttttttcttaaaacacattcttgtccttgacacttgtttcctctttcctaacatattttagaaagcactgagatagttccaggtcctctgtgtaggttattatccctcttttatcagaaaggaaaacagactcagaatgagtaagtaacttgttaagatcatctcactagcaaagcactggcattcaaatttgggttatcttggctctcaagcccatggtctttccactgcccttattcttgcagcctccagtttgtatctggacttagagttttcctttatgcctgtccttcattctccactcatttagctacatttattctacccaaaccttggatgtttgtgggcaaaattctgaagagtgccccctgtcctgcacaccacgttctcttcatccagcctgaggtatggagttgccaccctggatgtgggccaaggttccacggattcaaagacagaactcaaacaaccatgggccaagtcctgctgaggcctcagggaagccatggaaacttcatccagagaagtggccccaggcttggtgtgcagagagtcactgaagcaacgcgctaaaaccacagcaagcttggactaattacagcacctctccgtgcttcagtttcctcatcagtaagtggaaataatattagtacccaactcatagttttcttgtgagaattaaccacaataattacctgaaaagtgtttagcatgatgcctggtacctagtaaatgcttgataaaagttcactgttctagccaggcacagtggctcatgcctgtaatccc

SEQ ID NO: 199633 - DNA, 1000 bp, Homo Sapiens
gcttggcttatttcatttaatgtaataaactctagttccattcatgttacatggcagcacatcttacatggtagcaggcaagagagagaattagtgccaagtgaaaggggaaaccccttataaaaccatccatatcatgtgagacttattcactaccaggagaaccgtatgggggatccacccccatgattaaattatctcctgctggtctctcctacaacaaatggaaatgatgagagctaaaattcaagatgagatttgggtggggacacagccaaaccataagtatgcgaaattttttttattttttagtgtgtcctcttcaatttctttcatctgtgttttatagttttccttatagagttctttcacttttttagttaaatttattcctagatactttattttttgtaggtactataaatgggattctttcttctttttcacattgttcactgttggtgtgtataaatgctactgatttctgtatgttgattttgtatcttgcaacttcactgaattcatttattagttccaacagttttttttttttggtgaaatcttcaggttttcaatatatgatcatgtcatttgcaaagaagaataaattgactttttcctttcctatttggatgttctttatttctttctcttgactaattgctcaggccagaacttccagaagtatactgaataaatgtggtgaaagtgggcattcttctcttgttccatatcttagaaaaaaggctttcagtttttccccattcagtatatattagctgtgggtttgtaatacatggactttattatcttaaagtatgtttcccctgtactcagttttttgagtttttgacatacaaggatgttgaattttgtcaaattatttttcagtctctattgaaatgatcatacggcttttgttcttgattttgttaatgtgatatattatgcttatttatttgcgtatattgaaccatccttgcatatctggaatgaattc

SEQ ID NO: 199634 - DNA, 1000 bp, Homo Sapiens
aatatacccatcggggtgtcttggattcacaacatgagatgaaaagtgttctctcttctattctacacaatagattgtgtaagtggtgttatttatttgttaaatgtttagagaaattcattaataaacacatatgggtctgaattttctttgtggcaaggttttaatttcagattcaaaattattgttagtatagaattattccaattattttctgttgtatcaattttgataaaatgtgttttaatgtaagttttcaaatttgttagcacaaaattgttcttaaaattctctttatctgtctaataaatgttgactttatggtgacattcctttttagtctttctattggtaatcagtaactttactgtttttattctttgttagttttttcaaaggttatacatttattggccttttcaaggaacaactttgggttttatttaccttcattgcatttttcatcctgactcaatttctgtttgaatctttgttactctttctatctaacttatcggtgtctaatgtactattatttttctatcttctttaggtgactacttcaatcattgattgttagcccttctgttttctagaatagatgtattaaagatgatcattttttcttaaagcacatccatagctgcattttataagttttgatatgtaatatttttattatcatccagctcagtgtattttctaacttcattgggatttctccctttagctatgggactttttaggagagtattgcttaatttttcaatatttgatacattttttggttacattctattactgatttctacctcatttccagtgactacacactgtataacttcaatccttcaaaatttgtcaatgtgtgtttttttctttgttcttaccttttattgtcctctcctttcttaaaaatgagtttttcttttttgcctcttaaccattcttttactgttaatttttttaaggtgttaccctagagattatacatgaattc

SEQ ID NO: 199635 - DNA, 1000 bp, Homo Sapiens
tgagatccaagacaggcagcatcaccacaagctgactgaggagccattgggctataagaaaacataagcagtagtctggcagtactcctcctgtgcctgaggtggtagtggtcacagagtgaggctcctctcccttcggaaaggggaaggaagaatgggaagaactgtgtctcatggtttaagtgccagctcagcctcagtacagtagaataccaggtagacttctaaggtttttgactgtaatccctggctcctggacagcacctctgtatctgccagaaacctggggaacctgctgccctgaagggaaggacataggcctaactgggtttgccacctgctgattgtagagccccaggcctttgagtgaacataggcagtagctagggagtgattacatcaggccttgggtgagatgcagccttttgttggcttcaggttttacacagtgcagtcatagtggtggtggccacaggggttcttgagtcactccacctccagcttcagatggctcagaatacagaaagagactccatttgtttgagagaaagtaagggaagaggacaagaatgtctacctggtaatgcaaaaaattctcccagatcttgtccaaaactatcaaggcagcacctctatgattttgcaagaaccacagtattgctggacttggggttcccctaaagcaaatacagcttagatcacaacacccaagtcatttcaaatatctagaaagtcttctaagaaggataaatacaaacaagcccagactgcaaagactacaataaatacctaactcttcaatgctcagacacaaaataacacctacgaagtatcaagacaatccaggaaaacatgatctcaccaaatcaactaaataagacaccaggggccaatcctggagaaacacagataggtgacctttcagacagagcattcaaaatggctgtgtagaggaaactcaaagaaattcaagataatacagagaaggaattcagaattc

SEQ ID NO: 199636 - DNA, 1000 bp, Homo Sapiens
agacatactgtgtaagaatttgtctgaatctttcccaagctgttgtccagatttcatgggatcttggaaggcatatgctcccaaatcaagttgatgttcttgattgctaatgtttgctttatggccttaacactaaacatgtgtatacacatgtgaccactttacagcctaatgtctctgcatttgtgccgactgtctaacggcacttaattcacctaaagggatctttcccatgagacaagtcttttcattttctcaattttgagataatggaatttgaataagttgcattcgtagatttaagagaccacttttcattccaaggatcttttgaggacaggaagagtacaatattcaaccttcactgatacacgttaatgaagaaaatctctcaaaggttatttaacttatctcgcatatggctatttacagtaattatttactcctataaaactaccagcaatgattcatgttctgtgcaatactagagagcaaaatattttaaattaaatagtgttacactgtaaaactgcttcacattttaaaatatttttatttttagaatatttattttttaaacaattaaatggcacttgcttttcagttcacttccccatcttttcccatttctcctttgactaataatattaaaaaccttcttgctatgaagaaaatatgtaaatattgaactatatatttttatttttttctttttagaattaatataagttgcttttgtacaggattaaaaataaaagtaaattgttgtactttacttctttgatagctttgaccttgaaatcaacttcagacttttctggtaacatggaaatacatgagaatcatataaaattgttatcttagtcagtgacaaatgtttacctaaaagatcaaagtatattttcctataataaaatagtgttttgtcttgaaggaagaaaaattagagatgtaaaatcagttgatttctatttgttctgtaagtttcccagaagaattc

SEQ ID NO: 199637 - DNA, 1000 bp, Homo Sapiens
ctccagaaatgaagacatgagacttaattgaatattgcgtcctgttcgctgctttgaagggcaagtaggaaacactgttaatttttaaaaattttactgagtacaagaaggtttggggatagctcaggaaatttagataaattgctactgttatgtatttgctaagtgctttttatttaaattccctcccccatgacatttcaactctgtagtccagggtctatctacatatagtagactggggaaaaagcataacattttttgtttttttaccttatattttattttattgttattatttttttgagacggagtctcacactgttgccggtgctggagtgcagtggcacgaactcggctcactgcaacctccgcctcccgggttcaaacgattctcctgcctcagcctcttgagtagctgggattacaggcgcctgccaccatgcccagcaattttttttctatttttagtagcgatggggcttcaccatgttggccaggctggtctcaaactcctgacctcgtgattcaccctccttggtctcccaaagtgctgggattacaggcgtgagccactgtgcctgggcaccttatattttaaaagtaacttcaaaagatcacataaattatatatatatataaattatatatctttgttgttgaaaaacggaaaatacagataaggataaaggaaaacaaaaaatcatctggaactcacacacagaattatctacccctcacttactggtttatataattccacagtttgtttctatgcacatagatatatttttattacaaaaatattatatctacatactgttttgtaacttgaaaacacagcttttggggagctttattctttctttctcacttttggtctaagaagccaagggaatttaaaatgagatgaattaatcaataattaaagtagggttattacaccatttagatgaaagaaaatttatgttgacagttgatatactgctctttagaattc

SEQ ID NO: 199638 - DNA, 1000 bp, Homo Sapiens
ctttgtttttctctgactttgtttttattcttctatctgatgatttccaaaagaacaacgaaaccaactcctcatttagatgggtaaatattattttatttattttacaacctgttttaaattaaccttgaaataaaaagcttttatttaataattttttacttgacactttaggcatcatgttgtttttggacaagtaatctctggtcaagaagttgtaagagagattgaaaaccagaaaacagatgcagctagcaaaccgtttgcggaggtacggatactcagttgtggagagctgattcccaaatctaaaggtaaaaaggaagtacatatttctgagaatacttacacatacaaaataagcagagatactctaaatagttgacatgaaattcatactcaagctgaaagaaaaatgaggtttttgttttaaaatgtatttctgtgcttttattttttacttttttaagttgacaaaacttgtgtatacttactgtgaacaatatgatgttttgaagtatgtatatgttgtggaatggctaaattgagctaattaacatttattgcctcacataattacccctttttgtggtgagaagaacacttaaaatcttagtggttttgggttttttttttgttgtttgtttgtttgttttgagacagagtctcactctgtcacccaggctggagtgcagtggcatgatcttggctcactgcaacctccgtctcccgggttgaagcaattctcctgccttagcctcccaagtagctgggactacaagcgcccaccaccacacccagctaacttctgtatttttagtggagatggggtttcaccatattggccaggctggtctcgaactcctgactttgtgatccgcctgccttggccccccaaagtgctgggattacaggtgtgagccactgcacctggccagtgattttcaagaatacagtacattgttattagctatagtcatcatgttatacagtagaattc

SEQ ID NO: 199639 - DNA, 1000 bp, Homo Sapiens
aatggggcttccatcacctcaaagcatttagccttcttttgtgttacatctcaattatactctcttagttatttttaaatgtacaataaattattgttgacctttgtcaccctgtttctatcaaatactagatcttattcattctgtccacctatatttttgtacccatttaccatccccacttccaccccacctacccttcccagcctctggtaaccatccttctactgtcagtctccatgagttcaattgttttcattttttttttttttttttttttttgagacggagtctcgctctgtcgcccaggctggagtgcagcggcgcgatctcggctcactgcaagccccgcctcccgggttcacgccattctcctgcctcagcctcccgagtagctgggactacaggtgcccgccactacgcccggctaatttttttgtatttttagtagagacggggtttcaccgtgttagccaggatagtctcgatctcgtgacctcgtgatccacccgcctcggcctcccaaagtgctgggattacaggcgtgagccaccgcgcccgaccctgttttcatttttttttatggctcttttcagtttatttcatgaaggagttacactagtccaagttaaaagcggaccccaaatggttacattatacaagctgtgaggtttttaaacttgtgacaagggacagaagggaaattctactcattgcaaggaaatcctcacttaaactacagtgagccacaagcatttaaaccccatgaatcttcagctgatcgtccttagccagtccaagctctacgaggaactggcataatatatgttcttgcacctgtcaccctgtagctgaattacttctccatattctggatgctcaattacagtaccattgcaggcaaacttcttaaacgccttcactggtttctttttggtgtaatcatcagcgatcccttggacagtagtaagggccttcctgccgtttctctgttgaattc

SEQ ID NO: 199640 - DNA, 1000 bp, Homo Sapiens
gcagagggaccctggacctggcccacaaaaccattttttcctgctaaacctctgggcctgtgatgggaggggctgccatgaagaactctgaaatgccctagagacattttccccattgccctggtgattaacattgggctcctcattactcatgtaattttctgcagctggcttaaatttctcctcagaaaatgggattttcttttctatcacattgtcaggctgcaaattttccgaacatttatgccctgtttcccttttaaaactaaatgcctttggcacccaagtcacctcttgaatgctttgctacttagaaatttcttctgccagataccctaaatcatctctctcaagttcaaggttccacaaatctctagggcaggggcaaaatgcaaccagtctctttgttaatacacaacaagagtcacctttgctccaggtcccaacaagtttctcatttttatctgagaccacatcagcctggatttcattatccatataattattaacattttggtcaaagccattcaacaagtctctagggagttccaaactttctcacattttcctgtattcttctaagccctccaaattattccaacctctgcctgttacccagttccaaagttgcttccacattttcaggtatcttttcagcagtgccccattctactggtactaatttactataccattttcatgttgctgatgaagacatactcaagactgggcaatttataaaatgaggaggtttaacggacttacagttccacatggctggggaggcctcacaaacacggtggaaggcaaggaggagcaagtcatgtcttacgtggaaggtggaagacaaagagggagagcttgtgcagggaaactcccccttataaaaccatcatatctcatgagacttattcactatcatgagaacagcatgggaaagacctgcccccatgattcaattacctccccactgggtcccttgaacaacatgtaggaattc

SEQ ID NO: 199641 - DNA, 1000 bp, Homo Sapiens
cataggcaggaatcgaacaatgaaaacacttggagacagggtgggaaacatcacacaccaaggcctgccgtggggtgaggggacagaggaggtatagcattaggagatatacctaatgtaaataatgagttaacaggtgcagcacaccaacatggcacatgtatacatatgcaacaaacctgcacgttgtgcacatgtaccccagaacttaaagtattaaaaaaaaatgagataaacttttaagaagctacgtgtactcaatgcccaacttgaggatgcttttttggacctacttaaaaatctgactgtcaatgcaaaaggaaaaaatattttctgttgaacaagacagttaattctagatgtgttttaaagttttactttaagaatgataatttaaaatattaaatagttatggtattattttttaattttaaaattattttattgcatgttatttttgtgttattcttgccttcttttagtgttttaaaaaattatcaggtagagttttttttacgtattattaaaataacatgctaatatattagggtcataataataacaaaccataatttattattataacatttttatagaaaaactctgagaggtttagtataagcctatcacagaaaaatgacttactgcttattactatgataatatattcttaacaatacagaaagtgttatgaaaaatatcgattacttataatttggggaattgctgagaattttcagaaattcttattttttgtgtttctgaatcctgaagagtaatatctgttgggaatttagtaggtcatggtaagaaccacagaagcaatgacggggagaaataagccactaccaaggtgggaggtggagcgactcttgctaattggtcttgctaatgaatcttgccttatgctgagagttgtccagtgatctagtcccaagccgctttcttccgttcttgaggctcatctgcaatggaattcttattccttccaagagaattc

SEQ ID NO: 199642 - DNA, 1000 bp, Homo Sapiens
ctgaccattttccttattctcttgacattcatcctttcagtgtcctttccttttgcaccattcacattaatctttttctagccttggccagctcttaaatccctgtccagactggcctctttcatgactgcacccacgcctccttgcaaagtcagcttcccttcccgtgagggctgctgctagtaaatctgcctttccttaagcttccaattagcttccttctttgcctcctgatctcggttaatgtacacctttgtagccactttagtaagctgagtatcactcacgcctgtggagcttctaacttctggaatttatgcctgatatttccctgggcctgccttacaaatgccatatttaccatgtactgtttttcagcagcctcagggtcaaatggcatatgaagccgataagcctcgcagagcctctcgtaaaattcaccgggactttcatctggcttctggtggacctctgagacctttctgatattggtggcctttttccctccagcctttattccatttaggagtgcctctcaataccactgcaaactttgtggcccttgagcctggttagggtcccagcctgggacagcctctatcagaagtgcttgttgtgcatactgcctgatatctcctgtgcctgcaggctcattgttctcgagccactggagagcagcttgtataactctttggtgctcttccatatcaaataatgacagaagaagttgtttgcaatcaacccaggtaggattgtgcattaggaaaatgggctgcattaaatctataagagcctgaggcttttctgtataggagggagtatgttgtctcctatttcagagatcagtagtagagaagggctgataaatgaagagccattctcccccttggacttcattctgtgcattcaaataaatttgtccccatgtttatcggagggacatctgcattgcttgggcatgacctgacctaagatagccaacctcatccccctggaattc

SEQ ID NO: 199643 - DNA, 1000 bp, Homo Sapiens
acaacatagatacatctcaaaataattatgttgaaccaaagagttcatactctatgattccatttatattaaattctaatgaaggtaaaacaaatccataatgacagaaatgagatcagttgttgctggggctggggagatagggacttgtggcaagaaagaagtagaaaacattttatggtaataaaaagctttctttcttgattgtggcagtggttacacaggtgtacatttttgtcaaaagtcatcaaatggtatgagtaaaatggattttactgcatgcaaatagattagttaataacaattaggaagccacctccaacaagtagttcagagaataaaaaccagaggtacaagatgccagtgtccttccctcctgctctctattctcttgcttctatctctcatggctatcccacctggaagccagatgggttttgaggcaggcttttaagatcagcctttcagagcccagagcagagtagagagtagatctctaggagccagtggagaatgtccttcagattgtttccgtgcagtgtgagtcccttaacaaaccactgggagaaaatgattaggtaggaaagtacctcttggttaacaaacttgcaaataggacaattgacaacataggtcaaattgattgaggaccctgtctatactaggaaagtacagtgtgatattgcagaaaaataatccatgatgtatccctctctttcctctcaacacacctagaaagaaaaatctggatgctagcagcttgaaactactttctcaggtggttatgtgcccaactgcagaaccttctgcctgagagtcccaagggacttgctgagcacagccatgctcatctttctggatgtcagcatcaaaggttagggcctactttacacagccttgtgtcccacggtgactcattaggtgtctgtaatccctttatatgcatttatttaatattttgtctgctgccaccaagttaggagaattgatatctgaattc

SEQ ID NO: 199644 - DNA, 1000 bp, Homo Sapiens
ttcttttctccaacaattctaatgaaaattctggcctaattctcactggcccaagttcagtcatgtgcccattcctgagccaatcactgtggtgaggaaaacagatgcataaccaaccttatcctcaggaatcctggaactgggtgaggggaaagagggacagtcagcttcatctaaactatggactgagagttgaggcaagatgattcctgaaagaaaattctaagtcttgctgctataagtggaagagaatggtgggcaagcaaaagcaaccagtgcccacaccaaaggtaaatctaaaacaacatcccatttcagtacagcaagcggttctccttcacacagaggaagctcatctccaagtttttatttggccaggacatgaaccaaataaacaccttccaaagaaagtgtttgatcgcattcttcctggttcgtgaaaacaccagttcaggtaagatggggcaagcatcattatttccctaggctagatcagttcagagtactattttctgagtttttccactctatattcaaatgactaagattaacctttatatatttatctcttgtctacattatgtacctcccaacttcctcctaatgaacatatttccctcctccaagaaattactggattcatttattgtggagagctggaacatatatattccagctaggtacaattcttaacccctttacacaggcaaagccagaagctgttgtcatgtcacaaacctggaaaagtctaataatctatgaagagaagccagaggacaaagttggtttgcttctccaccctcaagatgacagctcactctggtttttatgtttagacactcagggcaccatagctttgtaaataaggggaattgtcatcaggtttatgtacacaaattctgacacattaaatggtgtctaaaccaaagcaaaacttagtagaactactgaaatgcagaatgttacagataccatttgagcatgtatctcaagagaattc

SEQ ID NO: 199645 - DNA, 1000 bp, Homo Sapiens
acattggtcttttaccttatcaggtcttaaacaccgaagaattattattttctgtagttcatttaggttcttatccattggtgctggaaatttagcattatgtggctctttactgtcatagatttctcgccattcatatatatgttcacaaaaatgttgcctaatagaaaaaagcttaagaattattctttttattgggaaaaacttaaaagagattgttgaacaaggagtagaaaccagacagctatttaaaaccatttaaaaatcactaaattgaagaacaagtttacatattgccattcaatgataaatcatcgaatttaaacaatcacctgagtcctctgaaggcaggaaattcacttgcccgacagatttcctcccagcttttgtcctgtagccaagttggatcaggatttttctcagcacttttaagacttactcctccagttaaaagaaacatcagttcctggtattcaatctctttccttgccctgtattcccaaaataaggactgttatataattgttgattttaaaattgaatgatgtcaacttccgcttttgtaacctggatagaacaacttagactgtacttacccacctgctgtaaacaactagaaaactggacaaaattaatgaaacaactgtttttttgaaattgttcaatagccagtgcaggactgtggcctctgagagaagagaggtgaataaggtgatccccgttcctcagcaggctgcctggcactttctagactacagagcagggaggtgtgatcagaatcagagctctgcagtattgctgaattgaggaaaccggcattaagttctcctcaacagtattgctgagttgaggacatcagcattagggaaagcttaggtgactggagtttgtgagcagaggaggaagatgaatggaaaaggtgaatgaatgtcttaaaaatctacagaggtgctctcttggttctactgataaatacagccaggcattgctcatagaattc

SEQ ID NO: 199646 - DNA, 1000 bp, Homo Sapiens
gttttcttgggtatacacctaagagtgggattgctgggtcatatggtaactctatgtttaacattttgaagaactgccagactttgttaaataaagtgtctgtatcattttatgtttgtaccagcacaaatatgaaggttctaattcctccatagcctcactagcacctgttattatctaccttttgattctagccatcctagtaggtgtgaagtagtatctcattgtggctttgatttgcatttccctgatgattaacaatgttgaacatcttttcatgtgcttattggccatttgtgtatctttttagagaaatgtgtattcagatcctttgctcatttaaaaactgggttatttatcttcttattactgaattgtaagagttcttacatattctagatataagccccttgtcagatacatgatttacaaatattttcttccattcagtggttttcttttcattttccggaagatgtccttgaagcataatagtttttaattttgatgaagtcccatttatctattttttcttttgttgcttgtgctgttggtgttatagctaagaaaccattgcctaatccaagatcatgaagatttaggcctatgcattcttttaagagttgtatagtttagctctcacatttatttaggcctttgctccattttgatgaagttttgtatatggcatgaagcaggagttcaatttcgttcttttgcatatggctagccagttgtttcaccatcatttttgaagaaacttccttgtccactgaatggtcttggcacccttttagcaaacaagctgagcttagatgtataaatttctgtcaggactctcacttcaattccattgacctatacatctatccttacaccagtaccatactgtctggactactatagatttgtagtaagttgtcaaatagaggagtgtgagtcctccaacttaattcttcctttttaagatgattgtggttattctggataccttgaattc

SEQ ID NO: 199647 - DNA, 1000 bp, Homo Sapiens
atcatacttctcttacagttgatcacagacaatactgccaattatttagacttgaatgtgtaattaccttgggaccttgtatcacttcagattctgatctagcaggtctgggacagggagtgagactctgcatttttaacaggtggtgcctggtgctcttgggtgctgagcagacctaactactacaataagctcattgtgaaggcgccagctccatggtcaacccctccagtccatctccagcagagagccttgtaaaaggcaaatgttactgatcaaatcactttaaaggtttccctttctcaccagctagccagagaatgaacgtctaattgtgtagcatggcacataagctgcccttttacttggcccctacttctcagctcctactttgtgcttggctagtttgatgacctggatttcctaacacaggtcttcatataagaaaggcaattccttgagcattaaataagcaacagtgaacttcatgcccattcctcattcgctttgaaaggcctaatttaatatgcatatactagaccaaaagactgaatcaagattaatagttacggtgcccatgaacttgggcttttaagaagggtaaggcctccaacatgctttataaacttggccccagaactcagctgtattgctgcaccagatcttatcttaatccctttgtttatttttcaaaagatataactaacacagtacagaagtctggaaatgggagttgtgatttttgtttgtatttaagcttacatataatttaaatgtcaagtgcctagcagtcttgggcatattcctaaatgattcaggaaaacaagacagcacaacagctggagtgaagtggctaagtgatttatgtgattcatttgaaatttagcaaactccacatggattgaacgtaagtgtgtatctttttgcaaatgccaaacacatgtgaaaagaggaaaatatttcctccaaaagtgaataaaatataaacaagaatgaattc

SEQ ID NO: 199648 - DNA, 1000 bp, Homo Sapiens
agaccactgtaactcatgggcccaccatgcctccagtccccactccagcccacgctggctttcccactgtactcatctccttaaaattccaccagattaggccgggcacggtggctcacacctgtaatcccagcacttcgggaggccaaggtgggcgaatcacttgagctcaggaggtcaagtctagcctgggaaacatggtgaaaccttgtctctactaaaaatacaaatattagccgggtgtggtggcaggtgcctgtaatcccagctacttgggtggctgaggcacgaggatcgcttgaacctgggaggcaggggttacagtgagccgagattgtgccactgcgctccagtctggtgacacagcgagactctgtctcaaaaaaagaaaaaggccgggcgcggtggctcacgcctgtaatcctagcactttggaaggccgaggcaggtggatcacgaggtcaggagattgagaccatcctggctaacacggtgaaaccccatctctagtaaaaatacaaaaaattagctgggtgtggtggcgggcgcctgtagtcccagctactcaggaggctgaggcaggagaatggcgtgaatctgggaggcagagcttgcagtgagctgagatcgcaccactgcactccagcctgggtgacagagtgagactccgtctcaaaaaaaaagaaaaaaaaaatccaccagattagggactgggcctcactgtgacatgccccaggatccagccctgtgctgtgcgcgtggtgggtgtgtgagtgaaccactgggtggtgcaccggctgctggtgctgcccgatgtggcgcttccttttatcctcggatgtcacccttcctgggtcactctgggtgtctgtagaggtccccaattctccagctcacaagggcaggcctgaagggactcctctctgctcccctcaggtctctccagggaccagaaagctcttgctagcgctggcctccatcagaggcatttttagaattc

SEQ ID NO: 199649 - DNA, 1000 bp, Homo Sapiens
ataccttcttagatgactttaaaatggaaaaagaaatcggcttatcctataacccgctacttccgcccagggacttgcagagaaacacctgtgcgttctcagaacttgtttcactctgtagggtggagggaaaaatcgatcatgatctaaggctgtggttgctgaattgggttattagttgtgcaccatctacttttaccgtcttttgatctggccactatatttaggttgttatggtatccagtggggagaaaaacaacttaaacttttgcaattgggaaaccaagtgatactttaaaaaacttaatgaaccttgaaaattgctactcaccgtgtgagagtaaaaatgtcgcatcaggtgggtagcaaagaaaattgtcttgatacttcctgcattctgacaatatttctttggcagataatcatgtatcttttactgagagtctgctttgtgcagatacccttatattgtccttgtatgcactttggggagatacataaaggagaaattaatattaagattaaaacatgtgaatcccatggactcaggtgaggagaaatggcgagtaaccactaataggtccagagtttccttatggagtgatgaaatattctggaattacatagtggtgatgagtgtacagttttgcaaatatatgagaaacaactgaattgtatactttagaagcatgaatattacagcacgtgacttatataacaattaaaaaaacccaaatccaaaattctagtatatgcatgatcagaaaaacaacaacccaattgcttagctcgtagtccttggacctgttgtaagacttctgtttcttatcctctgcctactgttccctgaatgatcttccacagtgactgatttaatagagttaaaaactttccgtgaactctcattgcttttagttaggtctgtgcatacagttgggcagactgtgctctgcagaagtctaagaaatgtctttctcattctgcttttttggatgaattc

SEQ ID NO: 199650 - DNA, 1000 bp, Homo Sapiens
caggaggtaagaggcaaaaatataaatgtggtatcctgctgattgatggatttagcaatacaaacgttattaaggatcttaatagaacatattcactggattggtgaaggaaggggataggagagaataggagtttcaaagggaatgggaggagagaactggagatgagacaggcaatactttcaacaaatttcactgtaaaaaatgggaaagacatggggcggcagctggaggaggaagtaggataaagaaaagtatttttgtttgttgtttttaaataaaagaaagaatatgtttgtatactgatgagagtaactaaagagagcaggtaaaaccatcaaggcagtagacagaggaaaaactactggaaatctgtctctaaaaatataagtggatgggatccaagggacaagtagtagattagtttagccaggagcatagtcactccccataatgacaggagaaaaggtagaataaacagatgaaggcacaggaaagtatctaactgcagtcacagaaacttattaacattgattaaactggttgattcatctgattctaatcagatttgaattggattacacaatacacacacaatcatacttttgcacttgggaatgaaatttcttttcacttggcagttatgcttgttttaccctagtgtcccatttaaaatgaaattattatttaataatcaaatagagaaaaacttacaaagataatttgtactctttccagtttaaactttcagaatttttattaaatacaatgacctttggtcttgtttcttagtcagagtatcttaccaatatttgaagtaggtgaaaattattgatgagaaaatacgtggttaaatatggctatatgagaaagaggacttttatgtgttcagtctattttaagtaaaactttaagctacaattgtactattttcaatttggcaaaattctcctttctcttcagaaatgtttagtttatttcatgttctttctctatttta

SEQ ID NO: 199651 - DNA, 1000 bp, Homo Sapiens
atgtaaacttttacaatcattgaaatgcataaaatcctggttctatttctcactggcttgcttaatgttcctaatcctagaaaatgaagatattagtacatcacaaggttattgtgacgattaagtaagttactgtctaaaaagctgttacttatcttaatggtgactaagtgcaaggcaaatatcagacggaccactagttctttggagtcaagatccaagggtcttgaaaccacccatgaatcgtaagattttcttgcatacttaccttctatggttcctcacagaatgaatttgaatggtgttcactaccctttttataataatctgaacccaccccacctacccacctttagatacacatttttttttttgagataggctttgctccgtcacccaggctggagtgcagtggcacaatctcgctcactgcaacctccgtctccaaggctcaagcaatcctcctgccctgcctcagcctcccaggtagccgagactacaggcacctgccaccacatccagctaatttttgtattttatgtacagaacaggtttttcccatgttgcccaggctggtctcaaactcctgagatcaagtgatccatcctcctcatcctcccaaagtgctgggattgcaggtgtgagccactgtgcctggccagatatgcagttctttatatggtctcacaaatgtaccaagcaaatttccatctttatgtctttcattctaagttcctccttagaactcaagctctagttctcctggctatcctattccacatttacaactgacttcttagaattcctattgcatatttaactttttgatacttaaagtaaatacctgctatgttaaaacaactgcatggaagccaaacataaattaaatgtggtccttaaccttaagagcagaagataagtctactcaaataattacaatagaatgtaatgagtagtcataagggagggataataataacatgggtttaaataggaattc

SEQ ID NO: 199652 - DNA, 1000 bp, Homo Sapiens
tttagttcaaagaccgtttttaaagtttttttgtctttgtttttgctttttttaaaatcccaagaatctccacatggtaaagctgtacttttggcatcagttgattgagaaaatgcttctgtttgcctaggtttgctttcctctgcaatgactcagcaacccccagagggaggaaccaccagtcacctgaagccagataaagtagccggtaaaatttgtgcttgagttactcttctatgaatcaatgtactcatggagaccattagttaaagaatgaagagaaagaatttctttaggccatgactcacagaaaaaaaaagaagaaaaaaagaaccaaggactacaaacagattaaatcctataatcaagggctactcaccacattagtaaattagtcactattcattcttctgatgcaaacacaagcatatcaccctctatcccatccacgtatttggacaaatacccatgactatgtattcaaacaatgctattttaaaaataaagatattattcttctcagtcaatattttaggaaataatcatcatggaaagttaaataataagctagacacggctcaccctgttttcatagtacataaaaatttgctgctaatatatagaaatacaattgattagtaaattgaccttgtattccatgaccttgctaaatttaactaatagttttggtacacattttgtagattccttaggattttctttgtaaacaatcatgtatttcaacaatatagacaatattagtccttcctttcctgtattatgccttttgtttctttttcttgtctcagagcactatttagaacttctcagaccactatttagaatttttactacttctatttaacaacgttaaatagaaatggtaaaagccgacaccctcacaattcccaatattagggggcagcactcaacattttaccattaagtatgacgttagctatataggtttttgtagatgctccctattagaggagaattc

SEQ ID NO: 199653 - DNA, 1000 bp, Homo Sapiens
ggggacacaaccaaaccttgtcacaggtcaaggcaggaggattgtttgaagccaggagtttgagaccagccagggcaacatagcaagaccttatcactataagatattttttaaagcagtagaagaatgaaaatgtaatcataattcactatatggcttggctgtgaataaaaataatttttttcttaaacctctatctaccttaaaatggtgataagatgatgggagagagaaaaacgtatgtatatatttgagagaaaggaaacattgcctataaagtagcttcgaataggtctataccataatagaaagtgaaaggtgagaaatggttccggattgaaggggaccagagatataacagttaaatgtaacagatgaacctggatttagttctgtactagaggggaagaacattttaggatatttttgggacagagaaattcaaaagggtctgtggattagactgttgtattgcgtcagtgctaatttcccgattcaaatacctggatcggtactatggttaggtaggagagtactcttgttttctgaaaatacacacagacctatttaggaataatggggcaacatgtttctagcttactctcaataagtaaaagttttctcatccctccttttctctcttttgctttctctctccttaactttcttacaccaattataatttatctacagatctaacataggcatgcttcctatcacatttatgtcattatcagttttcttttcttccttttttaaattccctttcttccttgtttttctctctcaccttctctttttcctttcctcctctgcttattcccctttcgtattttgttctccaccatccccttttccttcatccctcgcttcctttattctttctccttgtcatctccttgataccctggatatttattttcctggtccagtgtatatgggctgttctctaggtttgctgcaaaactgtcaatgtagaacattattttccagggaattc

SEQ ID NO: 199654 - DNA, 1000 bp, Homo Sapiens
gaggaccgttatggtcgcctgggtgtaactttagtctccttttgcctttgggtgtgtctagtgtaatggttctctgtgtggggtgattttgccctccagaggccacttaacattgactggagacatttttggttgttacaacttggggagtgctatgggcatttaataggttgagcctagggtgttgctgaacattctacaatgcacaaggcagctgcccacaataaagaattattcagtcccaaatgctagtattgttgagtcaagaaatcttggtcttttttttttcttttttaagacaggatcttgctctgttgcccaagctggagtgcaatggcacgatcatggctcactgcagcctcaaattcccaggctcaagcaatcttcccacctcagtctcctgggcagctgggaccacagacgcatgccaccatgccagctaatttttaagttttttgtagagacagggtctccctctgttgcccaggctgatctcaaactcccgggctcaagtgatcctcccaccttggccttccaaagtgctgggattacagggctgagacaccaccccggtcaagaaaccttggtctttatgatctaatcaggtgtcaagcagagtggacagagggtggctgatgtagtctgagaaaggggttctttgttcattaatccaagaaggctgtgatatagacacagagatagggtaacaaaattcaggggactgaagaactagctgcccaagacctctcgccctctctcttccctttctcctcattttccttctccctcctgttgagagctttggagtgtaacagacctgttttcaaacccaggtcctgctgcctggtaaccttgggcagcttgctaaagctctttgaacctcagtttcttcacctgaaacatggaaataacaataggacttttcagaattatgaaaattaaacaagagaagtcaaaccatgtaaaaagtttgttggggcctagcacatgggaagaattc

SEQ ID NO: 199655 - DNA, 1000 bp, Homo Sapiens
ataatgagagagaaaccatagtttattggttatatctttttcaatatttctctgaagcagttttgattttaaaaaactatcccagtctattagcattttaatcagcatcttgaaattttatctgtaatacacaggtagaatttttcccttgctgttttacttgtagagtcaaatgactctagtatgtgttgttcaggtgacacaaaaaaacctctgcgtaatgagtaaaattatcccagaggagggagctcttttagacaatgaaacatagtggggtccttgagtgcaactaaaatttcttttctgattaatcaccgtccccttgattcatctttgcttggtcttgtgtatttccattgcatagtctgacttataatgtggttctgcagttgagtctttcttagaactgggtgatcacaggaagttatcttatttatctttgtagtccattacccctcctctcaccctacaggccttactcagtaacttgtacatagtagctgttcaataaaagcttgttaaatattaaggtgatagatatcacagttaccctgatttgattatatgaatgtatcaaattatcacctatacccctaaaatatgtgcatgtattatgtatcaatgaaacataaaatcttgttaagggatttgattttcaatgatgataggggttgtgcttttgaagtgatgcaaggctaagaacaaaactgtaattgtttaattcagaaagtagttgtggaatggagtctgaagggagacacgacaatatggcctgcacgaaggaagattttgtgtatagaatgttctagcctgtttagattgccttgacttgtgtcaggggagcagtttgtttcactttgcctatataagattaatgtttctgagatgaaaaaaacacacaaaaaaggagctttttgacgtaatcaagcctctatcaatcacttcttgcttcctaataacttttgtatcttcctttcaggagagcagttgaagtgaattc

SEQ ID NO: 199656 - DNA, 1000 bp, Homo Sapiens
gatacagtggtacatatcaacaacctggaacatgtggcatttacaccatgtgccaggaaatgacaattcatttaagatagacatgatatctgacctcgtggagtttagaaactgagtggtagcaaagattatgaagaatgataaaggctatgcatgttataccagggaaacacaggaaggctggggaaaagtacatcagggaaacctaatctagcttcagggaggtggggctgtggggaagaagagtgttaggaaagagaagcacatttttaaaagatcgtcaattacagaagaaaacaaatgaatttcactggcctatcctaagaccattctagccaatcagatttttgcagcttggtttctgcccattggcttgtaatcagtatttccaagtgtaaaacaccagccattctttccttgaatcattttaagtctaaggggacagcatcagtaattagcagctcaggctggagttaatccctaaggaactctcatttcctgcctctatgtcagttttcgtccaggaaatatagccttaatatccatagccaagtacaatgctaggtattttcacaaaaatttattcatttatttcctaccacaaaatggtatgcctactttatacatttaaaatatggaagctcagagtttaagcagcttgccaaaaagatccaacaactagcattagctaaaatttgaattcaagacatataagtccaaatccagtactcttttattaaatggaagctctttgtctttatgaaatacctttacttatgaaagcaatggcaattttattttctggttgttcctaccaaagatagtactatttgttcttccttaaaacatttggacaaaatgatcaagtatttttgtccccaagaattaaaaaagaaaaaacccacaaaacccatgtttactttgtgtatcttccaccaagggtgtaaccagattggtgacaagaaatatgactcatgagcggtatcttggcaaagaattc

SEQ ID NO: 199657 - DNA, 1000 bp, Homo Sapiens
tttcaggcaccaccatgtcccctttgtctggacattggagtcacttgtgacatgcctggtccagccacaagccccacatggagcccgcacctatgccagcaattggaacagccagctggaccccatgctcactcgctcacacatcccctcactctgcgggctgagtgcgcagtcacagtggccacaggatccaggccaggtggcaaggcaaatgcagcccaacaggctgaatgggcagggtacctcctgccacaagcccagggcgagcaaggcccaggcaggagcattgccagccacagaggtctccaactggcaaaacgcacagaaaaaaaatcctgtgtcattttgaaggcagtgtctatattatttcctgaggaactggatgtgggctatgaaaaggccgaagaaaaacggaatcaaatgtgactctcagtttcttagtctgagcaacagaaaggatgaagtgcagtgtggaagactgagactatagaaagagtttgaggtggagggagtcgaggcattgaattttcaacatgctaaacctgatatgtatattagaaaatcaagtggagatgctgaattggcaattggaatatacatatctgaagttcagatgacagatctttgctagagatgtaaataaataaatgggtaagacaaatgggtatcattacaatatagatggaatttaaagccacatgagtagataacattatcaagagaagaaatgtaaatacagacaaaaagatgatcaaagactgactacttggaccttccaaaattaagagatcgaaaagaagagaaaccagttcacaagactgaggagtaaccaataaaatgaaatagattgcaggatcctggaagccaagtgatgaaagtatagcaagaagaagagagtgtcgattataccaaatcctactgatcgattcaataagatgaagactaagaattaccacaaatgtatgttattaaataaatggcatgtagtcacagaagatat

SEQ ID NO: 199658 - DNA, 1000 bp, Homo Sapiens
tggcaaatatgaggattttcctgatagcatagattctggtgttgactgagatgaaacaacagatcctccccagaaggcatgagcagaagtagggctgttttcaaacaatgtgctaaagggcccaaatggtaagggggcactgaaattgggagcaataggcttatttgctggatgtactgaattctgacaagcactttgtgtacttaaggtcgaaggtagctggacagaagagggaacactgtgaggtcttttaatgtgattgacactgaggactgcaacagatgaattttgcactgaagctgaattcttgtgaggggcagttgtgccatgagggggtggtctaatagcaggggtttccattttaggagtaggctgggggcatcccattggtgtctgaggcatagggtaagtcactggggcagtagaaggcaccgccactggagcagaacttgttgctaaaggaggaacagtcattctaacttccgggggaggaacctgagactgctgaagaggtggtcttggttcctgagaaacagatcccggaggttgttgctgattagaatgagctgatgaactcccagaagaactgctgctgtttggaggtctagtgtttgttgtttctactactggtggactacctgcttcctgttcggaggaagatgccactttatttggagatgctgatccacaatccaaagggctgtttctagaaacccctcctggctgggctggtggtgatggggaagatggggatgatactggatagtgttctttggcagtaggcataggatatgtggcatttgtgggtgcagtgttgttgttgcttgccgtggttgtgactgttgttgtggtggcattggatgtcttcacaactgtgacaaaaagctgccttcggacagaaggtgaacttggactgccatttgtagatgtaccaggcaccgttgaagctgatgaactggttgtagttgttgggcttgaagttaaagaacctgctgaattc

SEQ ID NO: 199659 - DNA, 1000 bp, Homo Sapiens
cgcgccaccatgcctagctaatttttatatttttagtagagacgaggtttcaccatattggccaggctgtctcgaactccttgacctcaagtgactgcctgccttggcctcccaaagtgctgggatttacaggcatgagccaccactcccggcctgggtttatgagtcttttactgggacttgacccattctcatttcccaaagagtttaaagattgggatgaagttaactggagcaggaaaaataagtaagattggaaagatatatgactttataaccccattgaagacatacaaaaaaaaaaaaaaggctgaaatataaagtatttccctggtggcatttgttctggtatcttattttttaatttatgttttcaggaaaaattctccatcagattaaatagctaaagttacaaaaggcaaatactcacataaaatttgaatctgaaaaggaaaacctaattcctggtatatatatagatgggtactgacaacatttctatttctctgagtttcacggatttcagggtaacatctgaattaaggttgtgtatctatcctttcaacatctgaatcatctaacatagaatgatcaaattctgtttctggcttatcaaattacctagcattttccttgcaatgatgatgttcaaagctggtacaaatagtgcaggatagagccattcttagctaccattggtaggagtgggtatgatctttctggagagtaatttgggcctttaaaaagtttatgaccttttctccaacattcagcttctaaaaagctatctccaggaaatagaaaggtgagataaatttccagataaagatatttatggcactgttctttacaatagcaaatctaaattttgccattaataatttttaaaatatactatacagttatgatcatattcgacattgtcaggtacttacctaactgcttaactcacttgaccttctcaagagccctatgaagtatgttctcttacccagaattc

SEQ ID NO: 199660 - DNA, 1000 bp, Homo Sapiens
aaccaacttgatattgcttctaacctccaaactgtccttgttcattcctgggtgtaggctgaactaactttgggaggaactatagtttaaaacaaagatgataacagccctttctcagaacaaacctcctttttgcctggggactagactgcctttgtaggactaacaaattagccacaagattagaaattatggtttaggagtcatgcagctggaggctacaagattgtgaccctccctaaactgttcctgacatcagtgcttgagatattttgcagactctgcacttgatggatcagctgacatcacctggatccataaactggctcatctgatcttgcggtccccattcaggaactgactcactgcaagaggacagcttcaactccctataatttcatctctgacccaaacaatcagcactctcaactcaccagccttcccccacccaccaaattatccttcaaaactctgatccccaaatgatcagggagactgatttgaataataataaaactctggtctcccacacagctggctctgagtgaattactgtttctctattgcaattcccccatcttgagaaactggctctgtctaggtagtagggaaggtgaacccattgggtggttacaaggcattctgctcagtcaagcactctgctaagtgctttacatgctttatttatattcttcattttatttctctatgacaacactatgaggtagatattattattatacccaattcacagacgttcaagtaacttccctcaagttacataattgtaggtggtagtgtagagattggaacctcaagtccaactctagaatctgtactcttaattcttacacattcctgccttcttggattaattattctgttttggcccaggtgtccatcagggttctcctgtcccctgtgacttagattggattggaacattcttccatttcatattctgtgcaaagtccatggcctccctgatttctgtgaattc

SEQ ID NO: 199661 - DNA, 1000 bp, Homo Sapiens
tcttcttaatctgaatcttctcttagatcatctcacacattcttaatgtcttgagctttattatatactgcttgtctcctttctctttctcatctacatctatattttgtcctaacttcttccctgatagcaaatctataaggcaaaatgctgctggaccattcctgctgaatgcaccatgagcatttggggtacataggcctgcactgtattcctacatctgataatgactctaccatcttcaaagtctcttcatttcaataccttggagtcaggttacacataattaataagtcaccaaattctcaaaaaattacctattttgaaaaaaatgtattattttcatctccagcttgattgcaactgcagtaggtaagcccttgaagatctattgtccagactaacacaataacctgtaatgggtctctgtaaccctaacttggactcttacctccatcttctatactgctataagagagatgtatttaaaaatgtacatctgcatttgacactcccctggtaaaatgtttcctgtcatttatcttctcccaagggatacaatttatacataatacaatttacaagcttcctattatgatggcttacaagactgtccttgataagatccttaaatatcccttttgcctcaattccttactttacactttatattccagtaacatcaaattgctggaagtccccctgatcttatcaggctgtttcattcctctgtgactttgtgcatgctgctttctctgccagtaagtcttttttttctctgattgactactttcccctcagacttcctgattttttttctttccagatttcttcagggacctcttcttggtggatcagatgataatttgttatgccgttgcatagttctaccaaacacagcacattggaataacaagatacagattcttagatacaggtatagtttagctccagttgccaatacctggcacaaagtaattgtacatgttgatctgaattc

SEQ ID NO: 199662 - DNA, 1000 bp, Homo Sapiens
ctttgtctccagacataaaacaatggccaacacagacgcttaaatacttggtaaatcaatgaataaatgagtaaatagatggctaaataaaaagagcgaacaaatatatatattctttttatcagtataatcataaagaaaaaattcaaaagaaacaaaagctacattctataagatgttcgtaagtgcattaactgtaatagcagaagagcaaaccccatctaaacatctaatgacagggctttagccatttattaatccatttattcaagaaatgttttttgagtgctcactagatgctaggaactctatttgcctttctacactgaatttattctagtgagagaaatagccattaaagacatcagtatgtactacgatgccaggcaatgataaatgctgggaaaagaaaaatcaggaaagtttaaagagtgagggaatagggtattcaatgttaccttattattaggagatttatgtagaaaagtgtttataattcaatgtgtgaaatacaacacaacattatatagtgaacattttaatagctatgtagaaatatatagtcatggtaacatgaattggaaaatcaaagaaataataattaggtaataaaactatggaaatttttaatttttaaattctttattattgcacttctccattaaaaaaaaagcaacatggaaaaaaagaaaagcaacttgaacaagaaaacctaaagtttagaacttctggaacatactgttcacgctgtcttttggacaagccccttaatctgtatacaaaatagttgggaggtaggctgaaactttggcgttttggacctccttttctagaaaatcaacaatatcatttgctccacttcttgtttcaatgaatcatctgagttatctagattttctgttgggcacaaaaacattcattcctatcgaaaataaaacattctacagaaataatctaccaccatttacaattgaggtaatttattataatgcctgaattc

SEQ ID NO: 199663 - DNA, 1000 bp, Homo Sapiens
acaggccccagtgtgtgatgttccccgccctgtatccaagtgatctcattgttcaattcccacctatgagtgagaacctgcggtgtttggttttctgtccttgtgatagttgttgcagttggtctcgatatctgcaggtgcagcgtccaactaacgatggatgggaaatattaagaaaaacccccaaacccaaaaataacaatgcaacaataaacaatacaaacaagaaatatagtataacaaccatttgcagagtgtttatattgtattgtttaaaataacctagacatttacccagtacagtatctacccaatttacagctaaagaggggctcaggaatatgtattatttaagaagctcagtgactccagtgctcaatttaggaaccattttctcccacttagctggttcattggcctttcactttatttggctggtcaggattcttgcattgtctgtccattcaagctgaagaaaagatactgcccaattgcaccttcttcacataacacttcatgacctataaatgtcaataaacatatgccagactccattaaccatgaagttaggactgcagctttgccccttgaaaggatcttaggtggttatagctgagtatgtctgaatgaaactgctgtgtgatagcagtaaaaatgctggcctagggtgtaccgttcagtggtgattgaaaaaaaagaaaaaaagccaactaacagggctactgctaagcaagtgggagaggaggggcattactgtttttatctattattgctaatactcccaaattatgtgcttattgtgttctttatagtttgggaatcataaacccatactcttttaaagtggtttctagggtttcggagtcagacctttgacttaactgactatgtctgttagccaaaatggataagaatggctttttaaaagaacatgttttacaggaccagaagttttgttgcacttggtatctgtaatcttcgtatctgtctaaaggaattc

SEQ ID NO: 199664 - DNA, 1000 bp, Homo Sapiens
tagctgggcttggtggcaggtgcctgtaatcccagctactcaggaggctgaggcaagaggatcagttgaacctgggaggcagaggttgcagtgagccgagatcctgccactgcacttcagtttgggcaacagagtgagattctgtctcaaaaaacaaacaaacaaataaaaatacatttataaattataaaactaaatgaaattacatattcggtaaaatttaaatctacatcaggtaatgctagggatgatgtgaaactaatgctcctcacaatatgtatatggcactgatgggagtttggaatgcctctactaatgttgccttatagttatttaccactttttctatgaaattactgtagaacctttatttgtacagatggtcatttgaccttcacatggcaaaacctaacatttatgtattaaatctacctgcttaatgcaataaaattaggacttagttataaaattatgtagtagttataaatccagatgggagcactgaaatcacacagtagtactggcttataatgattgtcatccgcattatccagaatatgctcatgaaattatcctagacaattcttaaaatccagagaccatggcctcaagtaactaggattcttggaccttgagaaacatagccatagaggttttatttaccattggtgttcctgagtaattattttagtgtcagtactgggatatttagaatggaaggagcagtgtgtttaactgcaacctgtgttagcatttctgtcttattagttgaaaactcatccactagaggcagaacaaagcatcagggataaaaggaaaagtagaataggttggagttattgaggcccttattgtacttcgtctctccccccttgaaattttcagctactttactttgttcatttaatctgttttattctaaatattatatattctaaatttgttttaacttctttctctttttcttttcctgcactaaatcctataacagctggtattt

SEQ ID NO: 199665 - DNA, 1000 bp, Homo Sapiens
gacagggtcttgctctgttgcctagctggagtgcagtggtgcagtcgtagctcactgctgcctcaaacttctgggcccacacaatcctcctacttcagcctcctaagtagctgggactaaaggtgaatcccaacaccctgggctaacttaaaaaaatattttgtggagatagagtctcactacattgcccaggctggtcactgaactcccagcttccagtgatcctcccacctcagcctctcaaagttctgagattctaagtatgagctgccaaacctggcctatatgaagttttaaacatttgtagaaccagttgttaacattgctttttttttttttaccataaaattggtatatgtcgaggaattctatcgtttgactatatttctattgtgttaaattttttgttttcttatatcaaaaatatttttgtaaatgtaaagaaaattcaagcagacagaagatggtgcaggtgctttctattatttaatagttcacctggccaggcacagtggctcatgcctgtaatcccggcactttgggaggctgaggcaggcacatcacctgaggtcgggagttcgagatcagcctgacaaatatggagaaactccgtctctactgaaaatacaaaattagccgggtgtggtggtgcatgcctgcgatcccagctactcgggaggccgaggcaggagaatcgcttgaacccgggaggcaaaggttgtagtgagctgagatcgcgccattgcactccagcctgggcaacaagagtgaaactccatctcaaaaaaaaaaaaaaaaaaagtagttcgccaccatagcatgttttctctaaagaaagctggttgtgcacagaaaagttctattttttttaaagggcatccttctagtaatgctgaaatataaaacaaatagcgttataggaaaatgaaacagcaggagaacgagagagtagaaaacagaaaggaagcgaaggccttggagagcaggcggtagtgaattc

SEQ ID NO: 199666 - DNA, 1000 bp, Homo Sapiens
aatactactggaaataactctcccaattattctattttatcctagagccagctttttctaattgagcatgcaaatacattagtttaagcatttcaaaggtattccattttcctaaataagggcaagagatggtgccataagtatggatcacgagtctagctggagtttctaaaggcgcatctctccttaaggaacacttggtattagatggcagattgcctgctatttgtattctcctcttaagggaccaaaggttgaaagggaaagatatttttaatcatgtgtactgcttatgggaatggcttcccccaggggtcacccttgggttggttcttccctcttacgtgccttggtaaaaccccggaattctgggcatttaaagcactgggagatcagccccttatgtatgcccatcaatttaagcaaatttctctgcatgttcttctttggggactccttatgggaccatttctcatcataagcaataaactctgacactcctatgagaccttagtcacctaaggtgtcttttggccagaaggatctgtgtctctcatatttgtgacttatcatgtcctcataaacttcttctataaatttttctattctttctttttatgaaagaagaatctaaatgtggcaatttcagctgaccttcaaaatctagccagcttaacatcacaattttgcttaagccacagacatttacttcctgttaaagagcaactgctttctctttaaccaaatttcaaatgagagaaaagttcataaattgtattagtttgttctcacatcgctatgaagaaatacctgagactgtttaatttataaagaaaagaagtttaattgactcacagttctgcatggctgaggaggcctcaggaaacttaaaatcatggcggaaggggaagcagacaccttcttcactaggtggcaggagagagtgtgagagcacgggaaagactaccttttataaaaccatcagatctcgtgagaattc

SEQ ID NO: 199667 - DNA, 1000 bp, Homo Sapiens
gatatttttctgtgcatatatctacacacatcctgttggttctgtttctctagggaaccctgaccaatacagagatgaaatggggtggagttagggcaagactctgggcctctccaaccagaggctctgtgctggttggaagttcaacttcctctcctagactcttggtcatacgggcataagtagaccattcatttgattgggagcccttaaaaggcaggactctggtgctaagcctgctgtgtcctgccctgcatggcaccccatgtggatggatgcattaataaaggttcctcactcccccttacagaagagggtgagactgcatggcccaatggaggaagcacaagaaagagagatggggaaggtgaggactggccccagcactgccctcttcaaccaggtagccctggacattgctaacgacctctcattcttcttgattcttcatttgcaaagtgggtgtcacatcatttgggatattatatacaatgaacacaaaatcaaataaaacatgtgaaaacactttggaaagcttcaactactccatgacatctggcattacactttttagaaaagggagtggattgagagaccctgagtctttttctagaccacttggtgatgggagctgagcaaggacttgaacaggtgggtggtacccatgtagagtccccaagaggcttttgagtttggagccagtgccacttgcttcttggaggctcagagatgactaagcaaacacttgcatgtagcagtttagaatcagtgtacagagagactttaggactcaaggctgtactagtttcaggcataaaactaggactagatataagatgtatgttataaccaataaaatcactcatctctcatttttttcctctccagtggagctctttgtgctttaacaggaccttagaaagggtccctaaaacttgggctgtggtttgaagacattgctcttttggggacaagacagaggaagtaaaaagcagaattc

SEQ ID NO: 199668 - DNA, 1000 bp, Homo Sapiens
caaaagaagaaaggaaatgcatacagattagaaatgaagtaaaactttatttacagaagatatgattgtctgtgcagagaattgtaagtaatctacaaaaaaggttactacaactaattcttgcaagcctgcaggagaaaaggtcaatatgaaaaaaccaactgtatttctatatactggcagtaaaacaaagtgaaaatgaaattttaaatatcatttcccttggaagacatgaaacacacgtaaggataaacctaacaaaatttgtgtaagacttaaacattgaaaattacaaaacattactgtgagaaattaaagaccacctaaataaatggagaaataaattgcattcatggatctgaagactcattgttaagatgtcagctcttcctaaatttatctacagattcaacacaatctcacacaaaatcttagcagactgacagagtgtaaaatttacgtagaaatctatatagacattaatctagataaattcatgctataaaacaccctgctagagaatcttaaaagcttgaaggtagttaaaggatcatatcttttgcatgagtaaatgacctgtccatttccacaaagaaagcaagaagcaaatccaggaccaggatccaactttgttctttcatgttttgatactgtgctctttagagtggtacatcatgctacttgtaattaagattactttcactttttactttgcctagaaagagattcagatctcctcaacagatgccagaatctctagatgtgccatcacctctcgatgtgcagcaataagtagaaaaataaccaataattatgtgataataaattaagaataaatttatcaaaacaataaaaatgtaacaataatccctgatcttaggaatgaattgacttttacaataaattacacattttaaagatataaggactccattaaaatgttttattttataaattatttagtaatttacactaaaacactgaaattttaactgaattc

SEQ ID NO: 199669 - DNA, 1000 bp, Homo Sapiens
taagaaggttgggattgaaaaaaatgagaaaggccaatttggaaaatgcattttagtctctggatctacttgtgactgaagtccattcctagccttccaaggaccgtgagtcagtacactcccttgccgcttatgctaaattggatttctgtcatttgtaaatgaataacttctaactaatacaggcagggaaacttggaagggttctcggtacttgagctgcccaggtgggacctatctgtgactcttccatgaccttttggaattgagaattttcagttcatgacaaattaccaattcattttcagctcatcaagaacactagagttccctgcctcttacttccctggatattactgagttcttttgacaatctgactaaattgctgactttttaaggttaaatctccttgttctgatccacagctttgacacacagaagggcagattatgtggctgcccaaatcatccatctgacctgggaattgtaccttgctgaacaattaccaaagttataccaaaaagatagaaaataatgcataagatcttcctagtaagcccttttataaaataaagaacatctaccatatgaataaccttctcaataccctggtttgcatgctcacatattcatattttaagcatgtatgtagatatgtatatgtgtgtgtgtgtgtgtgtgtgtatatatatatatatatatatatatatatatatatatattcatccaaagaaagtctgtacaagttgctttttgtgtcagtgatatgccacaaagctgttaatccattctcatcatggaccagttagtttaaaatagaaggtaccaataatacttatcaatcttaaaatggaaaacattcacaagtcaggcaggatagagtcttcgcagtgacaagtggaaaatggccagagcccactaggagcagaactgggaggaaatgatctacctaaacgatcatttgtcagtgtccaaagacaataaaccagaattgaattc

SEQ ID NO: 199670 - DNA, 1000 bp, Homo Sapiens
ggatacaaagcctaaccatatcagtaggcatgtgttgaattttaaactcagagaaaaatactagtgtttttataggattcttactaaagaaaaaacagaaagtaataaaccatctacgctaagacataaaattcagttgtttagttacaagatagaatgtggccttgtaagaaagcaaattaacttctaacatacaaagccttagagaagattcaagtgactgacagatcttaaacagagctattattacaactcaaactgcagaaaaatatcctcagcagcatagatgtgtgtgtttcactagtcagagcaatacaaatttaatgaaactccattggtggtgtttttaatcagacaatttctgaagatgtcctggcttattcatagatgcaagccaaatctctagaagagtaccataataagaaaaaaaagaatacaggcaattgagagctgttccaaagtttagggagtttttgtaaggaattaataaataaaaatgttcttgaaagagagaaattaatatgcagttcatactgccagaattgcaggcaatttatcaaactcccctaatcctccaaaatcgctattttttttttgacacacactttatagtacagaagaaaatgtctccggcaataaatcacaaagttaaaattacctagtctacaattaactagacagtgatggtaaatcattttctaccaaaagaaagaaatgtcttgtctattcaggttctgctctacttaaaagttttccttgttggcgagcaagtggttagaaaatcatattttatacgtacattcagcttaactatcattcagctcagcaagatgactcagggccttatccataccttcaagtttgctcttagcaagtaattgtttcagtatctatatcaaaaatggcttaagtctgcaacatgtttctgaatgattaacaaggtgatagtcagttcttcactgaatcctggatgctttatttttcttaataagaggaattc

SEQ ID NO: 199671 - DNA, 1000 bp, Homo Sapiens
acggggtttcaccatgttggtcaggctggtctgaaactcctgaccttgtgatctgcccacagcctcccaaagtgctggaattacaggcgtgagccaccgcgcccggccccttttttttcttttttagagatgtggtcttgctatgttgcccaggctgatctcaaactcctggcctcaaccaatcttcccacctaagccttctgagtagctgggactacaggcatgtgccactgtgcctggcttcctattgatttttaagcttaattacattgtgttaatattggaataaataatattgttatgtatttctttatttctgtgttcatgctaaaaaagatcttccaacctcaagatttgtttttaaaaaattatcctgctttacttttgatactttttgagggatatggaagctttaagctttaatttaagcttaagcttttaatctacatggaatttatttttgtgtgtataggtataaatttatttccaaatggtagctagttgccaataaagatttttaaataaagtaatgtcaataaattaatttattagaaaaatctaatgttcttttgttaagctagactccaatcagttagaattggtaaataattggcatggttcttttgaaatttccgttcaaaacaactgaaataacatatggacaccttataaaaattgacagacctgaagaggaaattaattctgactgaaacatgaaggagttttatttattaaacttgaagttggatcagatcatccaagtgaaaatatctaacaagctagatggatctgaccccatgaggatatcatgagtgagatgaagattttagagtcatccatgtaaaggtggtggtaattcttatagttattaaagccaagaggaaacatatttgggagaatgcaaagaataaataaatgtatagggctacttccaggctgtagtttttcaaagctgatagaaaaacctttgggaaacatgctgtctcgctctatcaccctc

SEQ ID NO: 199672 - DNA, 1000 bp, Homo Sapiens
agtttcagttttgtgagacactctgagcaggatctagccatgctatacctgtacctctaacccatgggaattgacatagtaaagacatgggggggggtttgacccattaaatttgtgataatttattacacagtaatacaaaacaaatacaatcccaatgctttatctaagtcatagaaattctgttctctaggaaagaaaccataattatatagttttaggaaaatttactaattcttatttctatccaatggagaacaatcactgataaacttgttacttgctgaaagacagtgataactttatactactcctttatatcagtctatctaaataccctcagagatatgtcatattagtctatgttatatagaacataaagttgctttttttaatctgtcttatcagtcttatcatataactgtcatatgcaaaaataaataaatggaacactaaaaagttaatgcaggcaagtcaagctcctaaattcatagaggttgaaattcctaaaaggactcacacattcacagcaatcaggaatatcatatacctcctttaagctatttgtggatttccattaatatgagggaacctagttcccacatggaaatggagatagattctaagaaatattttcacaggcccgggtgcaatggctcacgcctgtaatcctagcactctagaaggccgaggctggcagaacgcttaagattgggagtttgagaccagcctgatcaacatggtgaaaccccatctctactaaaaatacaaaaattagccaggtttggtggttcatgcctgtaatcccagctacttggtggctgaggcaggagaattgtttgaacccgggaggtggaggttgcagtgagccaagatcagaccacagcattccagcatgggcgacagaatgagactccacctcaaaaaaaaaaaaaaaatcatatagtaaaatggagattacaagcagcaataagcagcaatatgaacctcaacaaagctt

SEQ ID NO: 199673 - DNA, 1000 bp, Homo Sapiens
tcccctccttttagtttcatgggagaaaatatactctacctattctatagccaaaactaccacctgtcctggaactcactctttctcattttctttaggactccaccccctcatccccaaactgaataaccaattagcagatatttacagagcatctactatggtgcaaattattggactaagtttggaaaagaaactttgaagtgcatcaaaagggaagactgggacattcaattgcacaaagtaccatgttataagcaccaagctggtgatacagagagtcagtactgtggtcatttcagagaagggagacactcatagcctggagtgagtggctgagaaagtccagggaaggggctcgggactgagccaggcctggaaccttgggtaggattaagacaaagagagcagggtgcattcataattccattcattcagactgagatacatgagtgctgcctggtactggtcctctgtgagctcctggtctagcgatggagacagacagtgaaaaagataaatttcaacaatgtggcaaatgtgattatacagggatttgaacaaagtcttgtaggggcacagagtgtggaggaaccctgttggattctgataagaggtaagaaaggacaggtcatttgggcggcactttaaaggtaggtaggagcttcccagggcacagaagggagaaaagcctctttggataaaagaaaacactgctcccaggaataaatctggaacgaatgagaagcccaccatggcagagatgaagtgctggatgtgaagggtgcggcacagggggaagcagactgtgaaacatcttccatgactacgggaggatttgcatttcaccttctaggaaaaagagagtgaaaagagaattggaagccacaacatgccattataagatttgttttctgacaagaaaatgcatttaagcctagtggcagggagaccagataagaggttgagggctacacaagggcaagattgtgttgaattc

SEQ ID NO: 199674 - DNA, 1000 bp, Homo Sapiens
tgttttgttgcaggaggactctaggttatccagttagccatattgctagatgtctttctgtattgtgtcttgatgattccagttttctacaaggattgactgggattgcagatgtgctctgaatgacatactagagatattctagctgtgtagctgttgaaatgctttcctgtttgtcttcacttcttgtggttttatattaaacttctatcctttgtgatgacttatctgagctactagcatctctaaacaggactggtaactggtctccctgcatctcctttttccccacttcagtctagttgccacattacagacagagtagtcttctgaaaacacaaatctgatctatcattctcttgcttaaaaacagagtttattacttttccttgtaataaacagagtttattacttttcctcgtaaatgatcactcatcagctttatccaactcaatgcttttcctgcatctctcaggcatatttcttttttttctacctatatctcttccatcttcaagttctagcatttatttctttgtactatcttgaagtctgaactctaagtctctaattcctcctatcctgttgtttcagtgactttccccttcaatcctttatgtcagacacttgatggaagtagaaaccaatgtataaaaaaggtagcttaaggttataaaacagatggtcatcaacactgtgagaccattattccaatatcttccaagtatgaggaccttttattaatgtcaaaaccttttatatgggcataggagaagcgcttgactacaaagaggcaggacaaggcaatttttttagaatggtggaattattctctgttgtcacggtgaatatacaactctacatatttgtcaaaacccatagaactgtatatcacaaagagtaaattttactatgggtaaaaaataaatttcaaaagcatttcatagatccctagggatagaagtaatacttttagcatttcatattaataaatgaattc

SEQ ID NO: 199675 - DNA, 1000 bp, Homo Sapiens
ccacagcattccagcctggttggcaacaaagcaagactctgtctcagaaaaggtagacatctttggaaccagagaaaacctatttcccaaagtcttaaaaattatagtattttgggggagccttctacctggctgaccccaatcttgcaaatcatcatttttttcctgctatttccctctgacaaaatatcagtatactgacatcctaaactttagaatttaaagagaactcagtaagttgagaagagctgctaatggaatatatgtgtacatatatacatatatacatacacatacacacgtatgtatgtatgctagatgattatttgtacgtgtacatatatgtgtgcattaagaaatatatatatatacacatacatgcacacaaagactcatacacatatgatagggaagagagaagctatttatatgtgataacatatttgccaaagttgaattactgaagtctacaaatctagaaattgcatgagaatttaagagtagaagcacccttttgaaattaagtctttatgcaaaatcccatgccataattttcaacaactgctagacacatttacttagccagttgtgctaagttggagtttaagattatcagtgttaatgtctagaaaatgcatggtttatttgtggagagttaatgccatttcaaaagacttttccataatggtacagtttagaggtatttcatttaaagaatgttttcctttcatgcctgatcattgtcttcttttacttcatatggtttgagacataaggtaagatttcagaattgggattcagttgggagtatatatttagtgttaatcatatagacattctgtagtacatataaaagaatatgtgatgcaatgactagtaggtctggaatcttagatataattgctggttcagagaccttaagatgtttctaaaacctgagctatggagaaaataaaggtttgcaaaaatgtatttgagaaacattgaggataatgaattc

SEQ ID NO: 199676 - DNA, 1000 bp, Homo Sapiens
tctattctaatcaatttatctgcagattaatttttctgccagtatcatgatgtttttgatattatagccctgtattatagtttgaaattgggtaatgtaatgcctccagctttgttgtttttgcttagtgttgtttgggctcttcatgctctttgttacttccaaataattttagaatctttttttctaattctgtgaaaaatgatcttggtaatttaataggaattttcttgcatctgtagatttctttgggcaatataatcattttaacaatattgatttttcctatcgaggtacatgaaatttttttccgtatgtttatgtcatctactatttctttcgacagtatctgcagttttccttgtagagatctttcacttccttggttagatgtagtcctaagtgttttattatctttgtggcaattataaatgggattgggttcctgatttgattttccacttgaatgtggttgatgtataaaaatccaactgattttcatgcattaattttgtatcctgaaactttgtagagtcatttatcccgtccaggagtcttttggaggaatctttatgattttctgggtataggatcatgtcatcagtaaacaaaggtaactagacctcctaatttcctatttggatgtcttttatttattttgcttgcctgattgctctggctaacacttccagtactatggtgaaaagaagtggtgagattaggtgtccttctcttattccagttcttagggggagtgctttcaacttttccccattcaatatgatgttgcttgtaggtttgtcatagttggcttttattattttgaagtattgtctttcaatgccctagttgttgagaaattttactatgaagggatttgggatattattgaattttttttctgcatctattgaaatggtcatatggcttttgtttttaattatgtttacatggtgaatcacgtttattgatttgtacatgttaaaccatccttgaattc

SEQ ID NO: 199677 - DNA, 1000 bp, Homo Sapiens
tgaggtttcaatatgttggcaaggctggtctcgaactcctgacctcaagtgatctgcctgccttggtctcccaaagtgttgggatcacaggcgtgagccactgtgccaggccagcaaccattagcttttgtccagtttcctccatcttcccaaattctatctgatatgctagtactttaataatttcagttattaaaatgtatattagttagaattacctttaattttttactatagattcattctgaaagttgatttcaatgaatagactttataatattatgattatttaactactattgactacatattctggttggatttgtgcataaaaatataatttcttacatttaaaataactaagagtatattggaatgtttacatcaccaagaaatagtaaatgcttgagtggatagatattctatttaccttgatataatcactcattgtatgcctgtaccaaaatatctcttgtaccccataaatgtatacacctactatgtacccacaaaagttaatatgcatataattctttacctctagcaaaattttgctccctgaagtggtatatgcacacatgaagagcaataggattctactcttaaatgtaatgtcttttttagaatcaagtcatatttttgtttgttttatttcaacaaagacttcttaatgttctatttttacaagaatttcaaactgcctttatttttattatttttatcaaaaaatgccttttgttgtataactaatgtactccagctctgttatcacattatgtcttgaatgttccggtatgtaatgatattgtgctaggtcccttggccacctattattctgaaatttctttttgttgtattcctatctgatgtgcaatgtttcttgaattgcagtttatgctcagccaattattctgtcttgaaactgtctttcattttgctctagcgaaagtgtcttccaatcatttaaaggaaaatgcatgaaggtacattttctgaattc

SEQ ID NO: 199678 - DNA, 1000 bp, Homo Sapiens
taatccatctcacctctaattttcttttatagatcttattgtttcctttagtagcttttgctataatgtgtaacctgtatagcgtatgaattatatacgtgttcctctggattcctgtaagcctcatggtggcaggatccactttaattttactcttcattatataccatgtccttattctagcacaatatctggttctgagtggccacaatgagtgaactgctgaatgaataaagaatctgacccatttctattgtaatagaaatcaaaggagggataggaaatacaaattagtcctctatctctcataatattctttaatcatctttattttgagaaactatgaggctcattgcagagatcactatttcttacttttattatctgtgtgcaacatactatgaagcccagaactagaccagtgccagaaaatatttgaaataaattatgtaggggcagtgttgaattaagaattaagagtttaacatataatatttatttataaaatcaatttctctaaaaaaagagtattattgattgtcttggttatccacttacagtcaaaatatggataaccttgactaaggaggaggctttaatacaaaatgaacataaaattcactaaaaattagagttttatgtatcttaagcctgaagaatttattttttccccatgcactcaattttatcaattcatgagtaatgtactggtaatcagcatatattgattattccctcatattgagcatcaagataccaaataaatataaatttatatataattttatacaaatcagttatactaagctgtaaagcacaagttctccaagtatggtcaataaatcccccaaatccttctcagaggcaaaaatatttttattagtatgctaagctcttatttccatttttcaataattaacatttcaactgatcatacaaaagcaatggtggccacactgttttctcctcagtactaaactgtactagtagtgttgaattc

SEQ ID NO: 199679 - DNA, 1000 bp, Homo Sapiens
tgtctttctccaatctgctgcttctcattatatgaatatatttggtaaattttaatttgcattgatagcatgttgggcattgtttttggaagctaaggttttccttgttcttcaagaaaacctctgatttgtggaatattgatataaaaataacttattctgtgtctacctcggtgaaagtactggaagtataggactactcacttttcatatactttagatttgggaagaccatgatgaaataagatgaattacatatacttagccatgtatttcctccatttcttctgaatattacttacacatttaagttaaatattagaattatacattattctcttgaattgggaaggtttattttttaatgcatttcttcttatagccaaaggcaaatatttataagactgtatgttcacataaggtgattatatcaggttttgtcactagctttaaatcctcaatagagtatataaagaatactttccaaataatgttctaagtattatcattaataaatatggttcttgggtaattaaaaaaatattttacatccaaaaaaaaaataaaaaggtgatatgatttagagtatggtcttttccccccaccagtttctgtttatgttctttttaggtaaggttcacttataaaattttaaatcataatgcatggatcattagttttattgtagaactgtacacatattttattatttcagttaccactgttgggaataggacctgataatatttgaagtgtctcagattcacatttgacctttcaatgtcaggggttaacttgacagaggagggaaaatattggctgtaatcacatgagcgcaaaaggaacatatcaacagtcataatttatattatttacgtatttccagcaatacatcttacccattttatgctgattggttggatttcccagtgcttattacgaatgcatcaggaagtcttaacaattggcatcagcaggattctttataatggttgaattc

SEQ ID NO: 199680 - DNA, 1000 bp, Homo Sapiens
gggggctgtaagaaggaagcaagtctcttactcactggccaaggctaaggccactgggactggtcccacccttcccatggaaggacctcagtgcagtggtgactacactttacccaagaattccaccagaggcctgaggactgtttctccccaacctgtcatggccagtgcatgcactcgtgactgggagtcctgagtgtaagcttgcccagtccagctccatctggctttggccctcaaccaatgataagtgacaaaattgaatcagcaataaagagtctgtcaacaaagaaaaggcctggaccacatgaattcacagtcgaattctaccaaatgtacaaaaaagaaataatactaatcctcttgaaactgttcccaaaaattcagatggagggagttttctctaagtcattctacaaggccagtaacacctgataccaaaaccagacaaggacacaacaacaacaaaaactagaccaatagttctgatgaacatagatgcaaatatcctcaacaaaatactagcaaaccaaatgcaacagcacatcaaaaaataatatgccatgatttagtaggttttatacaagggatgaaaggatgatttaatacatgtaaagcaataaatgtgataaatcacataaacagagccaaggacaaaaaacatatgattatctcaatggatgcagaaaagcatttgataaaattcaacatcctttcataataaaaaccctcaacaaactaggaatataagaaatgtacctcaaaataataaagtctatttaggacaaatccacagataacatcatgctgaatgtgaaaagttgaaagcattttttctaagaaaaaatgaaacaagacaagaatgctcactctcaccattcctgttcaacatagtagtggaaatcttatctagagaaatcaggcaagagagaaaaataaaagccatccaaattggtaattggatgatatgatcttatttctagaaaaacctaaagaattc

SEQ ID NO: 199681 - DNA, 1000 bp, Homo Sapiens
actgaaatcaaaacacttctggctccaaaaattacaaataaagagttgcagagctgtcctcccttttgcttcatagtcattgcatatgccaggtgtgctgactcataaccatttgaatgactagattgccaggttcaagtacagggctagaagttgtgcagacagttctggacattgttttctgtaagaagtaagtaatataaaagcatttgactggtctgcaactctgtgtggagagtagacagcccaaattttcagacactttaagacagtaagacacagaggagtgaaaaaaaaaaaagacattttaatgaacccagtgacaccattatctatactgaaaacctcacattataaattgggaggtagtattacccccattcatttcctgtatcatgaagctagtctattttaggctgtttaagtaaccaaataaagagttaagtgatccaatcatttggaaatactattaatttttttacgcataggaagattccccaatgtgcttcttttcaacagaatgcaggatctatgagaatagaaatttgtctatttttgttagtttcaacatttcaataagctgtctcttgatttacagtacagtattgatttctatttaagttggttttaaagaaaaattctacatgttgaactttttaatgattcatttaaaaataaattatgatatttatggggcaaattccctttatcctgtcccctctctagttttactgtctcatccctacacagctattttgtgatatgtaagttcacacttgatgcctctaatttttttttcttttttttttttcttgagacagagtctgactgtcacccaggctggagcgcagtggcatgatctcagctcatcacagcctccaccacccaggttcaagtgattctcatgcctcagcctcctcctgaatagctgggattacaggtgcgcaccaccatgcccagctaattttgtgtatttttagtagagatagggtttcaccat

SEQ ID NO: 199682 - DNA, 1000 bp, Homo Sapiens
atctgtgcagtagtgaggggtcggcaggcctaggctagcagagccctccccagacagaccccctcctggccctgcccctgcccatccttccactcactctctggttggacctcttctcttttggtgtcatctgtgggcctggcctggggcccctggctttggactttgcagtacattcttcagcttctccccaactctgctgtcctctttgtccctctctgactcccaccctccctctctgcccctccctggcccccactcccgcccccaccccgggtctgctggcacagggccgcctgtctgaagagattgagaagctgcgccaagaggtggaccagctgaagggccgaggggggccgtttgtggatggcgtccactccaggtactgcagcgccagaggctgggcatgccaggacggggtcctgatggaccgtgaggaaggagacttccttccaacaaaagactgcccaggacctcagggtcctcctcctgttcagggtgggacactgaggctcagataacttggtcagagtcacccagcttacttgggcagtttgggagggaacacctgtcctccgagggctgctgagaggcgagtcatcagacagccagtgctctgtccccgctgtggtaggacataggccatgatttctgcttccttgacagagggcacacccctgagagaggcctgcacatcccttgcttagccatgtcctacagggcccactggtagggagagccattcactccagttctcttgagagtcaaggaccacctgagttcaggcagcgggcagaaaggcagcaggagagattggaatgaagcatcagaaacttccttactggaagttgagacgccatggcaatcctatggacttggcatcccttttcttgaaaccattgtgagagatggagcttatctcctaatgcttgaattaggcccatgtttagggaacctcgggatttcccccacattttgtggagcgatgggtattgaattc

SEQ ID NO: 199683 - DNA, 1000 bp, Homo Sapiens
taattccactaccttgggaggttgaggcaggaggattgcttaaagccaggagtttgagaccagcctgggtagtataaagagaccccatatctaaaaaaaaaaatttttttaattagccaggtatggtggcacatgcctgtagtaccaactacccaggaggctgaggcaggaggattgcttgagcccaggagtttgaggctgcagtgagctataattgtgccactgcactccaacctgggtgacagagcaagaccctatctcaaaaaaaaaaaaaaaaagataaataaataaaatgacagtcaaattgaaaaaataaataaataaaataccccccaaaacacacaaaaggtcaacctcaatttttaagtgatctagcaatacaatggagctatggcatgggactcatggtagctattttaacaactggaaatgattcagataaacttttgcaaatgtaattaaatacatactttgctttatttgatggatttgtttttaaaaatttagatgtaagccaaatttagcaaaataaaaacatcctatttactgttcaatgcaagcttgtattccttgtgtaaaatggaaaatccttctgcagtgttgatatctactttctgattgatttgtcttaaagtttgcaactttgaatcctttctcctcttttctcctctcattttctatccctctccaactttttttgtgtgttcactcacttacttgaacaaagtgcatatccaaataagttacctaagattgattgccataaatctgaagcctttgggccatatttttaaaattattaggctgggtgcggtggctcacacctgtaatcccagcactttgggaggcagtggtgggtggataacctgaggtcaggagttcaagaccagcctggggaacatggtgaaaacccatctctactaaaaatactaaaattagctgggcacggtggggcatctgtgtaatcccagctactcaggaggctgaggcaggagaattc

SEQ ID NO: 199684 - DNA, 1000 bp, Homo Sapiens
aacaaatgggcctctccgttctctgtcaccacctcccttccataccccgaaagtttcttgtctagttttgtctacatggtggaaatgtcatctttactcgcaaggagaaagagaacttggggtccttcctatctagagccccagactgtgaggaaagacccagggctctagaggtcaggccacagaggcctagcgcgggaaggacaggccagaaagaagcctgctgttgggagagcgaactagaaagctatggccagcattgccgcatagagagctgagcgagtgagtctcacagccagagcaagtcactttcctaagcgacggaagctcccgaattttaagatcccgtcaaaggcgggaaaagccctaatgcttcacaaaattcttgaaagcggaatgaatgatttagactacaaacactatgctcccaccgctacccaggagcctggcgcctagcgccccatcttcaggacccagagtttatgctaaagtaaaattgccggaggtactgggagcccacgctcgggccttctccaactttggccaatacttgagcgacgcgtgtcatagaaacattttggggatggggtatctaaatgtgtctgagggtccttggctaactaactccttcactcttgaaagtcctgggcttttcaaactgaacaaggtggaaagaaagacagctagcaatggtgttttccttttttctttctttctttctttctttctttctctctctctctctctttctttctttctttctttctttctttctttctttctaactgtgcttttactttgagtcttttccttctctcttttcctcagtacttctgcctttcttactttgacctgttctctcctttccttcccttcccattagggcctagggcaaagatcaacagctaagataaaccctcaaccaaagagctgagcgcatttacagttggggaatggggctgagagatactgagacatcgcacctccagcacctgaattc

SEQ ID NO: 199685 - DNA, 1000 bp, Homo Sapiens
gatgtctattaggtctgcttggtacagaacaccccaatgtcaatattagacagatcaatgagacagaaggttaacaaggatatccaggacttgaactcagattttgttttttaatccaactatacaaatatggagtggcagaagtgagggaacatgatatggaagtagcagttgatggatgaacttatatctacctgggaatgataagactctgcagaagacaagatagttgctgcaaatatataaaagtctactttagaagagtgatgtcaagaggtctgagcaccctcaggggcagggctgggaggaaagagtagatgctgggaggaaaagggacacttgggccactggacacccaatgaaagctcgagagactgagcttccttgggcaggggcaggacagcatgtgggccggaacataagggaggagattcctcctttgatgggaggtagaacccggtctgagagcctatgaacttgccttctttcttcctacgtccctagaaccagggcatgcatggtaaaatggtcaatgaataaacaaagacgagactgaaggaacacagggttgacttcagagtacccattcataagactgccagatccatgcttcaggccattaaaaataatagttgtggcaaaacctctgatcaagaccacaacctctgtgtacatttggccctcattttccaagcctgtgcaacatagtcaattgacggaagtgcccacagtctaggcatcctctacacttgtggaagtgcctgggagaagaggcatctggcgcacactggccctaaacacctggacttaccaagggagggaagggcaggaatgcactccacacacccactcttctaccaccaccaaatgaaaatgccataaagagctgaaagggaaaggaaagagagtgatgcctaaactacgtgaacatctcaaaggtgatgtcagcaaatgcttctgacatgttcttttcctagagcagttgttggataaagaattc

SEQ ID NO: 199686 - DNA, 1000 bp, Homo Sapiens
ttttttttttttttgagatggagtctcactctgtcaccaggctggagtgcagtggtgcgatcttggctcactgcaacctctgccaactgggttcaagtgattctcctgcctcagcctcctgagtagctgggattacaggcacgtgccaccacgcccagctaatatttgtatttttagtagagacggggtttcaccatgttggccaggatggtctcgatctcctgacatcgtgatctgcccgccttggactcccaaagtgctgggattacaggcgtgagccactgtgcccagccatcggtgagataccttatatttctctttttcataccaagtcttcaaaattcagagtgtattttacaactaaagtacatctcaattggtaccagccataattcaggtgctaactagccatatgtggttagtggacactgtactggacaagacagttttatatagtcacagaggaagaattcactccagtactctctgattttcctccagaaacccattacggtgttaaacagttctcaatatcggaaagttcttccttgtgttgcactaaagcctgcataccatactttccatttctaccttagtctttgttctactttctcaatcatatttttaatactacagaaaatgtcatattataatagctttcagtagtggcagtatattgtgatataactctcgttactttcaagtattctcttcttgaatctcatttcaccctggcttacttttgaaattggaatttttagatcagctacagaattttctactcagagctattatacccattgctccagagtgacaaagcttcttttggaacagaattctttcaactaactaatcaggtatccctctcagcttattgttttctatgtatctatgtagtcaacacactgtcaggattctcgtttaattcagtggtaaacacgttgactgagataaggcataagacagaggaagagccatccatggctcactctgagaattc

SEQ ID NO: 199687 - DNA, 1000 bp, Homo Sapiens
tgttcaagccaccctgtctgtgatgctttgttatggcagccctagcaaacaaatacagtcactgagcaagattcctatctcagaacaaaggtctgaatttcattagtttgaagcactaattctttaatagtccacctctggaaacagagaatactcccttttttctttcagatggagttccactcttgttgcccaggctggagtgcaatggcgggatctcggctcactgcaatctctgcctcccaggttcaagcaattctcctgactcagcctcctgagtagctgggactacaggcacctgccaccatgcctggctaattttttgtatttttagtagagatggggtttcactatcgtggccaggctgatctcgaactcctgacctcaggtgatccaccaacctcggcctcccaaagtgctgggattactggcatgagccaccttgcccggccagaatactcccttaaaaagcagagcaaatccccatggagttcagggactggaaagagttttcagaggacctagtcataactcttctctttctttactcgaaatggcagagtccacagtcggactcctctgcggagtcccactctcctctgggcaggcaggacagacacctctcatagctgctccagtcccctgaaaagtcctcatgtggcattgctgattacacggatggtgtcccttgttcactctgggtctccctccactggggaagggagatggccatcatctagcaggaacaatgtgatttaaagacttgaaacaagtacaaacacaaatacacccaagacagggtctggtaatcctcattctaaactgtaggctaaaagatgccatagtaattcagagaagagaggagagtctgagggctggagtggaggggaaggcaggccagggacagagcctcctgtaattgtaatattgggacgtgtaactgtattgtaacatcacagtatcaggaccaataatggagggaaggtagggtagagaattc

SEQ ID NO: 199688 - DNA, 1000 bp, Homo Sapiens
ctgtcttacccagggatcttgtagcaacattattttaaaacactaccttgttcaaaaacaggcatctgtagtgagagaaacagtatataaggcacagcctttgtcctcaaggactttaaataatgtgaaggagataaacctctacacaactaactgtaatcaaaggtagagtttaataacagtaacactaggatataagcagagttccatgggagcacaggagaaggacagatgagtgattaagacgaggttttattcattcaatttacaaatatgtactgaccatttagtgctgggtacttttaggtgctggatatgcaatattgaacaaaccagacatggatcattctttgattgggtttatggtccagtggtggagatacatgattaacaggtaaaccaaaatattacataacaacaagctacattcaattgtaggcaaagatcagggtgccatgaaagagagtaacagaaaggtcccaggctttatgtggtcattttgaaataaaaaggaacttaggtgggaagataggggaaaacattctaggcaaatatccttgtcttttattccgctgagaaaatagaaaccaaaagtcatgagtactcttcacttaccattcccataccttaaacattactgttgagaccaactgatgggagggatggaaggcaagcaagatgacgcagacacagggcaccaggaggaaagtctgttactactacgacggggatgttggaaattaatattatagacaagaccatccaatgaagcctcaccaaatctactactcacaatttgctgcccagctatggtctccactgaacaatagaaatctgtcaccctcacaaacccagtactgaggagatgaccaagtaccacagggatgactacattaaattcttgcgctccatctcttcagatacatgttcgagcacagcaagcagatgcagattcaacgtcagcaaggactgtccagtattcaatggcctgtttgaattc

SEQ ID NO: 199689 - DNA, 1000 bp, Homo Sapiens
cagcatgatttagtgatgagactctgggttctatagcagaaagacaagggttcaccacttgttagctgtgacacatggtaggtttctgtaagctcaggttcctctatgattaataatatctaatttttatagggcatgatgaggataaagtatgtacattcttaaccaaagacctaccacatagtaagtgcccaataaaagatcattattattcatttattcgccaaatgcttacagaaacctacctgctcagtgctgagtactgatttgaacttaaggaccttaaggtaaacaaaatagacattcattaccctcaaagttgattctcatgaagggataccaacaataaacatatgaaaaaaaatctaggaatagtgttaaatacaaacggaaattatgctatcatcattaattaaaattatttttagtgaatgacactcgtctataagtgaaagtcaaattttcttgttacctagttggtttaaaaaaaagacatagctaatatctattgacaaaataaaaaatgtttaataacttgcttcaataacagaaacccataaagtaaaatttgtttccaaaaatgaaatagcttactctgtacttatcacaattttaaacacatgattttaaaatcatttttaacttccattagtctgctttacataattttaatgaacaaatattttctctataagcaataaaatatctgtgatattatactacatttttgtaattatatactattataatataattatttaaatacatgtagggaagcaagtaaggcatgcaataattaagataagtaattacatgattagtaagtctaattacatagcatataatcagagactttatgaagaatttttgcttacatggacagatgatttttcatatgcttatgcactataaatctgttaaaaattcataatttgaaataatattttaatcaaaatcattcaagaagctttaaattcttaagaaaatataacaagaattc

SEQ ID NO: 199690 - DNA, 1000 bp, Homo Sapiens
tgatgagcagggaaaagtctagtgatcacataaaaatgagcaactgaacagattcagtaataattattggattaaatgtctgtaaggaaaatgctgtaatttaactttattccaggcctaaatatggagagagttaaaatattgtgatgtattctagcagcatacttgaagatctgccaagattgccattataatccttacttgtcaggagtttatattgtcacatttagttgactataaattggaatataatacctaaatctcactttgagctttagatctaattatgtttaaactattatatgtgctgacacaagagaacacacacacacattgcaaatcacaaacatacttctatgaacaaaaatttttctctatatcccgatagtgcttcttccataaagaaaatttcattgtcatcttgaccacctctctgaagtatcttcatatttctggtcttcccttctacttctggaatgctacctactcatccatttactaacttattaattcagcaaacataaacttagtacctactgtgtaccaggacctgtgctggattctggaaatgcactaagggctagcaggttgccaaggcagcacagtagtaactgcacatctgggctttgttcagatagcgtatgttcaaatcccagctctctcatttattttataatttcccaatttgtaaactggaaataataatatatttcctggcacagtgcctgacacaaagtaaatcctgaatgaatgttagctattatcatctgatagtctccctggctatcagaaaggagagggataggaggggggttatgacagagaaatagaaaataattaaagtaattatcctgatgcacaaatttcctgggacaaaccctcatcagcacataatccacacatctttgaacaccttctcaaggtcagtcattctatactcaagatatatttgccatattttaaaaatagtatcttctctgattacgttttaggtgaattc

SEQ ID NO: 199691 - DNA, 1000 bp, Homo Sapiens
ataaaccaaataagctaaaaagaaattaaaagctagaacaaagacatgacaaggcaaaggttagaaataaaagatgcggaataaaaagataatacaataacaataaatctagataagatgagatcaaagaaaatagtataaagtagctagaagacaaaacagagattaaaaatgactgagataagcaaaatcattaaaaccagaaaaataaaaagactaaagggattaaaacaataaaatgtattcaaccaataccaaaagaaataaaaaatttaaaagactgagctatgggggaagggagtaatagatcaattttgcttcaagttaaaataatgctgcaatataagtacaaacatatccctcattcagatgcattctttggtccaggcaacctaaggctatgcagaccttccagcatctaagcctctatatattaatttgctagggttcccctaacaaactattacagacacggtggcttaaacaacagaaattcattttctcacattctagacagtagaaatccatggtcaaggtgtaagcaggttggttctttctgggggaaatacccgttccaggcctctctgcttagcttgtacatgactgtcttctgcctgtgactcttcccatcagcatctctttgtatgtctctgcgtccaaatatcatcttgtaaggacaccagtcacattggattcggacccactctcgtgatctgattttaatttatttttatttttttttaattttttaattttttattttatttattttttttgagacagagtctcgctctgtcacccaggctggagtgcagtggcttgatctcagctcactgcaagctccgcctcccgggttcacgccattctcctgactcagcttcccaagtagatgggactacaggcgcccaccaccatgattttaatttaattacctctgtaaagatcctgtctccaaatatggtcacattctaaagtgctgggagttagaacatgtgaattc

SEQ ID NO: 199692 - DNA, 1000 bp, Homo Sapiens
tgaaaccccgcctctactaaaaatacaaaaaattagccgggcatggcagcgggcacctgtagtcccagctacttgggaggctgaggcaggagaatggcatgaacccgggaggcagagcttgcagtgagccaaaatcatgccactgcactccagcctgggtgacagagggagactccatctcaaaacaaacaaacaaacaaacaccccaattcctggatttgttgatcttttgaatggtttttcatgtctcagtctccttcagttcagctctaattttggttatttcttgtcttctgctagctttggggttgatttgttcttgtgtcttgaattctttcagttgtcatgttaagttgttaatttaagatcttcccaactttttgatctgggtatttagtgctatgaatttccctcttaacactgccttagctgtgtctcagagattctggtatgttttatctttgttttaattattttcaaagaatttcttgatttctgccttaatttcattatttacccaaaagtcattaaggagcatgttgtttaatttccatgtaattgcatggttttgagtgattctcttagtcttagcatctgtttctttgtgctctggtcccagagagtgtttggtatgatttccattgttttgcatttgctgaggattgttgtatgttcaattatatggtcaattttagagtatgtgccatgtggtgatgagaatgcatactctgtttttttgggtggagagttctgtagaggtccatcagatccatttggtccagtgttgagttcatgtcctgaatatccttgttaattttctgcgtcagtgatctgtctaatactgtcagtaggactccctttaatatttctggtagggcaggctttctagcatttctttagtttgtgtttatctgggaatgtcttaaattcttcttcagtttttcaaaataagtttgctggatataaaatctttggttgatgattttttctcccaaggact

SEQ ID NO: 199693 - DNA, 1000 bp, Homo Sapiens
cagaaaagtaatgctaattaataaatatatagttgtttagcattgatttgaattatgtcataactatgaaatgagtattacctgtcactttcttttcacaggtgaatatcaaaggaagacagacggaccttctgaaagataattattgtagactttgtattatttcagtagctgtcttggaaaagctgcctacctgagaccattgacagctcaaatttttaaaatatttgtgtaaataccttttagtagtatctgacagccttagtctacccaaatacatgatgatttttattacttatttgtggattacaccctgtctacttctaaacagattttgagcgtcgtttaacatagactatcttaaatctaaaacaaagcatgagggctatctctgctcctgttctataattcctctgcatcctgttcctcctttgctagtacggagaaaatttaaattatctatagataatgacaattatagcagagatatgctttaaaaacttgcatttggcagatttttaaatactgagtgctgtcaaagtggaagggagggaaggcaaaattgctttctagccacatatagctgggccatccttccaacagtatacgtcagtccaggaaatagattgctgttcaaaaatacattgaatttagttttttcagttacctttgagtagatgacacatttctatttatttttaaataaaatacaatattttaaggaaaaggtaacaaagaaattcaaattaagtggcaggatggtatctcaaagtctcttctattgtcccaaactgtaagaagctgccattggctaaacctttcagtaatgacattgaagagctcagtggtccattctgtcaagagccctgttagccccagcacctccttcagagggcacagagctgtttaggggacttggcagttaaggtctttgaggttttgtgtagtttgtattttttttttctgtaaacaactaaaatttctgttttataggcataaa

SEQ ID NO: 199694 - DNA, 1000 bp, Homo Sapiens
ttcaccatgacaaaggtaacaagaagccatatgctcttctcttgcttcaagggttggcttgaagaaggagactacagacaccccatcaagggttggctgtttttggctacatgcttggaataaagatgattggggataaataagtctcacaaccaggtctctagaataatttgtttgctactcttcaggttatatagtagcttttcttttatttttctcccacaatacgttattggttgcctgacttcaaactccaagacctcataaaatgtatgagactttctctccattttccaaacctcaatattctaatctgtaaaaggtttaattcaccggctggcacatggcatatctaactgttagctacaatttaacttgcatttaatttccttttctcggtcatataactaaaactacatttttatttgtgttgatatcagataagctgttaggctttagaaagccaactaatgtgttgcttttgagttcttactggaatacttttcacggaacttaaattagttttactacctcagcatattttacttgaggtatgtttgaaagtcaagagataaagctggtctgtgatttctatagaaattttgacaaacacaaaagtggtataaagccattatgcatacaggcaagcacagttgggatattttcagtctgtcaagtttgcatttttaaaaatgtagtaaggttttatgaaaagaaaaattgcttttccttcagttttcttatctctttctttgaatttcaggataaatttgtaaatcaaattgtgttcagccaggtaaggctcaaacttgaagcttacagctctaagaactcttttgaggcatatgcataggatagtttgatgcataaaatgattgaaatagcattgcaagtttttaaggcaatagcgggaatataatttagtacttacaacagtctattccagtacataattttaaatataatgggaaaatgaatcccggacttatttactgaattc

SEQ ID NO: 199695 - DNA, 1000 bp, Homo Sapiens
cggtaaaaatgcctgtaattggtggtcgggcacagtggctcacgcttataatctcagcactttgggaggcagaggcaggtggattgcttgaacctaagagttagagaccagcctgggcaatgtggcaaaaccctgtctctacgaaaaaaatataaaaattagccaggcacggtggtgtgcacctgtagtcacagctgctcaggaggctgaggtagacagatggattgagccccgggaggccgtggcagcagtgagccatgattgtgacatggcactccagcctgggcaacagagcaagactctgtctcaaaaaaaaaaaaaagactaagaaagaagaaaaaactaaatccaaggcttgctagagggaaggaaataaagattagagcaaaataaaggaagtagggaatagaaaaacaatagaatcagtgaaaccaaaacttatgaggtaacacttaataccctcttgagttttttttttttttaacctgaaaataacaagtgttggcaagaatatggtgacattggaatcctcatacattgctagtgaaattgtaaaatggcgcagccactgtgtttggcagttcctcaataagttgaacatacaacaaccgtgactcagcagttccgctcctaggtatatactcaaaataattgaaaacaggtggttatatgaaaaattttacacaaatgtttatggcagcactattcccattagccaaaaggtggaaacaatccagatgatcatcaacagatgaatggaaaaacaaaatatacagtggaatatttttctgttataaagaatgaaatatatgtgctacaacatggtgaaccttgaaaacattgtactatataaaagaagccaaacaaggtatggcttctttggagggtagggtacagggagtgactgcttaatggatacgcggtttttgttttttttttcttttcttttctttgagacggagtcttgctctgtcgcccaggctggagtgcagtggtgcga

SEQ ID NO: 199696 - DNA, 1000 bp, Homo Sapiens
accaacaccccctccagcctctctgctaccacccaagctcgggctgcatcctcactcttctgggcccttggttactacggcctttgaatggtcactctctcagcacggacctcagaaggctctccctagaactcccatgtgatcaggccatgacccctacagggaagggagaaatggaaggtccacagcctcacacagggcacacaagactgtgggcccatccgccacccaatcaccctgtccgtcagcctctctagcctgtgacccaatgggatactgatgggcttcacgcccaggctgaacttgccagtcactcactgacatccccatgccttgcctcaaaggtcagtcccactctctgcctggggatgataggacagggcacgctctgccatttgttattccagactcagttccagtctcacggctatcctagcccctatgcaccaagcccaccccacggtatgtgcctcctccctccccgctgctccctcctccgtcccctctccctgcacttcccctgccatccttccctcccagacagagttcctcggggacaggaactgtcatcctcacacctcagaactggtaagcagcattttttttaaaggacctagtcagcaaaaataaaaatgtttacaggtcattttgttccttaattttttatttagctatatatttgaagtttcaactaagcatttttatgtattttaccgtaactaagggacttacatttttggctaagcctttaagaatactaaaacccactcacttttcagaacttcaagaaaacttatgaatgtctttgcaagcggcagggagagaggtttcagatacctgccagtaaggagcgaaacaatatcagggattaaacaacagtaacaactacaataccactaaccaaaccagaaccacactacctaactgcccaaggtgctggcaagcagggaaggaggggcaggaatctgaacaggtcaccaagagctgccacatggaattc

SEQ ID NO: 199697 - DNA, 1000 bp, Homo Sapiens
ttactagttcctcgaggtgggaccttagatgactgatttgaggtgtttcctgttttctaatgtgtggatttataaacttccccttagcagtgctttagctgtgtccctcggattttgatatgttgtattttcatttttattcagttcaatgtactttttcatttcaattgaaactttctctttgaattatggattatttagaaatcacattcaagccaggcattgtggctcatgcctgtaatcccagctactcaggggggctgaggcaggtggattacctgaggccaagagttcaagaccagcctgggcaacatagcaagacgccccatctctaaaactataaataataataaattagttgatgcggtggcaagcatctgtggtcccagctgctcaggaggctgaggcaggaggattttttgagccctggaattcgatgcagcagtgagctatgttcacaccactgcactccagcctgaatgacagagcaagcttccatctctaaaaattaaaattaaaatttttaaaaaattgtggtctaggcacaaaggctcatgcctgtaatcccaacactttgagaggctgaggcaggaggatcacttgagctcaggagtttgagaccagcctatgaaacatagtctagagatcctgtctccaaaaaaaaaaataatttaaaaattagctaagcgtggtggcacgtgcctataatcccagctactcagaaagctgagatggaagggtcacttgagccctggagactgaggctgcagtaagttgtgatcatgctactgcactccaatctgaatgacagagcaagaccccatctcaaaaatatttttttaaatttaaaaatagaaaaataactttcaatgtggtgggattcaaaattagtatgcaataattatttaaaatagcttaatgaacaatcaaatgcatagtaataaacataaaaatgttcataatctgtacaacaaaattttaaaatgaaattgaagaattc

SEQ ID NO: 199698 - DNA, 1000 bp, Homo Sapiens
agaaatgcccaaatgcaaattaagtatcttcctgactaaactaacttcctatattttttcccctatgctaatggaaggagaaactctcacttatattttgggcatagaaaagcttgtacatcatcccttacacaccagggacctctgaggcatcagagcggctggaggtgggggtagggaaccactaggagctttaaccttcagcagaaggcaacttgtgtatcttaatctctgaaaaattgaatgcaatttaatattacaggactaggcctttggagttcaggacaaggaagtgaatggtcccaatacactctgcacatgtttaggcttcatttagactgttacattcagttgtgaacaccacgttttaaaaggacatcgacatacaaaaacacatgtagagcaagactgacacgttgctgggggatcaaaaaaggtgttataggatgatgaaaggaactgaagaagtttgctttggaaaggaaggcttagagagggtctgagcactgttttcaaatatttgaagggctgtcatgttgtaagatgaattagatttacttggtgcagctccaaagacctgactcatcaccatggtggttagaagttagttcaagacagatttgaggctcaagagcaagaactttccaaaaagtagagaggattacaaattgaccggaaggcagtgaactccctgttattgcaagaattctgacttcacagccaaagggaggtcttaccagggtgacccctggctctcaaagcatatcttctgcctgactgtactgcctgcaaagtgcactgatgcttcttttcctaaggggcaactcacttacgtccccttgtgactttctttacttcgattctgaagctgatgagagaactcaagaagcagaaatgcagggcaggccttcctttgaatggcctttttccaattagtaaaatgtttccctggtgactctttgactttcttctcctacctgattcccttcattttgaattc

SEQ ID NO: 199699 - DNA, 1000 bp, Homo Sapiens
aaatacacatatatgcaaatacatgacttctagataaaaaatatttacttagaaagcatcttgtatttattttgctttgagccttaactaaaaagaaaaataattagattattttaaatataaataatatcttcattctaacatatattattctaatatgttaattctctcttaagattcttattcattttgcaaaatattgtattacaatactagtaaaatggtaattacaagaggttggggtgggggatataggtagctgttcaataggtataatgttaccattatataagataagcaagttccagggatctgctataaaacataatgcctatagtttaacaataaggtattgtgtacttcaaaatttattaagagggtagatcttatgttaactgttcttaccccaaaaaaacaaaaacaaacaaatgaacaaaggaacacaaagaaactttaaaaagtgatgtgtttattatgtggacagtggtgatggtaatacaagcgcatacatatgtccaaactcaccaagctgcatacattaaatatgtacagtcttttgtataccaattttacctcagtgaagctggataaaaacaaaatacaattaaaatgtaaattgcatagcaagtaaactttggcaaaaacatcttaaaatcacatatgctcttgaaaacattaatttttccaaaaacctctctgtctcctcaaataattcatttatattgtaaaatagcaaaatagcaacatttttttatgagtagacacccacttttaaaagttagcatcagataaacttacaatgttctctatttcaatattttctagtttctggtattacttagtcctcatataacctattgacctttacctatcatagacattcagaaataaaataaatgtctaatatttttctttttttttttttttttttgagacagtacagttctgtcacccaatctggagtgcagcggcatgatcttggctcactgcaacctctgcc

SEQ ID NO: 199700 - DNA, 1000 bp, Homo Sapiens
tctgctgtgttgctgggcgtacatctgggaataggaggcttatagagccagactctaaagatgatttctattcctttctgacttaaatgttttttctttctctctatttctctctttcccccacctttctttctttcttttttgaaacagggtctcactctgtcacccaggctggggtacactggcgtgatcacagctcactgcagccttgaactcctgggctccagtgatcctcctgcctcagcctccagcgtagctaggactacaggcatgccccaccatgccaggctaattttgttttatttttgtagaaacaggttctcactatgttacccaggctggtctcaaactcctggcctcgagcgattcttccacctcggcctcccaaagtgctggaattacagacatgagccaccgcacccagggctgatttatactctcgtaaatctggcttatgtatcaattaatgttcatactgacatatttccccacagtattctagtttgcttttgtggcatgggagctaatgccatttcatctccttaaatactctgccccaatagatatagagcattattttacatatgttagttatccacaatattcaggaactttgttgaaatatgtggtttctgacacttgacatgcatagagaacagtagttgcacaaaattaaaatcattttttaaagaagatgattgaaaacagtgggaaagtctttcccctgcctttctgataagcattccataatttcaatactttttaaggctctcattttattgcttataaattattttatatctttctattttttatttttttatttttttaaatttttatttatttatttttttgagacggagtctcgctctgttgcccaggctggagtgcagtggcacaatctcagctcactgcaagctccgcctcccgggttcacgccattctcctgcctcagcctcccaagtagctgggactacaggcacccgccaccacgcccggc

SEQ ID NO: 199701 - DNA, 1000 bp, Homo Sapiens
cgagaccagcttgggcaaaatagagagatcttgtctctacaaaaataaaaaagttagccaggtgtggtggcacacacccgtggtcccagttacttgggaggctgaggtgggaggatcacttgggcccaggaggctgaggctgcagtgagccatgatcatgtcgctgcacttcagcctgggcaacagagcaagatgctatctcaaaaaaagaagcaaaaaacaaacgaaaaaacaaaaaaacaaaacaacattttttcatgctagcagaatattactttagatcagtaagtagcaatttataaatgttaaggaaaaaaaagcttcataacagccactctatttaaacttattcatctctccctccaaagaatttttggcacaaaatgtgggttttctttctctttatttctttacatgctgtggctcctctttatacaagcagcctcataatgtgaactatcaccacaattcaccacaacatggaccccgaaattacaaataataatcctaaatgattaattttaataaaaaacagatatattatttaatatctatgatatgaacctgtattcaaaataattagatatagtcaggaaacaaaattaaacagttttgttatacaacatgcatgctaaaattacaaatagtaatcctaaatgattaattttaataaaaacatattctttagtatctatgatctgaacctgtatttaaaataattagatgtagctggcaaacaaaatcaaatagttttgttaccaaaaatacttaaatatagattcaaagttatctataaacagtttgtaataagaattgatttttccctctcctgaggatatattttgccgtcattaaaaaaaaagtaattccatttactgtctataaactaaatacagttatattttcaaatgccctaaagataaaactgaatcaatttcccctaaataggtgtaagcatgccatatagttatgcgttgtccagtactttgactcttttaaa

SEQ ID NO: 199702 - DNA, 1000 bp, Homo Sapiens
aaaacccaactgacctagggaaagagacatactaaattccaggcccatctagccttcctgtatcacctaaggagggggaggaactgagaagcatttgtgaagttcacagtccagggacatagacttcctaagagactgagacctaattatagatctacaaatacttttccctttcccacatcttagcacaacatcactaaaggtctacctgtcactgttcctttgatttcatacatcattgcatagcttttcacaatattgcaaagggtactaaaaggcataaagtgtaatttgaagacacagaacaaacatcagaaccagatacaaatatagcaggaatactagaattatcagaccaggaaaataaataactatgattaatatgctaaggggtatagtctaaagcagacaacactcaagaacagatatatcatgtaagtagagaaatcaaagttctaagaattaaaagagatgctagaattttaaaacactgtaataacaatgaagaatgcctttgatgagcacattaatagactggacctggctgaagcaagatttagtcaccttgagattatgtcagtagaaacttccaaaagtaaaaagcaaagagaaaagggactgggataaaaaatgaagcggaatatccaaaaactttgggacaactacaagacgtataatatacattaaatggtgatactggaagtagacgagaaaagggaacaaaagataatgttgaagcaatgacagctcgaatttcttcaaataaatgtcaggcaccaaatcaaagatccagaaagctcagaaaatactaagtagaacaaatgcttaaaaaataaataaataaaaacaaacccctacacctaattatgctaaatgcctagaattacataggacttttcagaaacaatgcaagcaagtaaagagtgaagaaagagtggaataaaatgcttaaatattgagatggtggtggggggagggaggaactaccaaccttgaattc

SEQ ID NO: 199703 - DNA, 1000 bp, Homo Sapiens
ccttcaggcgccagcccctgctggctccctccacagtggccggcctgctgcacctccattatgtcaggcaagctcctgccttagagccttcgcattccctattccctctgcctagaagggcttcccccagatgcccacagtgccggctcctgtgcctccttcaatccctcactcaactctcatctcacggcggcctaccctgaccacctatttgactacagcttttcaagggccccttacgctgctcgactttctcctttttcatagcagtgtctccttctaatggcacaagataatttgctaattatgttttatgtttcttttctgtctccctgctctagactgtaagttcctaaaggcaggaatcatctatttttttcagccatgtacccgataacccagaacagtacctgacactttgtaggtactcaatgtacctacaatatttgctgaataaattaatggtttagctgttaattaattagtcattaattagctaaagagacgtccctttaggttgcttatattcctttgcttttaacatcgatatccttatacatgtctctagtgtgtatgtatgtttctctataaagataggaaaaggtggaattactgattacgtgcagtttaaatgtcaatagatactgccaaattgcccttcaatgtatccattcagattcacattcctaccatagtgtgtgaggacttgtttacccgagccaacagcatcactttttaagtggaatataatctaactggagggctgccagagggagcaaacagaacggtagagtctggcactctctaaaagaaacttcgtctgtttaacctagagaagagaaaattctgaagagctctcgtgaaagaagaattctaattattctttgacatcctagtgctgtaaaatcctgccttcccagacctacccacagggcaacttgactcgtacttgtttctgaattccatgaccttccctgttcctaacgatgctaatgaattc

SEQ ID NO: 199704 - DNA, 1000 bp, Homo Sapiens
ttcctgagaggtagaggaaaagtgatactaccaagacagaagacagcaagggagtcaaaaactgccaaaaagtctattgagatgtgaacaaaaagtgttcattagatttgtcaactcacatcttggcaaaaccaattttaattatttgagcaaaagccagattttcctgagttgaggagaaaggtagggagaggaaatggtgagtgtagatggcatttttctggacactcctctgtgaaattacagggactgtgaatgtggtactatgaggatatatatgttgaaggcagagtacttgttgaagattttacagctaaattacgcatcaactacccctgctaaagggagattatgaagtgatgttgagtactacttccagcgtaagacttcgtggtttacaaagaagagtttgggaatgattctgaggagaatcacacagatggtgatatgatcataaaataagaccttggagatattaagtaggatgactaccttcagctatgagggatacagcttctcagaagacagtgactataatatgcttgatctcccgaaaggggacaacatggaaaaggacctcagttgtaccaggaggaatttaatttagaaagcaggatttcctgacattgtgattgaatgtttaaacaggttacaaaaattgttatgaaatctcagaggtctcaaaaatataacattaacagttttgaaataagaccttgaagaacaaatgttgatgatttcgattaatcctttttgagccagaatagctggtcaatggctctggtagctaagggactggcaatgcaactccgtacagctgcacagtcagtctcttgccaactacattgagctaatttgacacaaagtggttgtttgtaagccctagagagcctttccacatctcaaaccctggagctgctcaaaatacttcctgtgggcttcaagtttagacctaaataaacttgaaaaatccatctggtgtgggctgattctagaattc

SEQ ID NO: 199705 - DNA, 1000 bp, Homo Sapiens
agtgtgaggccttcaattttgttcttctttctcatgattgttttggctatttggagtaaatatgagttttaggactgtttttctgtttccacacaaaaaaaatgccattgggattttgataaagattccattgaatttacagattgctttgggtagtatggacattttaacaacattgtcttccaatccgtgaacatgtgatatctttccatttatttatgtcttaacttttttaagcaatgttttaagttttcagtgtacaagtctttcaccttgttcattaagtttattcctaagtattttacttttttgatgctatcataaatggaactgttttcttaatttcctttcatattgttactgttcagaaattcaactaatcttttatgttaattttgtaccctgcactttgggaggctgaggcagaaggatcacttgagtccaggagttcaagaccagcctgggcaacatagcaagatcatgtctctacagatgaaaaaaaactagcctggcatggtggcacatgtctgtggacccagctatttgggaggctaagctggcaggattacttgagcccaggttgaggctccagtgagctgtgattgtgccattgtactccatcctgtgtggcagagcaaaatcctgtctcaaaaagaaaaaaaaaatttgcacctagaaactttgactttgctgaatagtttattagttttaagagcatttgaaatgtggaatctttaaagttttctacatataagatcatgtcattttgtgaacagagataattttatttcctcctttccaaattggatgctttttatatatttttttctttcctaattgctctgactaggacttccagtactgtgtttaatagaagtggtaagagtgagcattcttgtcttgttcctgatcttggaagaaagctttcagtttttcaccatctagaatgatgttagctatagacttttcatacttgacctttcttatgttgagggaattc

SEQ ID NO: 199706 - DNA, 1000 bp, Homo Sapiens
gctccagatgaagtcagctccaggtcttgccctcttgcctggctcacagatggatgaagttttataaagttcttctaattatgtgcaaaacaataaaatataaaccaactacttatatgtgctgagtctgcttggctttcccagaacgtagactatggagagatcatggaaattatggtttagaacttctcctgtggctctaacaaggggttgagcacatgactcttgttacttctcaaatcccaaatgtaggcacagaaatatgaactgggattctttttctgacttacatgtacatgagtagagtcttgtggctgctattcctcttgctgagaacacaatcaagtaatcaccatacttgcatttggagccataaaccctaaagccgtaacatttaattttatgtaacacgatcacgctgtagaagctaatgtgattccctggagcagggcgtcttctgtgccaagccattttgtagagtctgctatatcagattttgttatcgtttatgttaagcctattttatttaaaacttgagtctggtttgcttagagtaaataccgtctgcttgcactcaatttcaatatgttctgtttggcagcattgtgcattgtaaagaaaaaaaaaaagataaaggctgttttgtggcacaccaagataagaaatagtttgcacatccagttctgttgttgaaagtcatctcactcagatagcgaattatccataatgacttaaaaataataacttcaagagcagtcttttattgttaagagtctttatgtgtgcgtgtgtgtgcgttgagtgctcactcaaaataggggtccataaattgctactaatgtagagtgtctgcatttcttggcattataaaacttccctagaggcattttcatagttgggaacttggtagcccagcaattctgagcttcttgttcttacattaaaataatttgcatagtagctccatggtgacctcaaattaagtgtctgtggagaattc

SEQ ID NO: 199707 - DNA, 1000 bp, Homo Sapiens
tattagaatgatcaaggtgattataaattttctcataatagtcccaggatgagaggcaagtataatactgtggagtcagatggttccagatctgaattctggctctgccacctattcagtatattatcttgggcaagttatcaatttcttgagcctcagtttcctgatcttttagaggtatagaatcttacatatggcatcagtttcaatgaactaatacataaaggacctagtggcagatctggcaaagaagggacactcaagtgtttcattcatgtctgtgtttcccctttcaggtgcaatgcaagtgggtctacaggcaatgcccactcctgagaatcctgttccacttccaaggagctccaggagctctgtctgctctattgtgaatccaactcaatttgatatccccaggcttatcaaaaatcaatccttacactgtgggctcattattttataggaagactggagtcacactctatttacaaagtctttgaggtaagtgatgacctgttggaaaaatgcttatagttttagaattaccacacaatgcctctgacaagacctactcctgctgggatgaactggtttcatgtgtattagattatatgccaagaaatacttgccttaagactggcccaaaagccctgtcggtcaagactccaaatcaacctccaagcaggtaccatcgaaatccaaacccttaggctggcccagcaggttgacttcagaggcagccaatctgtgtgtgtatctcaagcttggtaaaaacatgcaagtatgaaagcaaattgagccataatctccacaagttaaataataaagtaaacttcttatataagccaaatcatgattaacagctacactttgctatcagggtaagataatttgtgttaagaactcatgaaagtaatagaatcattctgtgatggtttcaagtattttcaagctttacatcctgtaattctaggctctctgggacaatgctgctttagaattc

SEQ ID NO: 199708 - DNA, 1000 bp, Homo Sapiens
cctgcattagccttgcccaacaaactggagggagaaggatgtggagaacttgagggagtgaatgacatagatattatttctccttagtttgaaaaataacagatagcaacaggatagtaaagatattcaaggagggtggaagaaactgggaatgtatgaaggaatggctgcatagaagtacaagtagatgtaatccatgttagcagaatcactggggtaaagccatgggaagcaatttttttttttttttttttttgagacggagtctcgctctgtcgcccaggctggagtgcagtggcgggatctcggctcactgcaagctccgcctcccgggttcacgccattctcctgcctcagcctcccgagtagctgggactacaagcgcccgccactacgcccggctaattttttgtatttttagtagagacggggtttcaccgttttttagccgggatggtctcgatctcctgacctcgtgatccgcccgcctcggcctcccaaagtgctgggattacaggcgtgagccaccgcgcccggccgggaagcaatgtttgattcaatgtaagaaagaagttcccaaaatctagagcctaaggattgaccaagatgctctggaaacaagtaacccctcttctctagagagaagactcagtgaggtataagctttcaactttattcgaagttattagagaaatttcttggaattgatttgtagaaaaatatttccaattttagcttatattttactttaaaaagaaaaataggagagagggagctttgtactgtactgaaaatgagatgacaggatgttgaagttttacccaaggcccccagatacaacagatgctgcccactgaagtgagattccagattcaaatgcagactctacaaagaatatagtagcaaatgacttccacaattcttgaaaccttcagccaggtccaagtgattaaaaggggttgattatggcaaggagagaggattctgtgagaaggaattc

SEQ ID NO: 199709 - DNA, 1000 bp, Homo Sapiens
actcaagcctcagcaatggtgggcacccctcccccagcctcgctgccgccttgcagtttgatctcagactgctgtgctagcaatgagcaaggctccctgggcataggaccctcttagccaggcacgggatataatctcctggtgtgccgtttgctaagactgtcggaaacgcgcagtgttagggtaggagtgacccgattttccaggtgccgtctgtcacccttttccttggctaggaaagataatcacctaaccccttgcacttcctgggtgaggcgatgcctcaccctgtttcagctcatgctcggtgcactgcacccactgtcctgcacctactgtctgacaatccccagtgagacaatccccggtacctcagttggaaatgcagaaatcattcatcttctgcatcgctcacgcttcgagctgtagactggagctgttcctattcagtcatcttggaactgcctctcccacaatttatttaactagcctcaactgattaggtttatttccagtcttttgttaatacaagcaacactgcaataaataacctgtacctatgttataatttattttgtatcaagaattatttttatttttgcagacagtttttgtcaggagcatttgttttctgactggagactaaaatttttaaataatagagggttttttttcttttgtctcatttgttaatcattatttttggtaataaatcattggtcttcctaaaagttttctcaatggtgccaatttaaaatgctcccgtgtagaagctttctaaaatggattgcttttgtaaaactgtataaatttattaaaaattaagaaactgtatactgacagtggatgaattgtatgtaaattatacctcaataaaggtgttaaaatcgaaagaaaattcttgaacgatttagagttcctctgtaaactatatttttgtgtgtgtgatattcaaaggttgattattcgtctttctgaccttgaatagtcttcagaattc

SEQ ID NO: 199710 - DNA, 1000 bp, Homo Sapiens
ctaccagacagaagattatgcaaagggagatgcctaaggtgagaagagtagtgatcagggacggattctggaggaaaaccaatatttaagggaagaatagaagtagggcacattgggaagatccattaggaactattgagttagagaaggccaaaaaggggtggtgtcaaacatcgaaggagcaacaagtgacactgccaaatgtagcagagaggacctgaacacatgagaactagaaagcaccactgtactgtcaatataggggccactggtcaaatatggagtgttgaaagcagaagacagatcatagatgtttaaaaagtaaatggaaagtgagagagtggagacaatggatgtggacacatttttccaaaagcgtgacttacaagagcaatgtgtaaagggagaaagagttagggcagcaggaggagagttgtttttgtttttaggataagaaagtcttaagcatgtttatagggttaaaagctaaagggagacagtcagaagaatggaagagatacaggagagaaaggaacagtggatggcaggtaagggcaagagcacaggcatgccctcactactactggagggaatgaggatgagagggcatggggacagaagaggagacggaggtcgctcatgcctggtgacttcacttttcctagtgaggtacacagacaggggatttgctaataaggcagtggttaattttggtaaaggagtcttgagaatggtaaaagtttgaacagggaacaggaatggatgctcaccgtgactctaacacctagttcaggttaaagccctcatctaacctcatttaaccttatcaccaaaaccactctttcttttttctttggaggaaggagaaagaggaatataaaggagaaaactcagaactgacatcttgactctacctctagctacaactaagacctttattgccccacccagatattttaccctcactccttaaccaaaattccagtgaatagccatgtgg

SEQ ID NO: 199711 - DNA, 1000 bp, Homo Sapiens
aggtcccccctttacgtttataatttactaaatcatcaacaaagatttgggtggtgcttctactcaggtttttcagtttaccgtttctcaattcccttgattttttaaaatttccccactacttttcagcttctctcattcttttttcagtctctgtctcctgacccctcaagccagtaagccttcatattttcatgatgagagctacatatttggaaaatgcatttattttaaaaaattagcagactcatagctttcacacagcatagttctatccttttccatatttaattgcattttcattgagtctcctgagtctcccaccagtatgcaagatcagtcaagaatttccacgtagtgtatagtcagattttaggtccaattctcttccaaaactagattcggttttttgacatcttaagctagtaaggcagttattttctgctgccacggtaatgaagtgtgccctgtagtaacaaaggcacaaacttgcaattattaccattttcagttggaatttttaaggaataaactctttactggcttctgttattggatattttcaagtgcttttaagtgattgttttctatactgtgtctaggctttacactactcatctgaggcagtagcttatgagcacttcacctcactgagtaccagaaatcctctgcctgtgggtattggagaatggtgacaatgccggcaggctcctcagagtgttttgtaggatataaaagccgaccttgaagagaagatgacaggaccatatgccaaatctaccaatcatgggaagtgctcagaaggttgataataagtaccatagtgcagttaaatagaaaagactcctaagaatatgacatttttaaaaggtggccaggaaataattcctgggaacacctctgggaatcagagaggacatgaacccaacctccaaattataaggacgaatgaacaaccttagtggactacagatgaaatagtgtcttcataaatgaattc

SEQ ID NO: 199712 - DNA, 1000 bp, Homo Sapiens
accacaaactcttggatttgataaataaatttagtcaagtttcaggatacaaaattaatgtacagaaacactagcatttctatacaccaataccaatttggctgaggaccaaatcaagaaggcaattccatttataatagctaaaaataataatgaaatacctaggaatatatttaaccaaggaggtgaaagatctccataaggagaactacaaaacactgatgaaagaaatcgtagatgacacaaacaaatggaaaaatatcccatgctcatggattaggagaatcaatattgttaaaatgatcaaaaagcccaaagcaatctacagatttaataaagtccctatcaaattatcaatgtcatttttcacagaattagaaaaaagcaattgtaaaaatcacatgacaccaaaaaagagccaaatagccaaagcaaccctaagcaaaaacaacaaagctgaaggcattacattagctaacttcaaattatacaggagtatagtaactgaaacagcatgggactggtataaaaatagacacatagatcagtggaacagaatagagaacccagaaataaaggcacatacctaaaaacaactgatctttgacaaagtcaacaaaatttacactggataaaggacactctattcaagaaatggtgctgggaaaattggagagccatatgcagaagaatgaaactggactgctatctctcaccatatataaaacttaagatcaattaaagacttaaatccaatacctgaaactatagaaatcctagaagagaaactcttttggatgctggcctaggcaaaaatttatgactaagtcctcaaaagacaaatggaacgaactaaactaaaaaacttctgcacagcagtaactaaataagtagataaataaataaaagcaactgaataacagacaacctacgaatgggaaaaaattttttgcaaacaatgcatccataagggctaatatccagaatctataaggaattc

SEQ ID NO: 199713 - DNA, 1000 bp, Homo Sapiens
tccagcctgggcgacagatcaagattctgtctcaaaaaaaaaaaaaaaagaaactgaaatcaggctgggcgcggtggctcacacctgtaatcccagcactttgggaggccaaggcaggcggatcacctgaggtcgggagttcaagaccagcctgaccaacatggagaaacaccttctctactaaaaatacaaaattagccgggcgtggtggtgcacgcctgtaatcccagctactcaggaggctgaggcaggagaatcacttgaacccaggaggcggaggttgccgtgagccgagatcgcaccattgcactccagcctgggcaacaagagcaaaactcagtctcaaaaaaaaaaaaaaaaaattatccaaaactttccccagaataaagctcttgagacagatggcttcaccagtgaattccattaatattcaaggaacaaataacaccaacttattaaactttttcaggaaataaagagagaccactgctcaacttgttttatgaagctaacaaaaccttaatgttaaaacatgacaaatatatcttttttaaaaaagggaaatcatagtagcagtaataggagtttagatatatataaaataattaatcaaataagtacaaatattaaattatacatggaataacatacagctaaatttcttactgttaaagaagagaatagtaaactaggccaaacctgggtgttggattcacaattagaggtatctttgtagatttcagtaaccataggtagaaatagaaataaactcacagtaaatgtgtatgtatatacatatgtctatgtacctagctctgtccactaagagggccttggaacaatgactccccccaaatcagtggacacacctagagcccagatcttaatttctaaatatgattttctactaaaggaaattagggatccttagagagatggctgatttctggctggtacaaatccatctgcattatctgttgtgccagatagcaaggaattc

SEQ ID NO: 199714 - DNA, 1000 bp, Homo Sapiens
ttaatatatactaaggcaatgttattttgtttgaaaaaatatattcatcagatcaacttataattttaaagttttatttaaaaattagaaagataaaaaaatgtattgttattcatagtactttttatattaccacccattacacacacacacacacacacacacacacacactcacagcagaaagaaatatttcatgaaacaaatgtatattttccatttgtgttatgtcctgatctgttctattcttttttatttcaactcattttatttagtgttttttaaatgatagtcatgtcctattaaactgatttcacaaatcactaatggcttataatctgcagtttaaaaaatattgcccaaaagtatatattctagagaatgttaaaaataagttcttcgctaaactaaattagaaaaatattggctttaatgaaattaagtacattgccctagtgaaatatttctcagtgtttactgtccaagttatgaatttccaaaaagaggatagatataaaatacaacattttcgaatggcatgagattttgcaactaaaccctctttgcttgtctttccttctgtcttttcctcttcctttcttccttctttgcttgttttcttcctccttttattttgaggaaacaccttcaggagtagttcttaagaaatggacttcatatattttcacatttcaaaaaagtaattaccataggttacttttggttataacagatctcatctttttttattttttaattggctcaattcacatatttttacatatgaactttgaatctgtcaaacaaaattgctgtaactctaaaagcttcgactgttttatcctattgcttttgttttaactaggtctctcttttattataaattgtatattacacatgttcacattataaaatcacatttacatcataaataatggcttactgttaaaatcctttatttagatgccagctatatttactcagtcctcttgatggaattc

SEQ ID NO: 199715 - DNA, 1000 bp, Homo Sapiens
tagaattctcttaccttttttcctctaattaattagcgtgattacaaatagtttcttttgaggacatgtttaatctaccagtagctgaatactcaaaaggaaatttgctttttgaaaaagaagtgttcaatatttaataaatattaactgagtgaccgccatgtgcttggagtttgagatgtagggctgaacatgacaggcaaggtcactgctctatagctgtagcctcctggaagcaccggtttgacttttctagaagtgaggttcctggataaagatgaatttttaaaagctggaatgaatgagcagcaatagcagaaggagaaaagtgagtgagggctctccaagaagccatctggcaggctaagggttctgagagaagctctggtttcagaagcaactcaggaattacttctgtcatattaggatgggatggtaggagattgggaactctagggactagaagtcatttaatttcctgtctacaatccttagaagaggttttgagacttgcaacctaggaccttaactaatcatcttccctcagcattgatagaattctttattatacatgttaatatcagattagtcaggatgggctagattatgctgtgttaacagccattctctaaatctctgtggctcaacagggagctctgcctgtcatggtcacttgggacccaggctttgggtataaggctacagcacatggaaaacgtatgactgtctctcagattcttaaagtttctgctggaagtgacatgtcattctgctcacagttcattggctaaatgagtcacgtggctgtctctaacttcaaggatggtatgaaattccaatcctaccatgtttctagaaggagaaccagccctaatcacaatgctacatgtttatagcttgcctcatagagtttactgtattctcctggtataattttcttacatgctcaactggagaggaagctcttaaatagaaaaaaatcacagtaaatttcctttaa

SEQ ID NO: 199716 - DNA, 1000 bp, Homo Sapiens
cctatctcttcccttacctgcacattgttggaagttatcttcactcctgtcactcaagtccccatgaaatagatttaagtttcatgagcagagagcaagtacagggtagtatttccttgttattttatataacaagggtatataactgggtagtactttcttgttattgttatattgtgcctcttaaagaaatagcttcttttcttatcctcttcaaaatcccagtgtgaatatttcattttaatgtctctaaattatactgaataaaaaagcctttggtattcttcccaagatcctaaatctatttttaacatgcagctactaccttttatgatatcattttatatattttaaatggttatcgtggtcttgactatttgtcaaacaacccactaagtactgacaaagcccaagtgttccttataatatgtgtctcaagaaggtctttcttataaatacaagttttctccttaaatctcctttaattttcccccacaaaaatgttgattcaattaccacatttaaccatagcagtactgtaaatagtccatcatgtaggtgatgctcgttgaatcatgtattttgaggccatagctagcaggacagtggctataataatcgatctcttgttctgaagtccacaatctataacaccaaactgcaaagggaatgaaaagtactagtgctcagatgttcttaagttttgctcaacacaggacatagaaagaaattaaatagtaaataaccattatttcaaactgaatctaccaggaacccagagaggcagtgggtattcatggtgcgataagggaaacactgaaaaatataaaatatcttctacttccaaaatagattacaattctgtagtgggataaacaagtgactaaccaaagatagactatgataaataccctaagggagaaactaataagttaattaagtgttcaaaggaggaagtgagtacatctgttgaaggcaaaaagagcaggatttatcaaca

SEQ ID NO: 199717 - DNA, 1000 bp, Homo Sapiens
caagaacttcacaatgcaatcataagtatcaatagcagaacagaccaagcagaggaaagaatctcagagcctgaagactgtctttctgaaataagacagacagacaagaatagagaaaaaagaataaaaaagaatgaacaaaacctctcagaaatatggaattatgtagaaagactaaacctacaagtgagtggggtacctgaaagagatgggaagaatggaaccaagttagaaaacatacgtcaagatatcatccaggagcacatcccaacctagcaagacaggccaacattcaaattcaggaactgcagagaaccccagtgtattagtctgttctcatactgctaataaagacatacctgagactgggtaatttataatgaaagaggtttaattgactcacagttccacgtggctggggaggactcacaatcaaagcagaagatgaatgaggagcaaagtcacatcttacatggcagcaggcaagagagcaagtgtaggggaactcccctttacacaaccatcagatctcagatatcatgaaacttattcattatcatgagaatagcatgagaaagacctgcccccatgattcagttgcctcccaccgcgtccctcccatgacacatgggaatcataagagctgcaatacaagatgatatttgggtgaggacacagccaaatcatatcacccaataaaatactccacaaaaagaccaaccccaagacatataattatcagatttgccaaggtcaaaatgaaagaaaaaatgttaagggcagccaaagagaaggaccaggtcacctacaaagggaatccatcagactaacagcagatctctcagcagaaaccctacaaatcaaaagagagtgggggccaatattcaactttcttaaagaaaagaattttaaacccagaatttcatatctggccaaactaagcttcataagcaaaggagaaataaaatctttttcagacaagcaaatgctgagggaattc

SEQ ID NO: 199718 - DNA, 1000 bp, Homo Sapiens
tatatataatatatatataatatatatatataaaatatagtttggctgcagctagaatgcatgaagatgagttgggcatggatggacttgagactgaatatgcaggtttacgtcaaatcctaaaaggctttaagtgaatgccaggctaggaaattcattccttagaggaggagatctcaaagttttgaaaagatgaatctggcagttttatgagtggcattagacaggatgtgtgtgggagaagtggagaaaggaggcgtagtagacaggaggccattctggaagataatgggggcttgaaccagagcagtgggattggtggagtttcctagcagccatataataatgtgagcctggcgaagaagtcaggactatagatgcatagttgggaattatttgcagagggtgaaagatgaaatagtagatttaatgaactcacagaaaatgaaagacatttacaagggctggagaaaaattcatagaaaaagggcaggaagagatgaatgaacaagacaaagatcaaccaggtaagagaataagagcagagaaaatggaaacagagagagatagaaagagatatagatagatagatagatagatagagacttctaactatatatatatattctctcctcattcttctgtccactgctactcttgtgggctatatttttctcccaagaataatagaagttgtctaccaactcctcttcagaaacaaaaacattgaatgtgttatctgtaagctgtgcttttctgtgaatttatacacatgaggtgggagattattagggacttctaaagctagcacagaaattaagtattttatgtaagatttggaatgaaagggtaacattagttatgtggaaagcaccataatctagttttactttgttttatctttacaattctgaggacatgctgaaccatcatactgatgtttttctgggagggctagtgctggtggacaaacacgcaaaggatatgtgtgtgcaagtta

SEQ ID NO: 199719 - DNA, 1000 bp, Homo Sapiens
ttgagataaaagaaacaaacttttttttcgtggaaatcttgtgtatgtttgaaaatggtcactgaactttcctcttcccttcagatttccttgagtaggcatcatgctgccccctgaatctctcctgtgggtattttaatcatgtttctctggatccattctggtaaccatatggaagacccattagaactctgctcagtagacagtgggatgaaatcagactaaggtgaatcttggaccttgtaaggaatttaatttcaaaggacctgtgaggagtcataacaccaccctcaaggaaaaagatacagtgattccctgtgtcatgatttttactgtaaccatatgtttttaattggggaattaaaatttgacagtgtccatatttttctcctaggaagagtggctgacctgccagagaaactggctctacctagaaagtattttcaatgctccagacattcagaggcaattgcctgcagaggccaagatgttccttcaggtggataagtcatggaaagaaatcatgagaaaggtgaatcggctgcctaatgctcttcgagccgctactcagccaggtatgaaacaaaattccaaacaagcaaaaagactacaatcttttagtagtctgggactttagtcccagactaaaatgtttctctgggaatctaataacatatggtccattcaacccttgattctagtcagcatggatgactaggaatccttgcatttgacacacttgctaagcaatgtcaacggaacactggacttttttttattattattatctctcagcttagtttgtagtttcggaaaaggagaatctgcctatttttgctgtttttatgattgggggatgttgcttcagtgtatcagcaatgttttcatctcagaattttgacaacgagacaaatatttgccttcggttgatgtattcagttaaagctcctccacagatttatagccacaaaaatgtccacaccttatttttaatgaattc

SEQ ID NO: 199720 - DNA, 1000 bp, Homo Sapiens
tcctccccaaacccataaaaccgactccacacataagaaaaacatcaggcctatccaacagagatattctataaaatactgaccagtacttctcaaaactgtcaaggtcatcaaaaacaaggtctgagaaactgtcacacccaagaggagcctagggaggtgtgacaactaaatataatatggtatccgggaacagaagaaggatattaggtgaaaactaaggaaatctgaaaaaactgtggactttagttactaataatatatcaatattggttcattaattgtaacaaatgtactatactaacgtaaaatattaataggggaaactgagtgtgtggtatatgggaactctgtactatttctgtgatttctctgttaatctaaaattgttccagtaaggtttataaaaattgttcatctttgatcttagagtcaactgttcagttgaacaatttttaaatttttattaataatagactattttttagaatagttttagattaagagaaaaattgggcagagagttcccatattccaccccaccaccacctgttgtgttttctttattaacaatattttgcaatcctgtgatacatttgttacaaaattagtgaaccaatatcgatatatcattattaactaaagtcctccatttgagttaaggctcactctgtgatgtatgaaaccatagattctgacaaatgtataatgtcatgtatacaccactgaagcatcatacagaatagtttcactgtcctacaaatctcctgtgcttcacctaggcatcccttcccagccaccaaatccctgtaactcatctttttactgtctgtatagttttgccttttccgaaatgtcatatagttggaatcgtatagtacgtagccttctcagaatggctttgctcacttgtgatacacgtttaggtttcctccatgtctctttgtggcctgacagctcacttcttttgtggctgaataatattccgttgtatggatat

SEQ ID NO: 199721 - DNA, 1000 bp, Homo Sapiens
tcctgactaccaccacccaggatcctgtgccccgagccagcccaagtgtttagccattccctccacacctgtggcactctgacagctctttactttgtatgtgttgttttctttgcctaaaaaggtcttccattgccaacaaacccttctctacctactcatcttcgagcgtaattcaaacattaccacctctccataacttaatgactctccatagaaagatataattagaccacaccatcttctgctaattaatcctgtacactacttatcaatcatatcatggcttctggggttttttacacttacacacagttctcactctgatattaatggacaggagccatgatgtatgcattgatacacacccagtccatgacactgtatctaggtaccttcaaaaaaacagtggaactgattctaaattctcaaacaaatgaaaagggcagaattgggctcattttaatcccctaggagccctctttccttatctggctcagttccactggctgtcgctgatctacagagctgccaactttcctgctaccatcacacctggtgtgaaggctgcaatgaagctcccttccacctcccaagctaaagaagaatcctctctttacacaggttagcagagagaaggctgggatatttcacatggaatttttactaggaagaaagtcaagtcaggaaaaagtcacagaaaatcagcaaagtagacaggtttacagaatgcttactgctgatccataattaactaagaagctcggcctggcacggtccccacattgctgtgtttcccgttcttcccctcaccacaataccatctgtgataaatggtaaacctgacatccttagcatgctaagccaaggcagatttgggttggtaccacactatccaggcctggtgagatcaccagaacttttgccagatccacaatcctttccacaaactgctgactgctgttttcttcaggtatggtccccctgacgtcatctctta

SEQ ID NO: 199722 - DNA, 1000 bp, Homo Sapiens
caagaaagagacccgatcaagccctggaagtagactcagagctgttagggcaggaaattttggggctctgcattcctagtgggtgatttaggaatgaagagtgtggggtccagatgaatccaatcttttggccgtgtggactcctcaccttgtgagcatgggcacaactggaggaaggctagaatgagaccctcttaagtaaggagcctaaggcagggggcctctcaatccaggggtacaaggcagatcccctcttactcagatccaagggcagtgccatatgagacaacaagcacacttctttcaagagggagaatgctagtaaggtaaggcaaggaagaggaggaagtgttctgtgcaagaggttgaggatgtgaggtcaggaaagtttggaagtacagagaaatatggatttaaaagtaggcaagagatgcatggtgaaattagctggcctctacattgcaagtagaaccgtgtagtcaactttgggcatagttacagcagattcagcctttataaaggctattctttctacctaaacaactcttctgactgctcctgatttgctacatcccttatgttctcagcttgaatttcacttgctttaggaggccttgctccaagcccctgattaatctatccctctctgtcttcaatttttccataaactctgtagttctctttttgttatatctaatcacacttgttaagttgtccatgcctttttgattattcaggctaaaaggtttatgaagacatctgtcttgtccggcatcatatcctgggacccacaaagtgactgaaatatatctggtggtcaatatatatttggtgagtagataatatgtcctcatggtgtttgagtggcattgcttgatgtagctgaatccaaatagaatatcagcttttttatgtccttccacttcaaattgtttcattttacacataatttttcagagccagttaatcagacaaagatgatttattttcatacctaaag

SEQ ID NO: 199723 - DNA, 1000 bp, Homo Sapiens
tgtgtacccggccctcacaaggtgggagtcatgtgtgtggtggcagtggggagtgatcaggaggacaggacatggcactcaaggggtgaccttgcagctagggaaggaacaaaaacatacaggatctaagtctcaattgccaaaaaggatagctcctggaagcccagagacctgtagactcaggttttagaattgacagtgaaggaaaggaagggttcaaggtggcccaggagcaccctatactcatccttgagtcagctggccagtgtcccagcagctcattatgtaagggctgagccagccaagtttgcagagcaaaggtcagaatggcaaagatttattggaaagtctccttgcactcatacccatgagtgccctttcatgtggggacattttgtgctcctggagcacactgcagttggtcttgggtacttccttgggacagggaagctgggcacgtgggctggtggaagtcttgggctctgagtttccacccctgcatcgggcttgggcatggccagcactctggttcctacccgattggctccagagacccaggaagcattcatatgaatcatataggtcatggcttcattttcccactcatttaaaggtgcctggtgcactcacacctgcctccagcctttgctcttactgtttcctctgccttgagtgaccttcctccagatcttctcccctccagtttctgcctggaaagccctctttccaagcttcatttcccatgatcttcaccacaaacccaggcttttgtatggcacccaaggccgctgtgagtgtgaatcttcaactggcccctgaggcacctgccagcagtaaccagtgccctgcgaatcccaccctgcagcccctcagccttccctagagtcagccttggatgcagcgggctcattaccttcaagcctttgctcaggctgttccttctgcctggagtgctttctctgcctcctctgccttcccaccactgcccactaaggaattc

SEQ ID NO: 199724 - DNA, 1000 bp, Homo Sapiens
attgaaaatacattcaggtttctgaaggaattttccattagtcatattgaaatggaggattctcgaatcctccccacattaatgtacgctatgaccaaagctgctttggggccttaagaatcaagattctaggctctggaagaatccatgctagagcccgccaaccttgaacctagattcccatcgattatctggagtcatctgaatgattctccactgcatggaagcaccggaaatacagtaaaacttcattgattcagatcagtggagagaaggagcagcattaaatacagaatgttttaaaagaaattgagccttattacttttaagttagcaccttcaaccaaactaagaaaatgtgcaagtgtggagttaccagatctactctaaggatttgatatgaacggctttagttcacatatccagtgtttagagattaaacagaagcttctaaggttcctgtttcaagttcaatagggaaactcacacccagttcctgactagcttatgaaatgtttagaattagtggagtctaactgtaatcagtgtcttgggtactcacacccttctccatcccatacacacatcacacttgtccaaacaaaatataactcttgagagcctactagattgaagacccctgcaaagcgctgggcattcatgattgcattaaatcgtcataagagccatgtgtagtaggctcaggaaaattaaattacccaaggtcatatagctagaaaataacagagaactctctcttctgtccttcaccttttgtaagcaagcaaatgggcagaggtattttctagaactttcgtcaacagccctttcttcaagaacctccaagataaactgagactcaatttctgccaggtgaccacagtcagcttcagtgcagtctgagttagtagttttctatgtggtgataatgcaatgccatcagtgaagtattgaggggctgacctgtgctccatctgatccctatttccacttagaattc

SEQ ID NO: 199725 - DNA, 1000 bp, Homo Sapiens
gtgtggggtatgcattcttactatagaaaaagcatcttaaaatctactttactgttatcttcattttcttccatatggatatcaggtgatccccaaagctcttaatctccaactattatctcacaaaccccaaactccctggcacctattccacatgattttctggtctctctccctccttcctcttgctgcctctctcagctctttaatatatacacaaacggggatttctccactcttctgttttccctctatttgctcattatttagattctgagcaacaaatgagagtccaagagcaacctgagcaggtgagacattttccctattagacatgaaaaagaggcatggatgtgaagtcccacacctaaatattcttttaaatttctattgccctatgggcacaccgtgacttactcttccacttgttcttcctctgggcagttccagtcagctttgccattgtgcataacaggaagtggagtgctcttgcaaggaaggcctagagtttcaggagacaaaccattgagttaatttctaacagattaacacagattccacttgtctcgttcatgctataaaactgcaagcctacagttgcctttgttttcacttctacctaagatgagcagggctctgatgctatctctgggatggcatgggtgtgtctgtgcaagggcaggccttccttgtctgccagagcaggcccctgcctgataaggccacgccaggcctctcagctccctagggagtcatcccatgcattgtgaaaattttaccatgacccagtttgttccgtgtgttgttttattgaatttcatactgatgaacgtcaattattattaagtacctgctgtgttccaaatatgccctaagcattttgtgtaatacaagggggtcctcagcatcatgtagttttaaaatggagatgtataatgataattgacattatcatattagaactaaatagaagcttatcttttagggcaaatttgaattc

SEQ ID NO: 199726 - DNA, 1000 bp, Homo Sapiens
taacaccccactgtcaatattagacagatcaacaagacagaaagttaacaaggatattcaggacttgaactcagctctggaccaagcagacctaatagacatctacacaactctccaccccaaatcaacagaatatacattcttctcagcactacatcacacttattctaaaattgaccacataattggaagtaaaacacccttagcaaatgcaaaagaacagaaataataacaaacagtctctcagaccacagtgcaatcaaattagtacgcaggattaagaaactcactcaaaactgaacaattacatgaaaactgaacaatgtgctcctgaatgactactggataaataacaaaatgagggcagaaataaagatgttctttgaaaccaaagagaacaaagacacgatgtaccagaatttctgggacacatttaaagcagcgtgtagagggaaatttatagcactagaagcccacaagaaaaagcaggaaagatccaaaatcaacaccctaacatcacaattaaaagaactagagaaacaagaacaaataaattcaaaagccagcagaaggcaagaaataactaagatcagagcggaactgaaggagatagaaacacgaaaaacccttcaaaaaatcaatgaatccaggagctgttttttcgaaaagatcaacaaaatagatagaccgctagccagattaataaagaagaagacagagaagaatcaaatagatgcaataaaaaatgatacaggggatatcacaactgatcccaaagaaatacaaactaccatcagagaacagtataaacactcctacacaaataaactagaaaatctagaataaatggataaattcctgggcatatacacccgtccaaatctaaaccaggaaaagtcgaatctctgcatagaacaataacaagttctgaaattgatgaatagttaatagcctaccaaccaaagaaagtccaggaccagaaaaattgacagctgaattc

SEQ ID NO: 199727 - DNA, 1000 bp, Homo Sapiens
gggttcgaacatcctcctttagcttggagaagtttgttattctgatcttctgaagccttcttcactcaacttgtcaaagtcattctccatccagctttgttcccttgctggcgaggagctaggttcctttgtaggagaagaggcactctgatttttagaattttcagcttttctgctctggtttctccccatctttgtggttttatctatctttggtctttgatgatggtgacgtacacatggggttttggtgtggatgtcctttctgtttgttagttttccttctaacagtcaggaccctgagctgcaggtctgttggagtttgctggaggtccactccagaccctgtttgcctgtgtatcaccagcggaggctgcagaacagcaaatattgcagaatggcaaatgttgctgcctgatccttcctctgaaagctttgtctcagaggggtacctggctgtgtgaggtgtcagtcggcccctactgggaggtatctcccagttaggctacttgggtctcagggacccacttgaggaggcattctgtccgttctcagatctcaaactccgtgctgggagaaccactactctcttcaaagctgtcagatagggacgtttaagtctgcagaagtttctgctgcctttttttcagctatgccctgaccctagaggtggagtctacagaggcaggcaggcctccttgagctgcggtgggctccacccatttcgagcttctaggccgctttgtttacccactcaagcctcagcaattgcggacacccctcccccagcctcactgccaccttgtggttcgaactcagactgctgtgctagcagagagtgaagccccgtgggcatggaaccctccgagccaggcaccagatattatctcctggtgtgccctttgctaagacagttggaaaagcacagtattagtgtgggagtgtcccgattttccaggtaccgtctctcacggcttctcttgactaggaaagggaattc

SEQ ID NO: 199728 - DNA, 1000 bp, Homo Sapiens
ctcgagctctttgccactcatcagaggtagaattataatggagatctaaacaaatttctctatctccaagccccaggtgtagagctagggactattcatatcaattgcctccagggaagaaaaataatgagggagggaatctgaatgactgaacattactgaacaagcacttgttagtataataattgtcaaccctggcagattcagctgggaggaaaattgatgatagtggcttagcacaactgtttcaaccaaaatgacagtgctgtgggcagcaggagatctgctaagtggaataaacaaatggccactaagaggaaaaagtcaaaggaaaatattcatacggggtttcaattcaaagcaccaacacacatttttgtagattagataaacttctattttctaaaactgctcatttttgctgcagcttcattaaccatatgttaccagtcctcttattcctcactatcgctatcactgttccgtaatactcaatagagacattctctgaaaaagaatgccctgacagcccactatattttatgtttatataaaaaagacattgtagattggctaaaattccctttaaattgttttgctgatatttaatccgaccaaaaaatctactagacatttttttcccatgtgtgctaagtggaatgttttaagagctaccactgaagaaaagtaattttcttgtcttcttccactaatattaatgaagcatcatttttttcctttcatcttcattcatataagcaattgcaaatatattgagatttattgaattacatttaacccctatgaaatttaacacctgttcattaattcgctcaagaaaagttagattctcactaaactaggtagagttgagtgtcatcttgatcattatttcatttggagcagatattatatactggtcaacaaaaggcacttttctaagtcgaattgtatttggagaaacaatttattttatatttgtaaagtaaatgtggaattc

SEQ ID NO: 199729 - DNA, 1000 bp, Homo Sapiens
tgtcacattagctttatattttgcatcagtcttgctctattctgctgccgtagacctggcttcaaatgatagtgcccacttgataaacagatgttgttcaggagaaaataaaataggaaatataaaatattctgtgtcgaattgaaagcatgagggtcctcatgttcttagaatcttcttagaaatacagtataaaatctttatatacagatacacattgacaacaatagagaactcataagcagttacctgagcagggttgaacatataggtagggtcatgatgataatacactaatgaacagcctgccttacacacatgcctccaatacacagacacatacacacttagcttagggaagtagggccacttctctcctgtttgttcttttccttggattcctatacttccctgggcctgtcagtaaccatcccttctccccagtcacactttttctgtagtcccctctctaaacaggaagcgacaactactaattagacttataaataaaagccaccttaaatgaacatcatgtgtaggtttcccaagttatacgtgcctctggcctttttctcatcatttactatggaaataaagacaaacaaacatattttcccccataatctttggagggtagagtaggtagtgtcagatgtgcctgttatggtggttgttcagaaattaaaagagggcaatttgcattggccaatggacactttagcttctaaaaaattcattttattcttcttctttgattattcctagcttttaatctgagtaaaggacatagattgtggcttggccttacttcatggcatgggaagcacatgatacgaataaacttgacttagtactgtatttggccgtggcttgacttgataccttgagcctcatgagttatttcatcagttggtcgctagttatggttctttatctttcaagggccttaacaaaaatttttaaagagccaggctggttatcgtaactattataggaattc

SEQ ID NO: 199730 - DNA, 1000 bp, Homo Sapiens
agtgacaaattattattttggttgactgtttaggcatcccaagatgagggaagtacaatagaccagcagagaaggactcttaatttgtgactggaatagctcagttactaactttcctgatgtgcccctgcccccagcttaggtggctggggaaaaagggaagagggaaacatcagaaagaggggagagggtgagggggtgggtccagttcagcctccagcttccttcaggcagccccctggggtggcttaccagacagagttcagtcttcctgggccctgcccccattgtagggcagccttgcctggcaacctccacagtcctcttcccctgcacccccatcctgagccaacccctgaggtgtgggttgttctcatcagaaactcccgtttaccgggtgctccccgcttagctgccaccctgccccaggcctacaatcagtgatgacaggataattgtttgtttattgatcctgaccagccttctgtggcctagtgatggatgatgtgggaagagccctgcttgcctgggcacaggcaccccagtaccggaagaatcagacgtgggctagcctggacccatccccatcctgacacatcactgcccctcttctggccttggcctatgatgatggagcaaaatgagccccaaattgggaatctggagccctgggtctgaaccccagaattctagactgttacccagaggcctcaggcagccatcttcctccttccctgcaatccctagcctcggatctcctcctacagcccaaaccctggggctagaccagactgcagggaccctcagccaggtttgaatttggaggatcagcatgagactagggtgccccagctggtgcctgatagatgcttgcacagacccggaggctcacagcccacaccagccattctatacccattgcctttgacatctcctttcctgggcagccaagatgacatgccttgggggactggagccctggggctgaaccccagaattc

SEQ ID NO: 199731 - DNA, 1000 bp, Homo Sapiens
tgttgttactggtggtggtggtgttttacagtgagacatactggttagctcagctaaggtgtttgagtaagacttcataaacataaagtactttgtgtgggtttgttttgtgtgttccatcttacgtcatttgtggcactgaaaatgagattgcaattcccagagtactgggatagttcattcagaggttagcccacctaagtttatagcagttgtctgtaatagaattgtaactaatttccactgttgtttttggagaaaactgtagactataattatgtgttagcactttttaaacagctccctgcattgtcatatcattttaaatgggctctgttttaaaatgacctttcatgttttgattgcaaaaatatagcttacacaggtctgtagttagcaaaatacaaggatccagtaaatgatagagcattgacacaactctagaagcatgtgttaaacatcactggcactgccctaggtttaaaggggaagaaatagggaagtagaaattcactgttcttcaacactccttctgttggataggcaagattagtacatagaacagttatggagccatgtgaaaaaaaatagtagttatacaaatgtaaaatgctacacatgaagtatattgcattacctttttgtggcctatggaaagaagtctcagagcacagtaagattcaagtaccatctcccagaattggggtcagcaacaccattttatattttggcaaatgctacccactgtctcccaaacggcagatatctgcatatagttagtcatgtggacacacccttcctctgctacattgcattgccatattagtagtagaattttagtgttgatttaaaagacagtctgccttaaagcagattgcatagtttgcacactgtgaattgtaattaaagtgtaaggggggcttattatgtcaacaactggcatgagaacccccgagcagcaggtgaccctgaccatgtgacgtttgtgacagctaggatc

SEQ ID NO: 199732 - DNA, 1000 bp, Homo Sapiens
agtatatgtatgtgtccatggccatttttattaagggtttttttttgtttgtttgtttgttttgagagtctcgctctgttacccaggctggagtgcagtggcgcggtctcggctcactgcatcctccgcctcctgggttcaagcgattctcctgcctcagcctcccgagtagctgggacaacaggcgcctgccaccacgtctgggctaattttttgcgtttgtagtagagacggggtttcaccgtgttagccaggatggtctcgatctcgtgacctcgtgatccacccgcctcggcctcccagaatgctaggattataggcgcgaggcactgcgcccggcctgttaaggtctcttaagttaagaacagcattgtttcttgaccaaaatagattttgtagcttcttaggcgtagtttctcccaccccatcctgtgggtactcaaatgtaagatcatattctgaattgtcatcacaggactaggtatatatatatatatatgtgtgtgtgtgtgtgtgtgtgtgtgtgtgtgtgtaaattggtattttatgttatgtacttcagttaccaagtaatgccagacatttcttcagaccttctccaacatatcgtggcatgtaatttactgtgttaatagtagtaagctccaggaatcgtgaggatactttagaagtcttactctttattattgagtatatcacagtgactttttttttccaaaattatttgtttaaataacaaacaatgaggtaaaatgaactttctcgactttgtggcattttgtcttacttggttaggtctaaaaaaatactttttcagcagctcttaagagtaattgtgagaaatatatatatgctgcattctttctgaaaacctaaaagtaatgtgttcatttgcttaagcaccaaaatagcagttaatatgaatgtagatacaggtgagccatcatttccctttaatcagcttttaaggcagtagtatccatttatagctctgatgatc

SEQ ID NO: 199733 - DNA, 1000 bp, Homo Sapiens
tgttaaacatcacctctccttcctctatgcatttattctattacaatccaaatctcctacagaggcagatgggtgtcttaggctgaatggagaaagtcttgcatattgcaaaggcaaataagaaagtacattaatatctttagaaatactaacttcattatatcagaaacaataatgcaccattccccccttccaaattcctggcagctactcctttctgtctctatgatgttgatgactctaggtacctcatataataaaaccatacagtagtttttgttactgatttatttcacttagcaaaatattgaggttcatccatgttgtagcatgtgatagtatttcttttctctttctttcttttttttttttgacaggatctcactttgttgcctacggtggagtgcagtggcatgattttgactcactgaagcctcatccttccaggctcaagtgatcctcccatctcagcctcccgaatagctgggactataggctcatgccaccatgcctagctaattttgtttatttttatctatttatcttgttgagacgagttctcataatgttgcccaggcctgtctcgaactcctggactcaagcaatcctcccacctacctgggcctctcaaagtgctgggattacaggcatgagccaccatgcctggcctaggattacttttttaaggctgtctagtattccattttgtgtacacacacatttagtcatctgttaatggacatgtggtttgctcttggctcttatgaataatgctattaggaacatgagtgtattagtttgttttcacactgctgacaaagacatacccgtgactgggtaatttatacaggaaagaggtttaatggacttacagttccatgtggctggggaggcctcacaatcatggtggaaggcaaggaggagcaagtcacatcttacatggatggcagtaggcaaagaaagagcttgtgcagggaaacttccccttatagaaccatca

SEQ ID NO: 199734 - DNA, 1000 bp, Homo Sapiens
aaactatgaccttaaaataaatgtcctcttagttgttttgtaagaaatatgaagatagcaaccaatgatcactttttcatgctatattcaactttatgctagtttatactctcatttgcttaaattcacatatgaatctattcccattagttggtgtttttactataatctgaataataagtttgatacaaatgacattagaattccatttaaaatcctttaatccttaaaatactgtattgttatcttataatcaatcaaaaatgatatctaatcatatgctatcttagcactatcgtcacatttatttaatctttactatcactggcaaggacacgatttatctcaatcattctttttttttttttgagacagaatctcgctctgtcacccaggctggagtgcagcggcatgatctcggctcattgcaagcactgtcttctgggttcacgccattctcctgcctcagcctcccaagtagctgggaatgcaggtgcccgccaccacacccagctaattttttgtatttttagtagagacggggtttcaccgtcttagccaggatggtctggatctcctgacctcatgatctgcccgcctcggcctcccaaagtgctgggattacgggcgtgagccaccactcaattattctttatacacactgaagttacagttgaatacaggatggctgattgtgaagaaggatatacaacaaatgaagatggaatcaatgcaacacaataattattgaaggtcagaatgagagtaaatttaggagtaatattataaatggtacatgcctagaaaaaaaaaaaataaggctgagctcagtggctcacacttataatcccagtactttgggaggccagggcaggtgaatcacttgaggtcgggagttcgagaccagcctggccaacatgatgaaatcccgtctctattaaaaatacaaaaacattaaccaggcgtggtggtgcacgcctgtaatcccagctactcagga

SEQ ID NO: 199735 - DNA, 1000 bp, Homo Sapiens
acaatgtaaaactaaaatatcattttattgtgtgacatggagctctttttcaagttaaaacagctctgtatcctagtgtttccttgctgtgtagcagaatgagaattaggaactaggaagagcccagctggtaaggagggttcgcttttttataattagttgggttaaacccataatatccatctataacttatccagggtattctgtttcaaagagaagtaatagtcttaaaacagaaaacatgcatttgtatgcatgtgtgtgtgcatgcacacacacacacacacacacactactgtgcagtcaaagaacagactccatgtcagttttgaaagacataccaactgggttcaacattacattgtgtcagagaatgaagtgatgactatccttcactcaaaaaatgcatagttgaatttttcctccaacttccaatttggttaatttgagaacttgtggtttagtaggttacatggaagattaaggagactcacatccataattgtcccaaaaaagcacaaagttaacattctcctgagttgaaagtaaagactattatggaaattaattaatcccttaacaacaaccacaacaaaatggcagggcactgcatggcagcactgcagggtcttttaaaggtaaatggatttcatgccattttaaccagttcaagtataaagtcatccaagttttagaaatattctgaaaccattttcttctgcctctttaacggctactttttgatctccattttttttcctcctctaaatgtgttgtgactcatacatttacaacttggatgtccccaaaatagtaaccacccccattctattgccatatatttttgtgttataaattaaaatgggaagaatacccattcagaatataatggaaaacagcatcccccaactcgctcctgaagtatcttcatgaattctaaagaagcttaacattattctgagtcatttcttgcttggatttcttgcttctactgaattc

SEQ ID NO: 199736 - DNA, 1000 bp, Homo Sapiens
ttactttaaaatgtttggattgaaatacagtgaagtgaaaattccccctcccagtctggttgccctttttttttttttttttttttttttttgagacagagtctcactctgtcgcccaggctggagtgcagtggcgcgatctcggctcactgcaagctccgcctcccaggttcaagcaattctcctgcctcagcctcccgagtagctgggactacaggtgtgtgccaccatgcccagctaatttttgtatttttagtagagacggggtttcaccatgttggccaagatggtctcgatctcttgacctcgtgatcagcccgccttggcctcccaaagtgcaggcattgcaggcatgagccactgcgcctggccttggttgcccttttttagaggcaactggtgctagtttcttgtgtatacttcaagagatattttaatgcaaaaaaaaaaaaaaaggtagataatcttatggtccacaatcccttatctggaagcttgggggcagttgtattttggagttgggaattcaaggagtgtagaaaggtagtatgtatattctatcacactcccagcagagcctgtgataaaatacacaaatatttctgcaccaagtaaaataaataaagccataatctgccttaagtcagttgagttcagccaggttttgctaccaaatgtgtttgtgttatttatttattttttaattgtgttctttggagatttttgaattttataattgtggataagggaatgtggacttgtttttgtgctactctccttatttaaaaacttatggcggcattctgcacctactggatcagactaaagagctctttcattattattattattttgtatccccatagtattgcattatacacatgcaccattgccagcttagcttgttcatggacatttgaattgtttccagtcttctcctcaatggcatcagtgctgcaatgaataacattgtgtactctttagcacatgtgcaagcata

SEQ ID NO: 199737 - DNA, 1000 bp, Homo Sapiens
aaaagaaactggagaaagggtgtgtgagccacacatccacatggcagcagacctcaaactcgtccacaggggatggaatggggggttcaaatctcaagggcaagggcacccagcaggcataggtaccccactgccagagtacgagtaagactgccccatcccatccagcagggctcctctccccagccttccttccttctttctccctgtttctccccccacatttctcttccgacgccatcctaaaaggcacatacatcccactcctcaatgttatgagtctggctttacaaaatgatttttatgctcttttttttttatagggaccattgcaagagggtattgcagtgtggaagagagactagactcaactctctgtgaaataatttgtatgatcatattaactttgtgttaatatcctgtatcctcacagagcacaggtgaggacaggtctccaggtgacataagaggcagcttgcaccaggagcgctgccacaaggtgaagagagagggccaccttgatcacgcacctcccgcacagtgcaagcacaaccatttttgatttataaaaatcccacttgctcagacccctgtgaggaagaaagcagtggggggccccgcctggggcactggagcttgggagggcctggactgcctgcagacaggcaagcatgtggccacagatcacttacctcctccaggatggctgacaacaggctgctcttaccactccccgtgttgccgcagacccctaacatcatcccctgcaagccaaggaggacatacaagtgttgggacagcatagccctggcatacccacctgcccatggcggctcaactgtttagaacccaaaacaacacacagaaaacaaaataaccacacagagcccaagactcctcagacaggcaaagctcaagaggagctttgtgctcagtccctggaggcaggtggggtgacccgagaggaaggagatcacaagggaaaggcagaggggaattc

SEQ ID NO: 199738 - DNA, 1000 bp, Homo Sapiens
tacatataacctaccacccagacacatacagaaagtaagtttgcacttgatatattctttcatagcctgttgtattcagttaccatccttggacatcacaatttacgggaatgctctgactaattttctttgtctttaaacatttatacagtcaatcatcactttaatggggatatgttcagagaaatgtgtcattagataatttagttgtgtgaacatcataaagtgtacttacacaaacctaaatggtatagcctactacagacctacggtatatggtatagcctactgctcctaagctaaaaacctgtacatgttactgtactgaatattgtagacagttgtaatacaatgataagtgtgtatataaatgtatctaaatatagaaaaattacagtaaaaatacagttaaaaaccatactgtaaagtataatcttatgggaacatcatcatatatgtgttagtttgatggcttacagtttatcattttagtttaaaatttttcaggtacatagtggttcctttcaatatgtagatttaaagctttcctgtatttctggaaatatttattagattatagttttaaatattcttttttactgttttgtttatcatcttaaagactctaattatatttaatgttgaatctttctttgcctatcttccactttaacccttttctctctcacccatattacttatttcattttcctttttttttttttttggctttcttttaaatttgtattcaaatctatttcctttgggccatatagaatttacttttcatatctgatatggttttgtctttttcctcaatttctttcctggctttaaataagtttcctgcatgtctttctggttttgggtacatttctgttcttagtttgtgagcttttatataaactatttcttaatttttgtttgagaatatttaattcaatttgaaatgttttcttattgttttctggaattttcatttgctgaaacatttgaattc

SEQ ID NO: 199739 - DNA, 1000 bp, Homo Sapiens
acacacacaaaaaaataaattcctatttcatatacaaagatcagtcctaaatgagacaagtaaagacccaagtgtgacacaaaacttgagaaattttagaagtaaatacaggagaatacgatatttagatagggaggatttcttaaataagccacaaaagtaaagcctataaaacaagagatcgataaattcaactacataaaaaaattttttaaaacctcgcatatatcaaaacacatcatggaaaaaatttaaaaatacaagccatagtctgggagaagacgtttgcaatgtatataagtgacacagtactgatactcagaacaataaactcctaaaaatcaataaaaagagacaacccaatagaatacagataaaggatatgaaaaatcaattcacagaagaaaccaaagtggacaataaagatataaaaagatgccctatctcattagtaattagggaaacatatattataacagcaataagataccatttcatgttcatcatgacaactggcaaaatttataagtctgacaatttcaagtgttaaggctgcagaggaatgaaaactcttacattctgctattggaagagtaaatatgttcaattactttggaaaacaattggtcattatgtagttaatttgaagatgcatataattaataaatcattttccctagagaaattctcatactcatacgtaaagagacatgcacaaaaatgctctaagcagcattatttgcaattgcaagtggctataaataacctaaattctgatcaatacaatggataaattgtaattcaatcatatatggaatatctaacagcaattaaaataaatgaagcagagctatgtgtttcaatataagtgaatctctacaatataatcatgagtagggaaaaagtcatagaatgacattgatagtgtgataccacaggaatttgtaaagcaataccagttacattttttgatacaaagataaggaaaaacattgaattc

SEQ ID NO: 199740 - DNA, 1000 bp, Homo Sapiens
aagggccaggtaggaaatattgtcagcattagaggccatacggtttctgttacaaccatttaactgctatagtagcctgaaagcagccatagacaacacataaagaaatgaatgttgctgtgttccaaagaaacgttatgtgcaaaaacaggcagctggtaccctgcctacagtttgctgacctctgctctggtaccaagaattacaaagcatagaagaagacgttaaatgccaccatgatgatgcaatcagccaaatccagaatgtgagaaattctacaagacaaatgatttgctttcttcagcagataaatgataagaaaacaaagaaagagggagaactcctatatattaagagagacttaagaatcatattgttaaaattcaatatgtgaatctttgattataaaaagattaccagtgaaaatcaatcataggctgggaattacatgatgttaggaaattgaaaaaaaattttgttgggtgtaataacagtgttaggttatgataaagtcaaaggtcctgtctgtcagccatacatagtggggtacttatagtgaaataattctatttctgagatttgctttaatatagtctagcaaaataaaaaaacaattttttgtgtgtatgttgatggggggaggtaagtactgatgaaataaaaataatggcaaaatgttgacattagttgaaattggttgttgtgcacctgagatttcattatattattttctctgcttttgtatttgacaaattccataatacagagagtaaacaatagcaaaaacaattttaattaaatgaaaatgttgaagatattggcatgccattttctgtcactttgttcacttatgacttaggtactcaccaaatgaaaaacacgtagaatgcttcattccattattacacaactttctcaattgtccctgctgtggttcagtgtctaatctaagcctgtgaaagtaaataatttgtttaagttgattttgcatgaggaattc

SEQ ID NO: 199741 - DNA, 1000 bp, Homo Sapiens
gtcttgaactcctggggtcaagcatctcccatctcccatctcccatctcggcctcccgaagtgctgggattacaggtaggagccactgtgcccagcgaagagcattatattttaatagatttgcctttactattatatcaccaataaactttatttttcataaaattatagtcaagcagtcactaattggaatccttaattaaggactttaaaaaatatttttgttttttttatttcctgccccaaattaacttttaggcaaatggaaacagacttactgtatggggacatttttaaaaagacagcttagtaatatgttcatatgcagcgtgttgcttccctctctgaggttggcacctttcctgttgtgatgtgcaaagtgtggcttcaggtgttctctcagtgggcagatagagggtgtttctgcccttgcctcccttagacatttcctcactttgtccctcatgcaaatgctggtggcttcctctgttgggcaaggtgctgtgctggttttatttatgtgaccctggaggattcaccatgatagagggccctgggcagtgtaccagagaacagatgtttttggaatatgtgaatgatgcctggttgcctctggaaagaggtcacatggaatctggtgtgctccgttgacgttggtactttctatatttgccagtccctctcatatctgtcagtgcttaacgccaaacagcatacatattcagttatatgaatcaaattggaaagattactgaatattcataaaaattcccttgttctgttttcttctattaaaagataattttctatgtacccaaataaaaggcaacctgaaataccagttcatatataaactttgaaggctatagatgaaatggtcaaatgtatacttacgatatttactttgtaagtttagttaaacattcaatttgaaaacctgtgagatgttaaattttttttgcctattctcatatttaattatataattttatttgaattc

SEQ ID NO: 199742 - DNA, 1000 bp, Homo Sapiens
tcttttatttctttgctgatactttctttttacttttctaagacttttaacttttgtttcaagtatgttcattaatggctcattgaaacacttatgatggctgttataaaatctttgtcatataattctaaaatttctggcatcatggtattgacatctattgactgtctttttcattcaattttaaatcttcctggttcttgatgtgacaagtgattttcaacagaaacctgatcgtttctattgaaatgatctttatcttatctgaaccttctgttttagctgacttcttctgacacactgctccagcaaggtggtaaggggtggaagggcatctcatttttgccaggagtaggttccccgctcatcctccatgggcacttgacaggataagggattctttgctactgctaggtgggattagaagttccagcttcccacaaggcctctctactgagacttccctagctgggaggagtaggagtaccttattactattccccacatggcccctgctgacgccatgcaggtggctgagagggtggctttcttactgctaggccttctctatactagtccactgggatgatggaggagcacctcattactgatagtttagggaagaagtccaggcttcccacatggtctccactgacactgtggaagggtgggtctcgttatcacccagtggagattaaagtcccaactctctacttggccttctctggcaccaccccagtaggggagttgggacagttcatcacagctgggtgagggtggacatttaagctcataacttggtctttgttggcataagtggggtggagcagcatttttttcctttggtgcttggctggagtacagaaattattacagttatcgtctaaaagttttctgccttgctaggctgccttttcctggtccactggttaatgagaacaggcttttatttgggctacgtttgtttgtgtccattggtgtttctatgttgctgacttct

SEQ ID NO: 199743 - DNA, 1000 bp, Homo Sapiens
ttattttgagacagcgtctcgctctgtcgccccggctggagtgcagtggcgcaatctcggctcactgcaagctgcacctcccggcttcacgccattctcctgcctcagcctcccaagtagctgggactacaggcacccgccatcacctccagctaattttttgtatttttagtagagacagggtttcaccgtgttagccaggatggtctcgatctcctgacgttgtgatccgcccacctcagccttccaaagtgctgggattacaggcatgagccaccacgcctggctgtccctttgcctttctgaagctgttatgagtattatacatagagcttgtgaggcaggcctgctagacaccttttctgtaatggttaaagaaaaggaaaacaaaaggaaaaggcagaagaggattaaggttgctggtgaccactgtttagggcagagtgactgcttaaattcttaaaaatacaactattggatgatattgccattttgcacattctgtcccctggaagggctctcctacctcttcttccaggagtaaaaccctctgacaaaagctcaaaggtttaggagccttcagggtcctaggagactgtagctttcagggctccgtggtgacacagtgaactctgcatctggctctctccctgttcccttctcccctcctcctgctcttcctccatcagggagtgaacaggcattcctacttagaggattctgcgtggctggaagagaagtggggaggggctgctcaaaacaagccagccaaggagcaaggcagtctgagggaatccagcctctgggaccggctgctgggggagagcgggaatgctgctctgcctgtttctaaaagagacagccaaacaccatttatgacttgtatgatgggcttgtatagtactagaaatattaaatctgcacttctccctcctggaactcaatatacaacccgtggtagtgggactgggtgttaacaaatagaataatctttgtttat

SEQ ID NO: 199744 - DNA, 1000 bp, Homo Sapiens
ttacattttaaactcactaattgttatgtaatcctttagcttaggaattgcgtcactttcaaacttcaggggatcattcataggtttaaaatttcagtggttgataagcttatttttatcctttttttgtgcattatagttttgtaaacttcaacaaaattcacactcagcatttatttttccagaccaaagagccttacattgttttggctgaaggtaggcccttccgttcctttgaaaaagaggtgggtggcatctgtccacttcccagtgctcttaagatttgaatgtttgggttttgagtgctactttcccctcttgatggatatccatggttccaggctgctggtttgggagaagtgttcagcgagtcctgacgtccttgataggctcttggaaactgctactttaagtgaaacagtgtaaagcaggtccatcaaataatgtcgttttcattataatgaaatggtgagaaaataaatggttttgttgtacgttgttgtacttaaagttgcagtttccaagaacccatcgataccgttgaggacttaccatatatattctgcctctggtccagtacataggcatagccttgtgtgctgcagatctttcattcattttgacatgcatttgagcatattatgtgcaagccattgttacgtaggtgccaggaatacagttgactaagcttttgccattatggagctttcattctagtggggagagagatagaataaacaagtaaataagaaagttaattttggttagtgatgtgttatagccaagcagaatgatattgaaaaggctggtagggcactactttaagataaaatggtcagggaaggcctctctgatgaaggtaacatttgagctgagatttgaatgatacagactcagtgatgatagtgacgatttaaacaagttgttccacagggaaataccacccaataacatctttcagaataaaatcgtaaaagttttgagaaaataaatatgaatt

SEQ ID NO: 199745 - DNA, 1000 bp, Homo Sapiens
atcatttaaaaagaaggatgtcaggctgtgagcatgagttaagactgacgcactttcaaacaacatttaaccaggatagttgaatagctggcagcattgggattttgttggtttgccacttctcttaagaaaataaaaacatccccaaatcagttattgattccaataagaattactgggatttaatatgtgcatacattatttttttttctttttttgaggagttttgctcttgttgcccaggttggagtgcaatggcactgtctcagctcactgcaacttccgcctcccggttcaagtgatgctcctgcctcagtttcccaagtagctgggattacaggtgtccaccaccatgcctggctaatttttgtatgtttagtagagatggagtttcaccatgttggccgggctagtctcgaactcctgacctcaggtgacccacccacctcggcctgccaaagtgctgggattacaggcatgagccaccatgcccagcctgtgtatacattttttaatgactaaagatataagtatatcaagttttgcacttaaaaaattaatcagataccttttctgggaatttttaaagcacaagctaatgagtaatgtcttcaaggtaaaaactattttagttttgggaaatctgtattttgtaaagaaaaaatatttgaagggaataaaaggatctacattagatagatagcttgaaatgcatttacagaatgcaaatttaaaaagaacaaaaccatatgggtaaccaaaatagaaatttagctcccttgcagacaaggtcagttaatcagtaaatgactttgtgctataaacaatgctcagtagtaccttttagatcctagtgttgctttacccacacatttccagaggtcactaattcttttctttacttttatatgaatatttttattacgtagaaacagaatcaccaaggacaaataaggtagatacattattttaataggcaatgggtgttaagatagaattc

SEQ ID NO: 199746 - DNA, 1000 bp, Homo Sapiens
agtttgaaaccagcttgggcaaccaagtgagaccttgtctctacaaataataaaaaaaattagctgggcatgttggcacgtgcctgtggtcccagctacattgggaagctgaggcaggaggattgcctgagcccaggaggttaaggctgctgtaatccatgtttgtgcctctgcactccagcctagatgacagagcgagaccctgtctcaaataaatatatatatggttaaaatgtcagttcttctcaaattgatcctgtggattcaacacaatcacagtcaaaatctcagcaggcttttttgtaacagttgacaagctgtttctaaaatttatatagaaatgcaaataaccttgaaaaaaagaaaaaagaacttacactgcctggtttcaaagcttactataaagctatggtaatttaaagtattgtattggcataaagatagctaagtagaccattgtgacagaatagtggccagaaatagttcttcagatacgtggtcagttactttccagtcaaggtgcgaaggcaatttagctagatttttttttaaatggtagtctttctaacagttgattgtagaacaattggatatccattcctccttcaacccaccccccacacacaaagtaactacagtctatacatagtaccatattaaaaaaatagctcaatgtagacctaaatgtaaaactttaaagtatacagcttttagaagaaaacataggagaaaatgttgtttattaggctaacatttcttagacactaaaacacaatctgtggaagaaattgataaattttacttcatcaaaataaaaaacaaagatgaaaaggactctgaaaagtaaataataaggaaacaatccatttttaaagggtggaaatggtctgaacagatactaatccaaagaatgtgtgaatatgacaaatacccattaaggaagtgcaaattaagactacagtgagtgtgttagtcccactggtttgctataatagtgtac

SEQ ID NO: 199747 - DNA, 1000 bp, Homo Sapiens
aaggataagtagcttacataagatgatgtagctgataaagaagagatctttgaacgcttaatttttgattttggagctcccactctgttaaccactgtgttactgaggcctctgggcatccacagttactatctttagatactgttgtgtcactttttcaaagatcctgcctatcaaagatggggaaaggaaataatttcatggtttgctatctaaccaatagaaacagtctccaaatagcaataatcaaataatctgacaaaaggatgtcaccagttagtatttactctagatacagaaatgcaaattgttacagagcttttttcattgtcataaacatgaaaattatagggaagggaaggtagaccataccaatgacttgagtttgctacatgtgcttgtgcttcttttcccttcaaattaggtgtcaagtttagttcatcaattctgattcattgtcatcctatctaactctacccaaccaatttatgtgtgtcataatacttttgtgtatatgtaaattagaaaaaatggtctctatcagtagaatttttgttaaactaggtttaggatcaacaaaaggtgagaaacaacccattgaatgtcaagtatctcccagtgagaatgcatcacttttttatgaatgtcagattggtaatggcaacacaaagactgaaatctacttgttttctctattgatagtctttataacctgtcttctgaaatagcaatgattggaattattcttaggattctgccacttttcaactttgttccattttatatccgttctttatttgtttcatctaattcttgcattccagactgttttattcacaaatgtattactttgcaaaaatcaaggattgttattcaatgtggagattcataatgttcttcaaccttttgttttgtttgacttccttacttcactcaaatattctaaccagcaatatcctaggaatttttatgctaggtatttagacatagaatagaattc

SEQ ID NO: 199748 - DNA, 1000 bp, Homo Sapiens
ggttctctttaaaaagtacactgtgaaaacaagcatggggtaagaatatataattgtaactagccaaatggatatataaatatagatcaactgctagataaattgacaggaagatttgttatatactatgggtggataatgaagctttattgataatttgtgtgtgtgtgtgtgtgtgtgtgtgtatatatatatattttttgtttgtttgtttgtttgtttttgagacagggtctcactttgtcacttaggctggagtgcagcagcatgatcatggttcattgaagcttcatcctgccaggctcaagcgattctcctacctcagcctcccaagtagctgggactacaggtgcacaacactgcactggactaatttttgtattttttgtagagatggggtctcaccatattgcccaagttggcctcaaactcctgagctcaagtgatcctcccaccccagcctcccaaagtgccagaattactggcatgagccaccatgccagacctaatttttataattttaaagtgtatcaagaaactcagtttgtcataggatgctaattgcagtttcatcatatctttaaagttataaacataagatatttaccacatagtgtattgaccatagacaggggtaagtaatgggcagatctgagttcaaatccaagctctgctacctactggttatgtaaacttatcaagtagcgtaactcatatgagcttcagtttcctcatttgtaaaatgggcatttagaatatattttctcaaaatatgcttggaaatattaattataacaatgtatacaatggctgggcacagtgggtcacacctgtaatcccaacactttgggaggccgaggtgggtgcatcatgaggtcaggaattcaagaccagcctggccaatatggtgaaaccctgtctctactaaaaatacaaaaactagctgggcatggtggcgcacgcctgtagtcccagctacttgggaggctgaggcagaatt

SEQ ID NO: 199749 - DNA, 1000 bp, Homo Sapiens
ttcttaccatgtcatggattcctggtgcaagccctatgcccctgtccaacagccccagctccctccctcccttaaagagagtattcaggatgcccagctagggaggaactacctcctttcccaagaatttgggctccttcggccttctgtgctgtgccctgacctgttcgtgtctccaccagacatcagccctaaacacagctcacacttcaggaaaaatgtgtgtgcacccacgtgccaccatgcctgtctctccattccccagggctaagccccagagagtaagggacaaacgtggggtggagggctttctgtgatgcgagggcagaaacctggatccttacactaaggcgtctgtgtgcatcgcccctttatcacgggactgagtctcacaccaagacgtctgcctcaccccttcatcacagaacccagtctcccccttccccttatagaagctgtgactctgggcaagggtgtgtacttttttcctgcctgggcccatcctgcttggtatcagcaatgagttagttgcaacttgaaacccccttccctgtacaagagacacagagagagagagagaaagagagaaggggcagcttctctccatgagcaccttcattctttgatgagaatatcgcagctcacccataccggggtgcagggtgagagtgaggaaaagaggaaaggaaggggactcccaaagaaggggtgagatgcaagacctggacgagagagatatccaccgctgcgctggagagagggggccgggaaaagcagagaggtgggagaggtgatggaaaggcgcgcagtcggggacgcctgctctcccccgaccctccccatctgcaaagggaggccccccgcccagtgccgcagcccctccccgcgcgctcgcccccgcgcctccctcccgcgcccccgcgccccccgccgccagtggacggctgcgcgctgctgcccgcggggctggcgtttccacctgtcaccgcgccgcctccgc

SEQ ID NO: 199750 - DNA, 1000 bp, Homo Sapiens
attttttcaagtaaaataatagaatcacaaatagtccccaaaaacctgattaggtgaaaacattgtagagatgaaaaatatttggaaatgaagacacggaagctactgtaaatacagaatttgcatgacttccagggactccagctcctcaaattgtaattgtctctcagatttctgtttacagagctctggggaaataaatgtggagaaagtactcctttccctggattgttatcttatctttatctaaatgtatctaagtgtcagcaatttcattccccgatgctgacttcaactatgttgcccattttctttgaaaaaaaaaattaaaaggattcagcaatctttgtgtggggatatatatccaaaagaactgaaatcaggatctcaaagagatatttgcacacccgtgttcattgcagaactattcacaatagccaagaagtagaagcaaccctaatgttcaatgacagatgaatggataaataaaacatagcctatctattcaatggactagtattcagccttaaagagaaaagaaattctatcacatgctacaacttgaatgcccatgggaggggttggccatttctaggagctgttaggaatgttagttgtgcagaatcttgctgcctttagctcagcaaaacacgcagagcttctccccttttggtggtttcctcctagccaggccctgatattgtggctggattgggccagtgctcctgcctgtcactatgctataaaaatctgatctctgtggcctggcagaaagcttctaaaacccttggcatttcctgagtgatagaggagtgtcttttgttattcataaggaccccctttccagcgtacctgagtttatgccaatgagtggtgaggggacccctagatagcctcagagtgaggaccggtcaccagcaagggcaaacctgtgattagagaatgggaactttcagctccatcccctgaccatagggaagtgaagctgggcactgaattc

SEQ ID NO: 199751 - DNA, 1000 bp, Homo Sapiens
aattgaatttaattaatttccaattgagcaacatatagattaacaaagttttcagtactaaaaataatgctgtaaagtatatctgtttatacaaaataattctgtacttctgattattacctatgcataaatttctataagtggaatgacgacattaaaaggcataaataatcataaggctttcgatacagaccaattaatattttaatttaccaatatatattcccacagccagcttccaactttgaagattggaaaagtaaaaacttgcatttcatttttttctcatttaattttcccttattactaatgaacttatgtgtttggtgaaattaacattgggcatttgtatttctgctgttgtgaattacctgcttaattcttttgaccacttttctcttgggggtatctctttctaaatgatttaagtgacttctctctctctctctctctctctctctctctgtatatatataatctccttacagatactatgtctcataatgaatttgttataagttgtggaactcaaaagaccatcagttattaccattctgcccaattctcacatcagtgagatgtataaatataatgttatactaaaattctggtgtgtttttacctggttctaatatctaaccttgagatttggttattagagtctaattattaagactcaatttcctcattgatgcacataaaaacttaaccattaattatgcaaaagtattcttatcctacatttaaaaatcaaggcaagaaaataaaatggccaggcgcggtggctcacatctgtaatcccagcactttgaaaggccgaggtggacggatcacaaagtcaggagtttgagatcaacctggccagtatggtgaaatcccatctctactttaaaaagatacaatctcaccactcctattcaacatagtgttggaagttctggccagggcaatcaggcaggagaaagaaataaagggtattcaattaagaaaagaggaattc

SEQ ID NO: 199752 - DNA, 1000 bp, Homo Sapiens
actctgtcacccaggctggagtgcagtgacatgatcatggctcactgcagcctcaaccttttgagttcaagcaatcctcccacctcagcttcctgagtagctgggaccgcaggtgcacatcaccatgcctagcttatttatttatttttttgagacagagtctcgctctgttgcccaggctggagtacaggggggtggtcttgggtcactgcaacctctgcctcatgggttcaagcgattctcctgcctcagcctcccaagtagctgggattacaggcacctgccaccatgcccagctagtttttctatttttagtagacacggggtttcaccatgttggccaggctggtctcaaactcctgacctcaagtgatctgcccatcttagcctcccaaagtactgggattacaggtgtgaaccaccatggctggctaattttttaattttttgtagacctcggtctcactatgttgcccaggctgatcttgaacttctggcctcaagcgatcatcctgccttggcctcccaaagtgctgagattacaggtgtgagccaccatgcctggcctccacaaatttctgatggcaatttcagggaaaaaggacttaaatctagtgattgttgttacatcttaataaggtttaaaatacaaaaaaaaaaaaatcttaatgaggcttaatatttatacaggtaaggatgtacatattatctagacaaaatgccatttatatatagagaaaatattatttccaaaaaattattgggacttaagtaattattgattactttaggtatcaaacactcagacttttaatcccatccccctactcccacccaaccctgccaaaaaaaaaaagtggaaggaaggaagaaagggaggaagaaaagaaaaatgtagtacatgtttctagctattagcatcacagccagtaactccatctactggaaggcttaagaggaagaggcaactctggagtcaggcagaacttggtctgaattc

SEQ ID NO: 199753 - DNA, 1000 bp, Homo Sapiens
tacaatactcaatatctaggtattatctaatctctgcctcaaggtagaatctcagttttccagccagtctggaccttagctcctgatgtatcttacattgtgatagagtggggagttctgggggatagataaacaaggggtctgcccataacccacagctgactcatttactgttccagtaagagaagagggtcttcttagcacacacccaccccactcccccagcctcgtttttaaaatcatggtttacttaaattggcaaaattttgtcccaccgaagggtttctgacaacagatatgacttcttatccttatctttttctagggtagaaatggtggactctcagtgaaatgcatatgcaactttctctctttaacccttttatagagacacacatgtctaaaagaggaaggagcaaacagagtagcaaactttttctataaaggccagaaagtacatattataggctatatagtttctgttgcaacctttcaactctcagctctcatagtgcaaaagcagccatagataatgcatgaaagcatagctttgttccaacaaaactttataaaagcaagtctcaggctagatttggcttgcaggctgtagtttgccaaccccttagaaagcaaacaagctggattttaaatatttatttagggggcaggggtggcgatcatttaatatataggagttgctcatttttctttagtacagctatgcagcccttgtttcagaaaggggtgcagtaaactcacttcaccttgattaagaataatggtgacattctttcaatgttacttgttccagtgagcacataaatccagaccctgaggttcagaaactaaggctgtctccaagacctcatgactgcagcacacaaaaagattgatgctgtaaatatattgccaaaaaacaagcatttcactttgaaaggtgttcagatattactttagcaagaatttttggcagaaaattcacttgaagttgctagaattc

SEQ ID NO: 199754 - DNA, 1000 bp, Homo Sapiens
cataactccatatcccaagcagggccaggtgcttctgggtgtgatctcggccaccaagcacctggtgtgtccctggaaccatgttgggctgttcatgcatgatatcaaatgttaaccctgtcctgaagttcaaggccgcggtgagctatgatcgcaccactgcactccagcctgggtgagagagtgacagccctcctcacacacacacaaaaacccgctcctgtatgtcgagtcctggctaggtgcctgtctatgcatttgttcctttgttaagcacccactgcatgcaggcccaatgctcagtcccttcacactgagtttctcattcactgagcacctgttttacaccaagcactgtgctgggcactttcacacaaattgcctcacttactccacgcgcatctttccatttctcaggaagagaaacttaatatttactcagtccccgccaagagccgagccctgtgccaaggtgtatttcccaagaaacacacataagactgagaaggcccagagagaacaggcctcaggcccaggccggggcagcaggtgagagaggccataagggaacagaggggctggaggtgaaaggttgaatgaaaacccactttggatacaaaaggatttctgcttccatttgtttctggaacattcagtagctattttagagccaactcatcatctcgtttgccaatttccttctttcctaagaagccaggcactatgtttacaattttacatctgtgctccctccccagttcctgctcagagacacacaggtcagagtttgggcaaaggcctgcctgcattttcttattttcccagactgaaaaggggcagaaggcgggctgggggaactgggcttgtaacagccaggaaccagccgcggctctccccagggatgcacggctgtcagagcagcaaacggggggcacggcaggaaagcagtggggacaggggtctcgtccaggtctccctagtggaggtcaaggctgaattc

SEQ ID NO: 199755 - DNA, 1000 bp, Homo Sapiens
aggtgacatttttgtcaggcttccaggggaagaggatttctatgccaagaagacagcaaagacaagaacacaaaggtatgaaattctatacaaggtagcttgctcatcaaagaaacactggtgttgggaatggcattctaaggtttatcattcctatttctcaaaactgaaattcagatcacttacattttgtcccttctgctgcatatgttttccttttggtcctaaaccttgatgcagagaaaatatctctcataaaaaggcaagggctacctctagattttaacatcatggtgtggtggaggtacccatagaaatacccgggagactatgaagtttacatctatataacgacaaatgacataacggtgcagaaatgaatcaagagaaatctaaagacacttagaaggcatcacaaggccatctgaaatcaggttaaaaataagccacagtttctcttgtgatttctgaaacattctttgtttaatcatataattattttcatcttccagtcatcataaataatccactttatgacttaaccaatccttttgaaaaaatttggtatttagcacaaacactgaacattagctagaggtgtgttaatttttaacagaatagggaaaaattttaaaaaacccacaaaaattttaatactaagaaaaaacatgaaaataccaacattattacccattaaaaaatctaattttgtaacaaccattaaaaaaaatccaggtggaaaaatgagtaaacataaatataatctaatgtatttctttcataaatacatttagacaaaacaaatgcataaaacagatagctttacagtgtataaacataacaaaatattttaagctctgaataattaaatcccaataagcatgaattaaaaataaattttgattttattttttgttctttatgaaaaaatatgccaaggaatttgtgtaaaaaaaagaaataggcataaacatatcactaacgccaccaaagttcacta

SEQ ID NO: 199756 - DNA, 1000 bp, Homo Sapiens
acagagaataaaagagaatgtagttttactgtgacttataatgtggacagtataatcttgatgactgtcattaacacatcttacatatatttaaatataattacttcaataaaatttcatcaactagaatacactaacaaatcatatctgggttatttacttttctttctgtttttagtgaaataatttttaaattcagagaacttaatagtgttttatttcctcatttacaatttgaccaaaaataaaaatcaatgttcatttttttaaaaaaaaaaagcattttcataagtatgtagaatgattaagtatataagaactaaaaatgtagcacccacatagatgtttcaaagttagaatttagaggataagactatataccagtaaacacgtggtcctttgttttccaaaaagtataaatcctccagaaatgctttcttttcttaagtcaataatctgattattttttgaaagcttctaaaatatttcctggaaaataagatcatgtattctaaaatttgtttactctttagtaaagattattgagatacaatatattatttttacagataataaaataatagataccttttaagtctcgttaacatgataaagtaacaaatgcactgacgttaactcagtaaatacatttttaagtaaagatcagcaaaaaataaaacagtttaagaattttgtattctctggaaacataaacaggattataactgtcagattacagaagcactgacttcagccattagtttggtttggctcctgagaaacacaacatgaactactgcatcatttcttttcaaatccatacattccctgcagccgttcaagcttcatcagcagtgcaggaatgtataaaaatgacaggcaaagggcattaggtttttttacttccatactgttttcctataaatggaagacaggattctttctcaaagcacttaagctcaagctcagtcaatgctgaaggaaaaatacaactgaattc

SEQ ID NO: 199757 - DNA, 1000 bp, Homo Sapiens
gtgaaggtgtagctggaagccttgggtagaccttcactaaggccccaggtttcctcacctcagccccagactgcacttgctggacctgggactgggcacctgtggagaggacagaggagtgaatgagaccccacttaactggacccagtcccgtcatcagccatggaacttagaattctcttacctgtagctgctgccaccaagaggaggatcctccaggtccagtccatggtgatgtgctgtgctctggggacttctacaggggagagatgtggttgttgtgtgatgctctctgggcaaggacagatctgtatttacctcggtaaacaccagtgcatttgcatattcatgaggcagctacctatttcgtagctcaagccccccaacctgaggaagaagttaggtgacacacggaccacgccacagtgggatgctgagctccatgccctgtactttgtttaatgatatttgtcctctgacatgctcagaagtccatgaagacagaactcgtctcacagaaaaccacaatctcccaggacattgtcctcaatgtgattccttgttcctatggaactctgacaacctgaacatttcctgggccttcacctctgcaccttaacttctaggatgagtgtatctcccagtagtaacacccattgaattaataaaaccaccactcaattcctaactataaatacatttgaaaagactagacatttctccatttaaatatggtttgcattaaattattgggttaggtatcggctccatatacaataaaatacttaacggtacatcagtacttgctaaattcttatttaaattttaggtcattattgctttgaaataagaaacattcaattcctgagagaaaaccccaccctgtcctcctgtgcacctgctccagggctgaatcctgtgctgggtgcgccctgaggacccccctgaagctcagctcctgccctgcatagaagttcctgtctgggctcacagagaattc

SEQ ID NO: 199758 - DNA, 1000 bp, Homo Sapiens
ctgtctgcaacatccctcctctccttaggaatgttgaccagactctacaaaacccaaacagttcctgtaagcaaagagtaaacagattaagaaaacaaccagacggcttaacacaccatcagtgacttcccccgccccttccattccctcttcatgatataaaagactagataggcatgtactataagcactgaaatctaccttgtcttgctgctgcccaaggctgccttataaatttcccctggataaatctttgactacctgccaacccggaatcatctgccttttttttttggtctgatggcaaatcagtaatttgcctccacttgtagagggcaattctcagtcctggcagggagttttcccaacaaaagcaaagttacaataacactagcttttggcctaatcattggtttttgttaatgtattggtctcaagtcatgttgtaaacaaaaagtggagttacataccattgttacaataatactagcctttataatttcccatgtatttacctttacttatctttatttctttatacaagttcagttactgtctagtgtcctttcaacttgcaggacttcatttagcatttcttgtagggcaggtctagtggtaatgaactccctcaacttttgtttatctggaaagtcttatcttctacttcaatttcgaaggacagtttttgccaggtatgggattcttttattttttttttgacacagagtttcgtactgttgcccaggctggggggcagtggcgcaatcttagctcactgcaagctccgcctcctggattcatgccattctcctggagtagctgggactacaggcacccactaccacgcacagctaattttttgtatttttagtagagatggggtttcactgtgttaaccatgatggtttggatctcctgacctcgtgatccgcccgcctcggcctcccaaagtgctgggattacaggcgtgagccactgtgcctggccagatatggaattc

SEQ ID NO: 199759 - DNA, 1000 bp, Homo Sapiens
ttcaaatattaaatactagattacagatattagaatcttgtaatgcatctggtttaatacctgtcattttgtagaacggttaaatgtcttcccaaggtcatacacctaatcagtggtatattcaaaacccaaatcctaggcttcctatctgaagtccattgcttatgaagtggtttgctatgtgttctgactttgttgattcaaataagtaagctaaatcaatttaagccattaataggtttataaagttatttgctatgtgttgttcttacatcattgattcatgtaagtagacttgtgtgacagctaattcttaaaaaattatgaagatgttagacttcttttgatatatatatgttgattgtatgaacagattgacatcaatatacttattcattataaaagatttgagtgggaactcaccaaatcccacaccaaaaaaatttaaaattttaccatagtaaaaaaaactaaaaagcaagatgaaattatacatagttcttggtgtagtatttttaatttttattatttatttttatagaaatggggtctcaccattttgccaggctgttctcaaactcctggcctcaggtgatccgcctgcctcgacctcccaaagagccaggattataggcatgagctaccatgcccggctagtgtagtatttttaaattttacttaatgctgagccattttcaaataacctcatcacattgattatgacctcatgcaagaaccatctgttctatctttcagtgtagttgtactttaatatcttagaagctattgcattctgtccttttttggaatgttttatgcttttacagtcttaaccattgcttcttaatatcacttccgcggaacagctggtgcaaagaacatgtgataaggaatggaaaacaattgatgatggaaacagagatttggagttaattgcgttcttaaaatattatgatgttctttctaataaaatgtacatttcacataattttcctctttc

SEQ ID NO: 199760 - DNA, 1000 bp, Homo Sapiens
aaagggaagcactttgtctcttttcccaacacacacccggcccaggaagctgaagccctggagctccatggagggctgagggatctctgccaggtagggaagggaacactcgccctcaggacaacttgctggtcaccaccagctcagaggcccccagtccatgtcctgagacccgatcgcattcctcccacaagcttcccctccagtgcccaggccatgcatggtttcagagggagcagcccacagcctcccctgacccagctggcccaggccctccctgctagagtcacagaggaaccccctgcagccccagcccctctggcctggtcagtcctgggtcctgcctgctgggtcaatgcagcttacagccaccaaggaagggctttgagaaaccatgtagccctcatacattttaaacctgacatctaaaagttttcatcacaatgttaattgcttgcaaaggacgtcgtttctgcacattgtgaatatgggcacctttaaagttaactgttacatcattcctttgagggcatccagtgggatatcgaggccaaagcaagaccctcaacatttgcctacaaaacccccaacagagctctgggaacaaactggctggaagcaccagagtggctggaacgcctacattccagggtttacttgtctccatttctccaaagagatgttagctcttctgatatggtgagacgtcaaccgagcagcttagattccagatgccggagctgccgggattcgaatcccagctctacccgcgtagtgtgctgtgtgtccctgggcaagttccttaacctctctgggcctccttgtcctcatctagcacacagaacctacttcagaggggtacacggcagcacagatgagcatcccgtgagccagtgcgatgtgagacctgagtcctgcctggctcagtgtcgaggccctggctgctgctctaatggctgctcctaagaggcccaaggccagagatgctgattctgaattc

SEQ ID NO: 199761 - DNA, 1000 bp, Homo Sapiens
accatatcaggtgttcttcaaaattaaaaggagcatttgatgagggagatggactttaaaacatggcttttgagagcatcccacaagaagcagtcccaggatttaagccctcattgctacagctccgtttaacattatgtgggttttccttccaacggcttggttctgcctgctcccatggagatagagaaggggacttgcttggaagttcaaacaccgcctccctgtctgacgtttagctgtagaaacaaattgttatgtgtgaaattaatgtttcattgaaaccaagaggtattgcgtttttatggatctagagtgggctgtgcacacacagctctgggttttgcatctccggagctgcccttggaggcagcggtgctatttgaaggtggataaatattacagagtgtggctctcagcctctggggttgcggtttcatgttattcctatggggaatgtgctgtgccccgtcctgttcttaatgtttctgggaaatcgtgggcttattgtgcttattttaagcacagctcacctgggctccttcccacaaggcacttgatcctcaactttgaagctgaatgtatcatttgacttgaacgtgagcttcctgcagcctggtccagtttgttcacctctgtcattgttccccgagaagatcagcacctccctcccctgccctcccttcccctcccctcccccttccctctccctcccctccctctgcccattttccaaatctgctctgtgctgcgcctacatggttagtggtatccaaggcagttgaatgcagaggtgattctgagcagactacccacactctctgttctgcaatcttgatgaacccgatatttgtgtatattttatacccagagagctagagctacacatcagaagagcttctgaaacttgtttctctgagttaagaggtcaagaactaatggtatgtggcagcttctactatactacccatggcctctccccaagtttgcgtgagaattc

SEQ ID NO: 199762 - DNA, 1000 bp, Homo Sapiens
tatattctatccttgctacatccaatatgcagcccagacagtataataatttttgaaaacttctggtattagtagggaagagtgttccgaagaatgcaacagtgcactttcaggagaatggaaaggcacaggagacccgagtatcttcctggatctttgtcttggtagttgcatgagtcattccatcttttgacctcagtatcctaatcaataaaatggcaatagtagctttgccataactatctcatggggttgccattaagagcaaataaggttatatataaaagcgcattcttaaataattattcatagtgtcctctgttaataaacacatatataatgtacacaaggcaaacaattattggagatttaaagactcgaaggagatagtttccttatgtcctactctcaaaagtgggcagtctaccatgacccctctcattcccagagtccgtgaaatgtgggtgagagaatcaggtcagatacactgtactcaaaacctactaatttaaatattcaagtttgacactcaagtgttcaattaattattactggtgtttgagtggctgtttatgagtctgcatttgaatagaaaacagtaggaagaatgcataggagaatgaaattgattacgaaacggaagttgctgctgttctttttccatttgttgactgcaattagaaattatcttcattcttatatggcttggttgccttgtgacagcaccaattgttcccatttctttttattaataaatactatcgctttgagtctccctaagttgtatgtttagcttcttttctttcaaattctttctcaagccctttttttccctttatgtgttcttaggctaaaagcatcctttagcttgagatcctatctgtgtaggttacacgatgttcatctaagatttttggccatgatcattatcagttacaaattgtccaataaatgtcacagagttgatctgatccagttgtcaaaagcctaaagtaacaac

SEQ ID NO: 199763 - DNA, 1000 bp, Homo Sapiens
gtgcttaagcagagacattctttagagtaacaactgttcttatcttagggataattactcatttgtggacactgagttttctttaggttatttcagtcattgtggcccacctttagtatgaaataacattcttaagctttagtatccctaaactttattattgcgtatgatatggcagtaaggtagaatgtcatttactgtttctattagtatttctatgtaaattcgtagctacctgcaattctttataaaacaaattaaataaatattgatagtcatctctaagacagaggtcttacttatattagcagctgattgtcctccataatgggtgcatgaagaagatgctactttccagtcttgctaacacttctttggggcattagcagaagatttcgttttacattctgcacagcagagcatcttttccctggtggtttattgttagctttccagtgatcacacttaggctctggtctcatcctcgttaaggaggttgcatatttggggggattagaggaagtttctgaaagtaagataatgggacaggaaaagattttctggtataaaaagctcctgaaggctctgaggatatggtagaaggaaaagatggaagaagggagccagattttcctggtttggttattcgtttaaggtgagtatgatctgtttataaaaataggcaacttaatgcttaatggacttgggtttttaatatttatagcatgttatataaatgctgtccctccaagtgctttcttaaatcctcttagcttataaatgacagctttgatttctaaaaagaaatgaaatattttcatttatccagcctaacagtagtaaacaatagatacttaatgccctcctttcatgttagccctcaaagactgagacttgtagtctaaggagttgattgctgtgctttcaagcttactaaggtcatgtgtaacttaaggggggaaaagctgatgctacattattggtgcaaaggctggaattc

SEQ ID NO: 199764 - DNA, 1000 bp, Homo Sapiens
catctcggttcactgcaacctctgcctcctgggttcaaatgattctcctgcctcagcctcttgagtagctgggattacaggcacatgccatcacacctggctaatttttatatttttagtagagatgggatttcaccatgttggccaggcttgtcttgaactcctgacctcaggtgatctgccttccttggcctcccaaagtgctgggattataggcattagctaccgtgcctggcccatcttattattgttattatcttttttagggacagagtctcactcattctcccactctggagggcagtggtgtgtccatacctcattgtaacctcaaacttataggctcaagtgatcctcctacctcagccttcggagtagctggggctacaggcaggcaccaccaccttggcctcccaaagtgctgggatatcttatttatatttatatttttccacctcaattttcttatattttaatattttatgtttaccattgtatctttgtaagctacttcaaaatcattttatattgagtatgacgtaacaataaattagtaatcacaattacaaatttgttactccataacttttggtccaaattacgttgacagccttttcttatttttctttctaccaaccctttggtagagtcatattggtcaatgtcataacccttgtaaggtaggggcacttaagacaatttttaaagaaatgctgttttcctcacattgccttcttttttttttatcattatatcccaagcataatatgctacacataatagatgcataatacatttcttgaatgggtatgtaaaaatttatatcacatccatttacatctcttcatgcttgctgttaaattcaaacctggaatgagctttctttatccttttgatttgtccagtaaagagacccagatcaagtgtcaccctccacttgaagactttcttgacctttgttccagacagggggctcccttctccaagaactacggaattc

SEQ ID NO: 199765 - DNA, 1000 bp, Homo Sapiens
aatgcatttctgattattttccttccacttatataaaatagaaaagacaggatgtaaatcctgaagaacataacagttaccacatcttaagaaatctatcaagcttcactaggggaatacaaggcgaagagagaggtggggagcaagagctgaaaaactacctattgggtactatgctcactactgggtgacgggttcagtcacactccaaacctcaacatcatgcaatatacctttgtaattagacccacgcatgtactaactgaatctaaaataaaagttgacaaaaggccaagcgaggtggctcacacttgtcatcccagcactctgggaggccatggtgggtggatcacttgaggccgggagttcgagaccagcctgtccaacatggtaaaaccccatctctattaaagtacaaaaattagcaaggtatggtagcacacacctgtaatcccagctactcgggaggctggggcacaagaatcgcttgaacccaagaggcggaggttgcagtgagccaagatcaggacactgcacttcagcctgggcaagagagcgaagctctgtctcaaaaaataaataaaaataaaataaagttttttaaaaaagtaatcaagctagataagtaaaactgggagaaaaaggtacatttcgaataagcaaaaatccattaagatttactgaaaaatcattctatgcaaatgaatttgaatacctcttattaaaaggaacaccatgggcaaactttaaaagcaataggaaactagacctcagaaaataaaatataacaactcattactacaatccttccaaaattagtataaggattcttcaaagttctgaccctaagtatagataaagaattcatatacttgatatatattaccaattagttctttaattagtctagctctaatctacaacattagcaggtggttctatagataaactttagaatttttaaatttagttttaaacacttttagaacttttagaattc

SEQ ID NO: 199766 - DNA, 1000 bp, Homo Sapiens
agccatcatcctcagcaaaccaacacaggaacaaaaaaccaaacaccacatggttctcaatcataagtggaagttgaacaatgagaacacatagacacaaagaggggaacaacacacaccagggcctgatgggggatgggggtgaggggagggaacttagaggacgggtcaataagtgcagcaaaccaccacggcccatgtatacctatgtaataaacctgcacattttgcacatgtgtcccatttatttttagaataaagaaaaacaaaaattaaaaaaaaccatattttttacaatttgtggtaactgccacaaatgccacatgtctagttctccaccaggttttttactcctttatacaatgtttgaattccaaacaatggtccttttactttatttatttatttatttttaattttattttctgttttattggtacacaagagatgtacttctacttattttagatttcttccatatcttgattaatgcaactcaattaggctttaaatccagtggtatgctggcaaatagctaacaaccagctctccaggaaaagtaaaaaaagaaagagaagtcttggtatgtacctttggtcaattttgatgatgtaaatactctcagcatggccaatttcaagtaccaacttggctttaccgaatataaaattaggaagaaatgtacataatcacaagtctgctccagtacataacagcaagtgaccccaaagacataaaacattgttgttttaataattaaattacaaaaatctagcaggggtaaaagtattctacaattccaagacagcttgtctcttaaattgctttcactttgttactgaaaagtagaagtccatgagtgtttttataaacccaaaataactccctgctagtttttttttttttttttaatgacagtctcatgatctgtgtaattaccacagaatcttataagccatttggattttcatgacacaaacatactgaaagtttggaattc

SEQ ID NO: 199767 - DNA, 1000 bp, Homo Sapiens
actatatataaaattatagttttataatttctgtttttaaatacttgttttatattattacttttctttacatctggaatttcaacaagaagttgcaagttgccactgtgtttgtgtgtcttaaatagtgagacttcgtttttgtgaatgtattaaataaattttggctttaggatcaggaccctgtgctcaaaccctggctcttccatgatgtagctttgtgactttgggtaagttactcaacctctctgagcttcagtgtcctcttctgcaaaacagaaaaaaaaattggaaatatctgtttctgactggtgtcaaaaagttaaaggagataaacgtgtaacacattcccctgatgcatagcatgaagagtcaatgagtattatggacttgtgaataaatatttatgtgtgacataccttatgtgttttttattacatagtcaatcacctattctatgtcatataatacatactgtaggttccagatgaacccctccctgtctctattgtgtagaaacaaccctatttctccccttgataattaagataaatcactccagtgtttttgtggtggcaaaagtagtccaaaatggccaggtcacagtctcggcttccagttcaatggaaccattgttttgtctagttatacaagcattaatcctttaggaaacaagatcttcatatgagcagaacctaatgtttcagatacagaaagcacaaagtgttcagattatttattcatttctacttcaacccttttttcctgaacctgacttacctctgggagaatcagccatagatagcagaactggttcacggcatgcattgcctcttgtaggcgagcaccctgccctgatcaatgcagccattgaatcttcaataagacattcaattgcaatattaggcacgttgctttgcagtaaggagattcatgatacaaccatgaatctcatggggtcaggccagtgcatccctgatttcttctgtaaaaggaattc

SEQ ID NO: 199768 - DNA, 1000 bp, Homo Sapiens
ccattgcgcccagcctatacttcaattttaaaagtttattaataaaagatgaatcactatggaaaacagcgaggtagttactaaaaatgttaagcatagagttactatatgacccagcaattctactcctaggtacatacccaagagaacggaaaacatagttaacacaaaaatgtgcacacaaatgttcacaatagcattattcataagagccaaaaagtagagacaacccaaaagtccaccaacagatgaatggataaacaaaatgtggtatatctgtacaatggtatattgttctaccataagaaggaataaagtactgatattcgctttaatacatgaaccttgagaacataatgctaagtgaaagaagccagacacgaaagaccacatactgtatgattccgtttgtatgaaatatgctgaataggcaaatccataaagacagagagtagtgatttccaggggataggagacagggtgaatggagaatgactgcaaataggtatggcatttatttttggggtgatgaaaatgttctggaattagacagtagttatggttgcataaccttgtgaatacactaaaaccactgaattgtatatacttttggtatatacttttcggtatatttcatggtatgtggattatagctctaattttaaaaacaagttttaaaatagataaagtctctattctccccatcttttttgcctattctccactctatttcctcttttaggaatagatgcttaggctcccaaaaggcttggacaacttttaaagaactttaaggcagtcagtggagcagatacctaccagtggctgagagactggaggtggcatggaatgttgaaagaccacaggatctagagtcagacagacctggttttgaaaataagtccaccacttacatgtttgttttatgatcttgatcttggccaagtgacttaattttttgagcctcaattttctctccatgaaatgagtaaaggaattc

SEQ ID NO: 199769 - DNA, 1000 bp, Homo Sapiens
acctctttaggaggctgacgtgtgagggtcacttgaaaccaggaatttcagaccagctgggcaacaaagggagacctcatctctaaaaaaaattgttttaaataaattagctgagtgtggtggcacacgcctgtggtcccagctactcgggagggtgaggttggggatggcttgagcccaggaggtcgaggctacagtgagctgttattgcaccactacattccagcctggtgatgaaacaggaattaaaagaaattaaagaacgtgtaagcgaaaactcagttgtatgtaaaaaaacccaattccccctgagaaagaaaaagaggtggagtcctttaaaaattaacgcctgtttttctgtctgtggcttgtgagtcttatctctctctttcccaggcattgcgaagatcctgtttctctaactgtgcagttgcaaggttactaggcagataaactcaagtcgtaaaacatgtttttccttgaaaagttagaaataatgtaatgagtgtctcaattgaataacggtctttgtttctcacttctgtaatatgcttccccctgcaaagatctcccgctgccccatgaaatgcttaaaaggtaacctcactctttgttcggggctcagtctttttggatgctaatctgactaggccagtgcacctaaataataaataatatatatcctctccggcccctcagtctctctgattcctaaattatcccactgcagtgacacagtgagatcctaagaaaacaaacaataaatttaatgtaattttgtagtaattcaccggttaatgtttgcttactttcttttttctatataatctatgttataatcagaggtttacctttccaaagactaatggtagttgtcttctaatttttttcaagtttccccattaaactcatccttagggcttgtaaactcctattgtccttcccagcaaagtctaagttgaagaacgtagagcttataatattctgtatctacaaaaga

SEQ ID NO: 199770 - DNA, 1000 bp, Homo Sapiens
gcatgaatgtagctgagaagagaattcatatgttataagaatcagtcaaggaagtctcagaatacagagttaaagctaacaaataatcaacaagaagggatgcaaaatatgaggaaggcttaattgactttgtggctagattagaaaatttcagtattcacttaagggtgatccagaaggcttgaactaggctggatatgaaaggaggaaataattcttaagacttaaataagacctaagtatttgatttaaaatgacgtgctaagagccacacaacataaataaggatatattcccttaaacatttttaagacatttcaaaacaataatgacaaaaggagaatttgaaatgcttttgaggagcctaaaaaatacaggctcaacaaccaacgtttttttctttattgggaacacttgaccctaaaagacaatagggtatctttttcaaattcctcattaaaaattttgatcctagaaatccatccctaactgttcgctagagattctctcaattcagcagaaatataactctagtggtttaaaaagagttttcacttaacaagatgtttcatattaaggcaacccagagctgatgcaacaatttctcaatgccattaatatccagtaagctccttctatccaaggatcactatcctttggatgtgatttttaccttcacaaggcatctaatggccatgggatgactggccattctttcacatctgcattccaagaaggaggaagaggaaaataatgggacagcagttgtgcctatattggaaactatattcaatactgtggctatactgaaaggcaaactttcctaaacatgcccagatctgcacctacaactgtctgtgaccagacccatgttatatgcccacattttcaaaaaaggcggggaaacctagcttttagtaagatgcatttctaccatcaactaagatggagttacaatcacaaggaaaactgtctgagaatgggtattgaataggaattc

SEQ ID NO: 199771 - DNA, 1000 bp, Homo Sapiens
agtgatctcactcttagcctccaagtcattgttcatctctaaaacgttgcctagtcctgtagtcctttatgactcaccaattaatcttagaacacttatttgcactagtctcccacattaagcccatgttgtaacgaaagtatcagtaattttaaaaactcatttgtttttctcacttctctgcctttgacttcatcgagcttccttttattaccacctatcaggattctgttggttacaacccagctcattagccacgtcctccatgaactccattttcccaaccagatgtttcttctctctccagtgaactgtagttctctttaccacacatacactcttgcactgtcacgttcacatacgtcttgcggcaaaacaaggttacaaactcttttaggttataagtgatgtgttaggcatgttactttctcctgtgctctgagtgactgaattagtttgctagggctaccatgacaaaatacaacaggctgagtggcttaaacaacagacatttattttctcacacttctagagactggaagtccaacaccaaggtgatggcagattttatgtttcctgccgtctgttctctctgctcggcttgcagatggccaacttcttactgtgccctcatatggcttttcctctgtgcacaaacatccttgtctctctctttccttataaagacatcaatcatattggattagggccccaccctaatggcctcatttaactttaattatttccttgaaggccctgtctccaaatacagttactttaggggttaaggcttcaacatacgaatttgggggctgcacacaattctgaccataacaatcccaaatggcattgaagaatatttgttgaagttaatgctgatcattaaatcagttgtagagtctagtatgctggtcatgtttaacagccatttctgggtgtagctctgatttgtagtgttacttatatcccctggtataaatccatccaccatagtgaattc

SEQ ID NO: 199772 - DNA, 1000 bp, Homo Sapiens
gatttctgcgtttccaactggggtgactagttcatctcattgggactggttggacagtgggtgcagcccacggagagtgaactgaaatagggtggggcattgcctcacccaggaactggaaggggttgtgggatttccctctcctagccaagggaagccatgacagacagtacctggaatatcgctacactcctgcccaaatactgcgcttttcccatggtcttagcaactggcagacaaggagattctctcccgtgcctggcttggcagatccaacacccacggagccttgcttgctgctagtgcagcagtttgagatcgacctgcgaggctgcagcctggcagggggaggggcatccgccattgctgaagcttaagtaggtaaacaaagtggccaggaagctcaaactgggtggagcccactgcagctcaggaaggcctactgcctccatgaactgtacctctgtagacagggcatagctgaacaaaaggcagcagtaacttctgcagacttaaacgtccctgtgtgacagctctgaagacagcagtggttctcccagcacggcatttgagctctgagaacggacagactgcctcctcaagtgggtccctgacccccatgtagcctaactgggagacatctcccagtaggggctgacagacacctcatacaggcgggtttccctctgcgatgaagtttccagaggaaggatcaggcagtaatatttgctgctcggcagcctccgctggtgatacccaggcaaacagggtctggagtggacctccagcaaactccaacagacctgttgcttagggacctgactgttagaagaaaaactaacaaaccaaaaggaatagcatcaacatcaacagaaaggacttccacacaaaaaccccatctgtaggtcaccaacatcaaagaccaaaggtagataaaaccacaaagatggggagaaaccagaacagaaaagctgaaaattctaaaaaccagagcgcctct

SEQ ID NO: 199773 - DNA, 1000 bp, Homo Sapiens
ctgagatcatgccattgcactccagtttgggcagcagcacaagattttgtctcagaaaaactaataaaagtaataaaaataaaaaggtaaataattaaaatcacttttaaagaactgtataaaaataataaaacattgacatttacagagctcagttagatgaggtgactcatacactccaatggtgtcctggttctcttacatgagaattcaaatgtctttctgtggcccaaaagatcccacacagcctggcctctagcccatcttctgccagcctctctcatctctctccctctccttcacttccccccagatcacaaaggccttttgcctgtgccttctgccctgctccctccagccccagggacttggcctgtgctagtccagtccctccagctcaccaggagcatgcagtccagtcggggagacagacaccagacaccctaacaggcacatacatcctatgacagctcgggaggtaccaaggaggaaaatgagttttccaggcacagactacaggggtaaactggcttcaacctagagagggagaaaggggctctcacagcatgaggcagttgagctgaaagagatctcaggggaccagagcaaggaaaagtgttccaggcagagggaacagcatgtgtgaggtctctgagacaaagacctggtcatttcagattcccagtggccactaaaatagagggattccgacctaaaaaggagggagaggaggctgctggaaagcaaaggactctgtgtaggaatcataatagtgggggtggagccaagatggccaaataggaagagctccagtctacagctcccagcatgagtgacgcagaagacaggtgatttctgcatttccaaatgaggtactgggttcatctcagtggggagtgtcagaaagtgggtgcaggacagtgggtgcagcacactgagtgtgagcccaagcagggtgaggcattgcctcacccaggaagcacaaggcatcagagaattc

SEQ ID NO: 199774 - DNA, 1000 bp, Homo Sapiens
ttgtctttctgtagcttctgtcatttccttcatcttatttagctagatttgaaatattagattaaaattttcatctatcattttagattgcttttattatcagtgggagaattactctgcctttttttcttatgataacttggagtgaaagtcaaagaagagaatattgtctgaaattcattttaagttaaataagttttcttgcacatttaggaagaattgggccaaggtaacttctagtttaacatctttaaatttccctcttctgttgttttcatgaagtgataaaaatattattctcattttctctctcttctccttcacttttaggaggatcttctctttcctttgcatgtagtgttccctttttttttttttttttttttgagacagagtctcactttgtcacccaggctggagtgcaatggtgcaatctcaactcactgcaacttttgccccccaggttcaagcaatcctcctgcctcagcctcctgagtagctgggactacaggcacccgccatcatgcctggctaatttttgtattttttgtagagacaggatttcaccatgttggccaggcccaggcttgtcttgaactactgacctcaggtgatcctcccaccttggcctcccaaagtgctgggattaaaggcgtgagccagcagttctagcatttattttatggttagtttgtacccagactgctagttagggggtttaggagctctgagggctgtagcatatctgttagactttcctacactccctcccacacaatttctatgccatgaagattgtgcagctatggttagccatcatctgctcttattttggggttcatggggcatacttttttatacagtgttttgttggtttgtttgttttgtgatgccatctgcaaattttagttctaattttctggtttcttcattaatttggggaagataggattcagggagattccaaaactactttgctgccaccatttgcttagaattc

SEQ ID NO: 199775 - DNA, 1000 bp, Homo Sapiens
tttctaaataaataatattatagcaaaagttaaaaattaaatattaagcaaaatagtttatccatttaaactaacttggaacattattagaatatttttaaaatcctaagaaccaatgcaatctaacaaattttttaattgcatgtcttctaagattatactcaaggagttacataatgaatagtactatgaaatacatgcttatttagatgttactctgtgaaggaagagagctaatcatccttggtatttggcagctagactagggccatttaataggaatctatgtgatggagaaaatgttcactctaaactgtccaatatggtagccattagtcacttgtgctattatgcacatgaaatgtggctagtataagtgaaaaaatatatttttaaattttatttaaaataattaaaatttaaatataggcatacctcattttattgcactttgctttattgtgctttgtagatatttcaatttttataaatttgaggtttgggaaaaccctctagaaaggctattgtcatgtcatcatctttttactagcatgtgctcacttcatgtctctgtgtaacattttggtaattcaggcaatatttcaaacttttttatattattatatctgttatggtgatctgtgatcggtgatctttgatgttaatattgtaactgctttggggtgccatgaagcatacccgcataagatggagaacttaatcagtaaatgttgtgtgtcttctgacacctacactgaccagtcattcccccatctgtctcccggtccttgggccaccctattccctgagacacaacaatattaaatttaggccaataaataaccttacagtggcctctactcattcaagtgaaaagtgtcaggtttctcactttcaataaaaggctagaaaataatcaagtttagtgagaaaagcatatcaaacatctagataggctgaaagctaagcctcttgcatcagttagtcaaattgtgaattc

SEQ ID NO: 199776 - DNA, 1000 bp, Homo Sapiens
cccagagctcctgcatggcccccttagtcctgaaacttaaaaatggaagcatgtttcaggctgaggttcacacctcagcaaacagctgactctaattcttaaaggaccctgtctaataggacttcaaactggctccaaatggttgggacagtcccatccaacatcaaattacaacctcactaatccagactgattaggattgtgcatgggcctcaactgaagacttccttggctttgacaattctttcctcctcacgaggactgcaggctgcagccttatcaaaatgtttccttgaaattttataacttttcacacacttgaaaagcataatttaccttaatgcagcaggtagaaatgggggaaattaataaacttgtagtctaatttgagtttctatagtattttggagaaataagttcacagttcattgaagaattttataattcagatttcagtaatgaaaaatacaaaaataatagcaataataatgtgtgcacacatgcacaaacaatgagaataaggcaaagatagtaaaatggtaacaaatggggaaatgagaataggggagtccttcatactgttcttgcaacatttctgtaattatgaactgtttcaaaataaacttaaacattcacaaacacacaggaatgaatatatataacccctattcctaaaaaaattaaaaaagagattattgggtgcagtggctcatgcccgtaatcccaacactttgggaggctgaggtgggaggactgcttgaggctggagaccagcctgggcaacaaagtgagaccctgtctctacaaaaaatacaaaaagtagctgggcatggtggtgcatgcctgtggtcccagctacacagaaagctgaggcaggaggatagcctgaacctgggaggctgaagctgcagtaagctatgtttgcaccaccgcactccagcctgggtgatggagcaaaagaccatgtctcaaaaaaaaatgattttttaagtatttaata

SEQ ID NO: 199777 - DNA, 1000 bp, Homo Sapiens
aaccattcatttcacgtgattctttaattcttgtaggctaaatgactcactgaacaattcctggacagccctgccgatatggactaggaaaaaattaattgtccttgtatatctgtgctaagattttgaaatgattaaaatttgtataataacattaataatcattgtaaagtacagtacttctcatcttgaaaggctttcatttccatctttatgcaacccagacacattatgaacattctgcaaggagaggataacagcacaggctcacaatcatgaaaaggaatattgtggaaccatatgaaatttaaggtaactggggcaaaagatacacagtggggagaggcagggttgcagactggacttttgtctagtcatgtttttatgagacatgcacagtacatggagaagccaagtgatccctgtggacgatggagagtgagtgagaatgacaatgatccacttgcattttaaaaaagataagcttggggccgggcacggtggctcacgcctgtaatcccagcactttgggaggccgaggcgggtggatcacaaggtcaggagttcgagaccagcctggccaatatgatgaaaccctgtctttactaaaaatacaaagtaagccaggtgtggtggtgcattcctgtaatctcagctactcgggaggctgaggcaggagaattgcttgaacccgggaggtggagtttgcagtgagccaagtcacgccactgcactcaagcctggccacagagtgagacttcatctcaaaaacaaaaataaaataaataaaaaagataagctttgccacaggatagaggaggaatttgagtcaaaaagaactggaaacaggaatactagagaaggggttgtttctacagtccagttaagaggtgatgaagaactaaacaagaaaatgtactggtgatgggaaaaatagtaagacacctgactcaagaggtgttcccgaggcaaaactgacaggattggagatagagaattc

SEQ ID NO: 199778 - DNA, 1000 bp, Homo Sapiens
tctcttgtgttaggttattagtgtatttatgtgtatgaaggagggtgttaggtggatctaatcaggaattaagccaagattgggttttcttgccctattattatcttcattgcaccactggcttcaaattcctttttcttagggtggaggctgggatttaagaggtgttttctcaatgcttctattttacccttaccttctctgttcatccccagtgcaaatattgttcctctccacccttttttgtctttatcagtggtaggtggcagttgcttgttacttggtgcttgttagtctggtggtgaaggcgaggggttctttattatttcagtacagactccaccttaggcaggccctgcatgttcaggtcttggtgttgagctttctcagtgatcctatttcttctcttcatggcagtgaaactctgtctatatatcttatgagtcttccatgggagagagtttcttttcagtctcctagtggtagaagatctctaatattactggcatttgatcctgaatccaggacttcccctaggggtagtaggttttgtttttggttttattttgttttgtctgttttgttttaacatttcctctgcctccagtgggtctgtacctttgtcgtaggggtggcagggttttctgcttctccttcagaggcttacagctgtgttttctgaagaaggattacaatgaggcttcagacttttctcatggcagtgaccacttccctttctcaagcctgaaacaccaaggaaggcactcatgcacctcctgctttttccacaaatgttcttgtgagcaggagatggaggtccatggaaaaggatctgtaagtgtgtgcaagctcccctcgtatctgcagtttccgttagttctatcctcttctcctcatccacacatgaccttcaccaacccatcaccaattttatcagaatgcttttcacctggctgtatgataccaacatctcttcctcttgtagtctgccactatcaca

SEQ ID NO: 199779 - DNA, 1000 bp, Homo Sapiens
gacaatgccgaacagttatagtagtcttaaagttcttattctcattttctgaactcatgacagattggtaccagacagtttaaaagccagcagtgacccatgggccacactttgaatagcagcttttatgcttaagtcttttgaggatttatagtatcctgggcattgagtgaggcataggagattttctggtgtggcttctgcctcctcagaacgtcagggcttaatgagggtttcttgcggctctgtcagaatgcatgaatggtgaatggtatacctggattccagcctactgtgactaccagtaactacgggtcatctcagtctctgagcagggattcctgtttcatcctcaggcttggcttgccatttaggtggaaaagggggttgaattgtaatgccttctcctgtcatgtaaccaagggaagtaccctggctgggagtcaaaacctcacaaaaataagaaacaaaaaacctcggccggattccaaatgctgacttcagccacactcattctgctgcaggccactttatgtcattctgatggaggtcattttccaaagcgaattgcccaattcttttaggcactggactatactcctgttgctatcagcggaggctacatgcagggaccaatgttctttaaagtataacaataacaacaacgaaaatcttcattcacttgggaaattaaaggcacaggatcaaaaaccactactgtgaaatctaaatgctctcacactcagttgatgatacagcttatttgaagatttagacttacttaacaataacaacaacaaatagcctatagatagtatcaaaaatatcccaatgataatgattatacatatgtgataacacttgtactggggagaggtgccaaatacaggcacatgttccagctccctcaggccacacttcttggcagacatcatcaatcagtcactccttctcttctttctgatcttgcctgcagcatcagaatctcagcatagaattc

SEQ ID NO: 199780 - DNA, 1000 bp, Homo Sapiens
aatcaaatcagtcattacagtcccttatgccaaagcctaatccagagaaaagccctaactctctttgattttatgaaggctgagagaggtgaaaaagctgctgaagaaaagctggaaactagcaggggttggttcatgagatttaaggagagaagctatctccataaaataaaagtgtaaggtaaagcagcaagcactaatgtagaagcacagaaagttatccagaaaatctcactgagaccattgatgaaggtggctacactggcaaacagattttcaaggtagacaaaacagacagaagatgccatctgggactttcatagctagagagaagtcaatgcctgacttcaaagcttccaaggacaggctgactctcttgatagggactaaagcagctcttgactttaagttgaagccaagttttatttcccattctgaaaattgtagggcccttaagaattatgtctgtgctcaattaatgaagcaacgaagcatagatgacaacacatctgattacaacatggaacactgaatattttaagcccactgttgaaacctactgctcagaaaaaaacaagatttctttaaaaatattactggtcattgacaatgcacctggtcaaccaagcattctgatggagaggtatgaggagattaaagttgttttcatgccgtctaacagaacatccattctgtagctcatggatcgttgaggaattttgatgctcaagtcttcatatttaagaaatacacgttgtaaggctagagttgccagagagagtggttcttctgtttgatctgggtaaaatacattaaaaatcttctggaaagaaccattctagataccattaagaacatttgtaattcatgggaggaggacaaaatatcaacatcaacacaaatttggaagaagttgattccagccctcatggatgacttcaaggggttcaagactacaaagaccagtgtaggaagtaacttcagatgtggtggaaacacc

SEQ ID NO: 199781 - DNA, 1000 bp, Homo Sapiens
acccactaatcctagtttgaaccctgaagtcataccaacaattctaatttctcttccaggagataatttttcaagtacaggatttgcatagaagtatagaatattaaatatctatctaattagacttctctggtttctacattagatgtgaagaaaatggagactattgtagtaaaggaagaatagcaaaatagtggaggaaccaggattagaatccagagccattcagattttatcttgttaacaggtgccaaagtatctttccttccttggaaagagggaaaacagatggaggacattgtacttggaaagaaaacaatattgtggaatagccagacgtggtggctcacacctgtaatcccagcactttgggaggccaaacccggcagatcacctgaggtcaggagtttgaaaccagcctgcccaacatggcaaaaccctgtctctactaaaaatacaaaaagtagccaggcatggtggcatgcgcctgtaatcccagctacttgggaggctgaggcatgacaatggcttgaacctgggagacagaggttgcagtgagcagagatcaagccactgcactccaccctgcatgacagagcgagactccgtctcgaaaaaaaaaaaaaagaaagcaatattgtgcaatggacatttttggtataaagtttttagtgattaggtatcttttaaaggtaagtcattttagataagataatggatttttaaataaatacatttattgcttttttccctttagattagaaacaaagtatttcttcatactcctaagagtttcagagtttctttgtctcacattctaatttgagttagccatttttggctttggctatatatttccttagaattatcaatatccaatttaattcctacctccaaacattagtgaaagaaaagactaaaatgagatctacctcattttatatattttcagatttaatggactaagacattgcagtgttacagtgcatcacaatccagc

SEQ ID NO: 199782 - DNA, 1000 bp, Homo Sapiens
ctctgcattcaccttttctatctttaaccctatcttacagatgtccttcaggacgtgtgtctggtgatgggaccggctcttcatttacatttttctgttgacaaacagagtccatgaatattaattattctgaagtttatttgcagaaaaggcactttctaatccttatcaattatttattaaaaatctcccccacctaataatctcattaacattattatactaaggccaacagcaaatattcctttgataagtaacaacccaacctgctatccttcctgccaaatctcatgtagcctcctttgcttaatcatggatatcgtggcttttgttttctggaagctcgagggtagtcctccattactttttttttaatacaagaaaattcacaaacagtgccttttgttataaaatgaaaagtttctgatacattacactaaaggaaaagaacaaaaatcttggaaaaatagaatatgcctgctttttaatgccctgttggttatgtgcagaattactcaacagaaatcccaaggaactaaatccctgcagtcctacaacaacatgaagggtctcgagggaatccatcgggtttcaaaatatgtgagagtctcaaagaatgtaaagcaaatgaaaatcgcatccaataatggtgacacctacatttatgtagtgtttcattgcttaccaggcattttgacctataacacttcacttgcttcctctaatactcctctgaggtgtgcagggcagttattattaaccttattttacagatgaaaaaactgaggctaagcaactgcctaaggtcaccaggacagaaggcaggagggcagggactccgaatcctaggttttctcaccaagagttttgcatcccaccttgttgattggtcctgtgttcaaaatgaggatttccttctatcttccttccctcttccttctggattcactgttggtatttttacttgttgctgggaaatttcgttagctgcctggaattc

SEQ ID NO: 199783 - DNA, 1000 bp, Homo Sapiens
agggtggggacagctgcccaggctggaggactactgatgatgagaaatgacacacaatgtgagcagggaaagggatcatttaacaaaatgtgttagcgttgactgggaaagaaagccctaagtgggtaaacacacccgaactttgcaaggagcttaattcaaacaattaaaatatcaccttctctttaaatcagaaacatcaggtttcctattggaagaaatcccttgctaccactctaagcctttggttgaaaaggccaaattaaaattcgggttagaaatgtttccacagagggtccaaagacttagagcttgatttatatcctgatactgaattgtgattatagttttcatgttatgcaatccaactattattttccttttatcactaaaaaaaaatgttttaaaaaggaaaattaaagatttgtgtgctgtcagtgcaaaatcacattaagtatggtttttcttttccctgggacagaaaaaaacaatgcccagctcacagtacataggaatgtgtcacaacaaataatcagaagacagatttctccaagctagtgttcctccttgtacagtgtggtattcaaaagcagtattgtcacgattatgcatattctcattaactaggtacagcagagctacttaaagggaaacccatttcttgtgcctcaatgaaaggggagtgtagaaaacaataattaggctgaataaggaattttaaacggcaaaaaaaaaaaaaaatcagagtgaaaagaacagagaatttagaaagccaaaaaaaaagttttttgtgtgtgttttttttaaaaagcaagtaatgtgacggtagaaacccacacaatctccccccaccccacctgccactttgagtcctaattgcccatctgcaaggacagaaacccactctaaattgaccagcatcggcttcggcaagtcttctcttcactctccctcctgttaagaccgtttccaaaaccaatcagcaaaggacaaagaattc

SEQ ID NO: 199784 - DNA, 1000 bp, Homo Sapiens
cctgtaatcccagcactttgggaggctgaggcaggtgggtcacctgaggtctggagttcgagaccagtctggccaacatgacgaaaccctgtctctactaaaaatacaaaaattagctgggtgtggtggtgcgggcctatagtcccagctacttgggaggctgaggtgggaggatcactgaagcctgggaggcggaggttgcagtgaagcaagagtgtgccactgcattccagcctgggtgatagagtgagaccctgaaaaaaaaggaaggaaggaaggaaggagaaggaaggaaggaaagaaagaaagaaagaaagaaagaaagaaagaaagaaagaaagaaagaaagaaagaaagaaaggtaggaagagaaagcaagccaactggaaacagctacatactatataattctaattatatgacattctgtaaaagacaatactatggagacagtaaaatgatcagtggtttccaggggttcaggagaagaagggatgaataggtggagaacaggagatttttagggctgtaaaactattctgtatgataatgtaatggtgaatacttgtgacacatttgtcaaaacctatagaatgtacaacacaaaaagtgaactttaatgtcaactatggactttagtttataatgatatatcaatattggctcatcaactataacaaatgtaccacgctaatgcaagatgttaataataagggaaagaagtggtgggaggcagtgaagtgtatattggaagtgtctgtactttctgctcaatttttttgtaaacctaaaactactcaaaagtaaaatgtattaattaaagtgtggtgtgtgtgtgtgtaagcagggcattctgagaaaatatctttctggaagtgcatctagtaattttttccccctaattcatatctgaaacacatacaaataaacagtgaatgttgtaggaaattagaagatagaccactatcttgggaaagataacaatgcaagagaagaattc

SEQ ID NO: 199785 - DNA, 1000 bp, Homo Sapiens
ggaccccatccccaccgcacagctgctcagcccacagtccccacgaaactgcctcctgctcgcctcctcccctggggctccagcagaagaaccgcagcagactcccctcaggacaaatgtgctgaggggcaggtcacagccccaggccacagggacctacaggggtaaaagcctctggaaaggaggagcaggggctcctaccagaccctggataaacagacatcctgcggctacctgccagctgcagtcccctcgaaaatgtcacagatccttgccgggcgcggtggctcacgcctataatcccagcactttgggaggcagaggcaggcggatcgcctgaggttgggagttcgagaccaccctgaccaacatggagaaaccccgtctctactaaaaatacaaaattagctgggtgtagtggcctgtaatcccagctgctcgggaggctgaggtgggagaatcgcttgaacccaggaggcggaggttgtggtgagcaggagatggcgccattgcactccagcctgggcaacaagagcgaaactccgtctcaaaaaaagaaagaaaatgtcgcagatccaaagcagccaccatctaagtgcctaggccccacaggcctgctagctccttggctgaaatggggcatccagctgcacttgtagactgggacctcatctgggcaccagacaccagcctgggtatacacaggtctagcctggagcaataactggggcaaaggggcagtcagcctggctgggggtcctggtgtcagtccaccagactctcctgatctgggcaggggccccgatgcctggacgccccaacagaccaggccctctgaggcctcggcctcctcacctgcccacccagaactcagacaggatcacagtcacagtgactttgagtagtcacggcctgtgttggcccctacagcactgtcaacattgcttaatttgttgctaacattttcaaactgggaaattttacataagaagtagaattc

SEQ ID NO: 199786 - DNA, 1000 bp, Homo Sapiens
ctcctcgatagatcttatagtgctggtgaatttcttcagtgaaaggggaaaacagtggcacagagcacatggattatgaggctccttcccttgtattattcccacccacccattattacctcctgttttcaccggagagtcccacggcccagggggtggatagatgcagtcactgcaagaagtggaggcagagcttcaataaatccaggccagctgaccctctgtgggagaaaggaaaacgcacccccaagtctcccaaggcccaggcctgggcaaccagctgaggtgtgaagagcttctggccaaatcatcaaattaatgtgtgctcaatacaaggaaaatcactgtatatttctgaaaaattaaccagaagggcaacagtagggtagacgtggatacgtggatatgtacctccctttacataactgtccggctcagaaaacagaaaccaaaggtgtctccatcctaagggagactgaagagcaactcaccgtcacctctacctccccttcccagaacacaaggccacaaactggcacccagagtttgtcctagcaagtggggtcaataaagacagggagggcaatagtgtggcacaaacgactgttttctgggacttgcccgcccttctgccaccatactggggtggcctgcctggtcatggtgcccttgtaagccgtttgctgcaggagctgctctccagctataaatggctctgtagctgctggcatttgcaccacaacagaaggaagaatgcaggctgggatttgcagtaataatctgaatccagtgacgtggcaggcctccacctaaaatacgtccactgatgcaggattttgctgcaattcttgcacaaacatgttgatgacattgattcctaatggacagaaggcatcttagggactgagaggcacttcttgcctagttccaatttcctctcagacagctggtcccagggaatggccacccagaccagggaagctacctagagctggaattc

SEQ ID NO: 199787 - DNA, 1000 bp, Homo Sapiens
aaaatacccccacaaaataactaccttgaagttaattctttattggaacaagtagcacagcattggatagaaaagtacaaaatgcaattttctgcctctgtatgctgttcagtttatggttgttcccgacatcttaggtcactttccagttcaaagttagttttaagtctgagagcaaagatttccttgcctaagggaggattagatgaaacaaggctcccaaaaggcgattggccccctgacaaagctggaacagtggtgagacagatggaagtagaagagaaggaatcagaggcccttttgaatttagaagtggacttgtgagtgctaggatttccctgggtttttcaagcccagagaagaaattggagcaaatttcacaaggcatgggtttttcacctatttgaggaggtgagggatctgttgagaaaagaagaaagctaaggtccctctccttggaaacctgtgcgcacacacacgaagtgtatgaagtacctgtgcgcatacacaccaagtacctgaagtctgtaacttcaggatcttttaagacccatggcatgaagagattggctgaatttgaacaaaggaaccctggggcattagatgtagaactttgttgtctttggagagagacctggtctcacacttaaatacccaggtggccccattttgttttattaaaccaatttcgtctctttgacccccagctcttacaatcacatgcccgattgcacagctttctcccttccagcaaatcctttttgatcactattacataaactctaaattgagtgtccaaattgcaggcgtctaggatccaaaacaaatgtaggttgcaaataagtaaggtttttaaaaaagatctttgtcttcttaagttgctgatagttactgcttgctgggaactgtaggcctttcctggcaagatttctcaacattctcttgagagcagttgtgttaacaagttatgaagattactttaatgctttgcttggaattc

SEQ ID NO: 199788 - DNA, 1000 bp, Homo Sapiens
ggctgcacattagaatcacctagagagctttaaaaaaccccaatgccttgaacataccctggattaactaccccagaatctctgaggttggggggtggagggaccctaggataaggcaccagtaatttttagagctccctaggtgtattagttcattttcatgctgctgataaagacatacgggagactgggcaatttacaaaagagatgtaatggactcacaattccacgtgcctggaggggcctcacaatcatggcagaaagtgaaaggcatgtctgacatggcggcagacaagagaagagagcttgtgcagggaaactctcctttataaaaccatcagatctcatgagacttactatcatgagaagagcatgggaaaggcccgccctcatgatttaattacctcccaccgggtccctcccacaacatgtgggaattgtggaagctacaattgaagataaggtttgggtggggacacagccaaaccatatcaccaggtgactgtgatgtgcagccaaagccgggaacccctgttctaatcgggatcatggtttaatgaaggatgagctggtgtttggaaaaagcagactcccttcaaaggctccatgtaactttgaggctaagaattcaactgagttaatgcttagggttcaggtcacagtcagaagagctctggacataaagaatggggccctggagcttggatgagggaagcctgggaggaggctgtcacctctggtgtctagctgcagccctgtctatggaaggctcatacttgacattagtgttggttctcaagactgctgatcttgttaccagcctgggttgggggcatttgtcatactttcaggttcattttccagtcggtcatgggatactggtcagcctgcagctgggaactcgggcctgtcctctgggcctggctccttggctctcataaaagaaagagggcaggcaggatctttcctgcttggaaagtttgagcttgagtttgaattc

SEQ ID NO: 199789 - DNA, 1000 bp, Homo Sapiens
ggaggccgggcgtggttgttcacatctgtactccttgaattttgggaggctgaggcaggcagattgcctgaggtcaggagctccagaggagcctggccaacatggtgaaatcccatctctactaaaaatacaaaaattagctgggtatggtggcgggcacctgtaatcccagctactcgggaggctgaggcaggagaattgcttgaacccagaaggtgaaggttgcagtgagccaaaatcgcaccattgcactccagcctgggtgacaagagaaagactcttatcttaaaaaaaaaaagaaaaaaaagaaatggcatcttcttcaagaattacatcgtgtttcatgataaagaagctctaattttgcatttgttcaagtattgatgagatttacccaatatgacacccatcttggataaaatgcaaacaacacaatttcattttgtcattaacaaaaccgattaagtagtctaatataaattgcgatcttattaaaaactgatcagattaaaaaaattatggaattatggagccaataagatgttacaacctgttccaaggggaattccaaaatccacacatatctgagaccatcaagtatgatgaaatatatttgattactatattgaaaaataaactgattacatagccaacaattggacaggggtctcctcatccacagccacacaaacccgatcatgcagctatgtggttacaaggcctacatagcctagaagggactggtctgacttgagatttcatttgtatttgtattttgagacagggtcccactctgtcacccaggatggagtgcagtggtataatcatagctcactgcaaccttgaccaactgggctcaagagatgctcctgcctcagctgcccccatacctgggaatacaggcaagtaccaccatgtcaggcatttttttcatttttgtagagagagaagacttgctatgttgcccaagctggcctcaaactcctagaatcaagagatc

SEQ ID NO: 199790 - DNA, 1000 bp, Homo Sapiens
aggggaagagcccagtcttgtaagatgccctcacttcagcagcccatcgcaagtcccacgtggcgaccttgtgacctgtgcttctgactgcccagctatccacagggttttctggaccctctcctcaggtttaatagtttgtgagaacagctcatagaactcaggaaaatatttaacttatatttacctacttattatgaaggatacagatgaacagccagacggaagagatgcacaggacaagacgtgggaaggggcagagcttccatgtgtctccgggtgcagcaacctccaggcacctccgcgtgttcagcaatccagaagctgaatcccaaccccacagtgcaggggtttttattaaggcttcatcacataggagtgatgggtcatcaacgccatctccagcccctctccccacttcctggaggatgggtgatggggcttaaagttctaaacttctaattctggcttgttctttctaggggccagtgcacctcacccccagaaaccccccaagatttgttgcattcaaataaaagtgctcctgttactcaggaaattgcaagggatgagaaactctgcatcagaaacctgggtcaaagaacaatgattagaaaacaaaatgcacctaccacccccatggctcaaaaaaatcaaagggttttaggatctctgtgccagaaaacagaggacagagaccaaatatttattttgtattgtaccacaacatcactgtgtgtgtgtgtgcagatggataaagaggaagaagtgtggatagagcaaatgtggcaaaatgcaaatatttgaggaatctgggtaaatgatatgtgtgggaatttcttgtataattcttgcaacttttatgtgattctgaaattatgtcaaaataaaaattaaagtaaaacaagacaaaaggatggggaaaagggttgatcctagggtaaaatgatgacagaattaaaggtaccagaaatagtatgtatcaagtcgtgggtacatg

SEQ ID NO: 199791 - DNA, 1000 bp, Homo Sapiens
agtttggatgagttgcaaataacatcctctacccttaggtcaaaaagaatatgtaaaccaaaatattttagataggaatacttattatagtttcaactttcatacttcgtattaaaatgattgtataagaaaatacaatatttttaatgtttttattcagaatatgttctgaatttgtaacacatgttcattttttaattgttcaaagtaacacacattcattttattgtcattaaaattttctttaaaagtcaaagatcaagttgtacccagaaataaactttgttaatattttgacgtatcttttcttattttttctatttatatttatgtagattttgtgtttattaaaaatgaagattggctgggtgcagtggctcacgcctgtaatcccagcactttgggaggccgaagtgggtggatcacccgagctcaggagttcaagaccagcctggccaacatggcgaaaccccgtctctactaaaaatacaaaaattagccaggcatggtggcgcgtgcctgtaatcccagctactagtggggctgaggcaggaggatcacttgaacctggaaggtggaggttgcagtgagccgaggtcataccactacactctagcctgggcaacagagtgagacttcgtctcaaaaaaaaaaaaaaaaattatgtgatacatgtaatttttattcttttcatggaaatcatgaatattttccatatcattaaatatattttcaaatgcaaaatatggattttaataactacaaaatattctttcctagaagttcaacaaacatttaatcttttatgtgccaggcataacaccataatcttttttattatagcatgtgtttttttaattaaaaagaagcatttcaaaacattttcttaatatacttctctccagggattatgccaagtatgcacatgaaagcctgtttctctttgatcaagggagctagaggcaactcataatctaatagtcaggggttctcagaattc

SEQ ID NO: 199792 - DNA, 1000 bp, Homo Sapiens
ctattctgctcttgatgcctgcaattgtattgtaaaattcttgaagtaaatttttcagtttcagaagttcagtttggttctttcttaaaatggctcttctatttttcagatcctggattgtcatactgggtttctttgattgggtttcaactttctccttgattccactgaccttcctacaatccaggttgggggttacccaccctgttgtttcaggtgtgtcccaggacaacagaaggctggaatcctggcatagttcagacagaagcaggaccactgagatagaagctctagcaggtgtgcctgtctggctatgagcagtgggggtgggtggaacaacctgctctacagtctgcgtgtttcctgtgggaacaggaggctgcactcactgccagaattcaaacagaagtggggctgccaggtgggatgctggtgttgaaccttttttggtgacaggggccggagcgatcttactgatcccaggcaaaacaactgcagcctctgttgggactatggcattggtgctagtctgttccagggacaaaggcttgtagaggtcaccatgcacctgagagttgcttctgcaaaaactctgagtggctctgtgtctcaattaagaggcatgtgggtggaggtcaggaggattctccaactctcaggcttgcacaggttcctgggcaggatgtaaatccactggaggggctctgacccattcactcttttcctgtgttgagaagcttcttctggctccatgctaatcccagatgggctgctgcccagatttgctcctctctgctcatgtctccttgctgacttgatggatcacaatgtggttccttagacaattagcttgcaggatcagtttcctagtcatttttttcccctctgttagaacagtggacaagagctacctctagtctgccttcttgacccaacccaaaaattgtttatttaaaattaaggtttaggtagtagataagtccattttactattgaattc

SEQ ID NO: 199793 - DNA, 1000 bp, Homo Sapiens
gaaagccttaatatggaggaacacaccaccgactaagaaagtaaaataaaaaaatgaaaagagaaaatgtgttcaagtaaaataaaattacagtataagttgatttcatatttaaatcctctaggtataaggaaagtatacaagttggctattaagactgcaggaaagtcagttgtgggaatggggaattcattgagttaaaggaacttaatcatagtggtgatggaaatagactaacttgctttggtaaactcaactgtaataattctgtacattttcactgactgtgtcattagaaccttcttaattctggagtgcaagagattaatttggttctagtgttcaatataaatcctgaaaatgaagtgaatggctgcctttacacttgattttcagataacagatattgtttaatttaaaagaagaaaattcctgaagccagacatattaaggaaataacaaaaattcaaggacgtaaccaaaatttggacattggaaatgtctgggaagttgaagaaggtgaagttatgtaccaatgtgtaaaaatgaaagtttttctttttaaaaatataattagatattccatacttcatgcatagaacacattcattgatgagacttatacaaatactattaaaagattcagttccctatgcaaatatgaggttgagatttatttgtttagaaaattaaaagcaaattagaacattttctatgactacaattattttcactgaagaaatgactgacttttaatattttaagtaacatgggcaataagatgttaatactatgttcatttctaagttcaatgttcccagaaaattctgtgcatttgcagaacttattagatactcttaagtgaatcaactgacataatgtttcaatgaccaagttaaaagctaatcagaaatttcccacaatacctttacctatatgtttacacacattaatattttatgtcaatataatatgttattcaatgttgttttctgaattc

SEQ ID NO: 199794 - DNA, 1000 bp, Homo Sapiens
acaagaatgaccaaaggagaaagcaaagaaagtctaccaaacacatgacctaatggtgttttgtgtgtcatccttataaaatccttccaacaatcttcaagaaacattgtgtatgtgtgtaagcacgtgtatcactaacttgttactctcattgatggattttgacttttagtgccttctactcctgtgcatctcaccaatgagatgaaaaactacatgaagaaatcttcctacatgcaagacagtgctatagattcttcttccaaggatcaccactggtcacgtggtaccctgaggcacatctcggagaactcctttgggccatctgggggcctgcgggaaggaagcctgagttctcaagattccaggactgagagtgccagcttgtctcaaagccaggtcaatggtttctttgccagccatttaggtgaccaaacctggcaggaatcacagcatggcagcccttccccatctgtaatatccaaagccaccgagaaagagactttcactgatagtaaccaaagcaaaactaaaaagccaggcatttctgatgtaactgattactcagaccgtggagattcagacatggatgaagccacttactccagcagtcaggatcatcaaacaccaaaacaggcatagtttaattttaatattttggttttctcatttaacaaagcaaaatagcagcaaataagttacagagcacaataatctacaagatgctttcattattctggaaaaaagaaatagtttatatcttctaattgctactgcatttgatgctaactttcagagaaatcaacagctttggataataactttaaatggctatgactttgcaaacttgctatctaataacccaaagaaggaatatgcagattatgattgttttcttaccagttgtttgtctctggcatatttaatgtttgtattaataagagaattttaatatctgaaaattgtttctaaatagttcgtataatgggcatttgaattc

SEQ ID NO: 199795 - DNA, 1000 bp, Homo Sapiens
acattcatcttggcttttctttttaaaagataaactttgtcccacgtaaagaggaaaactgcatagatattcattgagattatctgatttgtcactgttgccaaagaaaaaacaaaggtaaaatacacgagtttctgcattcagaagaaagtatttcaggtaaaaattaactattaagcaacttttctcagcagaagaaatgcccaaattcttaaggacagccaagttgtgagttagagagctagtgttataacagatatttttaaatacatatatgaattacctccttacgttactttattcttgtgtttttagcaactgttgaaaacaattataagaaatgaaataatgtcctgagctgccacatggtatgttttaaaatctgcgattttattcttgacaagtaacatacactacatgcttttgtgtgcaagtaatgctcagatgtttgataacggagtgatcttaaagaggaggcatctgtttttgtttttataagtagttcattgcctaactaccaaaaatagctgcagttattttaaacagatggtcccaagttaatagggaagaaagtagaagtgagtctatttccccagtttttatttttaccccacaaaaatggtaaaaataattaacagtatataatttgaacaaattctatcagaatgctttcttctaagttattctttctgagagaggggatttgtcaattgaagtatatgatgtggtggagttgaaagccaatataaattgcttaaatttctactttctgatagcgttcatcaaaatgattgctgcattgttgaaatagagcttttgatttttaaaagacaattaaattgtggtaagatacatgaaacctaccaaaacttacttcaaaagttttgaagtcttaagagggtggtaagtggtggtggtgacatgttaagagtaggaccttgccagatgaccagaaagaatatgggttgatgacattaatatttttatgatttctgaattc

SEQ ID NO: 199796 - DNA, 1000 bp, Homo Sapiens
ttatgtggacagtgcatttaagcttgaaatttcacaggtaataaatgtagctggatagtaacttatattctgttgattctgtgtacattgactcttgagatgaatgttacaagaattttaattttttttagatgacagatgaaaagaggtatttaatgtttttatacaattagtagcattaggatggattgcaaatcagatgctcttttggagctctgtgtataatattcaggaccttgtgaggtcacagtgagcagggatttatattcttaattccttttttactttttttggatactctgatatggccacattcagttaagtatttagagtaagtggccaaaatattttatactttctctctctctcttttttttttttttttgagacatagtctcactccgtcacccaggctggagtgcagtggtacgatcacggctcactgcaacctctgtctcccgggttcaagccattctcctgcctcagcctcccaagtagctgggattacaggcgcccgccaccatgcccggctagtttttgtatttatagtagagactgggtttcgccatgttggccaggctcgtcttaaactcctgacctcaggtgatccaccgccttggcctctcaaagtgctggaattacaggcatgagccacctcgcctggcctagatactttttcaattgtgaaggacaaattttttattttaagcaaatatttattaagtgccagatactagcccatgtgctggagatacaacagttaaagtatttattgaaaaaaaagaaaaaactattgagtgctagctgtgtgacagacattctagtaacagtgatgtgaggaaggtactattatccaagctcaactttaagttgtaaaattagtgcacactcttagtgttttgctgttataacctgctagaagttgggatctggaactgatgctgattccaccaccaaagaatgtatggttaccatggttaccgtaaattgttgtgaattc

SEQ ID NO: 199797 - DNA, 1000 bp, Homo Sapiens
aggacttacccccagagtttacttttctcttgcatagagaccagttagcagaggatgggtagggagcatagggttttgctccatgtatctgttcagtgttcagacttttttcatcttgtggctccatgacctgtaggacctctgaaccaactgctagatcctgtgcatccagcctgaagaaggcacactgctttcttagtcactttgcccattttgcttccaataatattctgttggtgagcacaagtcacttgggtctgactaagccaatgggggcagggaaaagtagcctctgacagggcagccacttcccgaatacaagtctaccaaaaacaaaacaaaaataaaaacaaagtgtcgatgatcagctggtaacctctgctaactgttcaaaatgagtaacttagtgctaatctctgcctctaaataccctgaattcattgtatttctttcttaggcctgtcataaaaaagtgatacaaaacgggtggcacaaaataatagaaatataggatttcacagttctgaagtcagaagtctgaaatcaaggtgtcagcagagccatggtcactctgagactctggtagcaaccttcgtcaccccatccttgctgatggtggtgacccatcaatccttggcactcattggtttgcagctgcattgctccaaagcctgcctccatcatcttatggcatcattctctctttgcatttttgtccttacatggtgttttcattttcttcggacactagtcatattggattagggtctacatcagtaaatctcctctggcctttattacatctgcatattttttcaaatgaggtcacatttatagttatcaggggttaagacttcaacatatcttttgggagaaggaaacaatttagcccataacagataaattgggttcctctgttttgttttttaagttccttaccaattactgcttattaatagattaaatataaaacgaagcaactataatcatatcagaattc

SEQ ID NO: 199798 - DNA, 1000 bp, Homo Sapiens
atatgtatatatttggttacaaaattttagtctgaagttttcagtttaaatttgatccctgcatttttaagtcacagtcatgagttcaagttagagtccttccctaaaatctcttccacactgttaagacccacaaccttccctccctcatgggcccactcagagcagtcgtgacagagggcaaactcttatttaaaatgtaggttaactatagccatttctgccccccttgacgcccctaaggatgggtggcaggattcatacccctgggaaaaaatctgatccagttctcttgtagagactgatgaggaagtaggtgatcaattgtccaacagctagtgagtgtttggttctaccaagggagtgctgcagctgcattgacgaaacctagattgctttgcatagtaacatggggtagattactgataagcagtgaaaaaagtagagggctgaaatacatgacagaatgctgtggcctgaattgttggaaatagttaaaagacttttaaaaatatagaaatcaaacactttttacctattagctcttctttgatgtgggtccccttcttctcaccaatgtttgagtggagtttgctgtactcaacacgccccttttttttagtgggggtatttctggtttcgtatggaacacagaaaaggcaacaattgtggggcaaaaataaaagtgaaaataagatttcaggggtaacagaaactaagattcaaaaatgacattgagtatgggaacttctgggactcttcaggacgtaaatattgggaaggaaaagaatgtagagtttcccctgacatctgggttacatatttcttattgaactgtcatttaattgcttgcgtgtgcacatgttcattataaacttaggtgtgggaagtactttttgtggtgtgcatctatctttttgctgcccatgagtctagcagggcagtgcctacataaaatgctttcattaaataattttaaaatcacttaaaatattttttg

SEQ ID NO: 199799 - DNA, 1000 bp, Homo Sapiens
gcctattaaagtattcaaatctcaatatacatttgtctgtttttccttcaattctgccagttcttgctgcatgtatgttatgctttgttatggtatattcacatttaagactgttacatcttcttgatgaattgacccttttgacattatgaaatgtccatctttataccagggaacgcttcttgttctaatgtctactttgtctaatgtagccactctggtttttcaagtggcttcttatttgtatgatgtatctcttttttttcctctttatctgtgtttttaatttcaaagtgtttttcttgtaaatagcacctaattgggtcttgtttttttttttttttaattttaatttttagttctgggttacatctggaggatgtgcaggtttgttacataggtaaacgtgtgccacggtggtttgctgcccagatcaacccatcacctagatattaagcccagaatgcattagctatttttcctaaagctctccctccccccacccaaccccccagcaggccccttccatgtgttgttcccttccctgtgtccatgtgttctcattgttcacctcccacttataagtgagaacatgtggtggttggttttctgttcctgcattggtttgctgaggataatggcttctggcttcatccatttccctgcaaagaacattatctcattcctttttatggctgcatagtattccatggtgtatgtgtaccaccttttctttatccagtctatcacggatgggcatttgggttgattccatgtctttgctattgtgaatagtgctgcaatgaacatatgcgtgtatgtatctttataatagaatgatttatattcctttgggtatatacccagtaatgggattgctgggtccaatggtatttccggttctagatctttgaggaatccccacaccctcttccacaatggttgaactaatttacattcccaccgacagtgtaaaagctttcctatttctccacaacct

SEQ ID NO: 199800 - DNA, 1000 bp, Homo Sapiens
aaaatacaggatatggatgaaaaaatcgccagagaaatagcataaataaaaaacaattaaaacttctggaaatgaaagacatacttagagaaatgcaaaatacactggaaaatctcaaaaacagaatcaaacaagtagaagaaaaaaaacttccaagtttgaagacaaggcatttgaattaacccaatctaacaaagacaaagaaaaaagaataaaaaaaaaaaaaagaaagaacgaagcctctaagaagtctgggattatgctaaatgaccaaacctaaaaataattggtgtttctgaggaagatgagaaatctaaaagtttggaaaacatatttgagggaatcagtcaaagaaaatttccctggccttgctagagaactagacatccaaattcaagaggctcaaagaacaccaggtaaattcatcacaaaaagatcatcacctaggcacatagtcatcagattatctaaattcaagatgaaggcaagaatcttaagagctgtgaggcaaaagcaacaggtaacctataaaggaaaacctatcagattaacagcagatttctcagcagaaaccctacaagctagaagggattggggtcttatctttagcctccttgaacaaaacaattttcagccaagaagtttatatccagtgaaactgaggttcataaaggaaggaaagataaagtctttttcagacaaacaaatgctgagagaattcaccactaccagtgccaactggtagactacatacactacaagagctgctaaaaggagatcgacatcttgaaacaaaacctcaaaacagaaaaaacagaacctccttaaaacataaatctcacagggcctataatacaatacacaatgaaacaaaaaggtatttaggcaacaactagcatgatgagtagaatagtatctcacatctcaatactaacattgaatgtacatggcctaaatgttccacttaaaacatacagaatggcagaatggataagaattc

SEQ ID NO: 199801 - DNA, 1000 bp, Homo Sapiens
tacattcacaaccacatctaatagcgatggtagtgactgcaagggggcaggttataggaccacatttttagaaatgaaatcggggctccatccccaggcacagggcaagccagtgaggagctgggctcaggatctaggtctgcctgactcccagccccatccttgcctctgctgagtgttgccggaaatggaagcagcccctgtgggctttgagctggagctctggggctactcttgtggctgctggccagctcggggcatcgggttctgtctgggatgatctaaggaagcagcacccgtggtgtatctggagccgagtgctgctgatgggaggggatcctgtgtaccagctgggctggagcgggaacatggctgagctgaccctggcacagtcggctcctccagggcaatggaatggaggagtctcagctgaggagggcacggtccaggtgaggcattgggtctgggagccccctgcctgtgtagtgacaatgcaggcctcgccaagcaacgaggatccgggtttgaccatttgagcatccccctaggagggcaaaggtgggtggaggacagttggaggaatagtagcaggagccagagtctgctcagtgaggaaggaaagcaaaacgcagagccaagtgaggcctccacagacagcgagcagtggaccatgcagccagtggcttggctgaggggtggctgtttgagaccacagggcctttttagaaactggggtttctgtgacctcccaaaaactgtctggtaaaaccatcccttctaaatggccacatctccagcaccagggagtaaatgtttaagcaaagagctaaggatggtggaaagacagtcaggctgggagccgcagacgtggggttgagcccagctctgccattgactagcccccgacttggcacgggtcatcttgctgaaccttagttccccctttgtataacggagagaataagcccatcctggcctgtctgtgacctccttggaattc

SEQ ID NO: 199802 - DNA, 1000 bp, Homo Sapiens
ctattactaaaagcttgaataaaaataacaacaagccctatgctccaatcagtaaactcgtttcttggaataaaatcttcatttgtggaaatggaatgatgtctcttagtagacagtgttcatttagggtgtgatactctcacttttagaagcaggaaaaattactaaatattaatatgtgaaaagtaaggactttccttctgagggattattgctttatggacttgactttgtttatccttatagtatatcactgccttacataactgtggatatgatgcccagtttctaatgatttgtccaaaatcgtctgagaaaaccaggccaatacaaatatagtgaaaacctcttgaaaatacaattattatagacccacataaataaagtctaatctgaagtctgatagctgattttatgttgaatatacgtcttttaaaaagtgttcttattgaacataaaatgtaaaataacattctggaaacaagtataaatattacatttattctgagtccagatactttctaaactgtagaagtgcaggatggatttgacttatccattagtaatacagactcatgaaaagttatgctgcaaaaaatgctgaacctcctctgataaatgatctttaagatggagagactgaggaagctaagtgaatgttcatgttcactgctgtaaattttccttataattggtaaaaaggctacccataatagaattcacattttcaatgaatttatagtttatcatcaaatagagtaaatgaattaagatttcatttttaaaaataaagagacatatttatttgtaataactctctttttttggtaataactatctttaacaatgctattatttatttttacccatggggaatgcataagtacaaacattgttagcttatttaacatttattaaaaatacagactctttatactaatgcagaaggataagcctcttcttcccactctaaaaatctcttctttgctgtaaagaattc

SEQ ID NO: 199803 - DNA, 1000 bp, Homo Sapiens
attcaagtgattctcctgcctcagcctcctgagtagctgggactacaggcgtgtgccaccacacctggctaatttttgtatttttagtagagatggggtttcactatgttggccaggatggtctcgatctcctgacctcgtgatctgcccacctcggcctcccaaagtgctgagattacaggcgtgagccaccgagcccggccttgtatttacttttgaaagtacaaagttcccatccccatctgcatcagatgacaacattgctaaagccatttcatttgctaccagccctgaaaccacttagcagttttcctcccctttttccttcttccctttctcttaaacccagatttattttcattttattttattctttgccttccaaagtatctgatttgagatttggaggaggagaaaagtcaaacagaaggattttatttcttaaaattcacagattctcctcagtccactgctgtcttaaagatagcttcttattttttaagtttcagtgtttgacaaagaatcactgtcctaatttgacccatatttagtggaatgtttgctatgttgttgttgataaattactattcatcacagaataaaattttgtcaagtcaaaaaaatagctaaattcaaaataatgtgcaggtaaaagaacaaataagatgagtgcatcggttaactagggagagaagatctggatcacatcccaatttttttcccatttccagagcaaatgaagacctcatgtaataaatttgtcttctcaaaaatattaaagctttcaacggctacagtacctttgtcatgtcatcaaagtccataattataaaaaggccgatgatctgaaggccatttcagcttcaaaagatttttttaggggctggtctattggaaagcttgggggtttaattaactaaaatggaaatggaggcagcgaaattcagttcctgatgttttaatttagctcagtactgccatgtgttattgaagagaattc

SEQ ID NO: 199804 - DNA, 1000 bp, Homo Sapiens
gtattctgctgttactggatggagtgctctataaatgctaattaaatcctgttggctgatggtattgttaagttcttctatatcctagttggtgttctgtttagttgttctgtcaattcctgacagaggagtattgaagtcttcaactataattttggatttgtctgtcacttctttcagttttatcagttttttgcctcacatattttacagctctgttgtttgatgcatatacattgaggattgctatgtcttcctggtagattacccttttgtttttatgtaatgtccctttctctctgtctctggtaaatttccttgctctgaagtctactttatctgattttttaaaacttatttttgattccctgctttgggaatcaaactcagttttataactgaggttattcttcccttctctttttaaggaatatattattcgagtgcaaagaggaatttctgtggaaaacagctggcaggtaagcatctttttttttttttttgtcaattagaaaaatatttaaatgcgtgactaaaaccctgacttggggcctctgaaagtctggaaaaatcagaacatgcataaatataaatcatgtttcttttagctataaacttttagctttaagacaagtatgataagagtctttcctgtccccagttgtttggttaaattgtgtgtgattgatattactatggagggtatctaggaatttgttccccagctcaacccagggcaaatagtgtatgcaaattacttgttttctttctagaaattcacaccttctcccctgtagctatggtttgagttcagtctaccaggtagaaaggtgagattgagtcttggttattgtacagtttgggccactacattttatggatctcaggtccactcatgggcagcttctggtgctagctccctcattgtctctaggggagggtcttcttggggccccaggctctgctttcttcagtggtggcctcagagagaaaagaattc

SEQ ID NO: 199805 - DNA, 1000 bp, Homo Sapiens
ctaatttatggaagtattttagtgagtttttgtttagactttttttggagtcatcatttctctcctaagtaacggcttgcttgttagttacaagtaaccatttttggccgcttgtaaaacattaaaaacactaaaaagatattctgtacaaaagtaaaactccccggtttttttgttttgttttgtttgtttttgagaaggtgtctcgctctgtcacctaggctggaatacagtggcgtgatcttggctcgctgcagtctctgtctcctgggttcaagcaattctcctccctcagcttcgcgagtaactgagactgtaggcgcatgccaccacacccggctaatttttgtatttttagtagagacagggtttcaccatgttagccaggatggtctcgatctcctgacctcatgatccgcctgcctcggcctcccaaagtgctggaattacaggcgtgagccaccacgcccggcagtactcatttttaaagaaatgttactgtgtctcatactctgtcattttaaattctatttttgtaggactttgttttttgttttattttgttttgttttgagacagagtctcgctgtcacccagggtggagtgcagtggcatgatctcggctcaccgcaacctccgcctgccaggttcaagcaattctgcctcagccccccgggtagctaggctaggaccacaggtgcgcgccacggtgctcggctaatttttttattttttaatagagatggggtttcaccatgctggccaggctggtctccaactcctgaccttgtgatccgcccacctcagcctcccacagtgttgggattacaggcgtgagcccccgcgcccagccaggactttgtatttttacggtttcctttattgaagggaagaagtgtttgtgaagttgaattattcgatatttagtttggcgttaacttagggtgtggaacaacaataccaaatataatgaattgtggtttttctaaccagtgaattc

SEQ ID NO: 199806 - DNA, 1000 bp, Homo Sapiens
atggacaaccctaatagcccttctacacaactctcttaacctgattaaagataaagttagcaaatgtttgattgtaaatcaagaagcaaaactaacttaagtaacatcttttctgaaatcttcttgtcacatcaggccaatggctttgattcatagttttcagtacattcacctctttggattggggacatgttgagagatgcagtgctcagcttcctaagatttattcatttcatccctgacccttgaaccatgaggattgaagtgttgtcttctttcaacaggtgcctatggtcctgagcactgggtcacgtctagtgtcagctgtgggggccgtcaccagtctcctattgacattttagaccagtatgcgcgtgttggggaagaataccaggaactgcaactcgatggcttcgacaatgagtcttctaacaaaacctggatgaaaaacacagggaaaacaggtagacaatggcttctttatttgtccacagagcaacaggaactatttttggatgtctctggtgttttccttaaccatgacttgctccttaaatagtgcacattgctgtggggagcctaaatcagtccttagtttcagaacaagttatgtaactcagtaaatcactctgtggctaatcaccctgtgtcttcatttttttaaaaatataaactatagataataaagtattatacatctagacctagggtagtagtgattaaatgagttagtagatgtaaggtatgtagaaggactttcagaaagctacccaatctagtagccactagccacatgtgactatttccatttaagttttaattaaaaattaaataatattaaaatttggtccctcagttgtattaggtacatttcacgtgcttatctgccacatacggctagtgactaccctattgggcagcccagacagaggacattctctcattgcagaaagttctatcaggtaacattgtgccaaatatgcaaatggaaacagaattc

SEQ ID NO: 199807 - DNA, 1000 bp, Homo Sapiens
agctctttaaaataatatttttaaaaaaacaggcttaaacttttccctattcattctacttgtagcaaagaggtacttacttttcaagtattacatggtaaaaggcacaagttttttttgccaattttaagctgttaagctttaagaccaaactatgtgaaaaaaaatcatgcctagtcaatcctagtcaatcattttatagccaaatcctcttgtcttttaaataacgcagaaaaatactaatttgctaagaaggagcacactggaaaaagccatttgaaagtactgaagaatgaggagtattttttttctactgatgaaaattattaggaaagctatcctgtctgttgtctttagctagtttaaataaatcttttcaaaatgatggtcaagaaatctttagaaaactggaagaggggatgctcttttatagcatgaaaggaattccattaattatagaaattctcgttaaattttgacgttggttcttcagaaaaaatacgcatttaacttctgcagtctgttgtgtttgaacaccatctacctgagccaggggcccaagcgttccttcatcatcaaaggccaaaactggattcaaaggaacttctgggctcttactgttagtgacatctaatctggatggtttcgatccaatgggtaaatttataatttcttcaaaattttcattctgaacagagatactccattttcatttggttttccaaattgggggtgctctccacagtcacttttgattggtgtgaggtaaccacatatgggctggcaactggttctccatttcccagagcatttgttgtacacggaagtatagatagctctgttcctccagtgagagctcccttggctatatcaccatttctctgatcaatggttttcttatctgtagcttctgttctcctgcttcagggctgtttcttatagcaaccctcatattgttcaccaaagcacaatgcagtcatatcatctgaggacccggatc

SEQ ID NO: 199808 - DNA, 1000 bp, Homo Sapiens
atttcaaatatggaatattttaattttatgtattttatattatattaatttaatttaaaatatgaaatatttactatgcagaaaatcatataaacctgtacttactacctgataacatatttaataatcacaaaaatatgtcaatgatgaaatagtaaaactctaaaaaaaattaatgggctgggcgcagtggctcacacctgtaatcccagcactttgggaggccgaggcaggtggatcacctgaggtcaggagtttgagaccagcctgaccaacatggtgaagccctgtctctatgaaaaaaaaaaaaaaaatggccgggtgtggtggcagacacctgtaatcctagctactagggagactgaggcaggagaatcacttggacccgggaggtggaagttgcagtgagccgagattgcaccattgcactccagcctgggtgacagagcaagactctgtatccaaaaagagaaaagaaaaaaaaatgttggggcagatttttcaaaaagtttttatctttcagatatattcggtggtactgtcagtattctctgactcattgactctgttggaagaaatgcttatcacagcaaacctcatttttcagataggaaatggaactcgccgctacaaagaggggaaatgtagaagaatatgacagcttccatcctattcttctcatctccatatcttttcctcataaaggcatatcttgtttgaatatcgaacttgggttaagatttgacatttctaattgaactcttctggcttttttccttagaaaatcccggttctcaggagcacacattctctgcttatataggtgtaaagtgacccaaaacaagctctaaccatgcaaggagacacaatcattttagtgtttgttatgggaagaagagcattagcaagcccatttgtcctgagaacaaagctttcaccaatcacctctatctgcattttcatctctgatcgtcttatttcaaatggtcttaaactgtgt

SEQ ID NO: 199809 - DNA, 1000 bp, Homo Sapiens
agggagtggggaaagctagagaaggggaaaaaagtcttgcaatttccaaaacctgatatgggagctctagagcataaattatacctcctagcatgtcatcctggggcaaagaagccctgggtgtggagagattggaaggccatcaaacttccaggcactttcagctttacatgtagacaaggcagacccagtgcccaaggtccagcctccaaagggctcaggtgcaaagccttactggcaaagcacacaaaagctgggaatgggcttacaaaactggcaaaaaggaatcccgaagaatcgaagtggagcatccagtgtccactaaatttgctcagtgctttggtggggaagatacagtctcttgattaacgccaccaaaacattctcagggttagaagaagggcagttctcaagggtaagaatgtgaagccaaaaaaacaagtgaccacttgtatcattcaaagcctgagatagggctgttaaattttcctggagctacagtatttctgcacatttctccttttctcctaataattttttactgtaggtgttgatgttagtcaatacataaagttttataactgttataacttcactgtgcaatgtagtgttcatgataaaaataacccttcttttaaccatttagcgttttgaccgttgatatctatgtgtctgaaatcattaattacatctgtttttaaatgtcaccttataaatctttgtccaccctcttttttaaaaaaattatgtttgttttatggaagatatcacaaccaataccaaagaaatatgaaagtatattcaaggcttctatgaacacctttacatgcataatgtagaaaacctagaagagatggataaatttctggaaatttatcctagattaaaccaggaagatatagaaacactgaacagaccaataacaagaagcaagattgaaatggttaaaaaaaatgccaataaaaatagtccaggaccagaaggattcacagctgaattc

SEQ ID NO: 199810 - DNA, 1000 bp, Homo Sapiens
cactaaccatttaacatttatgaagcactaaccatttaagggccaatgttagacaccttacatatattagcatattttagcttcttcccaactctcagaggttagcagaaataaccctatttatagaagaggaaattgaggctcacaggtcatctggtaataagggaaagagctgaaattcagacccaggactatctggtgttaaagctgtgcctcttctgtcacaccacactgactgtccacaaagactgtgggttggaacatgacacagttatacaacacattaagaagatcaagcaaactgtggcatagagaagagagactgctgatggggagtttgacaaggaggtgattgtgaaagtccaggttttggtaaggacttgaattgagatgatgatgcaggaaatgagtatgaccacgaacaataggggagtcataagaaattgccaaattgggaggaaagatggtgcctttgattatggacacagttagtttgaagaagacagatagccaggttattatttggcagtaggaaagcagattagtgaagtgttaatagttagcagcacaggcactgtgcaaccttaggcaagctacctaactgccataaacctcaatttccccttccttagggatctgtgtaaggattacttgaggtaacgcatgcacagtattgaacataaagtttgagaaacaggaagagtgctagattagtgggagtagacattttattggagagagagggcagagcccaggaatgtgccttttccacggttatcttccttggctcggcaggtgttgcctggtgagccctggaaatgctgcctacaacttccatcatacaattgtccgattgatcttgggcttgcccatttgaacagtgcacttgactttcggcacctgcacatccatggtcgggagaggagtctggtctgcctcatggtgtaacgggcatgggattttcgggcttccagaaagaggaagacaccagtacccttca

SEQ ID NO: 199811 - DNA, 1000 bp, Homo Sapiens
tttaagatctactctcttagcaattttcaagtatattatacattattattaactatacttatcatgctacacaatagatctccagagtttattctataaaactaaaacttttaacctttaaccatatctccctatcccccctcccacccagcccaataaccaccattctactctctgcttccatgagtttgacctttttagattccacctataaatgagataatgtatcatttgtaccttcatgcctggcttacttcacttaacctaatgtccttcaggttcatttgtgttgcagcaaataacagaatttccttcttttttgagactgaatagtatttcattttgtatatatactgcattttctttatcaattaatctgttgattctatatcatggctattgtgaataatgctgcaatgaacatgagactgtggttatctcttcaacatactgattttatttcctttggatacatacccagaagtaagattgctagattttacgatagccctattttaaattttttgaggaacctccatactgttttccattgtggctccaataatttatattcctaccctcagtgcacacagattcccttttctctacattaccacaaacacttgttgtctctagcctttttgacaatagccatcctaagatgtctgaggtgatatctcattgtggtttcaatttgcatttccctgctgatgagcatttttttaatatctgttgtccattcgtatgtcttcttctgagaaatgtctattcaggctctacacccattttaaattgggttatttgctttcttgctattgcattctttaagatccttacatattttgaatattaaccctttttcagatgtatggtttttaaatattttctttcattttgtagattgtagcttcactcttgtttgatgtgtgtgtgtgtgtgcatgtgcatgtgtctatttgtctgttttgctgtgcaaaacttttttagtatgatggaattc

SEQ ID NO: 199812 - DNA, 1000 bp, Homo Sapiens
agcctcccaagtagctgggactacaggtgtgagtcacgatgccctgctagtttttattttgttttgttttgttttttttgagacagagtctcgctgtgttgcccaggctggagtgcagtggcacagtctcggctcactgcaacctccacttcccaggttcaagcgattctcctgcctcagcctcccaagtagcaggaattacaggtgtctgctaccacgccctgctaatttttgtatttttagaagagatggggtttcaccatgttggccaggctggtctcaaactcctgagctcaagcaattcacctgcctcggcctcccaaagtgctaggattataggtatgagctaccacacctggccttttcttgtttttctgtagattgggtaatataatagaagctggttggctttgtcccaaggatacccacctttaccttcacatgcagcctgagaaagataatttttttctttcttttttttctcgaatagagatgaggtcttgcagtgttgcccaggctggtctcgaactcctggcttcaagcagtccttctaccttggcctctcaaagtgctgggattgtaagtgtaaatgacactgcactcagccagataatttcctgatgctgtcctcactctttgtccccaaaggagaaatatactttgtatatattttttaaagcaaaaaatataactttagacataatatatgaatagaataattaattttaagatgattaaggttacaaggttttagttcattgatgaaacctcagaatttatagtttagaaactttgacccgatagattggtagaaaatctgatgattgaattttttagtaagtttagattacatgcatatcttaagtaaaatgtgaaatattttaatttatttttttttgaggctgggtttcactgtgttgcccatgctggaatgtgcagtggcgcaatctcctgggctcaagcaattctgtcacctcagcccctcaagtagctgggacca

SEQ ID NO: 199813 - DNA, 1000 bp, Homo Sapiens
ttctatgctccacttagagtttaacaaagtaatgaattgtgagaattttattgtaatataagattgccaaaatggtgattacagtatggtaagagagccctagaatatcttttcaagctaaatagactgtctctattcaaattaatatcctgcagattggagagtcaaaatgagagggtcatgccttgtggagaatacaatcctacattgtgtaaagtatcttcagggaaaattataacggaaaatgagagtagggagggataaaacctattaatattatttaataaaatttttattgtgaaagcaatatttgactgttatagtaaatttttaagatacagaaaaacacaaacacaaaagaaaatttttttaaatgttaatcaccacaattttgggggatgcattcatatattggtttgtgtgtatgtatggtgtgtgtgtgtgtgtgtgtgtgtgtatatatatatacactgtacacatgtatgtatagtatatagtatatatgtacattatacatacacacacaaacatggcccaataccatacacacacacacacacacatatatggtgtatacttgtgttatatgtgtgcttaaaaccacaaatgtatagcaaacacacccatatatgcatagttgttattataaaactgttcttatatacagtgtttattaatgtgctatgaaattgttttcttaaaaatgattcttgttataagagaaataaatgtttattgcaaaaaacccagaaaataaaataagaaagtatgtaatacatgcaaattctcagcaacccagaagtaaccattgtttatatcttctggtataatctttcaaaatcctagtatataacaattacacagttttttgcaaaatagattatctattttataggatatcttataacctacttttaaagaataacaataggttataatcatctttccatgtcaataggtctatttctgcaccatcatgatttatggctatatagaattc

SEQ ID NO: 199814 - DNA, 1000 bp, Homo Sapiens
agagacagagggtcttgccatagtgcccaggctggtcttgaactcctgggctcaagcagtctgcccacctcagcctcccaaagtgttgagattacaggcataagccactatgctctgcctaagttttaagtaactaaagtcatgccaggtgacgtgattttttggaagtttttactgacttaatcaccagttgaagacacagctatagcagcgggataagcatactgcacaatacacactaggccatgatggagcctcaaacatcagtatgtcccttccgagagtctactgcatttacaagggttaacagagcatgggaaggcaatcatactagaattgaaatgagaataaacagattttagcaatgtacttcctttggtacacttttttttttttttaatgagaaagacggggtctcactatgtggcctagccttgtcttgaactcctagctttaagcaatcctccttccttggcctcccaaagtgctagtattacaggcaagagccactgtgcccagcctcctcttgtatatctttaaaccccagttattatccttctctcattacgtcttccaactttaaaacaggaaggcaactgcggagtgaaaagtaaatgagcaaaatatgttccaaatatgtcttattctgttttccattttattctaactcagtggcctccccctgggaatttttctttcatttatttccaaaactttggattatcatacaaatatttcataaagttcccatgttgcaaactaaaagattccctcttagcctcaaaagcctagaaagcatcaatacacatcacatgtaccaggaataaaaaaaagtcatacaagatggcattcaggcctaagccattgctggcctctgtgtcatcatagcttgcttgtgtttctttataaaaaagattgtaggccaggcacggtggctcatgcctgaaatcccagcactttgggaggctgaggcaggaggattgcttgagtccaggaattc

SEQ ID NO: 199815 - DNA, 1000 bp, Homo Sapiens
cctcatgagcttatttcagccctactacttggccatctgcagacctaagagagagcaagtgcaaatgggttgagagaaaggtctgtttgcggtcttggaaatgaagatgtcttcctttggaggaaatcttgaggattaagattttgaatgctggctgggcgtggtggctcatgcctgtaatcccagtactttgggaggccgaggcaggcagatcacgaggttaagagatcaagacaatcctggccaacatggtgaaaccccgtctctactaaaaatacaaaaattagctgggtgtggtagcacatgcctgtagtcccagctacttgggagggtgaggcaggagaatcgcttgaacccgggaggcagaggttgcagtgagccgagattgtgccactgcactccagcctggtgacagaaggagactccatctcaagaaaacgaaagaaaacaaaagagaaaagattttgaatgctttgaccaactccaaaagtagagcacactttcataagagcatcacatttaacaatgtgctcattagagcaaacattggctggcctcattatctataggctctcagatttggggtaaaaaatttaataactctgaagttcctcttaaatttacaattggttcttaaacagactagttccctgagggtgtaaagcagatgacttttcattcttaggaatagtctaaaccagagaagactctatggatgacatgaatcttctttttacctcatctttggaacattctccagaacaattttgagacctaccagcatcattgagagatttagaagtataaattagtattgccctaaggtaagctcaactgtatcaatgccctttcacttttctactcactatttataaataccatttataaatatctgagattcaacaataaaacaaaatcacttttgttagctctcagtactttctctgtgtttgttttttttgtttattatgttacatataattcctttttgatagaattc

SEQ ID NO: 199816 - DNA, 1000 bp, Homo Sapiens
gcaattctcctgctttagcctcccaagtagctgggactacaggcacatgctgccatgcctagctaattttttgtattttagttgagacaaggtttcaccgtgttgcccaggttggtcacaaactcctgagcttgggcaatctgcctgcctcagcttcccaaagtgcttggattacaggcatgagccactgtgcccggcctgcagatacctatgtttattacagaaatacatcactaatttttgctaatgtgaagctaatattttattttatttcttatttttgcctttttccaaactgttgtgcacttctcccagataaacatctcctaatatctgcttattataagcccttatggcttgttagaacctaccattacttttattaccatggataatataattttgattgtagaaagctcatttcaggatgagctcagagaatacagtgaactactgtgtcaaagactttgaaaggctgcaataaataaaagagagctgtggtaaacaatcttcagaagatcatctgtcccaaatgcattgtcctgatttcttatgttccattcatagcttagtgataaaaggatgaatggacccactcttgattaattttactttacattaggggggctagaaaatcagatattcgttttcattatttattggcttttttctgtaataagcatttagactttcagcagtattgatgttttgattgggtgttgcatataattttacaatttgttcaatcatttattagatattatatgccctgtttgtagggaaatgtgtctggaacagactgatgttggctgctgaggatggttcactgatttgtagtttagatgagtcaacacatacaatatattactatttggaagtaaaccacagaagaccagcaacagtttctacccgatttaatacacctttgggaggacagtttctcatctaacaatgcttatgcctcagaaagctatttattatgaacactctggatacagac

SEQ ID NO: 199817 - DNA, 1000 bp, Homo Sapiens
attgcctactatggaatgtttccaaggaggtctgtttgtcataggtcagcaaagctcagaaccacaggagcagccatctactgctcgtgcagatagatcagagccatctctgtggagccgtctctctgcaattgcctctatgtgctggcttttcagttgcccttccaccaatgccagcctcccacaagcatggaagaggcttgcactgaagtgagatgacctactggctctcatcaaagatttgagaaaggcttgttcagaatgctggtcaaagtggacagagatctctctactctgaccagttttgtttgtgcttttcctttgattgctgggtggcatctacaaacagtcttgacttgtaaggggagatggttgcaagctgagagtgagctctgtgtggctttggggaagcaactcattgacagcaatggccctcctcactcccctgagaaaggagatgcaacgtggtacgtggggttagggagatgattagcattcttggatctctgtttcaaacttcagatccaggcttgtggccactgtaaatgtgtcactcaaatgctgttcacacagagagggagtaagagcaaaggtgaagaggagagagacagagggctgatttctttggaagcaaactttagtttttaatttaactcagtaattctccaactttaatgtgcatcagaatcacctggaggggtttttaaaatggaaatcgttcggctccccaaatcagattttcagattttgcagttctgagagacagaaacccaaatttgcatttctaacaagtttccaggtgatgctgatgctgcagatccggagaccacacactgagaaccactgatttagctcattgccagccctctattacagaagtttaggcagttttgactgaggagggtgctcattcattcattgattcgtgcactcaccacatatgtattgacactctacaaagggctggcagaacctgggcctttatagtgttacagaattc

SEQ ID NO: 199818 - DNA, 1000 bp, Homo Sapiens
agggaaatgcaaatcaaaaccacaatgacatgtcatctcacacttcttagattggctactatttggacaagagataacaagtgttggtgagaggtagtgccaggtctattcatgtggaggtgagacagctgcagaagaggcatgagcaggaatgattatttcaaactgctaaggagtcaggtgtgtggagaagaggcaactcttgaacactgctagtgagaatgtaaactagtacagccattacagaaaacagtatggaggttccgtaaaaaattaaaaatacaattaccatatgattcagcaacctcatgtctggatatatagccaaaggaaaagaaattagtatttcaaagagatagctgcactttcatgttcattgcagtattagtcacaagccatgatacaaaagcaatgtataaatactttctgagaaatgcattgtacgtgattttgtcattgcatgaacatcatagagtgtacttacattaattcagatggtatggcctactacacacctaggctgcatggtatagcctgttgttcctaagctataaaccggcacagcatgccactgtgctgaatactgtaggctattgtcatccaatgggaagtatttgtgtatctcaacatatcaaaacagagaaaagataccataaaaatataatattctaatcttatggaatcaacataagttctagaaatctaatgtacagcatggtgactatagttaataaaactttattgtataccctcaaaatttgctaagagcatagatcttaaatgttctcacctcacatacacagataactatgtgagatgatggacatgttaattagtttaattgctgtaatcacttcacatcatgttttgttttccccctaactccaagtttagaatcaccagatgaaattttgagaccacaatgactgaggcttggtgatcattctcataataaaaagtaaattttattagacatgaacttggaacatatctggaattc

SEQ ID NO: 199819 - DNA, 1000 bp, Homo Sapiens
ctgcctcctcgtcctggaaagcttttccccaaataccattttgtctctgccttcagatttttgatcaaatgtcaccttgctcccaaagttttctctggccatgctatttaaagtacaatgctctgctccactccttgcaatctcaatgcctctgtcctgctttagttttcctttgtagctgttatcatcaactgacatagagattgcttatgtattttgtcgttttctgtctcctcacattaggaactagggttcgtgagagtgggggttttgtaggctttggaaattagtatttctttagcaacaagaacagtgtatatggcagacactcaataaatccttgctttaaaaagtaacagtgtatcatgataaaaatacataggcacatgaatgaaatataaatacaatggtatccatctccaatatgttctccaatgatctttacctgctgctaaagaattagtgtagtcctcctctccattgtatcagggttaatctgtgtaaccaatagattatgtaatgttgtgtgacctctgagactagattgtaaaaaatagtacagtttctattttgttcacttggatcactgactctgagggaagccagtgacaatggggacactcagcagccctgtggagtgggtcatgtggcatgtaattaagacttccatccagccaataacattttgccagccatgtgagtgagtcatgctggaaatggatttgccagccccagtaagcttcaaatggttacagatctggccaacatcttaactacaacttaacgagagactccaagccaggaccaccaagataagctgctcccaaattcctaacacagacattgtatgagattaaaaagaagtttattgttgctctaagccagtaattttgactaaatttgttatacagaaatagtaattaatatggatttttgtacctaaattttatacccggaatgctgtaacaaaaatcaaaatgtgggagaagctttggaattc

SEQ ID NO: 199820 - DNA, 1000 bp, Homo Sapiens
gtaggttgcctgttcactctgatggtagtttgttttgctgtgcagaagctctttagtttaattagatcccatttgtcaattttggcttttgttgccattgcttttggtgttttagacatgaagttcttttcctttttttttttttttcagacggagtctcgctctgtcgcccaggctggagtgcagtggtgcgatctaggctcactgcaagctccgcctcctggattcacgccattctcctgcctcagcctcccaagtagctgggactacaggcacccaccaccacacctggctaattttttgtatttttagtagagacggggtttcactgtgttagccaggatggtctcgatctcctgacctcgtgatctgcccaccttggcctcccaaagtgctgggattacaagcatgagccaccgcgcctgacccagaaaagttgtaatttttaaacactatgacatcaacataatccaaaacaacttttttggcattgagtagatacatcttggtcagtaattacagtgcctcactttaaaattgactaggtttaattatgtacaaaaaagtggtcaaaagaatgctctgttccattaaatagtcacaatgtatagaggaaataaaaaaatgttttctgagatacacctttttgtaccttttctctctgaaaagttcatctgaggcctgttgcattccactatactcatccttaaaacaaaatatcttctaaaattattgcactatagccaactatgaaatttggctattataagatgaatagcactggaaacttttcaagctgatcttatttaagaggagtagaccctttctgtcaaactactaagtaggatattgaaggggaaatgtcatcttataattaacatagaatgaaaatattatttggcatgtttggtagtgtgttttgccaattagccacaaaacaaaaaataagaatcgtcaacaacaaaaaaaaccctcaaatccaaaaggaaacaaagaattc

SEQ ID NO: 199821 - DNA, 1000 bp, Homo Sapiens
ccgtcccaaggtgggtatttgagctgaggaactgagaagctgttttctgcctagagttagagatccgagaggcatcagcacatggaagggagggaagctatgatgcctccagggtgggagatcagatgaaccaggagaggcagggcccgggaggaaccccggggagcagccgcctttaaagcctgggggaagtagcttcagagaaggtggggcaggttgggtggggggtgctggaaaaatataattaagaaagaaatttctgctcatcccagaaacccccatcacatccgtagacgtaaaagaaacctgtcttatgattaagcattaagccaaaatgtgatgcaatctgctgagagatgacaaagtcagaaataaatcccactttggatccagccaagcaggtgcaacccgttacacacatggtctccagatagacggtgactagtttccagttgaaaggactcaatggcaccatttgtcacacatagttcatcctaaattcacccagtaagtgggttgattctctgtgtggttaattggctttatctacaggaaaaacaaacctcttatctatgacaggaggtagttttgcaactgggagtgagatgccccaagaactgaggttccttccttctcacagaaactgggagacaggggcgccttctgcccggatgcctgcctttcaaagagaggtctcctatggccttgaggaggacagttctgggttggcaggcaagatgtttatgtatgctttagaaagctttacatacatcttcaagggctagagaaagaattttcaattacctcttctaaaaaataaatgctctcaaagtccagcctaggctgcatagcaagatccaatctccacacacacaataataataatcaatttgctgggcatagtggggtgtgcgtgtagtcccagctactcaggaggctaaggagggaggatcacctgagcccaggaagttaaggctgcagtaagcttggatggcaccac

SEQ ID NO: 199822 - DNA, 1000 bp, Homo Sapiens
gtgtgcgccttgagccatttgcatcatggtatgtgcattcggccaggaatgtcttcaagtttcaggaacagaaacccccgctcactgcagcttgattgaatgagggcttatttctcgctcacaacagcacacctggaggtgcttggctgccagtgttagtttggtggctgggcagtgtcagggcagagccgctttgattctcttgatctttcccctcatggacacatcgctcctgctgccatgtcgcatagcctcccctagctccaaggaaggtggcaaatgttatttaacttttcagcctttcctgaggaggaagccagagaaaaaatgaattgagagtatctgttggggtggccagccagcactgcctggtttcatggggaaggaaaagcagtaataatgaacattaatgggtgctgactctgtgccaagccctgccgtaagcgcctcacgtgcatgatctcattcagttcttgtaactaccctaagacgtcactgctgtgatatccccatggtaatgatgaggaaactgaggcacgagtggtgaagctgcctgccaggtagaggagctgggacagggaggcatgcagcctgggtccagggcccctgttcttagccactacactttgttgcctcataagaggtccgggggtgcggggggtggggtacaggggaccaggctgctcactgtctggcctgggtttaaattcttccagcaagggcagagcccagcagtgtgttttgctttggggaagttgtgatcattaaaaaactgtcttgtgaatcacatccgcccctgtgtaactaactacctcccactggttcaggtctagtcctcgggagagcaccagctgcacgtcttattcctggcagccctgcagggacttacaagtggctgagggaacccctcttggcctccctttttccaaactatacctgtgcttttagttattcttcccaggatgagccttctagccttttctttctctggaggtctgct

SEQ ID NO: 199823 - DNA, 1000 bp, Homo Sapiens
gtgacacttggaggtgggcctagtgtctgcccaagtctgctgctacatgatgctgtcagcatctttgtcccaaaatacggctataattgggtctctcccaaacaaaacagtccctttacaagatacccagagaataaatccaaagtctatcctgaaacaccacagcctccaaaatctagtacccactgtctgaattttttaaaaaataaattttaaagatgtaggaagcacagagaatagtattattacatgtactcagaagtcacactatcacatgttactgtgttgtcacatttattttattattttctagtgaagttattacaagtacagtcttctttcccctccttgaattcacgcttcagtcattttcctctgcgaatcgctttatacagcccatactcaagcctgacaggaccatgggaatttccagtggaaactggtgccatattgcctccctacatttgtctgtgtgggacccctgactagaatgtccccctacccatcagctgcccctggaatttgagagttcactcaaatcctactagctcttcaagcaccagttgaaatgccacacctcccatgaagcccgtgggttttctttcccacttctcttaaactcccccagccctccccactgtcaccttgagctgggataactttcaaatccctgcctttggagcacaggattgattcagagcacgaggctgaaggctcagcttggccattgactgagtgtgggatgcttgacagactcaatgccctcatctgtgaaatggggataataatgtcttctttgcaggcttgagagaaaatgtgtgacggctgtaagggatgatcatgcgagggattttataagtaatcctaggtaagggatcatttatgtttgctaatgctccctgactttcgtcatcatttgcggtgatgcatgcacgtatctcaactgcctgaggacagagtgaatcccggcctgatttaccttttatgctacgcagaattc

SEQ ID NO: 199824 - DNA, 1000 bp, Homo Sapiens
cagagcgagaccctgtctcagaaaaaagaatgacaaagtgaccagctcatggtcacaaaccactaagagggggaataggacacatccagaggtgcgggtgcaaagcccagacttacaacctcaagactctgggaccccaggtgagccccttggcttctctgagcctcagtttcttcatctgtaaaatggggacagtgagtccaacctcatctaggaggtgaccagcacagtgcctgacccagcgggtactcaactggtcattggaaagggcaagaggaaaggccctagcatttggggacccctcccaggagtgctggaagaccaagggctgctacctgaacctaacaggagaccccacggagggaacgggaacggccagctgcccacaggatgccgggaccccggtgcctgtcaccttccctgtccctgctgtctgacctcctctgtccccctggacctgctcaatggtctggggccacacagagtggggtgccaggccatgcctcatagaatgggtgcgaccctccccaaattctccaaacggccttgcccgcttgggtgatgagggaaacggagcctgagtcgggactcagacccccactgatctgcctctagaatgctgcaggcctgacgggagagggcctgaggcgcagggtggcccaagccttcagccaggagctcagagggtcacaagtcggggcctccagcacccaggaagcaggactcgcctgcctgggctgcaggctggagagtgggcagacgtgggccgggggtcggttggtgccggcgggaggttccagcccctgtggatggagatggaggcgacccccagtcggtgcggggagtggggagttgagctccctcagtgggggtggtgggggctaccttggggtcaggcttcggactgaggctgggggaagctgtggcgcccgcattatttgcggagaggagcaggaggatgcttgggggttgggggtgcgggttccctgacaccgaattc

SEQ ID NO: 199825 - DNA, 1000 bp, Homo Sapiens
gtttaaatctgctgaagctgtgcccacagcttcccccaggtgctctgtcccagggagatgcgagttttatctataagcccccagctggggctgctgcctttcagagatgccctgcccagagaggaggaatctagagaggcagtctggctacagtggctccacttagtctgaatttcccagaggctttgtttacactgtaagggaaaaccacctactcaagcctcagtaatggcagactcccctccccgaaccaagctggagtgtcccaggtcgacttcaggcgtctgtgctggcagtgagaatttcaagccagtgggtcttagcttgctaggccccatgggggtggtatctgctgagcaaaaacagttggctccctggattcagccccctttccaggggagtgaacagttctgtctcattggcattccaggtgccactggggtacgaaaaaaaactcctccagctacctcgggtgtctgcccaaatggccgcctagttttgtgcttgaaacccaggaccctggtggtgtaggcacttgtgggaatctcctggtctgcgagttgcaaagacagtgggaaaagcatagtatctgggcccaccgtcactcactcacggcttcccttggctaggtgggggagttccctgaccccttgaacttcctgggtgatgccccaccctccttctgctcaccctccatgggctgcacccactgtctaaccagtcccaatgagatgagccggatatctcagtggaaagtgcagaaatcacctgccttctgcattggtcttgctaggagctgtagaccagagctattcctattcagccatcttgcccaagaatcagttttgctttattttttcatgaagattagtaagttcagtacattttcacatacctacttaccattggtatgtacttttttgagaaatgtcaatttaaattctttgcataattttaattgagttatttgggtatttttgctattgagttgcatgaattc

SEQ ID NO: 199826 - DNA, 1000 bp, Homo Sapiens
gtgttaacaatgcatgtctttgaaacgataggaagtcatgacagtgaactaacatggaaaacaaagtttctgaaaatgtggttaataagattgaagagaaaaaagttctaagaaagatcatagtaaaccttacagagcattttttgccctaaaatgttgtgggggcctaatatagggagataagaggtaatatatgaaaaacccttggcactgtgcttcaggatattagttcctattccctctgattcatttctgattcaagtaccatttgtgtcctcttgacacttatttcagtggtacttcattgctcagacattttttgcaatacttgtaattttcctgagagactgtttacaagccacacaagataatttaaaactttataacctatcattgctgttcttaataaattacccagatctgcattgtcttagtcactcaccttattctcagaatttagctctgaatgaattttggcagtttccagcaatcagactcaacctcaaaagatggggatttgctctcattttcagatagtagaattcagcagaagtaaagaattgaaagagcactgcatttgatgttgagacttgtattctgttccaagttcttttgttaagtagacgtataccttcatttaagttctacttgaaatggcttaattattaattatggctcaataagagcataattattatatattgtgaaagtctatgattttattattttaactaggttctgaaaataagatagttataattccatctacaataatgaatctttgaaaatttggttcttggtttgaaagtaggaaaaaacattcttagtaactctgtaccaaagctacctaaagaaaatttaactctatatttttgtataaatatgtggaatatatgaatgtattcctattttgattttttttcactaaaaatctacttagtattatgttttgactaatctattggttcattcttagttggggaacagcatttgaaataat

SEQ ID NO: 199827 - DNA, 1000 bp, Homo Sapiens
cttttttgcaaaggggagagaatgaagtccaaccttatatttactccatcctcccacttctcaccaagttcagaattatcaacataaaaagtggctcggaagtttaaagagggttaattggagaagtctcttctacctgtgttttgttttggttttgtgttttcctgtgcagtctcagtgaaggaaatgaattcctgaccatagcagaaagcattaagaagcctgtgagtcacagtcttttgggcattatgacaatcaacagttatctgattttgcaagatcctctgcacacatttctctcccaccccctattcaacagattttgaggctctttttctcttttttaactcctttttttgggggcaaaatataatatacagaacagttcataaaacaatttagtttaacaaaatattttaaaatacacatccatgtaaccatgaccccaaggttatgaaaatagtatgttgtgaggccgggtgtggtggctcacgcctgtaatcccagcactttgggaggccgaggcaagtggatcacctgaggtcgggagttcgagaccaacctgaccaacacggtgaaaccccatctccactaaaaaaaaaaaaaaatacaaaaattagctgggtgtggtggtgcatgcctatagtcccagctacttgggaggctgaggcagaagaatcacttgaacccgggaggcagaggttgcagtgagccgagatcgtgccactgcactctagcctgggcgacagggcgagactgcctgggcaacagagcaagactccgtctcaaaaaaaaaaaaaagaaagaaagaaagaaaaaaagaaaaagaaaatagtatgttgcagaagcttttgtgttttgccgttaatgtttagatctacaatccacctgcagtttatttttgtatatggggtgaggtaaggccaaggttaattttttccatatgaatatgcagttagctcggcaccacttatggaaaagacggtccttccacctactg

SEQ ID NO: 199828 - DNA, 1000 bp, Homo Sapiens
cctatcaaggcccttgtgagcttggcctctgggatgtaggggcagggaagggaggcagtgggcagcccagcctggatgccttctctcaggcgggtgatgggattgaatgtgtggatgaaggagagggagtgtcaagggtggcttcaggggttctggtatgaaccagtggagggctggggtgcctctcccagtgagagggaatactggaaagtcattgggtttggtgggggatgatcttgaagtccccagttttgcatcattttcccaggttgggtggagggggaagcgcagcctttggcctgagactcggcattgcgactgtggcttcagcttctctccaatgtctagcttccaggtggaggggggtgcagggcctgctcccctagctgtgccccagaaggtgttctaaggctcagtctggctctgcaaggccagcctggcagtgatcaccaggcccaggtcacgtaggtcccagggtcactggggctcccagtggcatggaaggacagttccagctctgcccctgattaacatgcgacaaaacaaaaatcaaaaaacaaccaaccaaacaagacaaagccaaaataattaaaaacaaaataaataaaaagcaggcacagcaaaacatgtagtgatctaatgaacacccatgaaaccacaaattagtttcagaaacaaaaccaacaaatccaggtggaacccctgggtgcagctccctaatacacctcccttccactgtgcaccctgcactccaaagaaggaaccactatcctatatttgggatttcttatgaatttctttaatttttttaaccacatatgcaagttttcttgaagtatttacagggctgttttctatgctttgaaactgtataaatagtggcgttctagtatgtattcttctgcaattagctttttttttctttcgacatgttggtgagatccatgtgtgttgacgtgtgtaagtctggctcacttattttcaacgttgcgtagaattc

SEQ ID NO: 199829 - DNA, 1000 bp, Homo Sapiens
cagttcttcaaaacctgttacacaaattgccagttttccttcttgaaaacttgcgacaacatagaggacattatgctaagtgaaatagccatacacataaagataaaatactgcatggtctcatttaagtataggatctaaaaaattcaaactcacggaagcagagagtacaacagtggttaccaggggttaaaggtgaaggaaatagagaggtactgatcaaagaggacaaactttcatttaaaagatgaacaagttctggaaagctaatgtgtatcatgagtggtgatcaacgtgttagccctaatttgattgtggaaatcattatgcaccattatatgtgtacctaaccaatttgttgtataccttgaatatagtcaatctttagttgttaactgaatacttaaaaaattttttaagtattacatatatgaatactgatcgtaaagtataaaactcctccatgctgtaattgtgcaaatgaaaacgaaatgaccaaatatctgacagcaattctgtagtccaatgtttttaaactgcagcttgcaatacactagtgagacatgaaatcaatttaggatgtacctaacagcattaatacatatcatatatatatatattatatatatgatataacacatatcatatatacatatcacatacctacctatatgatcagaatacagtaaaatggaagaaattataataaaatgaataataatcagttatcagtagacagaataaaagtaaagctattggtatacattgtatatagtaagggcattttgaacttttttcacaaatttgtttgtgtgtaaggctgcacatgcaagacatgttcttggttgtggtgtaaaatgtattttttactatgatttgcagtttaggaatcattgaagcacactgtggtagaacaaatttctgcattcagtgggtgggaaagttggctataataacccctatattttcacccaattcttggttgaggatgctggaattc

SEQ ID NO: 199830 - DNA, 1000 bp, Homo Sapiens
actgcactccagcctgggtaacagagagagactccatctaaaaaaaaaaaggaagaatgcaaaaagagccaggtgtggtggctcatgcctgtaatcccagcactttgggaggccgaggctggtggagcacctgaggtcaggagtttgagaccagcctgaccaacatggtgaaaccccatctctactaaaaatacaaaattagccaggcatggtggcgtgcacctgtaatcccagctacttgggaggctgaggcaggagaattgcttgaacctgggaggcagaagttgcagtgagccaagaatgtgccattgtgctccagccggggcaacgagttaaactccagctcaaaaaaaaaaaaaagaatgcaaaaagagtagtaaaatattagcaagcagagtagtataaaatgacaaagctggacttacaactggaatgcaaacatgatatagtatcaggaaacctattattatagttcatcatattaatatatttaagaagaaaaagcaaataattgctgacatagatactgaaaaagctgccaacaaaattcaacaactattagccaggtgtggtggtatgcacctgtaatcccagctacttgggaggctgaagcaggagaatcgcttgaacccaggaggcagaggttgcagtgagccaagatctcaccactgcactcctgcctgcgcgacacagtgagactccatctcaaaaaaaaaaaaaaaaaaaatcaacaaccattcctaataaaaattcttaagaaagtaagtatggatggatgcttccttaacatcatgaaattatctgtgtccaaagccagcatcttagttcagaaatattataggcatttccactgaagtcaggaaacgttcactactagttaacattgttctgaaggtagtagccaatgtaattaaacaagagaaatctatgagttggtaagaagaaaaaaacaagattatctctattttcagatgacataactcaaataataaaagaattc

SEQ ID NO: 199831 - DNA, 1000 bp, Homo Sapiens
tactctgcacattcaatatcatttggtaattaatgaattgctcttctaatgtttcgtgatgcttatttgtaattacatactactttcctgtttaaataaatgtatctcagagacattttatttctttggtattgacatagtattactgttttagttattttaaacatataatttattataactactagaaaatcaagtctcctggtcaactttttcttttcaaaatatctcaatattgctatagcattctcagactgttagtatggtatggaaacaacctgattttggcttttgtaagtaacctctttggcactcgtgtttatatcttcattcagaaaatgttagaaaaacatatttatcagtcatattcaaaatattttaatgtatattcaaaaacatttgaggtcaagttatttgtgttaatgttcatatcactgatcaagttatgtttttcaatcttcacaaattcacactttctgtccaatagctcctctccatttttcatgtgtaccatttctatctcaaaatttccatctgtctttcttctgtattagaaattgaagtttctcctttccattgtcagcacaattttatgcactattaattatgctcttttctttctttaataaagattttaattctgctactgtatgtagatttctcctgcattgattctttacctttcttcagccatatgtgcattccatttggtattaaccctttaaaaaagcaaatcttccatttctggcagtataaattacaagttttctgttactgagaggtcaacaccaggtacattcctaaagtttctatttcttgtaataaatctaccttcccccttaacccagataaacattttctccgtatcttttaaggatttcttctcttctaacttgtggacaccttttctaggacccaggttgatatatggttgttgtttggttttgtttgtttgtttgcttgttgagacggagtctcgctctgtcgcccaggcttgagt

SEQ ID NO: 199832 - DNA, 1000 bp, Homo Sapiens
tggcatggggctgccatgagtggccctacagtgctgcaaccctcagtaccaagcaggaaaatggagagaaatgcccggctcaaggatagctctttcccctactctaccctaagccatggttcctggctaagttttccccattttcctgttgggagcatctcaatccctcagtacttcaaatctacaaatagttaggggggcagaaaaggcaacagactgcaaggtcaagaaaccctgttcactgtttaatgcatacttgaaatgtttagagcaaggttttgccctataacctgctgtgtgttttcccataaacccctgctgactgcctgactgtttgcacttaagcagagggcttctaatgtgtccagacacagacaaaatgagttcttcacctccctggcttctgcatctcaagatagcgtgattgcttcttcaaatctctttactccaccctatttgaggtgctcagctatcttaagagtgagcagagaaagtaagacttaagatgcaaagtggaaaagagctctctggctattcgagactatcataatagtgtatcaagatttcagaagcatacgattgagtccaatcatggaataaagcaaatccagaatcatttatgggttgaatgcccccatcactgccttaagaggggtagctccatcccttggcccacagcatgcaggacaaaagagagatgaataaagagtaactatttaccagttctttattctgttacagccaggagcagaagctgacatccacaaggacccttttcagcaagggattatatatcacaccatagaaatacataaaggataaattatatccctgagatcatcatgcctccattgacctgcccaaggtttaaaggcagctgcaattaggtgctacagtcacagatctgctggtagcttagcatgcctgcattcactttaatcctgcagaaatggagccagaatgaattttgtaggcatgtccttcatccaagtttgaattc

SEQ ID NO: 199833 - DNA, 1000 bp, Homo Sapiens
atcctcttagtttatcttcagtttaagcttgttctcccttctctttcccctaactcagattctctcactgccaatttcctccctctttatagactcttagctcataatcttctcatggcctacttttttctcctcctagatatcttatccaaggataaaagaggggaaggtgaatcctggtctttcacagattttgtggattaaaagtgctggacttggagtacagggctaagaaagaagtgttaggtaaacacagaaagaaatttggatgcttctctgcccaggccagattcttctttcccccagtctgctctagaaatgcctggcttcttatgtttttcactaaagcaaacaaagccagagctacgtcttcatcaggtaaactaaaaatcagatcacatggcccgtaggagcttgctgtatttcaatatgactcttctactgtttcatggctttattccacaactctcttttctcagaaatgcatcacgccacagagaaaaccaagctctgctgtcttaagcaccaaaaatgaaccaaagtttggccaggtgcagtggctcacacctataatcccagcactttgggaggccgaggagggtggatcacgaggtcaggagattgagaccatcctggccaacatggtgaaaccccatctctactaaaaatacaaaaattagctggatgtggtgatgcgcgcctgtaatcccagctactaggaaggctgagggaggagaatcgctggaacccgggaggcggacgttgcagtgagccgagatcacaccactgcgctccagcctggtagcagggtgagactcggtctcaaaaaaaaaaaaaaaaaaaaaaaaaaaattccaaaaatgatccaaagttttaggcaagaggatagctttacctagaaggttgttagaaatatctttctttgtctcacttgggacgtttgtaccctaagagtagtggtgtttctggtgtcatctttaagcaaagaaagaaagaattc

SEQ ID NO: 199834 - DNA, 1000 bp, Homo Sapiens
taggagtgcacatgtgaccaaactctggccaatgagatatagaaggaatactgctggggcctctggggaagattttgcgccctgataaaagtaacaaaagttattctacttcttctttttttttttttttttgagatggagtctcgctctgtcgcccaggttggagtgcagtggcacaatctcggctcactgcaagctccgcctctggggttcatgccattctcctgcctcagcctcccgagtagctgggactacaggcacctgccaccacgcccggctaattttttgtatttttaataaagatggggtttcaccgtgttagccaggatggtctcaatctcctgacatcgtgatttgcccgtctcggcctcccaaagtgctgggattacaggcgtgagccaccacgccctgccctattctacttcttaattcttccttactgctgatctttttttatagcacttgtttcttttgcagaacatttttcaggatactataagttactatctacttctcctagaaaggattgaaacaaatgttagaactagttcccatgaaaagaaaaactcctgtagctttgaccctacagcagttgcccaagatggggccagaattggaatgctcagagtccattcttggggacaaagaactcctggatgtcagccatctctctcctacgagctggtctctggactttggcccagttatctaatgtgagaatctcaattgctatatgttctacagctatattacttatgaaggctcagatagtcttacagcttaaattacttcctgcaaaaccacccattcagaattcaatatagctggtgcagaacaagacaaatccctttctgtaggtagggattttctgggttacagggacacctgtgggctgtatctgagcctttgcaactgcccaattactaccagtcatgtaccacttattaattgaattaattaacaaaacatggatgatggcatcaactttggtttggaattc

SEQ ID NO: 199835 - DNA, 1000 bp, Homo Sapiens
tctaatttaattccattgtggtcagaaaccatacattaaataatttcagtttttaaaaattcagtaagacttgttttatgtcctagcccatggtctgtcccagagaatgttccatgtgcagttaaaaagagtgtgttttctgttactgttggatggagtgtcccataaatggttaagtaaagttggttgataatgttgctgaagtcttctgtattttttctgattgtccatgtagttcttttttcagttattaagagtcggctattgaaaccccaaaacaaaatttctgaattgtttttcttttcagttctattactgttgttaggtatgtttaaatttataatgttatatcttccttttagtttccagtaatttttttgtttctagtaatcttttatatcttaaagtctattgtctaataattgccactccagtttttgtagttactttttcatggtcttattttttcccattcttttactttcaacctatttatgaatttgaatctaagatgtttcttttgtagacaacgtttcgttgtgtcttattttttaatccagtctatctgcatttgaataggatgtcccagttccttgttttgccaggttggaggctgagctccccattgggcctccatgacttaattttagtagtaataggataatgaagtaatgtttgtttttttaagcaagtaaaaacttgttaaatctcaacctgttttaggttgcattaactgtaaataaacttgctgtgttcatcagaattgtgtccctcttgattaaatcatattctatgatttaagaaattctaaagtgtcaaaatgaaaaaaatgtctttagtgggaaaaatattttgaacaagtccatgtgtttgtaagaaatgagcaaagaatatgatatgtattgttattacaaataggtttatttgtaatgagagtttacttaggatttccttttaaattgagagacttaaacaactctgtcctgctaaaggtgaattc

SEQ ID NO: 199836 - DNA, 1000 bp, Homo Sapiens
gcccagtggcctccatacttaacaatgtggtccaggcccttccttaagtgttggtcattgtcttcatacatttattacattcatgccatgtagctgctaaacctgcaatacctcctgaatcccactctcttaaaaagtgaataaaaatgcaacttgtggcaaacttgtatccatcaggttatacatgttcttgaaaagctgataatcactcacatgatgagtttgcaagatgactattccagatgtcctgaagaatctaacgtttcaaacatttttacatattaacaaatgttatgcataatgtgtgctagtgggatatgtgacatagaacaccctgacaatgctgagttgctgccgcttttgctattcctttatataattttaaattcctctttaataaactttagggaatcttcaaaaagaacaattacacattcattcattcattcaagaaatatttattaaatgcccacgatgtgtagccaccatgctagacactggagatgggatggtgaaaataaatagtttccacagtcttagaatttacaagattgcatagagatagcagaaaataaaatgtcaatttctctggaaattatatcactaaccgcaagaaaatatagtcatctgaaatttcaaaatagaacagactcattgtcaccagaagtgacagcttttaactatgcaattgttgggttcacagatggacaaatggttgaaattatgcagagcctgggggaagtctgcctctagattgaaccacattgaatgtttatgcccaatagagcattacggctacagagggtggtgttcccatcgtatcacaagctggaaaatataccaaagtggtttcacacagagaacattccagaaatagtttctggtgaagaggcttaacatattactgtttgtgttctctgaaaattttgaaatgggcattgaccaacagcacttcaggccaatggaagaatttcagaaaaatagaaggctgaaagaattc

SEQ ID NO: 199837 - DNA, 1000 bp, Homo Sapiens
cttgactcttgacatgaacccaactttaactcaaaaagactgcccttaaactgcctgcattagctgagaagtgattactgatatcttgcgctatataatgaacagaactcatgtcaggttgagtacaattcacaatagcaccgaaaagcatggaatgacccctggatgagacaaccttaggcaacatgggatatatccctaaactttgggatgtattccaacacttttgataatcttctaattattattactatacttttttttttttttttttgaggtggagtatcgctctgtctcccaggctggaatgcagcagcatgatcttggctcactgcaacgtccacctactgggttcaagcaacaagtagctgggattatacctgcccgccaccatgcccggctaatttttgtatttttagtagagatggggtttcaccatcttggccaggctggtcttgaactcctgacctcataatccacccacctcagcctcccaaagtgcttggattaaaggcgtgagccactgcatccagtctattattttttgagacagtcttgctctgttgcccaggccagagtgcagtggtgtgatcccagctcactgcaacctccacctcccgggttcaagtgattctcgtgccttaccctcccgagtagctgggattataggcgcccaccaccacgaggctaatttttgtatttttagtagagatgggggtttcaccatgttggccaggctggtctcaaactcctggcctcaagcaatccacccgcctcagactcccaaagcgttgggattacaggcgtgagccactgcacccagccctgagaatctcctaattattgaacactactatagcatactgatttctctaacaagatggtctgttcttttcaaatggctctatgaaaaaaaaaaatttaaaaatgtaaaaagataatccatgcaacaattacataaaaaagtaaagctgtattggggaatggatgctaggaattc

SEQ ID NO: 199838 - DNA, 1000 bp, Homo Sapiens
aataaaccctgacaaattcttacgaaacccttctttcctccattgttgacagaaaaattattacatcatttgtttcatacctgatatttccaagattacatgttttaaaaaaaaaccccacgcttttatggtagttgtttcttgattatcttaggaaaggtgctgctgaggacttccacttccaggaatgctggactgggtaattcagacaaactctcctgctgtttgcagtgtagagccaaaaagatagtgaagaatttggcaggcactaaggacacaggcctggatcaaggtgaggataggtctggtgtgttgtgtccaacatttgaggccagccacttttcctctggagacatttgtctgttccaaaatgggtggctgagatgctgagaggctgagtggtacttctgacagcttaagagaacaaggagaacaggcatcagagttcagggtccaccaattaatgtgctctagtgagccacactcactgcaggttgggacctcagagagctgcaccataggagtgagcatgacctcttccagcactggcgtggggactagctgtgttggacttacaagttatggtgatgtctatacactcagtgagataggtaagggttattgggaataattttgtctacattttgtacttaacttcggtattgatttcaaacctgactcctgagtcagcagcaactccaaacaactccagattaatagcttttcggcttattgcagtgattcaacagggccatctttagggttttagaacatggccaagtcattatgacatctgctccaatacctcaagattcactaatgaagtcctccaagtgaatacagagaaatgccacaggaataagatcagaaaacttcacttcgtgtatggaaggaattctaggtcagaagggcagagaagttaaaagagtggcagctactaaagcaaagagagagaaggctattcattctttgagagctattaatagtttcttaggaattc

SEQ ID NO: 199839 - DNA, 1000 bp, Homo Sapiens
aatttttgcatttttttgtagagatagggtgtcaccatgttggccaggctggtctcgaactcctgatctcaagcgatccacctgcctctgcctcccaaagtgctggtattacaggcataagccactgcacccagctgagattctctctttagaaacatacagtctctgcttctctatctcacataacacacacatacacactcacaatgttagcatataatgttatgggttttcagactcactaaagccctgcaaggaccctcttctgctgctcagggatataaaactcccctatttaggaggctggaatccagactgtgaggtgcctgagggcaggaagtatggcagtcaccacaactactgaattcaaacaccacttaattagtgtttactgaaggaaggaaaggggaaagagagggaaagaagggaggcagtgaggatgggcatgatccctgccttcaagaagttcagaggtctggcggcaaggtgctcatgcctgtaatcctagcactttgggaggccaaggcaggtggatcacctgaggtcagaagttcaagaccagcttgggcaacatggtgaaaccccatctctactaaaaatacaaaaattagctgggtgtggtggtgggtgcctataatcccagctacttgggaggccaagacacaagaattgcttgaacccaggagacagaggttgcagcgagctgagatcacgccactgcactccagcctgagcaacagagcaagacaaaagttcagaatcgaattagtcagacaatctattaatatgcaaagacaaatgagacttgtaaataagttcaaaagaagagaagagccatccccagtccaagcaggatccattgtgccaactggataaaacccctgaatacttactgcaggaagtcagacaacggagaaccgctggtccagtggggattggggtggtgcgggactagttgggcaacccaggtggtgggcttggagcctttcaagaagaattc

SEQ ID NO: 199840 - DNA, 1000 bp, Homo Sapiens
tgtgcgggtaatgccctctttgggattccaaaacacaacaaaacacaacacgcacagacacacgcataattacgcagacagctgcggagcgggcatcgcgagtgtcctgcaagctctccaaaagtctccgggaaggactgcgcctcccgcggtatcgctcccacccgccacccgcaaccaccgaagtgagacagggaagtgtggctccgagcgtccgcgagctctgggcacaagggccgtcaagagagacggcgccaccccacgcagagccgctcgaaaagaggagttttgaacgccagcccccacacgacccctgaccttcctcccggtccccattcaaagctggggccgccccaccgcacggaccggagaggtggcgccggcccggggtgaggaagtggccagcggctgggccaggatccctgccgtcaccaaacggaccccgggcacggcgggccggggtccccgagggtgcgccccgtccctgcccgctccggctgagccaggacgcagaccccctcggacgcagcgccctgggagccggtccccgcggggcgcaggtccctgggcgccctgcctgcctcgctcccggccgggcagctcacctggccgtgccgcccgggcacagctgcccgcctgccccgggtttgggctccggggtcccgcgcgcgcagcccgcgtcccgactcgggtcactcagcgccgctcacgccctccgccgccggcgctcgctacttctgcttcggccgcggcgccgcgccacgtgatcctcgggggccgccccccgcaccgcccagcctcgccccgcctcgccccgccccaggcgcgcccagccgggtccgcctctcggagcgcaccccgagtgcagcgtccccgcgccctccccgccatggagcggcccaggcctggagccccgcctctgcgtgccaaagaagaaactgaggcaacccgaggggaggctacctgcccgaggccacttggccaggtgcaaagggaattc

SEQ ID NO: 199841 - DNA, 1000 bp, Homo Sapiens
gataaggaaccacttcattttaaaaagtaacagaaattaactcttggaagtggacttgaagacatttaaaacagtctacttattttaaaaaaatccttttagagatgagctgacaaaagagatgccctgggcaataaataaggacatatatttcattgatgatttgttggtaagaagaggtcttgcttttataaatcaatatcagacatgtttctttgtattctgagaagaactgtatccattttttagtactttgagatgattcactgatcaatgtgaaaaggagataactcactcttctagttcactattcaggcagctgttgaaaagctttgattctttctctaaaaatagtttgctgtgggacagtatcaatatcctttctacaaaagatgtgtaaaaacttggatatcacaacagacatgacatctccaaaagatttcactcttctcagggtgaaaactggcaaaaaggattctctccatacacattgcaagtatggggtagaaatatttttaaattacaggtttgaataaacgatataggaaacaattaaccctttcatctttcaccactcttaaaaaccgtgtttcacttgaaaaactcgtttgtctttttccaagatgctttgtcattatattaagtgatccgcacaagtaccctgggaaggctcttctctgattttacaatgaaggcaaccctagaaacaggattctgacctgagacaaagtcacagaatctgaaaaaaaatctagattttgctacacgatttcttcttttaagaaaacctcagctgatccaggctccaaacatcctgtgatctagggaaaacaggctagttgatttcttgatcatcctgaagacatatgtgaggcagggatataggttaataggctcaattctctctttgtttaagtcagtcactaataacgtattgtcctctgtaaggcacattcactctttagagtcattttggggaattaagtattaaattgaattc

SEQ ID NO: 199842 - DNA, 1000 bp, Homo Sapiens
ttcccctccgtccctctggggcccgagttcttcccgcgccacccgtgaccttgggggctcgaactcctgctccgcgtttccgaacggcctgctcaaaacactttggcaaaggcgccccgaactttaccggggagccaaggacaaaagcgttgaagatgtgctttttaagatatatgtactgtggatgactgatttagattccggaagggagactcatagcccacctatcctggtcagcgccttccccacacccccaacagcccccttacatctgcatccaaccaccgaatattgggagatgcgatggaatttcgaaaacagtgctctcctatttctgccctctagaaagccccaaagtgctaatcactgccgggatatagcagattctggccctagtctatttcgggtcctgtatgtttttgcatcgtacagtaaaaaagaacctggtacttgtgaaaagtccctcacagtgtttaatagaaacgtaagtggctgagtggccccaattaacaccttatgataaggcattcctaagatggagtgtcagacaccaaattgtgaagagatgtatctaattaatcctcctaggatgacaccgataaacaagcctctatttaaataaagatcaagggctcggcgcccggtttgtttacattctccgccagggtctcctagtatgcaccggtgcaggcggtgttccctgcccagggaggagatactggctcgggggtctgctggctcgtcctggttcacatctccgttcttgccccaaataaacaaaaaaccacaataaaatcaataaattgcaatgaaacaggaaaaagcagtgcaaagaggacctgactcggagttggaaatactgttatttgccgttttccactggtgttctttccatcaccaaacactttttggttgttggtttgcgagggaaaaaaggaagaaggggggaaagcagcccacatgtagcctctagaattcttttctgctctggagagaattc

SEQ ID NO: 199843 - DNA, 1000 bp, Homo Sapiens
ccattaagaacatttgtgattcatgggaggaggttaaaatatcaacacaataggagtttggaagaagttaattccaactctcatagatgactttgagaaactcaagacttcagtggaagaactaactgcagatgcagtggaaattgaaagataactagaattagaagtgaaacctaaagacgtgactgaattgctgcagtctcgtgataaaactttaatggatgaggaattgcttcttacagatgagcaaagaatatggtttcttgagatggagtctattactgatgaagatgccagagatggcaacaaatgatttggaatataatataaacctaggtaatctttatcaactaagtggtggggtttcagaggattcactctaattttgaaagagttctactgtgggtaaaatgttaccaaacagcatcacatgttacagagaaatctttcataaaaggaagagtcaatccatgtaataaacttcattgttgtcttagccaccacaacctttagaaaccccaccctgatcagtcaggagccattaacatcaaggcaagagcctccatgagcaaaaagattattacttacagaaggctcagatgaccattaacatcttttagcatacagtatttttaaattatggcatgtacatttttttttagacataaggctattgcacacttattagactacagtatagtataaacataacttctatatgtattgtgaaccaaaaaatttgtgtgacttgctatattgcaatatttgctttattccagtggtctggaacccaatctgcactgtctccaagttatgcctgtagattgccttcttccatatttgcagtctaggaaaagaaatggttagctaatgtggtaatgagtataaaatactttcagagtgcaggacatatattaagtttataagagacagtagatcttattatgaagatctgctcagcaagcacatcatagtataataatatattaattgtgaattc

SEQ ID NO: 199844 - DNA, 1000 bp, Homo Sapiens
ttttcctccagcatgatacctctttctttccctccctccttccttccttccttctttccttccttctgctgttgcacaaagactcaagaacagcgttgaaaagcattgtggggagtggcaccacgtttccctctgactttaatggggttgtttcttatgctttcccaccagtgaggacatttgcaggagtttcattttatctagccttagcaaattaagtacatttccttccattcttgtgtgctaattgttttttgcaatcaagatgtttattaaatgcttttctttttaataacagcatgtaaccacccggtgggttctctttgcctgctgtctagacagagccaatatcaagacaggggaattgcaatagagaaagagtttaattcacacagagctggctgtatgggagacctgagttttattattactcaaatcagtctccctgaaagcttggggatagggggttttaagcataacttggcaggtagggggtcagaaagtgggaagcgctgattggtcaggttggagatgaaatcatagggagtcaaagctgttctcttgtgctgagtcagttcctgggtggggaggccacaagaccaaatgaaccagtttactggtttgggtggtgtctactgatccatcaagtacagggtctgaaaatatctcaagtactgatcttaggttttacaacagtaatgttatccccagggacaatttggggaggtccataatcttgcagcttctaactgcatgactcctaaaccataatttctaatcttgtggctaatttgttagttctgcaaaggcagtctaacccccaggcaggaaggaggtttgttttggaaagggctgttaccatctttgtttcaaagttgggctacaaactaaattcctcccaaagttagttcagcctatgcccaggaatgaacaagaacagcttggaggttcgaagcaagatggagttagttgggtcagatctctttcactgtcagaattc

SEQ ID NO: 199845 - DNA, 1000 bp, Homo Sapiens
gtatcttttttcatttcccaatgggttattaatttcacatcagagaaaagagtctagttgtggggttttttttcccctaaaccaagcaatttctttgaataaaagttgaaatttcgtttttcaaaggtttgtatgttttcttttgtatattagaactatgactgtgtttattctcataatagtagcatctgcataaatctaactattgcacttgccccaaaaagccttagaaaagtcagttgcagagatttgtaatgaaatctaatattactaggttttaacgctataatagcttcagtgttataatagtcttttatatttcctttgggggaaaatggattactactctttttcagaagcctgttcccaaggtaatcactttttaaagttttctgtgtttctgtttgttctgaagaagatttgtttgtatgaatgttaaaaggacatataagttagttttcaaggatattcctgctggaattaaaataactctaagtgatctttatcacagatttttttttcctttgaactagtaggaaacagctatttagctggttctgttatgtagcaatttaaaactaatgctgtaggccactttgtggttgttccttgtggcagatacttttgtaccttaaaattgtattttgctatttaaatttttgtttcacagggctttcttccttagataattttgtgatacaattgagtatacacatacttaatttagatatgttcctgtaacttaatataacataatttttttgtcttacagtctagcttcaattaagttgaataataaatttaccgtataaaaattaaacacctaaaaagattattgaacttcttccatgtatagcacattaggcaagctaattggaaatttggaggaagtaagctagagatttttctaaaattttattagttttccctgaaagttaataatttaaatatcatttagccaaagtatgttactactaaaagtgactgttctaaggctgtt

SEQ ID NO: 199846 - DNA, 1000 bp, Homo Sapiens
tcaaagcaaagagtaaataaatttaaaattatgtcaagaaatgttttggcacattatcttatttgtaaatgattgaaatattcaatgaatatgcattatttaatttaacttcatataactttagatgtgtaagttaccaaagagatttgggaaatctttttttttaagtaggcattatagaaacataattattgtgaagagcttatttataaactgttatcttacatatatttaattcatttatttttaacaatattgcctggattgctcataaaaatgagacattaaacaactagtcatcatctcaagttagttttctggctgataattttataatgtaagagataacatcagtttattttatttgtaaacttaggtaggaaaagttgtgtgtcatattatatttaatgctgacaactctaaagacatgcctatattcatcaaactaacaaacttgaactagcttttatttactgaagattatcccagattacatgaacttgaaaaacattttaggttaatttctatctttctaagagtttaaggaatgcttaatatttatcaatacttatttttctttaagccaactcaatagagctcttttatgatttaattttggtgataccatccagaggtggaaaatgtatcacgtatacatacataaacatgcagatagaagcagatcttacagctttcattctaaaattttagccatgtgccttgtgtaataataaaagctcactattttattaaagaatacctggaattgatttttttctggccagtgagataagattacctgcacatatagctaaagctttttattaatattggaaaaaatcgtttaagctttctcatttgccttttataagaggtcatttagaggggcagcttttgattcatttagtcttttggaaggctctacatttcaataaaatatgcatcctattgtttctgaggcattttagattcttgtttttctaacatgactcaagaattc

SEQ ID NO: 199847 - DNA, 1000 bp, Homo Sapiens
tataaagcccccaacatagtgcctggcacttaggagagactaaacaatgataactgttcttagaatataaacacacctcttagccttgtgcccacctcctccagtttttgccaccctttctgaccttgaaatacattgaactatataaaaataaatgaagggacgccaaacaaaacatcatgtgcacagctctagtagaggcataaacagttgaaaaaaaagtccatagcaacaaccaaagtattttttttctcagactcttttaaaatttaaaactttaaataagaaatcaaggggaaaatgaagtagctgaactggaattctaactcaggcaatctggccccagggtcagagctctctacagttataatcccctatgactttaaagggtaagaacattccagacccaaaggaaagaatttgaaactgcagaggaaatactgctctactgtcaggtaaagatgcagggtggtcagacttgctgtgatgggagcagtagaggtcagcacgtatctacttatacagtccgaggtcatattctggtgctgccatttaccagccattgaaacttgggcaagtcactttgtttgagcctcagttttctcgtctgtaaaatgtggaccctctttcacagaattgtggaaagaaacaagctcttaaatgatctcatgggacacagtgagtgctcaataaatgggagttatttttcttacaatgagccagaaagactatgagaaccacattggacattaggaatgcagaatgcccacgtcagaataatcactatattgtggctggcaggattgaagtttctaaagccaggaatattacggacgcaggcagaacagatgtaatagccaaatcccttgactcttccatcaggtagttttcagacaaaatcagatacaagtggattgctaatgtacctagcactgaagttggaaaggtattattgggagggtcagccttacaaagacatcgtaggtgatcactggaattc

SEQ ID NO: 199848 - DNA, 1000 bp, Homo Sapiens
tgatattaattcttctgatccatgagcatgggacattttcctacttgtttgtgttatgtgcagcttctttcatcagtgcgttgcagttttttgtacagattttccttggttaaatatatttctgggtatttatttttgtagccattgtaaatggtattgtgttcttgatttggttctcagcttgattgttattagtgaatagaaatactactaattttgtagatagattttgtttcctgaaacattgctgaattcatttatcatatctaagagtatctggaagtttccttaggagtttctaggtataagatcgtatctgtgaagagagataatatgacttcctgttttctaatttggatgtcttttatttccttattttacctgattgctctggttaggacttccagtactatgttgaataggagtggtgaaagttgacatccttgtcttgttccagttcctagggggatttctttaaacttttccccattcagtatgatgttggctgtaggtctgtcatatatggcctttattattttagggcatgttccctctatgcctaccttgttgagggtttttattatgaggggatgctgactattgtcaaatgctatactattattacttatataatttggtcaaattattttttatccattctgccaatctatatcttttacatggagcatttaatctatttacattcaagattaatatttatatgtgaggtttcattcctatcataaggttaattttaatctagttgtttcataggttctttattcttttttttcttctatatgtttgtctttctggtttcatggagttctgtcatgctgctattttatttctttttattcctcctttgtataattttttataagacctgagaattttatacttccctgtagttttatgctggtgaatattgaccttttatttctgtgtttagaactccttttggactctcctgtatggctggtttagtgctgatgaattc

SEQ ID NO: 199849 - DNA, 1000 bp, Homo Sapiens
cctggactatttacttaatattttcgtttgagtaaaaactcacttttgtaattgaaatgcacactttaccccatcctaaacgataatacccttgaaacaatgtgaaaataaagagcagtcctctatgcctccgcagtcatctcaatcatcaaggctacatgtactagattcttggaaacactgtcctagagaaaaaagagctgaatccagggttacgagatctgactttggacttgcctccctcaccgagcaattgtgggattctgggtgagtcagtctgtttttatctccgcaataaaatgagtacaatatcagccctgcccaccttacaaggtgattacagatcaaacaaaccaaagtgtgtcaaaatggttgaaaaaagaaaaagtactgaatatatgacagtgcttattatggatgtagatgtggactgtaatgatcatacagtggcttcctaaaatgagtgtcccttgggaaaatgctggcattttaaaaccaaaaagaatggtttctcctctaagctatgttcccaggatgttccagctcttatcttctcaaaacttgttttcactcacacaatttgatcactgctcattcactgcttttgtggtatttccaattatttctagcaagcaagcctcatcttcccaaatatattaaaaagtccccagagaactcattcaaatgagttaacaattataaaataaactatacattatagtacatagtgtggtatagacaaggatttagtgctatttatgggctgagtctttgtacaagttattaatctctctgaacctattttctaatttggaaaatgaaactaataatccctattttgcaagttttctgtgacattgaatgaaataatgatagttaattgcttaatacagtgcctggcccatggcaaattgtaaaaaaaaatagccattattattgcaagagtgatgagcattattattcgcactggtgacataccagtattaggggtctagaattc

SEQ ID NO: 199850 - DNA, 1000 bp, Homo Sapiens
gggaggcggtcacgtggcgcaggatgcacccaacaccaccgtcgcaggcagagtcccgccccgccaggcgacgtcacgtgacgcacattcgctcaagtccacatccgggcatccacctggccctggggcggagcctgcggtcgggtctcggcgacccgccgggactttctaatcagagtcgtggggattttacgggtggagttactccgaaacctttaaggccgagtgtgataggtagttcaaagcttcctgtttcttcagtctgacagcttcaaatgtcccgggttgtgctcaaagcctccctcttgtgagaagaatctctttggttgcctgttaaagcggtcagccagcttgcaacacggaagcagcttttagaggaattaaaaccaaaacaaggagcaaattctggattaaaaaggtattagggaaactgcagatacctgaaaattctagctccatgtttctctttgccggctatctctggctctttaactcttctcgagaaatggcaccaacatccatccagttaccgactagaagcctgagaaatcgtccttaatgattatttatcctctcttaacctttgcccgtccagtcggtcacacgatcttctcaactctgctttccaagtttctctcatgcccatctttttccccccaatccagcttccagcctaatctcattccctaaattgcactagtacccactctgaccgcagactccactccctatattcttcatagattaatatttttacaaaacaagtatcaaataggaaactttacaatggctccctattgcatttaaggtgaatttcaaactcctttaagatattttgtccttaaagagccccatgattcctggttccatcacttgtacattttctttaattttcttaaaattcttgccacttttgccaatgctgttctgtcaagaacactctttcccttggccgaacttactcctatgtatactgaagtttcactgtacagatgaattc

SEQ ID NO: 199851 - DNA, 1000 bp, Homo Sapiens
ataaaactgtttagctaaaacacaggagaatactttcaggacatagggcgtggagaagaattcttagacacgacattgaaagcatgatccataaaaggaaaagactgacaaactggactttatcaaaattcaagacttttgctacacagaagacctgtgaagatgaaaaaataagttatgaactgagagacattacttgcaaaacaaatatagtcatgttgtaaagcatctttacgacgttgagtcttcaatatatgcaatgaggtatctctccattcatttaggtctcatttattgtctttaattagcactttatagttgtcaccatactaaatctggtatatattttgttagagttatacctaagtatacctttttgtggaattgtaagtggtatacattttaaactcagtatccatgtggtcattgccagtatatagaaatagcattgatttttgtaagcttatcttgtatcctgtgaccttgctgaactcctttattagttctaagattttttttttttttggtagatttcttaggcttttctctgtagacaaagatatcacctgcaaagatgtagtttatttcttcatctccagagtatgttttttatttccttgtcttgccttactaccctagctagaaattccagtactatattgaatagcagtggagaaaacggacatctatgctttgttcactgccttaggcagaaggcattcggtcttgcaccattaagtacaatgatagctccaggttttatgtagatactccatattgagtttaaagaagtttccttctattcatactttcctgagagattttatcatggataggcattacattttatcaaataatttttctgcatcaattgatataatcatgtgatttttctttcttagcctgtcaataaggtgaattaccttgattgatttctaaatactgaaccagctttatatccctacaatacacccttcttggtcatgttgtagtagaattc

SEQ ID NO: 199852 - DNA, 1000 bp, Homo Sapiens
agtggaacctaatcatcagcagttctcatcccttagggctttttcctttttgttagttgaccaggttagtcagtgtggctctccctccctcatagaagagtgagtggcaatagacagcggtattctcatatttagggctgaaatttgagatacattttgctggtacgaattctaaaagtactggtaaattagatgacaggtagaggtaggagacagcatctaaggacaaatgagctttacaaatgtgtgagaggaacagttacccagttaggaatttaaatgcaaataaacagattgtagaaattaaccattttcctcctgtctagccacaatttccgagacttctgaaatcccatagacggtgccatctgccctgctttcacaggtgccaacatcttgccctgcttcccactgtaattaccaataagattaaaatgctggtgaaagcaaggtgaaggcaagtcttgcactttgctaagtacagacatattctcaaatcgtgcttatcatcctatcataataatcattcaaaactgagataattccatggctatgtttttaggagtttgtgtctctctattgaccttattcctatgttaagcttcccttcacaatgcataaaactagcacgtctgtgttatagaaacatccagcacataagagattatcaacaagggcacgttggtgtcaggccaaacagaaattcagcttctggggcggatgtcaaatttctaatactttttcaggattcttgctgaaggaaaagggggcccagcgtggaggggccgaaactgctgccgtgcattagctctgtggaggggagtcataaattctggttgtcagcgttttccgtggctttgtggtgaaggtagtctagctttcatgtcatacatgaaatatgttagatcccatctttaatgtagaaaccacagttgtttggttatactctttaaggaggttgtggtcagtgttgcaatatttgtgtgagattagtgaattc

SEQ ID NO: 199853 - DNA, 1000 bp, Homo Sapiens
gctcaacaggaaacatcttctctttggaacagagaactagaaagggcacaaaacatgcatcctaattttgtttttattatggcctttcaacaagatttcaaagtttatccccaaatatatggtcaaatacaacgttccctgggttgtcaactagtattctcttgactgagggcccttttgcaggggacaaagacttcttaaaacaaccctgcttcctcaccttctatcctttgtctaccaaatcctgctcatccttaagatgtcctggttcctgactttctgaggcttggtgagatgccccttttgggttgccatggcaccaacttgttactcctaccattgaactttttatataactgtgaaattaaaaatgcttatttacttctctctaccacctcttgatctcaggcgcttcattttcctcatcaacttatctttagttccaactacaaaagccagcacagaggctcaagtttgggttgattaaatacatattctaccctccagtaggtccccaatttaccatatctttactgtattcccaatctctagagctctcaacataaaatatacaatcttaggaagtcatgcagaaaagactcactgagtcagaaagaatatgcccagttgtcttaatctgccaccctgttctctctgagggactggacactccattgactttatgttcctcaagcttattgttaccagtggagggtgtccaggttcttggtatcttgaacaaaggattggacaaaacacacaaagaaaggaaagaatgaagcaacaaaagcagatatttattgaaaatggaagtacactccacagtgtgggagtgggcccaagcataggggctcaagggtcctgttacagaattttgggggatttaaataccctctagaggtttccattggttactttgtgtatgccctatgtaaatggagataatatttcccggcatagctgaagtgtgaataggccttatgttctatgcctccagatc

SEQ ID NO: 199854 - DNA, 1000 bp, Homo Sapiens
aaatacacgagtgggtagtgaggaaatgcaaaaggaaacaagacaggagaggagaagaaaggctaaacacttagagaattaaataataggggaacacatttacacctctggaataagaattttttttttaataacacactaataggcctaagatcctgaatggtttttaaatgcctacaaatcaagagggaagggaaaaagccagagtaaacatgagcaaagaatataaagaaacaatttcaaaaaccaaaaagccaaatggccaatgaacaaatgaaaaaacaggcaaccacatttgaaatcagaaatatgcaaatttaaacaaaagtcaggttttcagctatcagtttagtaaaagttaaaatattataacttgatgaggaatacatctagaaataactggaaagggtatgaactgatataacctttgcagaaggaaatctgacaatatatattacattttcaaatgtgtgaacctttatgttaatgtggttcatgatagtaacctttttactacctatgggtatcccataacatcatgttgtataccttaaatatacacattaaaaaaaaaaaaaaatgtgtggcctggccaggcacagtggctcacacctgtaatcccaacactttggaaggctgaggctggaggatcacttaagcccaggagttcaagaccagcctaggcaacatagcaaaaccccatctttacaaaaaatacaaaaattagctgggtgtggtggcacattcctatagtcccaactactcaggaggctgaggtgggaggatcacttgagcctagaaggtcaaggctgcagcaagccaagactgaatcacactgcactccagcctgggcgacacagcaagaccttgtctcaataaaaaaataaaatatttcacatcaattactgcatgtggaggagggggagggaaagaaagaagaagaaaaacaaaattttttttgaaaatttaaaaaatgtatgaacttttaaccaaagaattc

SEQ ID NO: 199855 - DNA, 1000 bp, Homo Sapiens
actccggtaagtgtgttatatgatctgctcctattatcccctggaataggagcctctctccactcaagtagagaatgccaaggactggcccggcatggtggctcatgcctgtaatcccggcactttgggaggccaaagcaggcggatcgcttaacaggagtttgagaccagcctggccaacatggcgaaacccctttcctactaaaaatacaaaaatcagccgggcatggtggtggcaggtgcctgtaatcccagctactcaggaggctgaggcatgagaattgcttgaatctgggaggtcgaggctgcagtgagctgagattgcaccattgcactccagcctgggcaataaagcaaggctctgtctttaaaattaaaagaaaaaacaagttattctaactttttttaattttaaaagattaaaaaaagagaatgtcaaggactgaaattgcatagagggcaatgctttttctttataggtggtgaactgggttctgcttgagttttttctctggtaatttagaaccaatggaagcaactcaacagctctaattttaattggcagaatgtgagatggaatgggacctcaaatgaaactccaggccaagagctcatgagccctgcagcatgtggggcatctctcggtcttcttgagttctgtaacttaaagtttgtgtggcctttaaagagtgtggaagtagccgtcccctctccgaaggtgcacaggatttggccagcccacccgcgtggccttccccttcccctctccagaccctccacagcagatggggccacggaggcctggagaagtggagtcactgacctgaggctacatggctggcaggcagcagggccaggcagcaaagcaggcagtgagggcctaactgcccgcgggctggctcggggctccctcaaccacattggcatcccagtgccaatcccaaattgttttctttctatctctccagacatgtagatagcatggaggtggagggaattc

SEQ ID NO: 199856 - DNA, 1000 bp, Homo Sapiens
gagctcttggctttggctcccaggaaactcagagctgaattggtcatccccttctagcaaatgtatagctccttggacatgcagttctagaagtgggacataattatatagagagagaagatacaggcaaaatcagccctcagtagcctcctctttctttgtcctttgtcctatggactgaaacctgaaaaattagccctttcttattccagaacctgatagtccacaaatgaagaggtcagcagcttgctttcccattgaccttgtctttcccagggccctctgagcaaggccctccatcaaaactgcttccagggaagaatgtgagcatctaatccacaccagttgcttatgactggtaaaagcttagcctgcaacttttctcagaggcttgtgtaatttgttggttcataaaccaaaagaatgcagttcttaatgtgaaatttgaagattaagaacagaaaggcatctggggaccaggaagggaaggactcaagtggtgccttctggggctggctactgggtagcttgtaattctcttaccagctgccacagacttggccttcacctacctcctcctccttttctgaccatgactgccacccctcaggggtaggggatgcatcttccaaatttgctgacccttcaatctttctgtgtacctcctatagctcctatcacagtagactttgttcaaagaagccctcagtaaatgacagcagaattcaaatttgtcttgagtagcacagaattgtggagggctgagaggcaatggagacctcatgtgtggagcacacacacacattggctagggtctaccatcagcttattgtctgattccctaacaacactcagaatgtaccatctcagcagaatcttgacctcttcccttgactctgctagcctttccctgccttttccagcgtcccccataccgggtgttggcacatcctctcagactgtggcaatgtgacgagagcatggccactgacatgaattc

SEQ ID NO: 199857 - DNA, 1000 bp, Homo Sapiens
gtagagtttctccaatattttcttatagtagtttcatagtttgaggtattagacttagtctttaatccattttgatttgatttttgtatatggtgacaggggtctagttttattcctctgcatatgtttatccatttttcctagtaccatttactgaagagactgtcttttccccagtgtgtgttcctggcacctttgtcaaaaacaagttcactgtaggtgtgtggacttctttctgggttctctattctgttccattggtctgtgtatctgtttttattccaatatcatgctgttttggttttcattgttctgtagtataatttgaagtccgataatacgttctgacttcaattatgttctttttgctcaggatacctttggatttctaggtcttttgtggttccatataaatgttaggattctcttttctatttctgtgaggaatgtcattggtattttgatagagtctgcattgaatctgtagattgtttggggtagcatggacattttaacaatattggtttttctagttcatgaacatggaatatctttccattttttggtgctctcttcaatttctttcatcagtgttttatagtttttatcacagagacttttcacttctttggctgagttaattcccaggtgtttaattttatctgtgacgttgtaaagggattttaaaaatttctttctcaagttgttcactgttgacatatagaaatgctctgattttttatgtggattttgtatcctgcaactttactgaatttgtttatcagttccaatagttttttggtggagtctttaggtttctccaaatataacatcatatcatctgcaaataaggataatttgacttcttcttttctaatctaaatgccctttatttttttctcctgcctaattgctctagctaggtgaaattctttcttctgcttgatctagtgtactgttgaagcttttgaatgtattttttatttcattcaatgaattc

SEQ ID NO: 199858 - DNA, 1000 bp, Homo Sapiens
aggtctgaccccaggcagccaggatctgggtctggtttctccatccagcaagccctgcctctggctttgctcagccctgtgtttcctgccaagcggaaatccctggtcactgacttggggagaggtcagggagggaagattcttctcccctgatgtcacccagctgtttgtaacccaagcagcagcagaacaagcacacttgatgtcatggttgaagaattcagtcctgtcctggggcacaaaacagaggcaaagaagcatgaccgatgcaaagggttcctagactgcaaatgtcatttctctttctgacccccactggttgtagtaaggtctgcagatacagtatcacctagccgtcacgtggtccagccctcttggggggaaaggagaaggccacaacctattggcagagtaaaaagctcatattcttagccaggagaccctcaggtgataaatcccagtccgtctgctgaaaggctcatgcccctcaccctacccagccttagggactgaagcagcaagacaggatagatgttaaaggatctgggctcatgctccctcaggtgggcagctcccatccctgcttgcattcactgcccccatgcctttggacctgatggacaagcacacatctagccaacggtgttcctggaggacaggtgctggtgtaaactgacaaaaatggtagctgctggtctatcctcaaggagaggagacaggtggaagtgggaaccgaagaaggagttttactcttccctggtctttgggggcaatgctgtcccactctccctttccctaaaaattctgacgccctatccctggtccctaacatctttgcttcagaagttaaagacatttcaagttatttgcaaagagtcaactgaggactttgtagaaattgttacttttcaaattcccacttcccagggccagcctccctctcgtcattgggctcagactgtggctgttccctaagcccagctctactggaagggaattc

SEQ ID NO: 199859 - DNA, 1000 bp, Homo Sapiens
ctcatagaatgtgcccatatgactataaaacaataaggaatatcatttcaggttttccaggcagctaaaaagcctgaattgttcttgttatgtatgtgaaaaatggccatctacttataacaaaagacttgataacaattcaggttagaaggtcctaggagatatcccttcatttttgataaactacaatgctgtatttaagatataataacctagtggataaatgtgcttttcatcaaactgtagcttatagcctcctttatcatttaagttacttgaaatagcaaaggaacatgcctaagaaatgaagtatatcatagtcctacttgagtggtttagcaatttataagacaggctcaggaaacagactacttccagagtctatctgttttggcttgcccaatagcacatgtaatcacatctgaaagtgttttcccatggtaccactatcattttatttttggttatttttatggaaacctgggatgacttcattttttcaaaggtaactttttttttttgaagttttaaagcatcaattttgaatattctaaatttagtaattggcaggaaagaccatgtggcatgagcagaacagatgatttacagctgaatggggagcagtagttttagagagccttgaataactagggggatatgtatacttaggtaaaatcagaatgaggatggtgagcagactgttcagcttaactgaggcttagatagaaattttttaaattcaagctttattaaactatgttttaaaatatttaatgagtagttacattagttcagtacacattagtccaaattgaatctctgatacaaaactttgtagtgtctcacaagttgacagccccgttagctttgcctttttgactttgagcatgtttttaacttttctaagcttcagaatcatcacctgtgtaaatacaataataaaagcaactcatagaaatgttgtgaaatgagctgggtgtggtggcttactcctgaattc

SEQ ID NO: 199860 - DNA, 1000 bp, Homo Sapiens
cccggccggccaggagcagcgaggccgcagctttgttacctgaggctgccgctgcgccccgccccgccctgccccctcgcgctcagggttggctgggcctgcagtgaccgggaggaggcggctacgccgacacaacggcgggaggctgcagcggtctgcgcgccgggagcgggggcgcgctggccgcgggtgagtgcgggtcgggcggccgaggcgggggcgaccgcggcgcgggacacggggagctggagccccgccgctcgggagggtcagggttggggtgttgtccgggacccgaggctgaggcgccgagaagcgcggctgatgggtgccgggtctcggcttcctccgagcctcaccgggaaagctggagaggaggttccagttccctccacatccaccccggtgactttggcggccgcccttacccggccacggagaacagcgatcggtccctggaggcgaggacgcgccggtgtggacccgcgtctggagaacgagctgcatcgccaaggctgctgcgggtcgcacctgggcggttgactattagtcgtggctaagactttcagatcaaccgccccctagtttatcccgacccttgggagacagcggcgtcccgcacggaatgcgcagccgcggcgccgcgctcggttccctagccagccgggggccacgcctggcccctgacacagtggtggggcggtggcggggacctagtgcggtggtgcggaccgaggaccaggcgcttctcgccccgacaaacttgctccggccgcgcgaagttcggattgcaagttgcgccccgcgcctgcaggagtgtggggagggggaggaagcgggtgggctggggatcagcctccaaacaaggggtgtccccagctcttggagagcgggttctgaccggtttcaaacgccaggagtctcccctctgtttttctcagcggctcgacccggctcccttttggcagagccgcagtgcggccgtgaggcttttcccccg

SEQ ID NO: 199861 - DNA, 1000 bp, Homo Sapiens
tcactgcaacctctacctcctgggttcaagcgattctcgtgcctcagcctccagagtagctaggataacaggcacccgctgctatgcctggctaatttttgtgttttttagtagagacggggttttgccatgttggccaggctgctctcaaactcctgacctcaggtaatctgcctgcgttggcctcccaaagtggtgggattataggcgtgagccactgtgcccggcctaagagtaacattttaaagatagtgaaataatgctcaaaaaagatgtactggtatatagtgtctgtcttactaatgatgtttgaaaaatggagatatgttttaaatttttaaatttaaaacaatttcctcaactggcttgctatttcagtcttaggtgttctctaatgacatgcagcatgatttcctccatgttaaaacatgagaaaatgaaaaatttcctttcttaggcttcttttacttgtaatctgtacgtatatataatttttttttttttaatcagagtctcactctgttgcccaggctggagtgcagtggtgcagtctcggctcactgcaactttcacctcctggattcaagtgattctcctgcctcagcctcctaagtagctgggattacaggcatgcgccaccacacctggttaatttttgtttttttagtagagatggggtttcgtcattttggccaggctggtcttgaactcctggcctcaagagatctgcctgccttggcctcccaaagctgtttggattacaggtgtgagccactgagcctggcctgtatatataaaattatatttaaaacctggtggacttctttccatgtcaatacatatacagctttgtctgatttctaaaagttatatagtattctgtgtattattacgtagagactgtttaaataggattatcaacaaagttgcactgaacatcctatatggacatctttgtaccttttcttgattcctagataatttcctgaaaatggaattc

SEQ ID NO: 199862 - DNA, 1000 bp, Homo Sapiens
aggccctaggctgcacacagcacagcgatcctgggcccggcccacaaaaccatttttttcctcctaggcctccgggcctgtgatgggaggggttgctgtgatgacctccaacatgccctggagacattttccccattgtcttggggattaacattcagcttcttgttacttatgcagccagcttgagtatatcctcagaaaatgggattttcttttctatcacactgtcaggctgcaaattttccaaacttttatgctctgcttcctttataaaactgaatgcctttaacatcacccaagtcacctcttgaatgctttactgcttagaaatttcttccaccagatataataaatcatctctctcaagttcaaacttccacaaatctctagggcaggggcaaaatgctgtcagtctctttgctaaaacataacaagagtcacctttgcgccagttcccaacaaattccccatctccatctgagaccacctcagcctggaccttattgtccatatcactatcagcatttttgtcaaagccattcaacaagtctctaggaagttccaaacttccccacattttcctgtcttcttctgagccctccaaactgttccaacctctgcctgttacccagtttcaaagttgcttccacatttttgggtatctcatcagcaacaccccactccactggtatcaatttactgtattagtctgttttgacactgctgataaagacatacacgatactgggaagaaaaagaggtttaattggatttacaatttcacatggctggggaggcctcaaagtcatggcaggaggcaaaaggcgcttcttacatggtggcagcaagagaaagtgaggaggaagtcaaagcagaaacccctgataaacccatcagatctcatgagacttattcactatcacgagaatagcacaggaaagaccgatccccatgattcaattacctcaccctgggtccctcccacaacacgtgggaattc

SEQ ID NO: 199863 - DNA, 1000 bp, Homo Sapiens
ctggatttacagatgcccgccaccacacctggctaatttttttgtatttttagtagagacagggtttcactttgttggccaggctggtcttgaactcctgacctcaggcgatccacccacctcagcctcccaaagtgctggattacaggtatgagccaccacgcctgtccaaaacactttttttaaagataaaaaagaccttaattgattcataattaatttagaaatcttgaggtttttttacttcatatttactgtggcaatttttggagcaaaccttcaggctaatagctttcttgtgccgtttgtagacatgttagtcaaacagcaagccttaagtgcatacctttgtgttactgttttttatttgagggacataattaaaaacgagagtacacaagcactttacatctgaaggttccggaaccttcctgcccaacttggaagtagtttgtataagcataagaacattttggtagcaatggtagcatccaatccaaggaaacataccttgtggatatctcctcacttacaaagtcatggatgtttggctgtatatcctattatgggtcccaaaccatgatacaagtatttaaagaagttgttgaaaacttggatctttttccacttacttacaagttggttggcatataaaaatcaaagctttgtttaggtgtatgtgagtgacccttgaggagggtgaaaacaagtctttctgggtttttgtttgtttttttatacctgtatttttgaaaaattacaaggttgtccaaactcctgccaactgaaaatatttattaatttattaatggtgagtttcttcgatgatccagatacattttctcaccaggtgtggtagtgcatgcctttagtcctagctacttgggaagctgagacaggagaatggcttgagcagggagttgaaggctgcagtgactatggtcctgtcattgcactccagcctaagcaacagagcaagactccatctcaaaaaaataaa

SEQ ID NO: 199864 - DNA, 1000 bp, Homo Sapiens
agagtcatgacacctggtttgctttacagtttgactacctgctcttagcgctgaatacagcgtagagctgcagaaatatcagtttattttactttattttttatttcgagacagagtcttgctctgttgcccaggctgcagtgcagtggtgtgattagcgtgatctcggctcactgcaatctctgcctcctaggttcaagtgattctcctgcctcagcctcctgagtagctgggattacaggtgggcatcactgtgcccagctaatttttgtattttagtagagatggggtttcaccatgttggccagggtggtctcgaactcctgacctcaggtggtccacccgcctcggcctcccaaagtgttgcgattacaggcgtgagccaccgtgcctagcctgaattatcaatttatgcccattaagaaacaaatcaggttggtattttgcagacaggatatatagatttattaagtctacagatttatttagcacattttctgtgctggtcctgcattagaaggcactggggatatgaagatgagtgaagtggcccatgccctcaaggaattcagggtttagaagggaagacaaatgggtataaaaataattgcaataggataggacgagtgctgtgcaaacctgggggtgaggtcacctgagggaggaatggggcctgtgaggtgactgaagaaacaatacctgctccgtgtcttgaaggatttggtaggaattttctaggtggatagtggaaaggtgggaaagtcctttgcagggcagcaaaccctgtaagtgcaagggtttggaacctcaaacaacatggcttcttcagaaaatttcaaggtctagggtggttgtagcagaagggtacaaggtacaaggtagaatgggaggaggcccactgagtgatggtttgagcagggctggatctggaagtccttcggtgccatgttgcagaatggcattctgcagaggtaggcaccaaataattttagacaagctt

SEQ ID NO: 199865 - DNA, 1000 bp, Homo Sapiens
cctggctgtttcctacttactcatcaaggctaactacgtgtcatcttttctaggaagcacccctgtgtttccaggctggtttaaggcctccttctttatttaccacagcaccccagatacacctgtgttttacctcttaccgtattcatattaaaattatctgtttgtgcgtttgtttcttcctctagattttaagctcttcaaggctaatgaggtgagtacaatgcctaggacataatagacttcaaataagttttgtttgtttactaacgtgaaaagcaaatattgagggaaaattttgttttaatatctgggaaagacttgtgggtaagatcatgttgaacataataatgatattctacagatttacatttctagacatcacaaaagtacaaaaccaaatatcaaaactggattcccaaacttgtacccctcacacccatgtctgttgtcataaggaggagtggcgtgaacgagagattgagagaagctctggagactgcccactgacatccctgctccaccaatgctaactgaatagccctgagcaagttactgagccacttttgcctcaattctttattaaaatgggggcaataaggccgggtgtggtggctcaggcctgtaatctcagcactttgggaggccaaggcaggaggatcacttgaggtcaggagttcgagacccacctggccaacatggtgaaagcctgtctctaccaaaactacaaaaattagccgggcgtggtggtgcacgtctgtaattccagctactcaggagtctgaggcaagagaatcacttgaaccaggaaggcggaggttgcagtgagctgagatcatgccactgcactccagcctggatgacagagcaagactctgcctaaaaaaaataaataaaaatataaaaataataattaaaagttaaaaattaaaatggggcaataattgagatattctggagtttaaacaagacaatacatgtaaaacactcattaaagctt

SEQ ID NO: 199866 - DNA, 1000 bp, Homo Sapiens
tggcccccagcactgcaaaaaggattaagtgaactgagaagagacatgtttttccaattagttaaaaatcacccatgttggaatttttgcaaaactggctggttgctttcccattacccaagattcctcattctttctttctgtataatttcataaggttttcaagtaaatttgatactaaaggcccatgaccatgaaataaacaggacactcacagcgaaacgctaaagccaaaatctcatcttccatgcgccatgcaatgagaaaggagatggacagtaacttccacctaccaaacttccctaccccaggtttctgaagacacatcaacacgtgcaacgacatttgtgtttggatatgcattttactacatacgtacatctttaaaaagatttttcccactgacatttatttctcatgccaagtcggggccagccgccaaactggggagaccaagatcctggagtcaatgcgctcattctccttaaaggaccgtgacaccagccagagaggcggagaatgtggtaaaggcagggaaaacacgattcttccacctaggaagacagaagagctctcccaatgggcagggcagctctgggagcaagtcactaataatagcaggaatattacagccagtgcatcaacacatgggatgaatttaacaaggctggttttgttttttgttttttttttttgtatgatggagtcctgctttgtcacccaggctgcagtgcaatggtgtgatcttggctcactgcaagctccgcctcccgggttcaagtgattcccctgcctcaggctcccgagtagtagggactacaaggcggcaaacaaggctgttcttacttcaattttgcaaagtgaggaaatggaagcccaaaaaggctatgtgtcccaaatcatttattgagtggtagtaaagctgggattggaaccatgctgtctggatctgaagccctattgtgctgttccatcaggcaggtcctcgtggacagaattc

SEQ ID NO: 199867 - DNA, 1000 bp, Homo Sapiens
ttaaggagtagagatgatctttaaacctatttcaccttttgccgaatgatgattctgcagaacagcagcacgtcaagctgtcactcagttaggctcgtctcagctggacctgctgatgtatctgccttagcatgaaaggaattctgtccgagtttgtgaattccattccaggaacctggcacagactcggagattgcattcaacctttgtccctgtgtgcattgagcaactataatatgccagacatggcgctagccaagccttgctcaactgaggttcctcatttgagccacaaaacacaggaagtgggcagagtgcctgtgttcttgattctagcaaggatggtatgtgactagtatgctcttaatgcatagagggaagctaatccaggatgtacgtggatgcctcggaacaccaaagctccattctcagagggattttgtcttcatcttcactgtttctccagcatctgaaacagcacgtgactcatagtagctgtaacataaatgtttgctgaatgagtacgtggaggtagtgtggcgtgcacaaatctgccttcatctactacacgtcctgtttgacaatttataatacgatcctgtttttacaatgcagccatttaaatactcagagacctggcactgaaaataattcatcagcgagcaatgaacttgtgtcagcatcttcccggcagagtttatgtgatcagatcccagatgacatttgttactaatttggttttttttgtttgtttgtttgtttgttagtaaagcactgtatcagtcaccataggagcgcagaaggagcaggactaaggtattgcccctgagtaaatacctctctgggaaaagaaagaaatatctgtaaatgaacagcttttacccaagaagcaggaggtatgagctcatgtagagtcaaataaaacccgggcttaaatgtcctcaatgaaatgggcccatacaactcaaagtgatacccagctgttgaaaaagcagaattc

SEQ ID NO: 199868 - DNA, 1000 bp, Homo Sapiens
aaaaaaagctacctgtcaaaatctttataatgttgttctgtcctggcatagtctgaaaacaattgttttggctggtgattatgggagtttctcacacattttcttaggatatgtgctgtctgaaattttgtgtttaatttttaattaacagagtttactcttgttattttgtaggagtcagaaatcacttgctacacctgttccttttctgtggtactgctgtcagtctgctgctctaccacttttttttttggtctcagctgactcaaactctcatttcaaaatatgccaccatttctttcagcactttatgtcatgagagactgaaacaagtgtcagaaaaggtccctaaaagtcagaaataacaacgaatgtgccagtattttagctttcttttaaaacagaaaccaagagttaggaatttacttctgaaggtactgcgttatagtggaaagcaggaaaagctgtgttgggtgaatttaacacttccttttttcctttgtgctcacctggaacactgcacacacttatttataaattttttacagatgtatttgggtctgtatattttagttacatttatatatctataaatgaattagagcctgtggtattttgcaatgccctcttgtttatgtatttggtataattttaaaggtaagattttaaaactatatccatgtgagtctagtaggtggagtaatttattatttttatttttatttttttaggtatatgccctcattttgcttaagacctctggccagagcagggcatggaagattccttttaaaaagtaatactgagaagacatgaaaaatgtggacatgataatttactgttgagaaatggctgtaaaagtgtggatgagtgtcaggtgcacaaagaaggttataatggacttaacaagtgtttcacaactactcagagcaaagtatttcaatgtggtaaatgtttgaaagtcctttataaatttttaaattcaaacaaaaaataagat

SEQ ID NO: 199869 - DNA, 1000 bp, Homo Sapiens
ataccatttataagaaagaaaacttagttacacctaataaaagactttcagctacttttttattcctctaactacaccataaatatagtcttcaaggtaagttattagttttctattgctttgtaactaatttccgcaagcttaaaacaacaaccatttaatagctcacagtttaggtaggtgagaaatctgtgcatggtatagttaggttctctgcttaagtattacaagaccaaaattaaggtgtcagctaggctgagctctcacctggagctcagagtacctgtccaagcacattcctggtattggcagaattcaatttctcgtggctatgagtctgttttcttgctgtctgccagccaggagttgctttcaccttctaggggacagtccaaggtactttacatgtgtcccccttcattttcaagacagcagtagcatgttaaatcccccttattcttcaaatctgatttttgtttatgctatcaagtagagaaaactctctgctcttaaagaaaatgggataaaattaggtccaccctgaccatcttttttttttttttttttttttttttttttgatgaagtgtgctctgtcccccaggtagagtacagtggcacgatcttggctcactgcagcctcttcctcccaggttcatgcaattctcccacctcagcctcctgagtagctgggactacaggcatgcaccaccatgcccagttaatttttgtatttttagtaaatacagagttttgccctgttggccaggctggtcttgaactcctgacttcaggtgatctgcccatcttggcctcccaaagtgctgggattacaggtgcgtgaccatctttcttttgatgaactcaaagtcaacttattagtaaccttaattacatcagcaaaatcccttttgccatataagtaacataatcatagacatgaatgaaatttcatcatattcagtcagtataagaaatcttgggggtacattttagaattc

SEQ ID NO: 199870 - DNA, 1000 bp, Homo Sapiens
tagcaaataatactattagtcgagatctgcttaggtgtttccccttaattccctcatctgcttactttctcggtctctgtgctaactgcagtgtccttaagaacactgtgaatctccctccctggcattgccagccttctcatattgtgttctgttttctgtctcctttcaccctctctgcccactttaaggtcattttgtgatctggcaatgctacttgtattgattttggttttgttttgtttttttaaccacaagctattacctttctctttcaaagtttgaaaggaaacatttgcactgggaattttttaatattgggagactgggtcccaaactaaagagtcagccctgtgatagaacacgtgtgaagacttcccattcggtaacattatagcggaggcattgacaaggttcttttcattgtgctctctattcctagaagtgtggaaggctgatgaccagatggagagagaccacagaaacccagacgagcaggcgaggcaatttttaattcttaagaaccaaaccccaattgaggaaagaggcgatctctttggaaaagcacttaatctgaacacagactttgtttctttaagacaagtaccttataaatatgacttatatgaaaaaactttgaaatataattcagacttgcttaatagtaatagaagctatgcaggaaagcagactgatgagtgtaatgaatttggaaaagcacttctctacctgaagcaagagaaaacccacagtggagtagaatattctgaatacaataaaagtggaaaagccctcagccataaagcagccatttttaaacatcagaaaataaaaaacttggttcaacctttcatttgtacttactgtgacaaggctttctcctttaagtcactcctcattagtcataagagaatacatactggagaaaagccatatgaatgcaatgtatgtaagaaaaccttctcccataaggccaacctcatcaaacatcagagaattc

SEQ ID NO: 199871 - DNA, 1000 bp, Homo Sapiens
ttttgtggtgaatgtgcgggtgctctcagagaatagagaaatgtagaagcatctgattcacattcatttcactccagccaaactccagtcttaccacatatacagatctgttgccacatggtatttgcttaatgctaaatagaaatcttgctaaactttaaacatgtgcgtgtagcctgatgaccctaggcccacaggaatcttacacaattcatcctggacttgttggaaaagaagcttctctgtagcaatggtgcaaaacctgtaagccaccattacaaaacaggatgtaaacaatccagaggcctgggctcagaatattctctttctcctcttttgactttaaatctatttcctttagtttctgcttagtaagaagtgctcatagctgagtaatacagaccacccttgctagacaatccaataaattaatctttgtttcaaattgctatttggcagtcattaacacgggataagagtaattggtcaactagatggcagagacagaattctggatgcagaaagggtatttgacttcatttctcactgttgaagtaattgtacttatttctgtgtattgctgtgaagtccaaataagttattaaaagtaaagtgcttgggacagggcctggcaaatgggaagtttagcaattattattaattctaaatatattctattgggaatattagtgtcatttttttagtgcctgagaacaaatttgaactacacttgacaaatacataggcttttgaaaaccactaactatgggttaagaaactttagtctgtatgtaggcttttatatccttttccatcgaaattgaaacaaataacagtttaagcccaaaatacttgaataaggggtccacatattagctactttaagcaatttcagttagggagaagatttatgaaaaatgctaagctctcaggaccctaaattaggagagtgtgtgtgtgtgtgtgtgtgtgtgtgccttaaaaattaaagacagaattc

SEQ ID NO: 199872 - DNA, 1000 bp, Homo Sapiens
attattttcattgctgtggggattccattgtttgcctttatactatttgcaagatttatctgacaatggctatttactattacaaataatattgccataaacatctttacatacttctttatatgtacagtaatttctccaaggtgctactgattttatatacagttggttcctctattcttggattccttatttgcacatttgtctactcatccaactttgtaaccccaaaatcaatattgagcacttttgtggtaatttgcagacatgtacatattggcaaaaacttagaatcattcaaatacatttctcatgtttaataagcactatgactcacacctgaataaagttcatctaacatacatattttctacttagggtacatcacagccttcttgtgcttaggaacgccatatttcagcactatacttgggggcaaatttaaacagaaaactcaccaacagaaagcacaaaaatttaaaaaagtgataataaatggactggaaaaagaacatttgtttacaacatgagagctgaaacaaagtcaaggtgttggcttcttcaacctcggctggaaatgcacaaatcaggtgaatcaaattctccaacactttctgtatgtccctgaatgaccatgaaaacaccagaagtatcgactttggaggttgcaaatacaccttagtgagtagggaaattcacaagtaggggattgtgaatgataaggattggctactgtgaatcatgagaatcaactatattttatatgtttatattgccttccaccttatctactgtatatgtaaggcagctcttcatatcatatgctcttcatttctcaaagaaatctacaaccagtaagaggggggaaaagggtgattacaggtggaaaatcccagccaatggttacgaaagatagtaataaatgttctgggataaaaaggtgatggggaagtttcataggggaataaattccgaatattagagattcaaaatggaattc

SEQ ID NO: 199873 - DNA, 1000 bp, Homo Sapiens
gcactcaaacaaaacgcctcaggaagcaccttcttcaaagggaaacatgaggtattccgatggcccaagcaatctggtcgatcagtcaccattctcaagcaacttctgtaagttattttgtatcttgaaataaaagaaaagaagttcctattattaaatagaatggagtatattaagggcatatttgttatagtctatatagcattctatattattccactttgaataaaaagctacaaaagggttaaatttaggtgaggcaaatagatgctttttcatagactagaactctgacaatccactttttctttgggaaaaagaaagggtctcgctctgtcacccaggctggaatgcagtgacgtgatcatggttcactgcagccctgacttcctgggctcaagtgatcctcccacctcagcctcccaagtagctgggacttcaggcgtgcaccatcatgcctggctaatttttgcactttttgcatacatggagtttcatcatgtttctcaggctgatctagaactcctgggctcaagtgatcctcctgtctcagcctcccaaagtgttgagattacaggtgtgagccaccatgtccagctgacaatccactttaaaatgaggaaatacagggcttaaaaaaaaaaaaagagagaatggcagaaagatgaaaatgtcagtagagactgagataaatgagatggaagaaaaagaacaaggaactggcaacaccagtgtgacccaaatgcattagaagacaatgggaaattggtctttacacaacccatttgatggttttaatcagaaaaatgccacgtaataatgtttaacactcctgttactccaattagatattattatttaacatttccaagaaggttgtggatttcacagggacagagaccaaccacgtcagatgtttggatcttaagacgggtccgatgttggacatcaaaaatgttctcagtaaatgaccgttgaataaaggaacttgtaagaattc

SEQ ID NO: 199874 - DNA, 1000 bp, Homo Sapiens
attaaaagcatgggcagccaggtggagtgttgcatgcctgtagtcccagctactcaggaggctgaggtgggaggtttgtttaagctggggagttcgaggctacagtgagctatgatcgccccactgcactccagtctgtttctaaaaaaaaaaaaaaaaaaggcttaacgtgacttgggtttggcagaggctcagctctttttgctccttctgtttcttattcatgcctgctgtcacgttgctctggaagggacatgtgtaagaatctgtgtggaactattctgttcaatttggtagctgcaggtggctaatcagcacttgcaatgtgcctagtgccacatgttgaaatgataatatgttgcatatactgggttaaagaaatgtataataaaatgaaatatgcaataaagtatgttattaaaactaatttcactgtttccttttatctcttttaaaaatgtggctactagaaaattttaaactaactatgtggctcacattatgtttttattggccatcacgggtttggaacctcattctgttcctgtctgatcccgctgctggaggctggggtggtgtcattgggaaggggacctatgctagggtatcctcccaggggctggaacagctaggagagcagccatggaacagaaccaatagctgaatttgaagaagtgaggagatcagtcactataccaccagaaattcctatagatgctgtgtagcagttagctgctgctgcgtaagaaaccaaccccaacttagttgcctaaaacagcaaccacacattatcgttcatgtgcctatgggtcagttggactgttttgctgatttaaatctgactggattgatatttgactgggcctcttcattggcctctggtttcattagtctctggtggggcttagaaatcagtaacgatgtatttattattattttaattttctttatttcaatagattttggggtaccagtggtttttggttacatggatgaattc

SEQ ID NO: 199875 - DNA, 1000 bp, Homo Sapiens
gttcaatccttaataatggagagtgaatataaaaattccctgacatttagcctgaagttaagcaagtctatttctattatctactatattctgggtaagcaatatttaggtacccttcaggcattttcaaggctcactttgtaaacttatgaaaacaccagtgtgtaaagaaatctaaatctgaagcttcagttaacatgttattgaaaaataaattcacctatctacctataacttgttagcatgattaaacaaataagactagtcaaagaaatattcagaaaagaactaacgttgaagcttgctttgggctgaatagtcatttccaaaaccaacttctgtctaaagacatctccacaatttaaattagagaaactgccacacaagaacttaagccttgacacttttgcagctgtgtttttgtgaagaaagttccatagttcacaatagttttcatcagctataaagggacagtttttaagaatttttgagtaaatcaaattgaatatatgcaagggatgtatttacagacatttccctcacttaggaaatgaagcaagtattacatttgagacttgtaattgcgccctgttgtttttgttttaataacaaatcctctaatattttgatggcatctaatcattgcagctgccctaagatgaggctgccctagaaacactttgtgtctagtagccattcatcctctcggctggaattgagatggtagaggagtgaaacatgttttgagatggtagaaaggttgcacttagtgaccagggcctctttagagaaagggaactcaaatgttagtcttgttacttagtccttaggagatgtgtggtataaggtgcctaccattctgttggcagagtgattagatatttttctctggtgactttcctaataattgttctttgcttcctctctcaagctaatactgtgtcttgtgacattcaggcatcacttgtcttcctaccatctctgctatcttctggaattc

SEQ ID NO: 199876 - DNA, 1000 bp, Homo Sapiens
tattggtgttgcaaaagcacaaaattgcttaattgcaacagccaagcaataactagactttcaaatgaacagcagatggttgtgaaatttgtagaccacaaccactctccaaatagagctgtattgagtgtttcaaagattatagaagaagtaaaaatgcaagtaaaaattacaggaaatctctcctgaaaaattattcaatcatgtatgaaatctgccccttcacacatagcattaatttgctatgctatgtatttcatcttcacatcatttccagtactggaggcataaattgtttaaaactttagagagttctaatttgttttatgtatttttcttttgcagatttgactccatgaaaatgcattgtcacaaagttgactttgtgtgtaagcattgtgtatgtcaataaaaatgttgaaacttcctcaataaatgaagagatgtcctttttgtacatctgcatttgtgaaagataaaatttctcaagattttggctctttgggcaactacatatgccatggtgacccactgtggcttttgaggagattgatacatttatgctgtttttgtatttaccaaggagattgatacatttaagctgtttttgtatttaccaatgtatttacctttactggtggtccttatttcttcttgtggatttgagttactccctggggtcctttaatttctacctaaagggcaggtctgctagcaatgagttctctccttttctgttgatcttagaatgtcttaatttctcctttagtttttaatagtagttttgcaggatataaaattcttgaccgacagtctttttttagcactttaagtatgttatcctactgccttctggcctccatggtttctgatgagaagtcagctgttaatcttactgagcaccattgtatgaatgagttgcttttctcttgttgccctcaagattttctttttgttttttgttttgatgttttgattgatgtatctaggtgtggaattc

SEQ ID NO: 199877 - DNA, 1000 bp, Homo Sapiens
ttttaaaatatatagctcaggatttgtggtaagttcacaaggttatgcaatctccaccactaattaattcaagaatattttcatacttacctaggaggtgaaataccatcatcacaaaggtgattttcccagggtgaggcttattcattgcactctggatgtgctgatccctgcaatttccccaaatgtggagaactcaactgcataatctttggcagtgggaaactgtgttcacactctcttctgtaacaacaacaacgaaaaaaatatatatatatatttatcagccctaggaaatcatgtgttttactacattagcagtaactctccatcttttcctccctctagctcctggaaaccaataatctcttttctgtctctatagatttgcatattctggaaatttcttttcttttcttttctttttttttgaaacgaggttttgctcttgttgcccaggctgaagtgcaatcgcgcgatctcggctcactgcaacctccgcttcccaggttcaagcgattctcctgcctaagcctcctgagtagctgggattataggtgcctgccaccacatccggttaatttttatattttcagtagggacggggtttcaccgtattgtccaggcaggtctcgaactcctgacctcaggtgatccaccagccttggcctcccaaagtgctgggattgcaggcgtgagccaccgtgcccggcctggaaatttcatataaacaaaatcatcaagtatgtggcatttggtgcatgccttctttcacttaccataatgtttttaatatttatccatgttaaagcatgtattactatttcatccttctttattttttttttttttgagacggagtctcgctctgtcacccaggctggagtgcagtggtgtgatcttggctcactgcaacttctgcctacaattgccagattgtaaaggaagggctaaaactatccctttttacatacatacgtacatgaaatatagagaattc

SEQ ID NO: 199878 - DNA, 1000 bp, Homo Sapiens
catgtttacataatgaagcctctgtaaaaacccagaagaacaggtttagggagcttctggatagctgaacacgcagaagttcctgaaggatggctcgccctgggagagcatggaagttccatgctctttcccccatacctcaccttatgcatcttttcatcagtatcctttgtaatatttgctgtgataaactggtaaacttaagtatttccctgaattctttgagttgttcaagcaaattgattgaactcaaagaagggaccatggggtccctgatttatagtcagttggaagttccagaggcccagacttgcaactggtgtctgaaagtcaggtgacagtctcatggcattgagccctcaacctgtggaatctgaggctatctccaggtacgtaacatccaaattcttctgaaatgaatcaaaggacatccagctggtgtccgctgctttgtgtgttggggggaaagaaaccccacacatttggtcacagtagtagtctttgctgattgttgttgctggtgtgaaagcagaagaaaaacatgttgagtgtatttttttccttattttatatagcacatgaataatgcatgattgtttaatgattctaatattctcaatgacacagaagacagagagctgtgcaaatgtcacttactatggacacacccacatagccagaactgtacacatttcaggtactaaagaaataagataggaaggtttgccccagtggtacaagataatggtttttagaacatttacaaccagctcattaaaaacccaacagttctcaaggtgacgtccctccacaatagcatcagcatcacttgggaacttattagaaatgcaaattttgaggccccaccccagacctactgaaccagaaactctgggacaagggcccagcaatcaaggcttccatagctgtccaggtgtttcagaaccactgaccaaacccaactatcctcccaatccctgggccttttcctacagaattc

SEQ ID NO: 199879 - DNA, 1000 bp, Homo Sapiens
aagctatagaaaatcctaaaggctccaccaaaaaactcttacaaatattaagtgaattcagtaaagcatttctatatatcaatagcaaactatctgaaaaaaatcaagaaagcaataccatttataagttataaaaaaaattctcttaatatgtttagtcaaggaggtgaaagccctctacaagaaaaactatgtaacagtgatgaagaaattaaacaggacacaagtaaatggaaagatactccatgttcatggattagaaaaattgatattgttaagacatctatactacctaaagtgatctacagattaaatgcaattcttatcaaattaccaatgacattcttcacagaaacagaaaaaaaattctaaatttttttttaaaaaccccaaagagccaaatcaattttgggggaaaaaaaaaaaaaaagaacaaaagctggtggcatcagactaccagacttaaaaatgcactacaaagttttgataaccaaaacagcatggaactagcataaaaacagacacacagaccaatgacacacaatggagaacacaaaagtaaatccacacaattatagccagctgattttcaacaaagataccaagaacacacttggggagatggcaatctcttcaataaacgaagttgggaaaactggatatccacatgcagaagagtgtagctagaccccctcactctcaccgtatacaaaaatcaagtcaaaatggactgaagacttaaatttaagatctgaaactaggaaactgctagaagaatacatagggaaactgcttcattagtctggtccatgattttttgggtaagaactcaaaagcgcaggcaacaaaagtgaaaacagacaaatgagattgcatcaaactaaaaagcttctgcacaacaaaggaaacaagggtgaacagacaggctacagaatgggagaaaatattctcaatccatgcatctgacaagaggttaatatccagaatatataaagaattc

SEQ ID NO: 199880 - DNA, 1000 bp, Homo Sapiens
tgggaccctgactgatccagagacatgtctaaaagttacataaaaagtaggggtgaggggaggctaacctatctgtgggttgtaatttgtgggctgcgattttacatatagaagcagtacccccattggaaaatttaagtatgtgaagtctagagttgggtgggaaagacatgcatttgtttcccttctaagatagggttcccaaaagccttgacttaataagcacatagagacaaaatatgggacaaaagtaccttagatctaaaaactttaatgaaccaaaggtccatttccttatctattatccctgcctgtattagggggttggagagaagggtaccacttaattatttcttcttttttttgagacagggtctcactctgtcacccaggcaggggtgcagtggcacaatctcagctcactgcaacctctgcctcctgggttcaagtgattctcctgcctcagcctcccgagtagcggggactctaggcgcccaccaccacgcccagctaatttttgtatttttagtagagacagggtttcaccgtgttggccaggctggtctcgaactcctgacctcaggtgatctgcctgcttcagcctcccaaagtgctgggattacaggcgtgagtcaccacacccagtcttaattatttcttttaaaacaattattaattgacaaatcataactgtatttatagaatacagtgtgatattttgatatatgtacacaatgtagaataattaagcaattaaaatacccatcacctcacttacttaacattttttgtggtgataaatttactctttcagttatctcgaaatatacaaaacattatgactgactagagtcaccctcctgtgcagtagatctcaaaatgtattcctgcagtctagctgaaactttgtactcctgacagtaacttcccattcccttgctccacccctacccctccagcctctggtaaccatcattctactctctacttctatgaattc

SEQ ID NO: 199881 - DNA, 1000 bp, Homo Sapiens
catgaaagcaaatgaaaatgcacaaggccttctcaggcctaggcccagaactgatacactgtcacgtcttgtgccattagccaaagcaaagtcacatggccaagcccaagtcaagggatgagaaaatgcattctacccatgacaaacaatgaaagtggtatgaatctcaggaaggtaaagatttgggactaataattccatttaccccttaggtatttcacatcatgacatcagaactcatggaggcatcagaagacatctataaggccaagctatgattgtcctgtactatgaaatcaaagataactacctccaagcttcagaattgtgctcatttgggacactgaaaagccacaagcatctctctcagcctctctggccttctctgtccaccaacatgctttcttatgttatggactgcaggagtagttcagtagatcccccacagatcagaagactgtgtctgtgtctttatttaccctggtgacaagcaaggagatgtaaataggccataaggaaagctgctttttcatttgcactacttcattcgttttgtatttataagatatacagcccgggaaagctataaataagaggctagaaacagcttgaggggctggtgatggaatcacaaatcaccagagttacatcttcattggtactctgatatagaacctttataattgccaaaatatatttatctctgctcaggctacaaaatttgtatatcacaagctaaaactaagtgacctcaactttcctaaaatttctatgaagtttcatattgataagcccatatctgggctggagtggatgctactatttcttgtcttgcccaaggcaaaattatccattctggtgcttctgcttatatgtgtttgcacgtgtcctttttctgcttttatctttatataacacgcccaagtgagccagaaaatgataggagagtttaaccccattaatctacttaccctgatataaattcttaccaattgaattc

SEQ ID NO: 199882 - DNA, 1000 bp, Homo Sapiens
aggccacaagtaatgctctgtcaccagctacccgcgaccctgctcaagccccgggccttctcatccgacaaagcagcggattagacgcggttctctaggtcaggccctcaggtaactcaaccacacaaagcaagcacacacaaacatcagatgtcagaacctggagaggaggagcaatgcggcagggggatgcgggacccaagcgcagaggaaaatcaccagcagaaatacggacacaaaggggattctctgtccccgatgatttctgatttcggcacacccagacccacggcgcacccatcgcgccccgcacccccgccccggcctcccgccctgccctcccccccgcagcacccagcccgagtccaccgttgctggccccttctccagcctgccaggcttttggagagggccactcaccaggtcaccctgcgatttccacgggggcaggtgggagcgggcagagcctggcgcagagaggaatgcacagggaagaggcttccctgtaccagtgactgggcgaccgagccgggatttgggagcggggaggaggctggagctggaggagaggaggggtttccacgggagtcccctcctccccacttcctcccaggctggagtgggagctccagggggcggcgcttggcgggggacagcgcttctttgtgtcgccggccctggtggcttggcattgctgtggcttagggacgcctggagaccccatcctggcagtgtggacggctgtttcattaaagatacaaacttctctgactctacattagtaagggaaaggctgagcaaattgtgggacaaacattctgcttagtattattcagttcttaggaagagcttgaatctccatttagtcggtgaatataccgtgatatattgccaaggggaaaatacaaattgtagaaattgttgaatatgcttttgtttttataggaaaaacaaaccccgtatatatttgtattatggtggggagaagggaaggctacat

SEQ ID NO: 199883 - DNA, 1000 bp, Homo Sapiens
ggatatagaaagttaattctcatatactacttacaggagcgtgaattgataaaagtactttggaaactgtttggcactatcttctaaaactgaacatgtgcctactgtgttatctggtaacttcactgctaaagagagatgctacaaaaaatgtgtgcagaaggcacattttaaatgttgtgtacacagaaacagttttaaatgttcaatgcagtattattcatagtagcctaaaacttgaaacaaccaaaatattcatgaagaaaagaatggataagtaatctgtggatatgcatttttcttgctgcttttagcaaaatataaattctgatggacattcatatatattaaattcctttacagcagcaaaaatgaataaactccagatacacgtcacaacatttgaattccacaaccataatactgagggaaacacaaaagaatgcccatcttgtggccaggcgtggtggctcaagcctgtaatcccagcactttgggaggccgaggtgggtggatcacgaagtcaggggtttgagaccagcctggccaacatggtgaaaccccgtctctacaaaaaatacaaaaatagccaggtgtggtggtgtgcacctgtaatcccagctactcggaagtctgaggcaggagaatcacttgaacctgggaggtggaggttgcagtgagtctagactgcaccattgcactccaacctgggagacagagcaagactccatctcaaaaaaaaaaaaaacaaaagaatgcacacttttatgattctgtttctataaaacaggcgggagctaatttgtggtatgagaagtacagacaatattaactttggagaaagggaaggagaagtgttcagaaaagatcatgaataggggacttctgtggtgtgattaatgttacatttttttacctggttctttgtttaccaggttgtgttgattttgtgattacatgtggaactatctacttataattttgtgcttccctgtatgtc

SEQ ID NO: 199884 - DNA, 1000 bp, Homo Sapiens
ggtacagcccaacttcctcacttctctttgcgtggaatgatgccaagcatctctcaggcaccggcagaaggagcagagggtgtgatgtgggtggcatttgggccaggcattccgtgtgagtctgttttgcctccctgtgggcctatttcctttctccctcacctagcaaaaaacaccaataattatgatatagaaaggggcaacatgggattttcaaaagacatttgagtgaaatgaaaatgtacaggtgagagtaaccgggaaaacaggtgaatgccacctgggagtttgctatcctccaacaagaaaatcaccatcatgactgcaataaaagcccaggaacagagaccctgagctggtctgggagacacactctgatataatttgactgtgtccccacccaaatctcatcttgaattgtagctcccaaaatttccacgtgttgtggaagggacctggtgggacataactgaatcatgggggtggttccccccatactgttcttatggtagtgaataaatctcatgagatctgatggttttataaggggaaatctctttcgcttggccctcttttctgtcttgtctgccgccatgtaagacatgccttttgccttccaccatgattgtgaggcctccctagccatgtggaaatgtgagtccattaagcctctttttctttataaattacccagtttcaggtatgtcttatcagcagcatgaaaacagactagtttccctctagctggaaacaacgtgggtcccacactcttctgcaggccattctgcaggactcttccactgtggtaagaacctacaggccccaggctgctaaatcttagaaggaggcccccaggaaagcttaatcacactagaagccaaaggttctcaaccctgccctttctcagaatcatctgggatcacattaaaacgcagactctcgagcccaacacccaaagatctttattctggaaatgtgaagtagggcttgggcatctttg

SEQ ID NO: 199885 - DNA, 1000 bp, Homo Sapiens
tttaaaaaatgaagtagtggatttagtggtggcttgagaatttctatattgaagagatttggaggcaacaacctgtatgttttggccaagggacttgtcttgaggctgtgtttgcatagtaagcatactatttctacttagattgtatagttacttaaaatgttttttttgggaggatctgttaaaaccctaactcagtttttcatggtatccctgtgtgggaccaatatttaatagaaataaaattcaatttctttcttgctgtttctgaagcatcttgaagaaaccataaaaaccactgaactctatgcttcctgttattttttactgtataaatgaagaaactgagaccagaaatttaaaatgaattgtccaaggtaacacaccaagatagaagcagttattccaaggactattcaatgcaaatgcttagagagagacacatttcttcagtttgtgtttactgtgcaaataaaaattaaaacatttgtctcaagtgttgaagttctttgagatttgtagaaagtagaatacttgagaattagaacttactttctctatagaagcagcatcatatgaagcacatgacatgtatttttagtttctagtatagtatattttatttgtttttgttttatctttgtgtttattacattattataattttgaaggtttgcatagtttttaatcaaaaatgttattttttattttaaatatttgattttatacaaatcccatttttacttataacacatactacatacaaaggccaaatttttgccaccaaaatacatatctgaatttatgttaaaatcaatgacagattaaaagaaatttacataagaatgttttttctcttaatgtgctacttaaatcaagtgaccagtgtgttacattattttgatatcataattgtcaattacattgcttttaataggcagtagttccttgttataaaagtatctttaaaaaatatagatgcataaattcatctgaattc

SEQ ID NO: 199886 - DNA, 1000 bp, Homo Sapiens
actatgctgtgttttattttctatctaccatgccttttctgtttcttcctactttctatcagattgattggttttctttgctctctgtgttttttcattatgattaggcattttatgtttcatttcttttagtggttagctttaatatattaacatgcatatttggactaatgtataaagttaacagatgtctcgtcatcaacaatacaaactttaatttcctctggtgttctacatggctattgatttaatgttggtttgtaattgcaaaaattatgcttaatattgtttgattgaagttttagccaccccacatgaagaagactagggcctgccctgagaatgaaagtcctaaagataggaaactcaactagtgtcatttccttcatctaagtatcaatgcttctccagcatctcgtgcatctggttgcaaatggggtgttctaaggcaatatatacttccttcagaaagcgtattttttatttgcaggagtgttggtccaacagaagcttactcagcaatcatcaatagcagaactcttgctattttaaattgatttttgtagagatttatacacatttaacaattttgttgcccattattgcttcttgcatctgattttccttctgttaattttctttattgcttcacttcttctggtaattctttcatcaaggtaaattctagcagcctctatttaacccttacatttcaatgacagtttagaaggctgcagaattccaagttgacagctcattttgaataaagttttttttttttttttttttttggtatcagttgttgcaatgggaagtctgtcagtgtaattcttcctttgtagaagactctaacttctctcactggttagttttaagaatttttaaattttctgtagtgttcttcagtttcactatgaagtaactaagtgtggatttgtttgcattcattttgcttggatctcttcgtcatttttaaaacttcattaattctaaagaattc

SEQ ID NO: 199887 - DNA, 1000 bp, Homo Sapiens
tgtgcctggtctgtgtgagggtttttaacagagataaagagtggtggtgcaattattttgttgttgtttcagctgaccccaggatagttagcattttgtgaggaaaatcatgaagtgtagtgagagtattgcatatttaaaatatcacaatatcccctcgttctgttcctaatatgctaaaatacatgacatttgggtaaaatatgtaatatttaaaatattggtattaataattttgatatcctttgaggtaattagagactttttgatgtctaaaagattgagtttgagatcactatctgttctttagtatcagttaagtaggagcctcaaagacaaacagctgcttttttgctgtgattaacacaccccgagaggaaaaaataatcagaattttcttgtcaacccatcagttttggggtgtgggaaatagattaatcactgccaaattagaatttgctgtaggctttcagcccccgcccccactaccaccccatctctcagaactgtatctgtaaatgcgagggcaaatggtccaaggttccatacatgcaggctttctttgccttgcagggtaatctggacctctgccaacattgtagaattgattctgccctcctagcgaccatctcagagaggctgcaaagggcaattccagggagataggtaagcaaaccttagagatacctccagcgggggactcagctctctctggtcctgctcctcctggtccacttcgtcctccatatccaggttttctttcaagcttacctcatcttagaaattctcattttaggcaggtcccagtctcactcctgcccctactgcctggtgaatattgccccattaaggtccaggccctcctttatctacaggacttaaggcaaattaagggggatcttacaagtttttagatgaccctgacaggtatatagaggctttccagaattcaacataggtgtctgagattcagaaatctaatttactttgtcctgaattc

SEQ ID NO: 199888 - DNA, 1000 bp, Homo Sapiens
accaccctgatccatcagcagccatcatcattgaggcaagatgatcattagcattttttgcattgaagtatttttaaattaagatatatatattttagacataatgctattacacacttaatagactacagtatagtgtaaacataacttttatatgcactgggaaaccaaaacatccatgtaactcactttattgccctattgacttcattgtggtggtctggaactgaaccagcaatgtctctggggtgtgcctgcactttcataatttaaaaatatttgtatattattagttagaatgcacaatttgactcggattactggtcctatgtattttctcttctatgctgcctattctgatccattaactgttttcctattagattttcaaatttgtgttactgttttccaagagtcctctgtatgttagaggttagtatgaggtgaatattgcaaatattctccccacttgcaaataatttcatacaaaagaaaagttccaaacagatgctggccaagaacatgtgctttggaatgaggtgaggtcaggttcgaatcctagcttcaccacttacctgttgtgtgactctaggcaagttattcccttctctaaacctctgtgtggtaggcaaaattctaagatggtccccaagattcccatcctctagtgtatacaccttgtataatcctctccccttgggtgcaatcagaacctagtaatgtcatgggatatcacccccatgattgggtaactaatcattggcttttagatcatcaagagagagatcatctgagtgggcctaatttagtctgatgagcccttaaaaggaatttggctcttcctcaagtcagagacatctgaagcatgaatggatgtggtgtgagggagattctccattgctgactttgaagatgacatggcaagctctctgacagcgaccccaagctgacagccagcaaggaaatgagaacctcctgacaaccacaaggaactgaattc

SEQ ID NO: 199889 - DNA, 1000 bp, Homo Sapiens
tgccacagctgggattacaggcatggccaccaagcctggctaatttttgtatttttagtacagacggggtttcaccatgttggccaggctagtcttgaactcctgtcctcaaatggtccgcccaccttggcctcccaaagtgctgggattataggcgtgaaccactgcgtctggcaagttgaatgttaatattttcaatgaacactttatttctacaaaatacctcatttaaatacagctatttaaaaagcatttatcaagtaccaccttgaatataaccatttaattgtagtcatccttccctgaataaaataacatcttcagcctctcaactcctgtctttttaaaatatgcaatttcttgaggtttcagaaagtattaattcaaaatacttattttcttgaacgatttacttatatgttgttttcttcaggattgtttgtgaaatctaagaaaagccatttgcttaagctaataatcttgtgagagtacaagtgaaagtactttcattttaaaagcactttcacatctattatcttatttttatctttacaactcactgaagtaggtggagttgctatcattagtcccattttacagatgagaaaactgaggcaagctcacttaactggatagaactggttttccccataggtaaaatgaaaatgattctaacattagctcatgcagggtgaagtgtataatgctttacagtttataatatttataatacagttataccccttacagtttataatgctatttacattcactgatcttgtttccgaataggtaaggcagagattattatccttgttttagaataaggaaattgaatcttggaaagataggagatttgattaaagttggtggtgaggagattcctgaagagccactggaatccaggtctcttaatttctaaactaaggtttttttctttaccccacaaggtctcacactcaaaggtgctcagaaatttctgctgttcaacagtgaattc

SEQ ID NO: 199890 - DNA, 1000 bp, Homo Sapiens
agtcctttaagaagagagcctgctcaatggtgactggaagtggaatcaatgagctgtgaatttcccagagaggtttatgtgaccctctctcacatgttggctgccaatctcctctgcctccttgctgaccaagccccacctagcagcagcaagccttacctgcgtgccatgatcccaggagcttccttgtgcttagatgtactgtccgttaatcaaactcatgttcttccttccaaactcagtttacaggcacggtcatctgtgaaaacttccttgatcttccccttaaaattcactgtttctttttctgctcttctgtactgtgtgcatgcctatattataaatcatgcttacttcttttgcaatgctttgttgatgtaccaactacctcactatggtgttagctggttgagggcagttcctgtcttgttcattcttgtttttcctgggtccagaactcaaccaatagttactgataaaattaatgattcaaatgattaatgatacattttatccttagattgcacaataaataattacatttggcatgttacagagatttctatgaaatgtctttcaatatggatgttttcttaaaattgttattaatataaatctgtaaaaagtatgaccagaaaaaaatgaaaagtggcaaattttaacttaccgtgatgtttatatcattttaagtatttttagcaaaagataacaggagttttgaaaatgtgtatctgactctactaactaccttcttaatttatcattaagctctattgattgattgattgtgtccctaggtgggctagaaaatttgatttttagaacagcatttcaacaatgatgagaaattttctgacctcatgttaactgaaggtggaatgactgcattgctatgagttagtaagaaaaatattttaaatagttcttaaggttttcttttattataataactattttatttcttttgattgcttttgttcaacattccaggcttgaattc

SEQ ID NO: 199891 - DNA, 1000 bp, Homo Sapiens
tgccgttgatgtaagttcatacttaacttgaattttacagtcttcactacaaagacattaggaaattaccattcccagatgtcttctgaagctggcaggtaagaaatcccaggtaccttagtgccaagttctccaaatactctagatctatccagtgaactagatttaataaattacttgatttgggtggtagctgtctcacagtgttgaaggagagctagaggaaaatttcaaatctcatggccaaatgtgtgtcacctctttgtgatgagtgtccattgtgccccaatcctttgttagtgtgttggctgtccagatggtgcagtctacttggtttcccttctttaccagtccacgtgggcaacctctttatatcctctggagatgaaggatattccaatgaaaagaagggatgccttttgaatatttgaaatttcttgaggggaaaagtgttgctgtccttttatattgtcaaaggctgtgtcgaagttggagtcttagaattaaggatgcagttgtgtcactttgaatagaaagaatattatagctggaagggatcaacccttaaattttattttattttattttattttatttttttagacggagtctcgctctgtcgcccaggctggagtgcagtggcgcgatctcagctcactgcaagctccgcctcccgggttcacgccattctcctgcctcagcctcccgagtagctgggactacaggcacccgccattgcacgcagctaattttttgtatttttagtagagatggggtttcaccatggtctcgatctcctgacctcatgatccgcccgcctcggcctcccaaagtgctgggattacaggcatgagccaccgcgcctggctacccttaaattttatagttgagcgtatccaggcacagggaggtgatgtgcttagtgtaagtttacacatgtagtgacagagtaggcattagaatctatctgccttaaagaccacaataaaggctaaggatc

SEQ ID NO: 199892 - DNA, 1000 bp, Homo Sapiens
atttgcatttcttgtgacttgctttaacagggaaggccaaggctataattggtttgctttactctggagtgattaagttctgtcttggggtcagtttgtttcctttgagggggatgtagggcagttttgcaaagatggatatttgccatggttcacataatagattgggcacagacaggacccatcaacccaacaattgtatcagagataccaagtatatttaacaattttcttattaataaaatcaagcctttattaatagtactaatctattatttctcagattaagcactttaatgaaatgtatttttaaaagggaatgcttttagtgaaaataatgcattaggagctgtaagataaatgaatgaaaatgttgcactttatttccatgaagtttatcttttaaaaaacaatacaaagttagaaatatgtttaactcccaagtgttcaatttttaccaaattgttatgatttttaatactctatagtattattaagttatagtcacctatgacattataatagagcgagcctaagtttaaaatgaaatgaggtggaaactatatttattttgccaagaattgtgttaatgatttaatatggtacattgctataacataatctagctgcatgctagatacctaatacacattatctcaggttcttacaatgaacccctaaggtaaatggtgccatccacattttacataagaaggaagttcagagtttctgatttggctgaagactatgcagctaagttagtgcctgaatgaagccaagcctccttagtcttaatgatatacttttttttattatccaaagctgcttatttattttttctatataaatttgttgttaactcaccatagtgactatatgaggaaacagagattgtaaagttttctgcccagcgttttccatataacagaattccaattttgaatcaaggccatctgtttctaaaacccatgttcttgccactgatttctcttaaatgact

SEQ ID NO: 199893 - DNA, 1000 bp, Homo Sapiens
ggtaactgactgttcttcagatgaacttttttttgttcaggttctaaagtcaaggctagggggcaatattagaagtcttttttggtcaacattaagccatagtttctaaatcagctttaggaggaataatgtatttggatattgatctgaccttttgtttttatttctaagttggtttggcactgaaaaaggagaggtttgttatcagtccacacccctaatgccctgacatccatgaatccgttttagtggaatccagatctctaagaaagagatataaaatatttgttcctatccaactgtgattactgtatttccaactatgttgctgtcggtaagtagagtctgcatacatgtttctggttcatatatgcctagggttccagagcattacatttccatcaaaatgtagatcccgagaatgccagagagggtcaggccgaggatagaacagacagtgattttcagatactgcagtaggaaggtggatccatgtcttggctggtacttgtaaccatgaagtgtgggaaagtaatgaccagattgagtaaatgaccagaaattcaaaactaagccacaagaaatttgtctatttctgcttttgttgactgctatcagggttgcatcaaaaacagtattgctgagaccagtgttgtggagctttaactctatgttttcttctagtaattttacagttcaggccttctatttaaatcttcatttggagttgatattagtatgtggtgtaagttaagggactaactttatttttcctgtggatattcagttttctcaacaccatttgtagaacagactatcctttaaccattgtatgtccttggcacctttgtcaaagataagttgacgtgtgtggatttatttctgggttttccattttgtttagcaaatttgtccatttatatgccactaccatgattacaattgttttacagtatgtaataaaattaggtagcatgctgtctctagctttgttcttttt

SEQ ID NO: 199894 - DNA, 1000 bp, Homo Sapiens
gtaggtgcctttcaggcatacaaagcagtgctctggaggtctccataccattttgacctttgtcagcctgagtctccattaaaattcaatttaaaaaactaataagctataaaaagatcatcaaactgtcagttggtattcaatcaagtatttacctttgaaaatattttaacgtgaagtattgttcatttaaaactttatattgtgaaattaagtataatattttttaaattaaagcttttccataactcaatgatatctaaattcatccttcctggattaaaaaatacaacctcctacccagaaggaacacatttatcagtattagtttttgaagagaaagaaaataagattcactttttaggccaactgatacaagggctgattctgatatactccaagaatattcagtgtacatttcacctagaagcaagctctattttaagatttaaaaagcagacaaaagatatttatgcacactactgcattttccttattaagtgttttgaaagcaattttgatagcaatgacagcagaatttgcaaggtgtactatcttgcatctatgaaaagagatctacacagaggagagcattccttcctctttaacacaccacgaagggcgagaactgttattttcttatgcaaaatcatttctttgaattttttacaaataaatttgttggcccataagaaaagtacataccatgcaccaaccacaagaactaactcaaaatggatcacaaacttgaatataaaactataaaacttttagaagaggagaaaatctttgtgaccttaagttaggcaaagaattcttaagatacaacaccagatacaacacaatacagatctttaaaatgtgtaaagtaaacaatcaaaattaagaacttctgctcttcagaaaacaccgttaagagaatgaaaaggaaagccacacactgggagaaaatatctgcaaatgctgtctctgatttgcacccagaaaatataaagaattc

SEQ ID NO: 199895 - DNA, 1000 bp, Homo Sapiens
caactattttgtctgggtcatttccacataattttattattcgtaatcttgtctgaccgattaatgtagctatttgatccaagtacaatgtaaaagtcttaactgtactgtgaggaaggaatgaccactccacaagatcagtattttgaataatgatgcctgttggagaatgtgcagtggcaaaaatcaaaagttggagtggggctaagggatctattctatttatttgcgctgactgaattttttcttccactaatttaatttcttttgttgcctctggggttaatattcttttactatttaagtctgagtctcctcttaatatagagaacaaatttgacatggcataagtaggaatgcctagagttggccgaatccaattaatatctcctagtaatttttgaaaatcatttagtgtttttaatgtgtcttttcttatttctattttttgtggcttaatttttctattttctatctgcatccctaaataatgaaaaggagtagaggtttggatcttatcagatgctattgccagtccagcattggcaacctctgcttgcagaaatgtataacagtcaattaatttatctttcgtttctgcagcacataaaatatcatcaatataatgaataatataacagtctgaaaacttttctctaactggttgaagagctcgacctacaaaagtctgacaaatagttggactattaagcattccctgaggtaacactttccactgaaacctggtggctggttctttattatttatggctggtatagtaaaggcaaatttttcacaatcctgctctgccagagggatggtaaaaaagcaatcctttagatcaattataattaaaggccaatcttttgggatcatggccggagagggcaacccgggttggagaggccccatgggttgaattacggcgtttacggcccttaagtcagttaacatacgccatttgcctgatttcttctgaattacaaacacaggagaatt

SEQ ID NO: 199896 - DNA, 1000 bp, Homo Sapiens
tttctggatgggatgataaaaaattctagaaataggtaacggtgatggttgtacaacattctgaatgtacttaatgccatagactatatatttaaaaatggttaaaatgataaattttatgttatttatattttgccaccagtgaaaaagacaaaaaaaaagagaagtaagtggcaaagagagaccaccagccaagtgagaagagacagtgaagcagtgactttgcatccaattcagattcttatctcagctcttggcattttatccagacaattgtcttcatgagtacccatttcagtgtgtgcatagacacaactgggataatttaagagagacatcactaaaatccatcaaatgttcaccttccagtagagaatcaatgtgttattaatgttaaaaaatgttaaaaatattttaaaatattaaaatattctaacaagtcctgagcaatacactaagatgaagaaagtccttctgattctggttacgggggtgacccccgtgttgctctgactgcagtgggtgttgcaatagctcattcataaatacaggcaccccagttattggctcatcacaggcacgtgttattggaaacagaatatgcaactttgacctccaaataatgagttgttgccaactcaactgaaagcaacttgtagactctatccagctaagggctgtggtttgagcaaagacaaataatacataaagcagagtttgttgttcagctctgctgaggatgagtacaggtcacaagagctcagttcaacatgtgcaatcagatatagacagcaaagaattcatatggaccaggcaacagaatgttcctgtgcatgggagatcaaattcattgtgagccatgatgtttagaagacagacttcatgactcagggatgaaggagtggcctctgactgataaaggaaatgattgtgttgagaaagattaaatatacatcctggtagggctaatgctagggataataaagcttatgatgaattc

SEQ ID NO: 199897 - DNA, 1000 bp, Homo Sapiens
gcattgactctgctgctttctctcccagtagatgcctggcaccaagcaggtactcagcagatgcccacagagtacaggaaaggaaattccactaaatcccctaaataattccccaagcagccaagcgccggtggctcacacctgtaatcccagcactttgggaggctgaggcgggtggatcacaaggtcaagagatcgagaccatcctggctaacatggtgaaaccccgtctctactaaaaatacaaaaattagctgggcgtggtggcaggcacctgtagtcccagctactcgggaagctgaggcaggagaatcgtttgaacctgtgaggcggaggttgcagtgagccaagatcacgccactgcactccagcctggatgacagtgcaagactctgtctccaaaaaaaaaaaaataataataataattcaccaagcataaaggcaatgatcacttgatttcacactttgaagttcaatgctgagctttctggtattttttccattacactacgaaagattaaaaataagtgccatagctcaaaattaatatgctaatctagcaatgatgaattaaatttagaaaaagtgtgctggctggtggcctttctgacctaattggccaattagactccaaaacagaggagtgaggcgaaatgtcagggaagctccaggcaacccagcccttgaccctgccagcagccctgtaataaaggcctgggaccctaagcacaatgcctcaggagccaaacaggtatgtgggaattctggcatattcactgcagaatatttatctaggcaaatgcttcaatcttcagtgtttaaagtggtgacttgcttttagccacattcttgtttttggctacattcttaatgctcaaccatcaaaaatatttcacccatgccaggaactgccatatcaacacactgtgtttataaaagaacaagacaaaactaccacccactccctttgctcaggttttccttcctgctaacagaattc

SEQ ID NO: 199898 - DNA, 1000 bp, Homo Sapiens
aacctatttttttctgcaatcttccccatctcaaaaaaatgttatcttactcttctaagttatcagtcagtgaactctttatttctaccttcaaaacatgttcagaatatgaccactaactacttaccatttccacagacactatcctgaaacgggccaccatcatgcctcctctgtgctacttcagaaacctcctaattgatctctcttctgccatccttatcttcctataatctatctcataataacagtcagactgatctctttaaaatgtaagtcagatcttttcactgttcagaatcctccaatggcttcctatgtcattcagagttaaaataaaagattgcacagtggcttttaaggtctgaatgatttgatctctgctatacctcttcccccaagcgttacttctctatcttttgaccacttcactccactcacagtgagttcatcatagtttctccagtaccccatgcaccatgccatagggcagttgaatttgggcactaagatattcccatggctcataccctcatcactctgtttaaatgccatcttgcctacatactccctgccatgtgcttatattaaaaaaactgaaactcaaatgataaaatcagacctaagttcaattttatggaaatgtagagaatgatgagtattctttactgttttgtacaatgcaaactttgtaggccaacatattcttcccttgcctttgtcattaaaaaactgacactctccttgaccaagctttagccaggttcctgtgagtccccttcactactagttaagccttgactttgggcttcagtgtctgatcttgtggagtccagttttagtaaaatttctgataagtcagtttagagagaatctcctcacttctgatacctgattgttcttaatacctaatcaaattcttcaactcacatccttgatatttgctcaccctggcttgccattcagtaggaatcctgttaagtcagtttagcaagaattc

SEQ ID NO: 199899 - DNA, 1000 bp, Homo Sapiens
ttttatttaaattggcttatttatttagagacagaatttctgggctcaagtgacctcctgcctcagcctaccaagtcactaggactacaggtgtgtaccaccacactcagctaatttttcaaacattttaattttttaaatttttgtagagacagagtcttactatgttgcctggctggtcttgacctcctgacctcaagcagtttatctgctttgatctcccaaactgatgggactataagttcgagccattgtgtgctcacttgacgtacttatttgaattgaagtatttaatggtattttgttggtgtttggaaatttgaattttcaaaataattacgttttcctttaaggtgtggcagaatgtgtcttggctcttgggtttgagaagatgagtaagggaagccttggaataaaagtgagtgttattttggcatagttactaaatgagctaatataacccaaaagttgaaaggtgatacttacatgtatgcatagatcttggtattttagaatagtgaagaatcttagagataattttgttcaaactgtttattttgccaatgatgaaactggtgttcaaggatatgagattattggaatttgaagttgacttatctatttaatttaaaagccattcatttattcatttttttgataaatgaattacattcaataaatgaaattcattcaacaaattgaagagagttaataaaatgtgggacttctgattctggtaatggcaagccaagttttttgagccagttctctcactgataacaactaaaatatttggatagaatatgaaaaaagaaatcctaaaggtattgaagaactagcaagagagaggaactgcagatgagtgccagagaattaacatcagcatttgcagctacttttgccttgaagatctttgctgatcaggcagctgtgagccacaattttaacagccccctggaatgaaaggggaaatagtcaaagctcaggccttcccaagatc

SEQ ID NO: 199900 - DNA, 1000 bp, Homo Sapiens
agtgtctcctttgacagtccctgcttctagcgcacgcttgttcataaaatgggatttgttctctctctcgtgttctttcttccttataaacttaattaaatgttactaatggaacattaaagtacatggaattaaactaatggaatactaaaataaccattatagaaaaaggtggtcgtgtattaggaattccttttactatttccactgctgggatgaaggaagaggtctaagggaaaggaaccaaaagtgtttgttttctttttaacacttgctatatgctttgtgacataagtgattactatttctaaaaaccctgtgagatttagtaaactggctagccatatgtagaaagctgaaactggatcccttccttacaccttatacaaaaatcaattcaagatggattaaagacttagatgttagacctaaaaccataaaaaccttagaagaaaacctaggcaataccattcagcacataggcatgggcaaggacttcatgtctaaaacaccaaaaccaatggcaacaaaagccaaaattgacaaatgggatctaattaaactaaagagcttctgcacagcaaaagaaactaccatcagagtgaacaggcaacctacagaagggagaaaatttttgcaatctactcatctgacaaagggctaatacccagaatctacaaagaactcaaacaaatttaccagcagaaaacaaacaaccccatcaaaaagtgggcaaaagatatgaacagacacttctcaaaagaagacatttctgcagccaacagacacatgaaaaaatgctcatcatcactggccatcagagaaatgcaaatcaaaaccacaatgagataccatctcacaccagttagaatggcaatcattaaaaagtcaggaaacaacaggtgctggagaggatgtggtgaaataggaacacttttacagtgttggtgggactgtaaactagttcaaccgttgtgaagttggtgtggcgattcctcaa

SEQ ID NO: 199901 - DNA, 1000 bp, Homo Sapiens
ctatttggtttatgataaagactatctgataaagacagattgagctgtctttatcatataatagtgaacgccagttttgggtggtagatagtattacttgttattcaaatgtggaatacatgccttactaggttagtctttatggaaacattacacttggatatagatggagtcagtaattactatagaaaatttcttcgaggggctaagaatggcttcccaactcctgggtgccattgtgtcagtaaagtcccagtgagactttttcactaagcactccttttgaagtcttcttttaaaaatgtaaaagcaggccaggcttgttggcctgggaggtcaaggctgtagtgagctgtgattgtgccactgcacttcagcctgggcgacagagtaagacctggcctccctcccacctccaaaaaacataaaaattttctaattcttgtattagatcccttcctgatatctgtctcaagaagctatgatgggggaaaaatgggtgggaataaaaaaggagttctgacaatacagatgggaaaactgaagtccaacacagacgctttatattttgcatttgtccagacctgctgacgcagagattctcataaaatttgaaaagccttaccactgagttgcttttcaaagcctgggtttccctcaaagaacatctgcaattaccatgctgcttttgaagaccatagtgaaagtgctaacctagaccagctctaccagctgtggtgaagtggctatgttgtctgggatatataccctggggttcgtcatctcatgccaggaaaatttaggacacggacgcaaggagtttaggagcggaggtttaataggcagaagagaagagaagagaaagagaaacagccctctctacagagatagaaggggctccaagtggaaaagaccagctggtggtggatgccccggattttatagtccagggtgaggagatggtgtctgatttacatagggctcacagattgtttggatc

SEQ ID NO: 199902 - DNA, 1000 bp, Homo Sapiens
agctcacagcaacctctgcctcccggcttcaagcagttctcctgcctcaaccccccaagtagctgggattacaggggcccgccaccacgccccgctaattttttgtatttttagtagagacggggtttcactatgttggccaggctggtctcaaacgtcatgatccacctgcctcggcctcccgaagtgctgggactacaggcgtgagccaccgcgcctggctggatcctctaatttataattcctccagatagagctgcttatagtttaccaattcactgttattaaagtctgcttgtgaagttttcattttggagagtttggcttccagttctttaattctgagtttcatctgactttttagtgaggtaatattgtcttctcttaactgctctaactcttcttgagacgctgctcatgtctaaaatgagcatttaaaagagacattttaatagtaattatcacttgaataattattgtgtatttgtttcatttagttttcagtcagtggttcagagagtgattttaggtattttttaaaaagaagctgaagtttaatatatttatcatgagtatcaactgaattcacaacttaatctgaattgtaaaaaaactgagtcattcttatggtagtactcatgtaatgtgatactccaaagcataatagaatcaattttaaattttaaaatttgaacaatgtaacttaagaacaatccaagaatatggtttaatttgtaaatcacaaacgttttatttctctcttcatcttgttttatgccaactggtcttagtaatcaaaggattttctaataagaatcattattatggaggatcaacttagttataataatgatgggaactaaaatatttaaaggaagaaacagctactaccatccttctagaaatctaccaaacaaattgctataaagtagggaaaacacatacaatgtctatatccaaaatataatttgcagtgaaatgaatgaaagcacattacagg

SEQ ID NO: 199903 - DNA, 1000 bp, Homo Sapiens
gacggccctggcagaggtgggtgctggaacgctgcgccctccagacctcgcatctcggggcggggcccccaagttagggacaggaccaaccccctttaacggcggcggcgcctttctccgctagatcccgctgttagtcgccttgggccgctgtcaccagctcggggtcgctgtcagccggagcccaggggtaccagtcttttgcagctttagggcacgaccgagagcagcccttaatcctccaatcggaaactacagccttgtcttggcgggtagacggataaaatggactcgacggggagggaaagggccaggccagatgcagcgggcattttacgagtgcgccctcagggaatgctttcagggaagaggcaaaaggtttcattcgccaggcattaactgagcgcccaccgaatgccaggcctgcgctgggtgcaggtactagaatcagagatctcagtctactgggggaatgttaatgtaaacatatcatagccacgtgataaaggaggaggtgcctactggtccctgggacacattgaagggctaatgttagcagttccttacacgccagcgaccactagggacctgtcagaggaggatctgtaatgggcctaggaagcctaggctgattgtccaaggcttttgaaacaactggccaaaaaccatagcagtggtaacgttcaaatctgatctcagggccccagcctccgctggaccatccccaccgccgcccacacagtgggtgaagcctcatgtctgggcgggtccctcctatcatagtgtggggccctagcagaagttgtggcacatagcacagtctcaatacatattcgttgaataagttaatttcttgccttttcatatcctcagactctgtggctcctgaagagataacggggttgaactaagcttaattgtcggggcagggcatagtggcttacacctttagtctgagcactttgggaggctaaggaggattgtgtgagcccaggaattc

SEQ ID NO: 199904 - DNA, 1000 bp, Homo Sapiens
taagattctgcgcttttcctgtctctgaaaaaaatccattattcatcatcttattgtttttaaatactgaggtaaaattttcagtacaataggaaaattgccttggaaatggaataaattgcttgccagttcaaaggctccatttctggagttgaggttacaaaacatgatgttgcttatattccttatctttcagaactcgttgtgctgcgtttcccgcattaaacttgataggattgtgacttttactaaaataagacataactgttgaataacttaatgaaaaagatcaaaagtctcatttagggtattatattacaatatatttatgtggtggtttgaatttattcacattttgtataaatactcattttctagttgactgttttaaaagaagtgatctcatacagagaagaaaaaaatgacattttaagggaaaatattattaatgttttagtctgttacttcatagatcatgtaattttttgcctaaattataatgaaacttgtatgttgtgaggttgttctgtgatgctgtcgatagtggttggagttgtgtataaaagattatctggagacactaaagcaagtaacattttgattggtagagtagggtgtttaaaagaggggtgaaaagaagtgactgccatttctcctaacacatttactttcaacaaaggtcttctttgtgattatttttagtgacaatattctattccatggtatatttcaccaattatttattcatggatactatgctttttgccatgtttcctttggtctttttcaacatcacagcacagtgatggttatctttgtagagaaatcttgaacacattttaaatttccgtgggataatgagaaaccatggttaaagtttatttacgttacagaaataaaaagctttcaatgcatcgtcacaaattgttctccactcttaccagcgattaagagtgcctgtttatccaagaccgttggccatattgaatgttaagaattc

SEQ ID NO: 199905 - DNA, 1000 bp, Homo Sapiens
gccttcccgtgggtagaggggccagccatagagctgtgtgatggggaacttttatgttgttcagcattcaccctgatgcctgccgtgcctaggaatttgtatataaatatttgcccaatttgccgggcgcagtggctcatgcctgtaatcccaacactctgggaggccgaggcgggcagatcacctgaggttgggagttcaagaccagcctggccaacatggagaaaccctgtctctactaaaaatacagaattagctgggtgtggtggcgcatgcctataatcccagctgctccagaggctgaggcaggagaatcgcttgaacccaggaggcggaggttgtggtgagccgaggtcacgccactgcgctccagcctgggcgatgagagaaactctgtctcgataaataaataaatatttgcccagtgattaaccagcaaaaatggatctcccccgaaataaacacagtgttccttgttttgagccacttctacggtgacgagggatttgtcagttttggttttcagtgatgagtccctggtcaagggtgaattttcacagtgaaacggggggtgatgagcattctgctcccttaagccctctagacagcaggccctgctggccgcatgtgacatcgtgaggtcacctggcaggggcacggtgtggcttagctcggaaagcctgggctttggggtcacacgccacctcttacggggcccgggacacgttactgaacctctcaaaccttggcttggagcctttcaagccaggaatgaagactgagtcagcagcggcagctgtcacctcgctgtcacccactgagacactgtcgttgtctttccagggtagaattccgtgtggattcccagctctgcttcagagtattccatgggtgtatcgccgccagagaagtcacattccccaagttacgctttttgttttttgagacagagtcttgctctgtcgctcagactggagagcagtggcgcgatctcagctca

SEQ ID NO: 199906 - DNA, 1000 bp, Homo Sapiens
attctgccactttctaggtgaacatccctggctccctctttgagcctcatttcctcttatgtgaaatagggaagacaattctcgtggttgtttcatagcctaatgaaatcacatatatgaaagcaggttgtaaagcacagggagaaagcctgaatgcaggggaggctgttaacataaaccacaccattaggcagtagagtcttgcatcaggagctgtgaatataggtggacctgaacctgcctgaggaaggcaatttgggggtctggtctctttctgctgggagaatgcacagagagtggagtggttgaagctgaaggaaggggcttcagagcagactcaaagcagcagcagaggtggattaaagggcagctctggagagccctcaggcaccggccccatgcgaccagcccacctgactgcccggccccaatccctgtggcctccttcttgccctctcctgaggtcctggcattctcaggggaggagaagggcccatggttagtacaggaaggagagaaatgccaggagagggcatcagggcctcagctcttggaggggctggaacttcaggctggggttggcttggccacctgagccctcctccagcaaggaccatccacaggctccccattgccacctcagtgccctcccccacttgccctccagccctgcttacttgtccagcgctgacccctggctctgattactggtgagacgagagaagacattgcggtcattgcggggccgagtgggaggggatgatgggggtgtgaatcccacatctgtggacctggtgagtcgggacagagggcagcctgttagtgaccacccctgcccacaggcccctacttggtgctgggcttccaccttctgccttgtgaggcccgcaggacagggtctgctgtgcagtattctcagagctcaacacccaatgaaactcctggatgctgtctttaaacatcaatcctcatcattcacagattccatatttgggaattc

SEQ ID NO: 199907 - DNA, 1000 bp, Homo Sapiens
actgatgtttgaattcaactgctggaaaaatgagttctatgaatattcattttaaagaattatgagggccaggtgcagtggctcacgcctgtaatcccagcactttgggaggttgaggcaggtggatcaactgaggtcaggagttcaagaccgcctggccaacatggtgaaaccctgtctctactaaaaatacaaaattaaccaggcatggtggcgtgtgcctgtaataccagctactttggaggctgaggcaggagaatcacttgaacccgggaggcagaggttgcagtgatctgagatagcgccactgcactccagcctgggtgacaggagcaaaaatctgtctcaaaaaaaaaaaaaaaggattacgagtaatctatgaagtattttaggcaccctaacttcagcttgcgaggagcgagtgaagggtctgttccacaggtaaatgaggatctggtgttaaacagaaaagttaacatactcttcagttctcatcctacacgtaaagtatagatattatgcagcacacagcacttggacaatcttttcctcctttctttaaaaaataatttacaaaataattccttaaatcagtagctgccgaagtatcatttttttctcttccttttgaggctcaggtttctttcatttcaaaacatattcttgaagacttaagttcttcctttaagaaagatttaattatttaactcagaaagaggggcaaaaagtcaggaggtgaaacctgagacagtcctattagtcttacataacttaaagttggaactgattcagtagctcagctaaaaacctgaggtttaggcacaaagatgagctctttagtatactctccacaaacataaataaacagtttttaaaaatggaaaggatcttaatttctttcttcacttcttaaaataaaagcacatacatgtatagtaacttacgatactaacataaaaatactaaattggttacgcttaaaatgaaaagcactgaattc

SEQ ID NO: 199908 - DNA, 1000 bp, Homo Sapiens
tgccatctgcaggatggcagatcagccaatggaactgagagcccccatagcccaccatcactcactagtattcagcaagtggtaactgtgtgcatgttactgcagagggcgggataatgtgctcaccgagactctgtcctgccctctgtgggttgatgaacatggtgaccaattttagagtttataagacatagtgtttccttggttataatgttcatcttgaccttacttgttgtatcttggtacaaaccaagtgaaataatctgttctttttctaccctttatatcaaagactttaaaaaattatcctaagtttacctctttcatttcatatttaaattcacccatttacttctcctctaccaggccaaaatttcctgttctggggttttgtgaatgaggccacacatttactcttattctctcttcccccttctggggctgcaatttccccatctataaaaggaagaaggccaggcatggtagctcacacctgtaatcccaacactttgggaggctgcggcaggaagatcacttgagcccaggggttcgagaccagcctgggcaacatggcaaaacctcaactttacaaaagttaaaataattagccaggtgtggtggcacatgcctctagtcctagcaactcaggaggctgaggcaggggtatcacttgagcccaggagtctaggtctgcactgtgtaatgtggtagttaagagctctacagccgcaagtggctagtggctgttgtagtagacagagcagatatagaacacttccatttcacagaaagttccactggaccgtattggtctagagtgctgaggcccctgtgaggtctgacactctatggtccatgatttctaagaacttcttctaaatttcctcttaaagtccattgcttcagtctgaagtctcagtttaacttgcttatctgtgtaataatctgtgtaaaaatgcatttatcttgaagtatggaacctgcattatatagagaattc

SEQ ID NO: 199909 - DNA, 1000 bp, Homo Sapiens
gattactctgattttttgctttacattcttttgtagtctttgaatttatttagagtaagcaaatattaccattgtaagttacaacaataaaaaggaataaatcaaggtggagtcttaacagtgctgaaacacttttgttaatccatttccccagttccaacctaagctttacagaggtgctattgtcaagcaatcactcattcgttcactctacacatataataggcatccactttgggccagaccctacgctatgtgtgaggaattcatgaagtttaggatctaggtggaaaaacataattatataagctaaaattgtaattaaaacaaataatgtacatgaaggagagatggcatcacatttctttattaatatatttattgggtattatatcccattattgctggaggataaaatctatgccagggaatataaaaagatgagacagagaaaatgatacgagtaaacacgctgaggactttagactcagcatataggtgtttggttcctaccatatcatctacataatttccttaaaactgctgtgaatataaaatcacaacagctgttttaaagagactgaaattgaaattcaatgaaacaaggcatttgtaagtcttccttggctttctacattgatagtgacttttttttttctttttcacactcttagaatcagggatgggttagatgttatgatcttgctgttacttcaggcatcttctgttatcattctccctagaggccaaaggcagagaccatgtcttcttttctatatgttggaggcactgtcttttgagttatatgccaaacaccttctctggaattggtttgccacttctagggactggctccctgtcgccatgtttgtgtaatatgacaacagacttaggcaagtgatcctagctgggccagaattccttcctcacacactcaaaacaggaacaaaagagagtggtctagattttacaatgtattaactcaagggatgaagaattc

SEQ ID NO: 199910 - DNA, 1000 bp, Homo Sapiens
gacagtatgtcacatttggaaaagttaagggaaccaggaataccaggccaggagaaggaaaacatctgaggggagagagggagaggagagaatgcacatgagtgtggagtgggagaggtgcagagagagagtggttttcaaatacttacagggataacacataagaaagtattactgggccaggcatggtggctcacgcctgtaatcctatcactttgggaggccgaggggggtggattatctcaggtcaggagttcgagaccagcctggccaacatggtgaaaccctgtttctactaaaaatacaaaaattagcagggcgtggtggcgtgtgcctgtaatcccagctactcgggaggctcagacaggagaacagcttgaacccgggaggcagaggttgcaataagctgagatcgcaccactgcactgtagcctgggcaataagagcgagactctatctcaaaaaaaaaaaaaaaaaaaaaaaagaaagtattactgaacattgctgcaggaagcaatgttacaactaagaaaggattttctcatcatctatactgaacacagacggagtacagtcatccttcagtatccaagggtgattggttccagaaccctctcagataccaaaatctaaggatgctcaagtccatgatataaaatggcatactgtttgcctatatcctacacacatcctcttacactttaaatcatttgtagattacttagaatatccaatacaatgtaagtgataatcgttgttatcctgtattgttttttatttgtattatttaaattgttgtattgttattttttattgttttattccctgatattttctttttttttctgagacagggtctccctatttcacccaggctagggttgcagtggcacaatctcagctcattgcagcctcaaactccctggctccagcaattctcccacctcagcctcccaagtaactgggactacaggtgtgtgttaccacgcttggtgaattc

SEQ ID NO: 199911 - DNA, 1000 bp, Homo Sapiens
aagaaaagacaatcaagcagctgcctgtgagaggggccacatgttggaatttgtaaatatgtatcaaaatgtaactaactattatacctgttcccaaggaaataaaggaaactatattcataatgaatggagagatagaaagtctcagcagagaaagaaaagttatataaaagacccaaaaggaattacaaatcaataacaagatatcaagaaaagcttcaataatttggaaataattttaaaaacaccagcgcgtgtgacgtcatggcgccgtgcggggtcgcggcggcggcgcagggggcgggcccgtggcgcggggcctgaggaggaagtggagagattgttgctccctctgcgcccagagaggacgcggctgcgtcgcgctcccctgcgatcccctccatgttccctggccccaccgctccccttcctaaggctgctgctgtctatggaagtaatggaaggacccctcaacctggctcatcagcagagcagacgagccgaccgtttattagctgcaggcaaatacgaagaggcgatttcttgtcacaaaaaggctgcggcatatctttctgaagccatgaagctgacacaatctgagcaggctcgtctttcactggaattgcaaagggatagccacatgaaacagctcctcctcatccaagagagatggaaaagggcccagcgtgaggaaagattgaaagcctagcagaacacagacaaggatgtagctgcccatcttcaggcatctcacaaactctctgccgaggatgcggagggccagagccccctttctcagaagtacagcccttcttcagagaaacgcctgcttgagattcaggggatctttgacagggatccagacacactactatatttacttcagcaaaagagtgagacagcagagccatgtattggaagcaaagccccagaagatgataaaacaattatagaggaataggcaaccaaaattgcagatttgaagagacgtgtggaattc

SEQ ID NO: 199912 - DNA, 1000 bp, Homo Sapiens
ggatctgcaaccaaagggccccaaaggcagagatcctgaatggcaaatttcacttcaatgttacagagaacaggaagcaagtgctcacaaaaggtgttgtcgagttcctttccatgcttgaaaccctttcctgtggctcccttttgccctcgggataaagaccaagccccttaatatggcaaaggcttcaggacttggctcgtctacccttccagcttcatctttcaccattcccaccttgtgtctacccaaactgaactacttattgttacctgaaagaaccatatggtctctcttagccataggtcttcatgtatgctgttccttctgccttaaatgctgttcctcatcttgtaccagaaacctcctttcacctgtcagtgggtcctttaaacttaatccagttattgcttactccaggaggccttcccaaagtctttggctagattagggatcttttgtaaatgcctgtagcaatgagcttcttgaagatagggattgggacctcatttagccaagattctggcagaaaatcattgtcaatcaatgttgaatggacaaacaaatgtgaacgtctgagaaaaaaacacctagcaggatagctgtaaaggggagtggaatgttctaacgtttccaagttccaagattcaacattctctaattctgggctgaagattcactcccctccatccgaagcccactctccagctagctcctccgccctgtgccctctgagtgtttgttctcaggcaggcacacacacatgttctgaacataaccgggaaagcaatttacaagaaataattgccggtcgatgtgtgcttgggaacagcggtgagctcagactatttctgtctgcatatcagcccacccagcatcctcccactgcggctgccctgggggaggggctcctatcacacagggtgggcagtttgtttctaatgcaggacccagactagccaaccccagtgacagccggctctgagccttgattgaattc

SEQ ID NO: 199913 - DNA, 1000 bp, Homo Sapiens
attaacttctgcatgtaacaccctggcctttcacctgtattaacttgagctcattaaacttgaggccagtaataaacaggaccaaactaattcagatattttgcttggtatgtgttcagcattttttttaatggtttctactgtgtgaaacattttcccttcaaaatttgtggaataagtaaaacaggaagcatagatttcaaggaatggagtatgtaggtagtatgcttctttaaataaataaagagcatattaaacacctaccttatacaaaactttgtgaggactacaaagaagtatgagtggcaggatagcacagagtctatcaggcagacttggatttgaattaattgtagcaagttacttagtctttatgcccctcagtgttgttgtgtataaatggacactagaatacccaactcatggatattctttatcttctttgcaataaggaagagataatgtactcatgtgctttgcaaagtgtctggtatatagccatgatcagttaataagctgatatattcgtgaaggtgatgatgatggtgcagttccttccctctcccttgttaaatttataatcccctctcagccatttttgaggaaattgattttccccatgtcacctcccctacctcatcatctctacaaaatataagcaaaggtcctttagaatgcaaggaaagtaaaactaagtcattttacccttcccaggttgtccaccaacattgctttatgttccttttgactaagaagtaagtctttggcagctcatagactatgcaggccccagttaacaaagttcctatgtaattttaaaagtcaagaatctgattgagcaggggatggtgataaaggaggggtcatctgcagaaagatgaccaacaaagaggtggaaatagaagtctgtcaggaagaatgacagcatgcaggagtttcaaggcagaagccattgtgagtcagggtgaggcagtcagcaggcagtgtgggagtgaagatc

SEQ ID NO: 199914 - DNA, 1000 bp, Homo Sapiens
tgcctgcagagtcatttttctaaaatttagttatgtcactctcttgcttaaaacctttcaatttctctctattgccaataggataaagtctaaattcattagcattttataatctggcctgatcatctttccagcttcatcagctgcccatttccctacacattacaatgtctacttgggtcatcttagaaagtgggttatccttttcatgctgttatacatgggatactgctatggtttggatatttgattcctccaaacctcatgttgacatttggtccctaatgttggaggtggggcctaatgggagatgtttgggtcatggggttgtctccctcatgaatggcttgctactgtcctcttggtaatgagtgagttaccactctcacagtttcctagagcctggcatctcatttgttaaaatgagcctggcacctcacttgtctgtctctcttcctttatagccatgtgatgtctgcacattctccttcaccttctgccatgagtagaagcagcctgaggccttcaccgaagcagatgccaatgtcatgcttcttgtacagtctacagaaccatgaactaaataaacctcttttctttataaattacccagcctcaggtgttcctttatagcaacacaaacagactaagacagataaccttagccaacttttctttaaacttgccatcatctttgattgataaaagaataataaaagggttgaactaatacttcttacttactgttagaatacattatggtagaaatcattttaaaaatgatacagaaattgatacagaaataactagccttacagtaatgttttctaatttacttggttcagaataaaattatactgttatatcactctgttgtaaaaaaataaaaaggcactggaaaattgtttcctaagaagacttatttgtagttatcaacatactaaaaagctttttggggggcagatcaaaaatgttactaatagttcatctcttggaattc

SEQ ID NO: 199915 - DNA, 1000 bp, Homo Sapiens
ccacggaccggtaccagtcagtggcctgcgggttggggatccctggtctaggcagcagctccctggtataaaattgctctctagaccttgtgtcccaaagacaaccctcccctttgctgtttcactttctcaggcatgaatctgaggagctcctggactacaaggagcacatttcaggctctctgagcagccttggtgaaggacccattctcaaacaggcttgaagagagagggaagcactctgcagcctcccctcttttgtatttttgagagagggtctcactctgtcacccagtctggaatgtactggtgcgatcacagctcactgcagcctccaactctcaggctcaagtgatcctcccacctcagactcctagtagctggggccacaggcatgcatcaccatgcctggctaattatttttattttagttttttgtagagatagggtgttgctgtgttgctcaggctggtctcaaactcctgggctcaaacaatactcccacctcagccttccaaagtgctaggattacaggtgtgagccactgcacccagcccactttcccctcttagaaggagtcttacaatagtgctttcttcaaagaaaaccccctcacaaaatcctctctctgtctttactcccttgaggtggaactgaggggttcaagagtcctcaaccagttctttttattttagacagagtctcgctctgtcgctcaggctggagtacagcagcacgatctcagctcactgcaacctctacctccccggttcaggtgattctcctgcctcagcctccgggactacaggcacgtgccaccatgcccagctaatttttgtatttttagtagagagggggttttgccatgttggccaggctcatcttgaactcctgacctcaaatgatccacctgcctcggcctcccaaagtgctgggattacaggtgcaagccaccacacctggccctcaaacagttcttaactgtctactttgagaattc

SEQ ID NO: 199916 - DNA, 1000 bp, Homo Sapiens
actgattgtacaaacagactatgattatcacactaggatatgtgtcagaaccacttgtcaaggtgaacatacctgcccaggtcatggtggagttcttgattccagtttattttagctaccatagatattgtctgaattctagtccgacttcaaatgcaaaacagaacctggatgacaatgaacaagtatctgcaatatatactttaggaggaggcattaggcctatcagcatgctctacaacagcgcctattgatgcacctgtgtcttttcaaaacatagaccccagttagttaaagacatatgggaagtgactagtccagaagctgtatcccttaatttctgatgaaacactaagctacacatctctgcttttctgtctatatctgctcttatttcacaatttaaaatcttttaaggagcatgcattaaatgccaattatgtacatataattataaaaaatatacatctataatttgatcttcataattactctatgaagtagggtactgcttcatactgtgaggcacatactacatattattaagtatgttttattctgcctatattacagataagcattgtagagaagaagggtcaaataaatcgaccaagattttgtggctagcaaatagtgtgaccacaatgtaaagccaagtctctctgattatagggtccatgttctttttggtaggctatgtcttccaaaactggggagtgacttaatgaggaaggattgtgtggcataggtgagatacaataacagggcagtaagggatgcttctacgaaaagacagtcaaattattcttttccttttcattttcgatttttattttgcaattgtgtgccatcacaaagctaatgcaatcaggacttatgttctgtatttacacagctgattacaagtactttcatggttcatgatctatcaagtttctgagagttaatgcaatttctcctggggtgtaggaacaccacattgggatactggggggaattc

SEQ ID NO: 199917 - DNA, 1000 bp, Homo Sapiens
ccacagtgtgaccttggggaggttgtttagacttcatagactggggctgacattactcaccctccagggttgtagtgaatgagggtaattgctaaaaagtcccttccccgggttggtcatccctaggaagtatcttatctgtcccttgttccttatcaacatggacggctggaagagcactggcccaaggacatcacatagagctgggtttgagttctagccccgtctctagctgtgtggtccctgtgagcctctgtttcctcatttgtgagatgggaaaagtatctattcccattgagttgttgtagctagaagatagagataagatgaggaaagccaatggcagtaagaatgctatagaagaccggaggcagtgggaggcatcagcctgattagtctgaggtagctggcctctcctttaggaagttttccttcagccccacaacttggattagactctccctgccatcctgggctcccacagtctcctctgctaccctccacaccccacccctctgttatggcacttgtcacaccctaccatagctgtctctctagaattatagaagcctccctgaaggaagagaccatcacctctgcatgcccgttaaagtagcaaatatgaatgaaaaaatagtaaaacccactgctggcagtgttgcaggtgttgaggctcagaacgtgatagcccaatgtatggcactttggcatgctgagtacttgaactcaaagagaagcaaaatatccaggccctgtgtctcccgctcctctttctcccttgaagcaaatcagagaaaacagaattcctattccccaaagcacgtcatagaaactagaacctctctccccctaagccagccataaaatctagaaaggttacactctctgttttcccttgccccttgaagaccctcatcccagagcagtcctgccccatacactgcaggaaggaatgcttcgcaaggagaccaaaaagaatctggataggctttgctggatc

SEQ ID NO: 199918 - DNA, 1000 bp, Homo Sapiens
gccaggatggtctcgatctcctgaccttgtgatctgcccgcctcagcctcccaaagtgctaggattacaggcgtgagccaccgcgcccggcctcaacaatcttttaaaaagttcactgcatggaaacgaggccccctgtcagttactgtggaagaggccccctgtcagttactgtggaagacacaatgctgaaaagacatggtttcggccctccaagagctcatgtgttactattccttttaaagaaaaaagaaacaggcagcccgtaaatgccaaataaatgctgtctgcaaggtgctatgcggagtggggctcagagaagagcagggcccaggttagtccaagacggttccacgcgagagcctgggagagggcagtccaggcagaggtggaaagggcaacacaagggacagagtctggaagagcaagctccaggcagactgtggtgcctttgaatttgacaccgagacaggtggattctattctgctgttgagttgggcgagagataaagaagctcttctggaagagcaagaagcggcagccaggcgccatgagaaagaaaagggactggaagctttgcgtagtcttcactgcaccgcggtctgcactcctgttcagaagcggtagcaaagaaataagtggttttttgccctactccaactcacaccttcaactaccatccttatccagcactaattccccaaaccactactgacttcccatcctctttccagttctctctctcaggctcaaggacaggtgcaaccagaaagtgaccctctgacaagcgtgcaagggcaatgtgcatcaatcattttatttctaaagcggaaaatgaggcacaaggaatacattcaaatctcgcagtttcatcagcatcccaaacccacgaattcacaatgctgctcaaaggtcctctctgcccatgaggcgtccccaaaccccaaatcacctgggccacaggctccaagcaccacagacatgataagcataaagctt

SEQ ID NO: 199919 - DNA, 1000 bp, Homo Sapiens
tagatttggtgtttattattcccacttatgactttatattctcactacatatctatatctgtaggtgacacatattattgcatgctttaaaacttaggcaaaaagtaacctattatctgtatcatccttaaacttgctttattccttcaaatctgtatatagagagatttctcatattgatgtatgtagctttagtttattcattttgatgctatagaatggcaaatataccacaatattaaaattgactctgttgataatggaaatgtaagctgttaatttttaaaaaaactcctttaattacaattttttgaccatttgaaacagtattgtggtggatagttttgtgtattttcctttgcactcatgtgtaggagtttctctagaggatatatctagaagtgaaattgctggctgcaaaaatattagtatctttacttttaacaaaagtatacctttttacactctaacagaagtgtgtaagaattcccattgctccaactttgccaacatttggaattgccagagtttataattttggtttagctgggaataaaatggtatgtcatgtaaatttgtattttcataaatgaggtcatagtttataaattggtaatgcaaaaaaaaaaataggtgctgttagaacacaatgtaactgaggatacattacagtaatgtaactgttccacagaagaaaagttgcttaaccaaagataaaactcttaaaaattgtaggcttagaattttttaaagcacaattttgtattcatgtctgtctgacatgccacatatatttagtcatgtcattcttccaaaatgtggactgatgccaattttctactgttataatactaagaatcaaaatgtattcgttatagaatcttcttgagacctagaaatcgatatgatttctgtgagctgttatactatgacttaacacacagattgaagcaggagattgacagatttagaaagtgtagactgccaaatcattgaattc

SEQ ID NO: 199920 - DNA, 1000 bp, Homo Sapiens
tctccaaaaaaatcacacaaagtatggtgttgtagctgtgttctagaacctgtgctacgcactgaggacaaaactgtgatcccaacagaactgggctgtcttctcgcccagccccttgagcagcagagcaggcagcagatgctgggaaatgcctgatggtgtagccatgtggcagggggatgtgtagggcaccgagaaagggggtcttcttgcaggattaaagaaatgacagtcttaggctcctggtggaattggaggtagctagtgatagggagggaagtagcagagagggaggactttcaggcagagcccatgtgccacatcctgagggaagagtacagagacattatgtgtagcagagagtggagaagtagtgtccagtgtcagggcaggccacccacagcgtatgcaggggatgaataaatgagtgaatgagtgatgtggaagacatggccccatcccttgtcatccaattaaaaatgtttactgaggctgggcgaggtggctcacgcctgtaatcccagcactttgggaggtagaggcaggcagatcacttgaggccaggagttcgagaccagcctggccaccatggtgaaaccctgtctctactaaaaatacaaaaattagccaggcttggtaacgtacacctgtagctccagctacttggacctctagtcctaactaccaactactctgaggcaagaaaatcacttgaacccggaggtggacgtggcagtgagccaagattgtgccactgcactccagcctatgacagagcaagactctgtttaaaaaaaaaaaaaaggccaggcacagtggctcacgcctgtaattccagcactttgggaggcccaagcgggcggatcatgaggtcaggagttcgagaccagcctggccaacatggtgaaaccccgtctctactaaaaatacaaaaattagctgggcatggtggtggaagcctgtaatcccagctactcaggaggctgaggcaggagaattc

SEQ ID NO: 199921 - DNA, 1000 bp, Homo Sapiens
gagagcagcctggccaatatggtgaaatcctatctctactaaaaatacaaaaattagccgggctgtggtggcacgcgcctgtaatcccagctactcaggaggccaaggcaggagaatcgcttgaatccggcaggtggaggttgcagtgaaccgagattatgccactgcaccccagcctgggcgacatagcaagaccctatctcaaaaataataataaagtaaataaaaacaacagccctgtttaacgtggggtagtctttacaggtcagaagtttttgggcattggctgggtgccgtggctcacgcctgtaatcccagcactttgggaggctgaggtgggtggatcacctgaggtcaggagttcaagatcagcctgggcaacatggtgaaaccctgtctctactaaaaatacaaaaattagctgggcatggtggcaggcacttgtaatcccagctacttgggaagctgaggcagttgaatcgcttgagtccgggaggcagatgttgcagtgagccgagatttcaccagtgcactccagcctgggcgacaagagtgaaactccatcttaaaaaaacaaaaaacaaacaaaaaaaggtttttgggtatcattacatgatgttataatttgatgatcaaaataagaacttgaatatttaaaaaagatttaaatatgttctgaactgagaagtttcagagtatttaacagtttaaaaagttctcatcacaacaattttaaacatttttttcttgagagtgatttaatgtactcctgaatttcccttattcggagctctttgttcttgagcatactggacagatgagttgctatcatatcagcatttactcttatgtgttttccgtagcttttctggaagtataaagaagtttaacaagggatatgattttcagtgtagggaaaaagatatgtttttgttattgttttgttttgttttgtttagagtcagtgtcttgctatattgcccagtctagtctagaattc

SEQ ID NO: 199922 - DNA, 1000 bp, Homo Sapiens
gttattttttctagagttttttttgctgattaaatcttgactaaatgtgtatgaggcatgcatgaaagctccatttcggccaggcacagtggtgggctcctgtagtcccagctactcaggagtttgtggtgagaggatcacttgagccccggaggtcaagaccagcctgggtaacatagtgagatcccaactctaaaaaaaataaaaataaaatctgcatttcatttccagtgtagtacatcattaaataacagcctgctctgttttttccaggggtgagcccctccagactccgaataggagatcaagagtttgattcattgcctgctttactggaattctacaaaatacactatttggacactacaacgttgatagaaccagtttccagatccaggcagggtagtggagtgattctcaggcaggaggaggcggagtatgtgcgagccctctttgactttaatgggaatgatgaggaagatcttccctttaagaaaggagacatcttgagaatccgggacaagcctgaagagcagtggtggaatgcggaggacagcgaaggcaagagagggatgattccagtcccttacgtcgagaagtatagacctgcctccgcctcagtatcggctctgattggaggtaaccaggagggttcccacccacagccactgggtgggccggagcctgggccctatgcccaacccagcgtcaacactccgctccctaacctccagaatgggcccatatatgccagggttatccagaagcgagtccccaatgcctacgacaagacagccttggctttggaggtacataacgtgcacaatgtagaaagaagagatctgctgcagggtctcctctcggtcctcttagagctttgtagcaatgctgactacagcattgggatgttgtagatggcaagccgctaagcactgatgttggcattgaatgttgggttttctcttcttcatagaaaacctgtttgggaatgagtaagctt

SEQ ID NO: 199923 - DNA, 1000 bp, Homo Sapiens
gcctgggaagcctttgtcatcacaggcctaaggctctcctacacaaccaagagaaactgaggtgtccagctagcaccagcaagaggtatctcgctgtatcaagtaacctcggcagacattttgtttctatgggcttaagaattccctccccaatccagaaacactggggtagtcagaggacaccagtaagagagactccactgtaacaagcagtctggcccaggtagtctctttgtcctcatgagtcagaatctctcatgtactccccagtgacatcagggcagtgaaatagcaccaataatgaacatcgtgccacacaaagtagcctggtccagcaaaacctctttgtccctgtagcctgagagtcccctcccccaccaagagacatcaaacagctcagcctggggaatgatttctgccacctcaggcagcaccagtgggagctctagtgctgcctgaggtgacagaagggctatatttaatggccccagcattaaataaacaaagaaaaccaaataaccaagaaaatcaaaataacactgaaaaggctctgaaaattaaactgccactggaacaacagcctacaaaattagactatggtctacatgctaactctaaacacaaaaactaacataacagccaaaatgtccaggatatagtaaaaaagcacccattacaccaagaaccagaaaagatcacaacttgaatgacaaaaagacaattaactgatgccaacacagacatgaatcagatggaagaattatctgcaaagattttaaagcagctaccttaaaaatacatcaaatcataaactctcttgaaacaaatgaaaaatagaaatatcagcacagaaatacgttataaatcaaacagaaattataaaactaaaaaataaaatatccaaaattaaaatctcactggatggtttcaatagtagagtgaaaatggcatagcatagaatcagtgaacttgaggtgaaatcagtagaatttacccagtc

SEQ ID NO: 199924 - DNA, 1000 bp, Homo Sapiens
aaaacctgtacatgaatgtttatagcagctttatactgtaccggtcaacactggaaacaacccaaatgtcctacaactgatgaatacaaaaacaaactgtgggccatctatactatagaatactgctcaaaaattaaatggaattaactggttcatgtaacatcttggatggatctcaaaagagttatgcatagtgaaagaggccagtctcaaaaggttgcatattgtatgattccatttatataatattattgatgtggcaaaatcataatgctgcatagatctatgattgccaggagttaggattgggggtaggatatgatcattaaggtgtaactcaagggagtttctttgtggtgataaaacagttctgtatactgactggtgatggttacaccaatcatagaacgatatacacatgcacatacccccaaaagaagtccacacaaaatctggtgaaatccaaataatgtattgtactgttgtgatacacattattattgtattgtatgtaacaatgtcagtttcttacttttgacaacgttctatggttatgcaagatattatcattaggaaaggctgaatgaggggtacatgaaaattctctgtactatatatggaattacttttgcatctaaaactatttcaaagtaagagttataattttaaaaaatcagttgtaagaaattttaaaaaatgttctagcctcaagcctgtctgacttcaaagccagtgtgattaaaccactacaccacatggtaaagatcccttagaaaaatgcctatgtcagcaggcacaaataagggacactcctagctattcaaaattatttttgtctccttaaaccctaaaataaaaaagcacaaaacaagaaatggctaactgagataactataacatttgaggtgggatgattttaatagaccttatataccattttaactcttttaggttaaatcccacttcgttgttcagtgatctcaaaatgtgttatgaattc

SEQ ID NO: 199925 - DNA, 1000 bp, Homo Sapiens
cacaaaaaactatatgtaactttatccagattgatttattgttaacattttatcccatttgttgtgttttttctcctcttctgtctcattctgtactttcttctctctctctccccctttctctttctctccccccaccacacacacacacacacacacacacacacacacacacacacacacggttttttaaaatcatttgaggataagttacatgcatcgtaatatccctttactcctaaatactttaatgtgtatttcctgaaagaggatatcgcttatgctaccacagtatacttaccagcttcagtaaatttagcatccaactgtccttaaaagccatttgcttctacgtcaataaaaataagaaaatggatattttcctctgtattttaaagtctcctttattgagtatagcgttatttgtatttcacttaagttgaatttttacaattaggtattcttgtaaccactctgctatcaatttatctatcttacactaaaagccccatgaggcaggatccacctctcttccttctgtttattattggcactgcagtactcagtgagtgcttggttggcattcaatcagaatgtaataaataactggaagaattactaataccttttaattaccactagtaagtttttaaaattagtgtaatagaaattaacttatagattttaggttttttttttttaagcttttcaaatgtgtcaagtgtggtttacttcagtcactggaagtggttagaatgaattatatattaatatatttatcttgtgttatatctatgctaggtgcaagcaaagctgtattagtaattttccagtacaagaaaaaattgtttcctttctgtttagtttaactattcttctaatatgctgacaaaatggaaaaagaattaattgatatattactttactaattagaagagggtgttgcagttttaattaatttggtatttttaaatgaactttttactgaatcatagaattc

SEQ ID NO: 199926 - DNA, 1000 bp, Homo Sapiens
tattgtattcactattaagttgtaattaatatttacctgcctatgtgctcaaccttatactaagagcattgtggaatataaactaggatgaagtaattgtgcttcacctgaaagatcatacatatgtgcatcgaatgcttggagaatgattataataatcagaatgatggcatcaacgtcacattaaggtgcgtagatagcctttagtagggtgcagtgaaatatcctcacagaccctgtctccctgcaccctcctccccatttgatttattactcatttccagaattctctttttgagggcccctaccagaaattggtcatttctgttcagactcatcagtgcctatcacatgatgtcccaccagaagctgagctttcagggccggagcccagcctccgcagtgtttgtttctccagggcctggcagggtttctagcacagactggggaaaatgggtggggaagatagatatctttgaagtgccgactgtaacaataggagttcaacacagggagggacatcatgggttggaaaaattagtaaatgggacaaataatattataaatagaatgatatctttttatgaaatgtttctaatttggcattggactgaaaaccttaaggttttattttgagccagaaagttatatgataaacgatatctattagggggagaagacctttctctgtaatttttatcatcacaaaccattattagacaacagttaacagtcctctctgggcaaagagcacatttttaggttaagtgaaaatgaaaaatgccagttgttaaggtactgaagagtagtgaagtactatgagaaataaacatagaaccataggaatagagcaaaaggaaacagaatgcgttcaacccagcacacatgatggaatctttcctcaaaagttgtctgaaatgccaaatatctccaaccctgtatttctgtcaattcgcatgtgaaaatcaggagagacattagcagtagcaacagagaattc

SEQ ID NO: 199927 - DNA, 1000 bp, Homo Sapiens
aaattgggatgtgtgctccaagcataaaatgcacactggatttgaaaggcagcaccaaaaaacaaaagaatgtaaatgatctcagtaataagtttttattgattaaatgttgaaatggtaatatattgggtatactgtgttggttaaataaagaatattattaaaattaatttcatctgtttctttttactttttagatgtggctacaaaaattacatatgtagcctgcactatatttctgttggactgtgctggtctagaacaacacttttatgtcaaagatgaggaaattgaagcccaaagaagtaaagggattgatctaaacatgtacaacttataaatggcagagctgatactcagacccaggctttgtgatacctgatacagttctttccattctagcacacttccttcagttgtggcagttacaacacacagacacatacacattccagagcatatacatctaagtaagcattgattcctccaaagtggtcatcttcacatctggggaggaggctgtgtatgcatattttagtaatacatttaggtttccactttcagaaacatcttggaattttctaaacattcttttgatagcaaatttgtgtatttttgatgcacacacacacaccgagagaataagagagacagaattttatagtgaatacccacatacctaccacctaaattgtatagttaatattttgctatatttgttcacctcatctctctatttaagtgggtctctattaacccatctcatttttgaattggatttcaaagaaagaggcagacatctgtataatctgattttgatttttagaaataactacaagttatttggaggtgtctgctaagtaatactgtgtctgaaacaaaatgtgtttataaaagagagcagctttgtgtgtgtacatatatgtgtgcggggagacaaaagagaacatacaaacttgaggtggacagtcttgtgagagaaagttccaaaatggaattc

SEQ ID NO: 199928 - DNA, 1000 bp, Homo Sapiens
tgaggccttcagagagctttgtccgcatcatctgtgggtgcactggaaggggacttctggctcttctcattctctttttccagtgtgggggggaggggatgttaataaagaaataaaagtgaacatgacacacctaaggtcacacactggattaatgagaggctggaatcagacttttaagctcttgaccttctagccttaaacatcttttggaaaacatgacttgatcttccagtttgggaggcaaatatattacagctcttatttttttccagttgtttgccagaatactcacaatgtccaggatctcctcctgtggcctccctcacactggatttgtccgagaatctcagggacttactctgcactaaggggtacagccctattccaacagagacttgacaagtacagtctcattggtcaatcactgccattacttcccactgccacctgatgtcgctgttggagactgggcctgcagagctcagtgagtgacactgactaattaatggcaggtgcttcatggtctcaatcccaactcagggtacagcagtgccacccaagggcatcgaggtcacagccccctatagttcagatttccatgcttggccaacaactcccactgtgcaaccaagtgataggatgatttgatctggggagcttccaacatcagccttagtttctagtaaaatctactcttctgaacaaacctttaagccattgcattgagctgggtcaccagcctagactcttcctttcacatggcagttttataaagcaagagttctcattgtttttctcagccactaagctttgtgcgtagccatgctggtctatcttgctttatccacataaatctctttacctttgaatctcgggaatgggagttgaagtttcttttctttcaagtcttgggttatatgctcatttatccattgatttatttcattggggcttttttgttgcaagtaacagaaacacaacttgaattagggaattc

SEQ ID NO: 199929 - DNA, 1000 bp, Homo Sapiens
ttgtgtcactgcactccagcttgggcaacaacagagcaagactcaaaaaaaaaaaaagaagaagaagaagaagaagaggagggcacccaaagggacaggagattggacaggggctgcgcaggagcctccccgacgagcgccaccccgcgctccacagccacccaagggctgaggagtgcgggtgcacggcgcgggactggcaggcagctccagctgcggccctggtactggatccactgggtgaagccaactggtctcctgagtctggtggggacttggagaacctttatgtctagctaagggattgtaagtacaccaattggcactctgtatctagctcaaggtttgtaaatacaccagtcagcaccctgtgtctagctcagggtttgtgaatgcaccaatcgacactctgtatctagctactctggtggggacttggagaacgtttgtgtggacactcactctgtatctagctaatctagtggggaggtagagaactttcagtgtctagctcagggattgtaaacgcaccaatcagcaccctgtcaaaacggaccaatcagctctctgtaaaatggaccaatcagcaggatgtgggcggggccagataagaataaaagcaggctgccggagccaacggtggcaatctcctaggctttgtggaagctgcgttgtttttgctctttgcaataaagcttgctgctgttcagtttttgggtctgcactgcctttgtgagccgtaacacccattgcgacggcctgcagcttcactgctgaagccaatgagaccacgaacccgccaggaagaacgaacaactcaagacgtgccgctttaagagctgtaacaccgtgaaggtctgcagcttcactcctgagccagcgagaccacgaacccaccagaaggaagaaactccggacatgctgtctttaagaactgtaacactcaccgtgagggtctgcggcttcattcaagtcagtgggaccaagaacccacgaattc

SEQ ID NO: 199930 - DNA, 1000 bp, Homo Sapiens
ctgagctgcaggcccgggaagacggtgcttgccagcacagaacaacggtgcctgcatagactgctgtcagacatcgtgaggtgtcgtcgtcaccagcccctggaacccccatgttcttccctgttcaactccctcagcactccggagagccactgtcctcaccttcaccattcctgtcaaatctccggcccacttctcccaggagaccactctgtggccaacttcagcagccgaggcccctgggtggggctcacacctgccactcaggtcagtccccccagccgccgggcacctgctcttctggttcctcccttccatccacaggctgccccaagtcgcccaccttgtcaccattttacctccagaccccacactcccacagacactcaactgctgctgaataaatggcgaatctgttaatgaaggaaaacccttccctgagtccccggcacctctgtcccttcccacccccgcccaggccccctcgcccaccatggtacaagagcacccacacctacaccctctccttccctctggctaatcctcagaagcagccacctgaagccttcaccagtggcaaacccagtgagcacattgtcagtgtccctcctcgaggcaggggggcactctctgtgggcctcctcccaggcaggtcttctcggcccccactgctggcagcccactgacctctcccagggcctgccctctaaggtgaagacccccacgcctttctagcctgacctagtctctgagcctcctcatccgatacccacaggcaccgcaaaccaggtcctcctcaggaactccctgtcctggcagtgccggccctcaggagccatcccaggaagcaattcgtcctaaccctcctccctccccagccccacgtgtcccacccagcttgagactcgcttcccttctccccatccacacagcctcggctccagttccatctcaccctgatgactctcagagtcttggtctaatgatctagaccaagctt

SEQ ID NO: 199931 - DNA, 1000 bp, Homo Sapiens
actaacccttgtctaggcaaacctgggagcgagatggaatcaaataagaaccaacctatactgggcagtgattactctaaaagcttatgcaagagccctgctcctctgttggtaccctacatgtcgatgccgagactgaggctcagagaggtctggtcattgctcacaccggcccctgcactgtcccaggctgtctctcttgcagcaagggaaaatggctctttagcctctgttatgttttaaccataaggcattttctcacgcagggctttccaatgttggcccacagacaagaagcccactggacatttgggaagaggagttttagagagaagaggatggaggaaggctagagtcacggtattgtgtgtgcacgtgtgtgtgtttacacgcctgaaacgaatgactgcgtcggtcacatgtgcggtgtgcccacatccttcccaacaaagatgagctcaaaagcgtgagggaaacacaccgtgcaaagaccagcttaggggattctggtgaatgtccagagatccaaacagcaagacccccgccgctcctgactcagcagggatgctggatgcaaactggccctgatacactgggccctggggtcttctccacgtcattatcctggagggtttaagtcccccgaggcaggagccaaagggaacagcaagcttgagatttttctgaagcctcttccgttgacagtgcctttccattcatctgaaacaaactctgaaggactcctctctatggaatcggtccccagaggtggaggctgctgctccatcccagcccctctcatcccatcctctcctgcttcacgcagcccaggtgaggcctgccctgcagaaggctacagggaacacgggatggggcagtttctacctgcctgctgagctgctctggtgacttaaaacaaaagtgtcaggagcctctggcaggaggaagggaggaataaaatccagcattcaacccaagcatctctgttgcccatgaattc

SEQ ID NO: 199932 - DNA, 1000 bp, Homo Sapiens
atacattgaagatgttactgatgatttttttttaaaaattgtcagttgacagtgaacctttcacgaactaccaaactaaattctctacatagaaatgtttgtaataagtgttcataagcaacacaaaaatattattctaagctattagaaaatcaagaacactttcaacactgcctattttttaatttgtgaaatgtaatatgcaaaaaagtactacaaaaagtataattcagttaaaaaaaaatgacccactgatcaccatctaagttaagaaatataattctgacagccctgaagctcaatcattattacctgcacaaaactatctattatcttatatgtacgcatttacttgcttttctgtatattttaacaaggtatcaaagcatatttaaaaacaattgtttagatttttcctgattatcgtagaaattttggtctcatttgattatcgtagaaattttggtcttttaggtcatccctgacctaaaagagaaatgcttcagtaattcatcaagtatgatgtttgctgtaggatttttggaaatacgctttttttttagattaagaaatttttcttacgtttcaaagccactgaattttttgtcatgattagatgtcaatatttatcaaacactttttatgcattattgacattatttatctcatttattatgctagtgtggctaatttcctgattaattttcaaaaattaatctggtaatacatttctgcaataaactcaatgtagtagggatgtattaccctttatacatgataggaattggtttagtaccaatttgtttagaatttttatatctatgttcataagtcaattggcttatttggcaaaaagtttttctttcttataattcttctgttatgtattggaatcgaggttagctagtctcataaaatggattgggaagtgtttcctcttgtattctatggaagtgtttgcataatattagaattatttcttaaaagtttaaaagaattc

SEQ ID NO: 199933 - DNA, 1000 bp, Homo Sapiens
ttgcttgtaaagcactataatatataaatacaagctatttttaatttgcctaattaaaattatggtgcccatctctcccatttaattaccgatttatttattattcatgtaaattaatttcaaatagttaactattgttaacaggcaacatgcttctctttgctagtcacattaattgtaatttgtcttgagttgtaagtaattcgttttccactcatattacaagttttatatctatcgtctttctgagtatgttttcagtgccttaaaagacttctcttattcattctatcatactttagtaactgaatacatagatgtttaagggatacttttagctccaggtttgtttttataactccccatatactattattgttgtttgtcactgagctttcaaagatatgaataggacataacataactttatctctttaataggctttattaagcctttgcaaggcattccggccaatatgtacatgtaaaaggaaatccataaattgagaaattctaccagtaactttgctttacaatacacagaaatccaatggaagttttcttacttacttttcctgcataaaccacccactagttgtatgttgtacatggggaagatatttttaaataaatgacttcttaacttcagtaagtcaaaattcatttaacaactgttattttggaaaaaaataagttcttatattattttatgcttttttgtatatgtgttatactttgataaaaattttgtttaactcaaatagagtaagggtaattctagaaaaaatatttaattctgacttgaaaatataactgctttggaaaatttgagttctagccacaaaatagttgatggaagagagggtttgtgatatggtttggctctgtgccccaaagcaaatctcatctggaattgtcatccccacatgtcaagggagggaaatgattggattatggaagttgtttcccccatgctgttctcatgatagtgagtgaattc

SEQ ID NO: 199934 - DNA, 1000 bp, Homo Sapiens
tagactctactcttgtactggcactagctacatatgtcggcacctttgaaatgcagtattttaaaatccaatcctgtgctaagattatccgtcctatcagcggcatgctgcattttgggatgccctctcccacctactttaagctctccagagactgtgatacaacaatatgggcttcaacacactgcatctaattttattgtaaaaaaaaaaaaaaaaaaaaaaaaggctatgccatatggttaccaacaaatgaaatagtgactgttgcaaacagaataaaaaagcaggtggagccctgacaaaaaaaagtacaactgaaatgagatctaaaagatttaaaaatagctggtcaaccagtaatgtatacttaaacgaaagtgtttaagaaaccaggatgaaaaatgtataaaaacattaccaggagtaatatgaggaaaataatgctttcgacattttcattttatccttggaaagctttggtgattcaaatttaaaaggactataatagggaagatataaaaaggaatcacaagtccaagagaacagaagaaagtttcaccttttgttctaatttcttagaatcatcttcctatttccttgcaatatacctctttaagaaacctggtatactttgctttatatatgatttaccaaaaaagaaaaaagagaaagaaacaaaccaaccaaccaagcaaccaacctagtatcaccaaaaccacaaagacagacgggccttaaatttgctacgtaacctgtatacacttaaattagaatggtcaggctgagttctctagtaaacactataaagaacttcagaatgacacaggcatcaaaccaagcaaggaagaaaaaatctttataatcgtgaaacaaactgatgttatatccaaaatataaatataagcatattctttgaaaacatgtagttatttccatatatattttacctacagtgtatataatcatagatagcttttgtgaaggtattagtgaattc

SEQ ID NO: 199935 - DNA, 1000 bp, Homo Sapiens
agcccttgcgtacagtgaagattgtggtcctcgacaacaggctggttgtctcagcattttttttttacagccatgcctaaattggaaacagaaataattgaatttatgagagacctctaatagtgattttctgttaaaatagggttctattgaacatatttttatcttcccattcttaattttgaatattaattattttagagattttttttgagtcagggttttgctctgtggcccaggctggagggcagtggtgtgatcaaggctcactgcagccttgaccttcgcagactcaggtgatcctcctacctcagcctcctaagtagctgggactacaggtataccactatgcctgactgattttttttagcttctgtagagacaggttttcactatgttgcccaggctgctctcaaactcctggactcaaacaatctgcctgccttggcctcccaaagtgctagaattacggcatgagccactgtgcctggcctagatattttataagaatatagatagaaggttgtaaaaaattaacatcaaagtttatggaaaggtagtctttcctcgtaaataaatgtgaaaaaaaatttaactcccatattttctcatttatcatcaaccaaagaatcaaatacttattgaatcctttaatggacaattgtcatttggaagctgctcagctttcctacgcatctcttaaaagacatgtacagccttgatgaaacagtaaatccaagagtcttcactccctctaaaaaagttaaaaggttttcaaaggctgatagatccttcttctcactccccaggtatagccaagggtgggcatatggttcaagtttgtttaatgattctatatccagggatgtttgaattgtgagcagagtgacgtagcatgcatgaagcagacagagtggacagattctggtggctgtgcccaggaaacattcccaaatgctgtctgctgcggggacctcctgggcctgtttgtcccaagctt

SEQ ID NO: 199936 - DNA, 1000 bp, Homo Sapiens
aaatttattcatgatgggggagccctcattacctaaatgcctcccaacacttttgcactcaagattatgtttccaacacatgcttcttttgggggacacattcaaatgtcccagccaattggatggtgcctgccacattgagggcagggcagatctttactcacgtgtcaatctcctcaggaaacaccctcacagacacactcagaagtcatgctttatcagtcctgtaagtattccttaatctagtcaagttgacacctaaaattaaacatcacaatttgctagtaaatactactagaagatgcatataaaatatttatttaaagcattaaaagaaggagtaaattttgttacctggttggaagattagctacactaattttatatatatacacacacacatatatatttatatattatgtatatgtatatatgcatgtatatatgtatatatactatatatacacatacatatacacatgcatatgtatacatatgtatatatactatatatacacatatgtattgtgtgtgtgtatatatatgcatgtgtatatatatgtatgtattagtcaggataggttattgtagcacacaaccaccaaatcccagtgttgtaaagcaatgaagatatatgagtatttcttacttatccagtgtccactggggacccttgactgtgaagccatcctgaatggctgccctccaagggttaaccaaaggggcccaagctcctactgtcatgtgcccacaccatgcagcatcctttgcttctggcagcacagagagggggagccaagcagaagatcaagagacattgtgtggccaggcctagatggaactgctcttgtttctgctcatatttcactggccagaacccagatacgttgtctcatcttgatgcaaaggggctgagaagagtcatcttcccatataactcagaggaaaaataaaggtgtgtttcaaactgtccacatagatttctaatatgtataagctt

SEQ ID NO: 199937 - DNA, 1000 bp, Homo Sapiens
cagtttccatgtagttgtgtggttttgagtgagtttcttaattccgagttctaatttgattgcattgtggtctgagagactgtttcttatgatttctatccttctgcatttgctgaggagtgttttacttccaattatgtggtcaattttagaataagtgtgacgtggtgctaagaagaatgtatattctgttgatttggggtggagagttctgtagatgtctattaggtctgcttagtccagagctgagttcaagtcctgaatatccttgttaattttctgtcttcttgatctgtctaatattgacagtggggtgttaaaatctcccactattattgtgttggagtctaagtcttgtaggctctaacaactagctttatgaacctgggtgctcctgtattgggtgcatgtatatttaggatagttaactcttcttgttgcattgattcctttaccttctttgtctcttttgatctttgtaatggccttctttgtctcttttgatctttgttggtttaaagtctgttttatcagagactaggattgcaacccctgcttttttttgtttgtttgctttccatttcctcggtaaatattcctctgtccctttattttgagcctatgtgtgtctttgcatgtgagatgggtctcctgaatacagcacactgatgggtcttgactctttatccaatttgccagtctgtgtcttttaactggggcatttatcccgtttacatttaaggttaatattgttatgtgttaatttgattgtgtcattatgatgctaactggttattttgcccattagttgatgcagtttcttcataatgttgatggtctttacatttttgtatgtttttgcagtggctggtactggtttttcttttccacatttagtgcttcctttaggagctcttgtaaggcaagcctagtggtgacaaaatccctcagcattttcttgcctgtaaaggattttatttctccttcacttatgaagctt

SEQ ID NO: 199938 - DNA, 1000 bp, Homo Sapiens
acaggtgtgagacaccgcacccagcctgtataatttttttaaccaatatttattgcctttttttttttaaaaaaaaaaagaaaatattgccctgtgtgttcagcagtgctggtattatctacttttacacataagaaaatgggttcaaagtggcatattgctcaagtttatgctggaacccaagttttctaacttctcgtggaatgtttgcattgtaccaactctggctgcagtattgcatcctgaatgtagaagtggtgagtgggagggtgtgacgaaaatgacatttctggaaacccaatggggaaaatacacaaatacttttattatcactttgtgtctcttgagggcttatgagtgggaccaagtgggctaaggagacaaagtctatatgagagttcttagccttgccatgtcagatggcaagtgtcctgttgctgatgacaaacttacttgactatctctgaggaaatcagatttaacttgactctaggcaaccttccatcttctggatggaactgaaacttgagaactcagtggcattgattgatggagcacaccgttctcatcagatggtacaaaggatgtgcaaatcatatgcaagtgggcgaaatctctcagaatctgccatcctgaaaccaaatgtcttcattccagctagattttcatttggtgtttgggtgacattcagtgaggtcttgagtatgcatattcttcatatggtatttgttgaaaaacagctaaaaactgcaatacaaagataagaagacaccaacatggaagtcagttgtagactttgtcggctggagcccaaggacccagctgttggcaggaggcctgcctgtcctgggttgatgggatgtggggcaaagtggacctcatgggggcctttgactctcatggttactttttccaggaaaaggctgcttgactaacatcggtccatcttccttttccaagcatttgccactgaggagtgcaatggtagcatggaaagctt

SEQ ID NO: 199939 - DNA, 1000 bp, Homo Sapiens
ctctggttttctgaggtctttttatgaataatccccagaggcgccacttaaagtgaactttcattttattgttctgagaacttttatatattttcttgttccttttacaaatccagatgtatgatctatctggtttggctatgaccctatagctgtgggcagtaaagggagttattgatcggcactgcaaccagtgggagacagaggggcataaagaaaagccagggcttaaccgtcagagaaatcaaattgtatataatatcaaaccagctgtataaacataagccattagtctgtctcactgatagtttgttcattgttgcaatggataataacaaaactcacctcctaaaattataacattcattgatgttatcttaagcactgagtacaaaggcacttaatagtctggttgcttttttcttacattttaagcattcattcaattcaaaatatcaaactagtcaataatcttaacattcaattcgattggccattctaaaacttctgctttaaattgtcagttctagtatttaggttaattgaacactaaaccaagtgttggcaaagatgtagggaaattggaagtctcatacatatctcatttaaaggcaatttgccagaaaaaaaataaaatatttagattatgtgaacttaacctcatagttacacttcttaaaatttatctcaggaaaatagttggataaatgagcaaagaagtatgtatagtcatcccttggtctcaaaggggtattggttccaggaatcctatagataccaaaatcagcaattgctgaaatcccttgtataaaatagcatagtatttgcctatagcctacacacataatcccacatactttaaatcatctctagattgctcatgcctactctaatgtaactgctatggaaatagttctactgtattttaaaatttgtatttttattgttatatttttgttactttttaaaaaatatttttgatccatggtttgttgaattc

SEQ ID NO: 199940 - DNA, 1000 bp, Homo Sapiens
tactttaggctagtcacagcagggagccatttccacatctaggtgggaaggtacagaggaagggagaagttaccaaggctgggagacagctgtgtggatgaggctgctgccaggagctgtgcattcaggagaggcctgcacaaaatccacagggcctggatggagcagtgtcggggcaataaatcctaagcctcactctcccctcactccatctcctgctagggactctaattggtaaactccaactagaagtaggagggcaagggaacccatggatgtaatccacacagttagcttttggggatgcagaacaaaatgaggactatggatggagggaatagccaagtaaatgaagataaccagcacaggcaaccaggatccttccaattgcaagtgacagaaccttatcagaaactaacttagataaaaaaggaaatttattggaagttgctatggtttgaaggtttgtgtcctttcaaaattcatgttgaagctcaatctccaatacaatactgttaaatagtgtggccctttggaggtgattaagtcatgaggacagagttctcatggatggattcagtgaccttatagaagaggttaaagggagctcactggccctttcaccatgtgaggacacaacaacaaggcaccatttatggagcagaagacaagcccttaccagtcactgaatctgctggcaccttgatcttggcctccccagcctctagaactgtgaaaaataaatttctgttctttataagttacccagtcttaggcattttgtcgtagcagcccaaacgggacaaaacagaaattggtagtgagaagtggggtgttgctatagatacctgaaaatgtggaagtagctttggaactgggtaacaggtagaggctagaaaagtttggaagtgatgctagaaaaaaactatattgtcatgagcaggacattaaggatgattttggtgagggctcagaagaagaggtaggcagtagagaattc

SEQ ID NO: 199941 - DNA, 1000 bp, Homo Sapiens
attcttccctcttttaattccattcaacaaataggagattggtgcaacagtaattgcggttttgttaataaaagtaacggcaaaaactgcaactacttttgcaccaactcaatacttactgagcccctgacatttagtaggcatcacacatgtgcatgcacacaaattcaaaaacacacttaaacctcaaacccaacccacaccaaaaacagatcgatttaaataaaataagagatttttttcccctgagttgttaattctttgcctcccagaaaattagaactttttcttggtgacaatattttgtaatgaatgatttttatttaaggctgcccctcaaactgctttttgcaatctacgaaataaatttctttttggctaccaggtcaactcatacttattgagaccaagttctgtgctaagagctttcaccattcaattttcctgtgtcaataagaatgggtggtgggaattttttactccgtcgtatcagtgaagagtcttggggcacagagtgggtaaatgaagtgccaggcttgagagatgggatttgaacccacctctccttgcttcaaattcagacctcccccttccacagaaaacaggacttcgaacaaaattccagaatcttagcaccctagtattttcatttgcctcctccatcaaatgaatttcttactaattcacacatttattaactgtcatagctactatcttttaaaagacaaattaaagctttcttttcatgttagacaggcaacattgatatgtaattgtgcactttgttaatggccatgagattatagagggaaaaaagaggaatgtgagagagtggctttgccacatcttgtttgggagtaagctgtttgtgtctttttataaatttgggtttgaaaagcaaactccagacttctattttcccctcgggttctttgctaccaatcagggagatacgttttgtttatgttcttttgcctaaaactgagaatttgatgaattc

SEQ ID NO: 199942 - DNA, 1000 bp, Homo Sapiens
cagctcagatcaagttggtttcaccggtgaattctaccaaacatttagtaaagaaggactaccagttcttcaaaaactgttccaaaaaatggaaggggagtgaatacttcccaacttattctctgagaccagtattactctgataccaaaaccaaataaagacaccataatcatcttttatgaatacagttgcaaaaatcttaaaatactagcaaacggaatctagcaacatgtaaaaaaaggattatatgccatgactaagtagaatttaatgtaagaatgcaaggttagtttaacataaaaaataaacataatagccataccaataaaataatggacaaaaatcataatagacagagcaagattattttgtcaggcacagtggctcacacctgttatcccagcactttgggaggccgaggtgggtggatcacctgaggtcaggagttcaagaccagtctggccaacatggtgaaaccctatctctactaaaaaatacaaaaattagccaggcgtgatggcatgtgcctgtaatcccagctactcaggaggctgaggcaggagaatcgcttgagcccaggaactggaggttgcagtgagctgaaattgcaccactgcactccagcccgggcaacagagtgagactgcccgtctcaaaaaaaaaattatttgacaaaatctaatgcatttcatgataaataatattcagcaaaattggcatataaggaagcttcctaaacctgaccaaagtcacctataacacacctatatctaagatcatattaaacactgaaagactgatggctttctctctaagatcagaaataagaaaaaaaatctacttttaccacttctattcatactacattggaactccagcctcggcagtaaggcaagaaaaataaataaaaggcattcaaattgaaaaggaagtaaaactatctctatatctctatttgcaaatgacatgatcttgcttatttaaaaatcctaagaattc

SEQ ID NO: 199943 - DNA, 1000 bp, Homo Sapiens
aaaaataaagttttggttagaattttttttttttttttttgagacaaggtatcactttgttgcccagactgaagtacagtggcatggtcatggctcactgcagcctcaccctctccaggctcaggtgatccttctaccctcagcctcctgagtagccgggaccacaggcgcacaccaacacgctcagctaatttttgtgttttttgtagagatggggtatcaccatgttgcccaggctgatctctaactactgggctcaagcgatccacctgccttggcctctcaaagtgctcaaattacaggctaagccactgtgcctggctttggttagaattattaatacataacagcactgttaaagatttggatgtcttaaaatataaaaatcaccttgagttatttaaaagaaaatgccatttataaaacggagtgtgattcaacagagacagtactgcaatggatattaagaaatgcagttctttcagacaaatttgagtttaaaaaaaaagaaatacagctctttaaaatttgtttccatcatgagtcacagaattacattaactaaattaattttagtttgcttccatttttctttttcatcaatttaagatataattcttacataaatgtcacagaaaatgtcccttgcctgatgaaaaaaatacatggaaattcaaggcactatttctatgttttcttaaggaaaataataacaataaagttacctttcttaatcttttgtgtttctaaaactgctttcttccaactactctcaaaaatcaaacaactgccaaaggaacttctggtgaatttagaagtctcacatttgatttcaggagatagcactgacattttttcttctttcaacagtgctgatgagagggagatgctgctgcagagacaggacacaaaatacaaaaaaaacaaggcacgtccgagacaaggcaaacagatgtgtcataatgtttctctttcaaactttgaacattttaatgaattc

SEQ ID NO: 199944 - DNA, 1000 bp, Homo Sapiens
ctatatgagtcttgaaatctggtagactgatttctcccactttatacttcctttttgaaattgtttttagctattttagttctttgcctttccatataaattttaggatactcttgttcatatatacaaaaaatcttgctgggattttgataacaattgtgctaaacttgtatatcattttggaaaaaatgacatttttactatgttgagttttcctatccaaaatcccagtatgtctctccatttatttagatctttgatttctttcattcactattgtatagtttcagcatacaactcctatttatatatgttattggatttatgtccaaagtatttctttttttggacaattataaatgatattgtattttttatgttggcgtccatgtgttcattgctagtgtatagaaatacaactgacttttatgtatttgtcttttaccttgtgatagaacatcactggttagttctaggaggttgtttgcttgtattttgtatttttgtagcatccttgaaattttctttgtagacaatcatgctatatgtgcacatagagacggtttttcttttctgatttgtatgctttttagttacctttcttgccttattacattggctaacaattctagcactgtgttgaataagagtggtgaggatggacatcgttgcctgtttttagtcttagagggaaagcattcagttgttcgctgttaagtataatgttacctgaaggtatttggtagatgctttttatcaagttgagaaagctagtcctctattcctattctctttctgagaacttttattgtgaattgttgctgaatttgatcaaatgcttttttttgcatcaattgatatgatcatgtgatttttcttatttcacctgttaatatggttgattacattaattaagtttcaaatattgaaccagtgggcatctctggaataaaccccatttggtcatggtatattattctttttatatattgctgaattc

SEQ ID NO: 199945 - DNA, 1000 bp, Homo Sapiens
catgccaccacactcagctaattttctttatttttagtagagagggtgaaaccccctctactggtctcaaactcctgacctcaaatgatccacccaccttggcctcccaaagtgctgggattacaggcatgagccactgcgcctggccaaaatcctctttttttttttaagacaaggtcttgctttgtcgtccaggatggagtgcagtggtgcaatctcagcttgctgcagcctcaacctcttggttcaggtgattctcccacctcagcctcctgagcagctgaactacaggcatgcaccaccgtgcccagctaatattttgtattttcagtagcgacagggttttgtataccgcccaagctggtctcgaactcccagactcaaatgatcctcccaccttgacctcccaaagtgctgggattacagagcccggtctgaaattctcaaaaaagaaagagtttactattttttaaaaaaatgaaaattttagaactcactcactggaccggctcactatcagaaagaagatgacagaagagtcagtgaacttgaagatatggcaacacaaattatccaatcttaacaaaagagagaagaaatattttttaaaaacaaacaatctctcaggcccctataggatatcaaaaggtatcaagctagaattctgtattcactaaaagtatagttcagaaatgaagacaaacacattatcagacaaaaaagcaaaaaacaggctaggtgcagtggctcatgcctctaatttcagtgctttgggaggctaaggcaggaggatcacttgagcccaggagttcgagaccagtctgagcaacatggtgagaccccatctctacaaaaactacaaaaaattagctgggcgtggtggcgtattagtcccagtagctgaggaggctgaggttgcaatgagctgtgatcacaccactgcactccagccttccagcctcagacaagactctgtctttggcggaggcggggcgggggg

SEQ ID NO: 199946 - DNA, 1000 bp, Homo Sapiens
ttagaggaggaaaccagggcctaggggtcgagcgagttgctcgcagttaccgagcatgtcagaaacagcctgttcccaagtgcccagctcacgagtcaatgctcttttgcagaccttgatctcacaccaacccactcagacccagtggggccagcccaaggtacccaggaacaactggccttcggcttttttgagacagggtcttgctctgttgctcaggctggagtgcagtggcgcaaacatggctcactgcagcctcctggactcaagcgatcctcttgcctccatctcctgagtaactgggaccacaggtgcacaccacaaagcccagcttttttttttttttttttttttttgagacggagtctcactctgtcgcccaggctgcaatgcaatggcatgatcttggctcactgcaacctccacctccgcctcctgggttcaagtgattctcctgcctcagcctcccaaatagctgggattataggcacccaccaccatgcccgacaatttttgtatttttagtagagatggggttccaccatgttggccaggctggtctcaaaaactcctgacctcaagtgatccatccgcctcagcatcccaaagtgctgggattacaagcatgagccactgtgcccaactcccggctaattttttaattttgtgtagaggtggggtctcaccatgttgcccaagctcatctcgaattcctggactcaagccatcctcctgcaatcccaaagtgactcacgcctggcctggtcttcagctcatgaacaaagaggacagacacagtatcttgcaaaaggttggggtaggtatgatggtgatggtggcgatggcaggggggtggggggtggtcccactggatgatgccacggtgaatcctacatggttacaggccaacgacgagactgactgacagactgtcaactccccacagctgagtgtgagtggccttgtgccccactagctatggggaggttggggatgggtg

SEQ ID NO: 199947 - DNA, 1000 bp, Homo Sapiens
agtgaactgagatcatgctactgcactccagcctgggcaacagagcaagactccgactccaaaaaaacaaaaaaaaagaaatattatacacattctatctgcattatgattaaaattttttattgtatcaatatttttattttatcaatattttttatcataatgcaggtagaatgtacgtgatagttctatatggagtaaggggaaggaaatattttcaaatatgaaaataggaaaccctttattccacagttaaaatgacaactataaaaaatctctcttatcattaagagtgggaaaacagaattatgtatggcaattcaacatcataatcttctcacaataatgattagcatataatatcctaaaacttgcaattagtttgttattcctaaactaagactcaaaagcaatgtcaaaatcagctctagtacataatcgacatttgatttacataatctgatatgaaaacttttcaaagcaccgagggaaaaacaccttagaaaatattctttgaaaggaacagcattaacagagctataataagtaagagcaaaagaaagttcacatcctccccactctttctaggtatctctaaaagaacgcatactctttcttttcaattattagctatatttcaagaatgatgcaatgacagtctgacaaaaactatgtcgtgggtaccaaaatcaggaccatatgctaattatgctgaaatccaaaacaataaatattctccaggtaaaaattttagtttacaaatagtagcaaatcacataagacaccaaatagtgccattagtttaggcttcaggttccctgttatgttgtagttaagactgctaacacaatggcattcagctataataatgtcttataatttctagttaacattgactttaaggaattcaaaacaacagtcacctattatcactctaactcatacacctaattaaagttaatctggtaaaagatagtttttatttccctactgagaattc

SEQ ID NO: 199948 - DNA, 1000 bp, Homo Sapiens
acgagggtaacccatagtgcattgcatttcctgtaagtagcaaccagggttcaggcaggaaagcagagccaaaatgattattacaggagtaacgaattgaatataggaatgagatgatacacaaatttgggaggacctgagtaaagtctggaagcaagagtcagaggagcagagcaagtgtcaccaaccgtgcatggatggacatgtcaggacttgtagggaaatctgagaagccaggcacgtctagctggcagagtaaggccataaaggaggagctgatggagaggtctaagggaggccgtgctgcctccctgccactatgtgggccacggccaaaagctgtggagggcctggcgccattgttggtcagcaaggccacaggcagagaaaatgacccagaagcagagcagaagaatgcaaagaccagctggaacctgccagacatctctgattctacccattaccataatgaccgcacagccttctatgagtaagagctgctgctttccttctgtcttccaaatctcacaccaatttctcctttgaccgaatctaactctgaaccatgttggtaccagcgtaaccaagttgaaatggcataacatagcacagtgtatcacctttctatgtctttcaattaatgtctagatttaagcttaaaggcattgaaaatgttccttaaatctaaatgaaaatagttcttattcatcctattcttaccctatttgggtgaataaaatattgaaaactgactcttaaaaatcatgggtatttcactttttccctgctgacactgttcatttacttcatggcaattgatggtagaaaaagatagcactttgttactccccatcacatcaggctgagttacaagactgtcattccacattttcagttcaattgtaaagcattatctatcaacaaattgagcagtttctaaattggctgtctttacataatgcctaacatccagaagtattgtttgcagtgataaaagctt

SEQ ID NO: 199949 - DNA, 1000 bp, Homo Sapiens
ctcaaaacaagacagactatttccaacacctcaaaaggctccattgtgtcctcctacaggtagttattattctgacatctatcatgaaagattatttgagcctgattttgagcttcacataaacagaatcataaaggttctctttcagagtgtttgtcttcttttgctcaaaagtacatctgtgaggccaggcatggtggctcatgcctgtaatcccagcactttgggaggccacggcgggtggatcacttgaggtcaagagttcaataccaatctagccaacatggcaaaaccctgtctctactaaaaatacaaaaaattagctgggcgtggtggcacatgcctgtaatcccagctactcaggaggctgaggcacaagaatcgcttgaactggggaggcggaggttgcagtgagccaagatcctgctactgcactccagtatgggtgacagagcgagatgctgtctcaaaaaaaaaaaaaaaaaaagtacatttgtgagattcatccccattgttgcatgtatcagaagtttattctttctcatagctgtgctgttttctgtaagcatgcctcaatgtatttatccattctactgctgatacatagttgggttatttctagttctgacttattacaaataatattcttaaactgtatacagtatatttctgcgatggacaaatacatccatttctactgggcatataacacaggaagtcatgttatatttatgactttattaggaaccactgaacagttttccaaagtggttgtaccattttgtattaccatctacatttatacaacccaccatacgtgagttctttctgctcctcatcttgccaaaacttggtactattgttctcttcaacttactcattctggtggggtgcaatggttttggtattttcttaaacatacttcttatttactcttgcttcattgatactgttattctcccaataaattattcctaaaattgtaatgactactgaattc

SEQ ID NO: 199950 - DNA, 1000 bp, Homo Sapiens
tctgatctcttcattaaagcccggggtccttttcttataagcatgtcttcagcagttagtttctatattagaaagtaatgaagctgctttgtctttaagagagttctttatttagtgcggcctcctctagttccctctggcctcccagaagtccctaggaaatctgatgctgtgcagccttccttgtagtgtgggggactgcaaataggtgggacagtttgaggctgaggggaactgaagtctaaacttgaagtctaaacctgtccgatgggttgagctgatctgagtgcagggcaggatggagggctatggggctgtagggtatgaagtggctcatttcaagggagtattttgggtgagtacattttcctgatatctggagttcttgagattaagcactaacacttagggtaactgttgaccgtggaaatttacatacgtcaccgtcagcttactggagtatcctgatgtgaatgaaattttccttcatgactttgggtcagccctgtggacctcagtttttgttctgaggggttgtatggcaaggggacgctggcgggagagagcttcgttcctgcattaagtggcctcagtgatgcagtcagggtcccatgactgacctttggagttcttccatgtccttatggcattactggtggtttctcctgcctgcagtaagctttccagcttactctagactcctgtgctgtgagacatgagcttgtcagaggtaaggagcctgtgttaatgcaagtctcaggtgagaaggggtgttggaatctgaggaccctgttttccttcctgtcccctcttcagctctgtccaggcaccacccgatggagggttggctgaatgtctcatgttcatatacctgacagctggcttcggtgctttaatatttatggaaaggacagttatagaagtgtggtcccttcaaagtagtcctctggggtgtctgtgtccttattaggttgacttctgaaacttcctgtgagaattc

SEQ ID NO: 199951 - DNA, 1000 bp, Homo Sapiens
aaacatcatatattctcactcgtaagtgggagctaagctacaaagatgcaaaggcataagaatgatacaatggactctggggacttgaggggaaagggtgggaagtgggtgagggataaaagactacaaattgggttcactgtatactgctccggtgatgggtgcaccaaaatctcagaaatcaccactaaagaacttattcatgtaaccaaacaccacctgttccccaaaaacctatggaaataaataaataaataaataaataaatggaggagagatgttcaggaaggctagaaggggcagagccaagagggagcagagggaggctgcatcagacaggcaaggaggagacaggcaccagcacctgtatgatttcatcttgcccttcagattctgcagtaacccaaacacatccccagtgaaggacgagggccacaacccaggatgccaggtgtcaggcaactgtcccacgatgccttgccgcacagttactgggctccttgaatcttaaagttaaacagagacaaggcagcaagatacatgggtaaaaacaaaccaaaatggtataaaaaatctttaatactacatagatagggctataatagaaatacatctgctatggggcataaattggctgtagttaaaaaataaaatcaaaatatatcatttgtttaagagacaatatctccaaacgattcgggtgtatctattatgtgccaggtatcgcgaatttgaagatggacagttctagacttcgaggagcttataagttgaaaaggaaaaagaagcaaaggtatcatttaatactaggtgagataacaactcaaaacgtgaacgcagggtgctccagggatctaacagactcagggacagtccaggaaggaaaaggacagggagctttcgtgaggagagcatgttaaaatctgaagatgggaaaaaaaggaaagaaaaagtggggtagggagcaggatactgcaagaggaagcagcagggagaattc

SEQ ID NO: 199952 - DNA, 1000 bp, Homo Sapiens
tgatggcacacaccagtaatcccagctactctggaggctaaggcaagagaatcacttgaacctgggagacagaggttgcagtgagctgagattgcgccactgcactccagcctgggtgacagagcaagactctgtcagaaggaaaagaaaagtaaagaaaagaaaagaaggaaggaaaagaaagaaaagaaacttaagacccaagacaggatgactgatttgctcttgatcactcagctgattaaacccaggtaatgccaccatgggtcagcaaagaagtaggcgaatcctggtgatgctggaagcattggatgccctgtaaggacatgattttgcagtctgcaaagtgtgtctaggtctctgccagagcaatgcactgcctatgatagagtgctattgctaaaccttcccactaatgcagattaatttcacaccctttgcaagtgttgctattccaagtttttcctcactcagccgctgaaaagggacagaatctagagatgtgctctggatcgaagtccagccttcagagttagaagagaagagccagtagggggtcgtctgtccattctatcctcaaggggtctcccctgagatcagttcttccccaccttatcttgtggccttattgcatccacccaccctcctcagcctccaagcctaggtcccattcctgcaaattcctgctttgggtaaattaataaaagagtcagtcttaacactaccccaccacctctggtcccacgacacacacacacacacacacacacacacacacacacgtcccacgacacacacacacacacacacacacacacacacacacacacagtgtctcagtctttctctccctccctctctcctcctccctctgctgctggtttcattaattaggcgattctttgtttaaaagacccaagactctaaggaatgatactttacagatgagatatcagtgagtttattgggtgagttgggggcacaaaggccccctgaattc

SEQ ID NO: 199953 - DNA, 1000 bp, Homo Sapiens
tgcctccaagtcttgcccatctgcaccatgtcaggcattagatgggctgggtcacacaatccacgtccctaccttttccccacctgcccctagaaaaacctatgcacatttttcagccattgccttgaatgagactgggaaatcaaaaagcctttcccccaaaggcacagaggttggttagggaaaaagcctgggtgataagagggggtgatagggccccacagggtgagttagcctgacggagctctatacctgacagcataaataaatcaccccagagggcttcctcattatggactctcccctctaagaagagttgtctccctggaggaagcaacttttcccaagtcagcaaaaacaaaggtccctaaaagggtcagaagtcagcacagcccagggagtctagatgaagtttaaggcctagggtgcctctgtcttcaccctcctccccagggccctttatacaggcaattatttctatttattccctcctaatttcccttcctttggcaagaacccagaaactaaatctctctgcttctcccttgaggtcttccttgctccagggatccccctccatgataccacttttcatgaagacagtttctgccaaatccagccactagccatggagtgtggagcccaggactttcttcctgagagtttttcagtcctgttcctctggtctcttctttgaagagaagtgtctaaaggccagaaaacctggtggggaggctctctctcatatcgggggtgactgtaaaatgaagccttggtttgaagacagcaggagaggctggctctccttccctcagggctgaagtctggcacttgggatggtaaaactggcctagggtactgttacctcagggcagacctggctcaaaaggagagtgaagcagctgctggtgccttgtagggacagagaatctggggtaatcagtttatcctttgcccagacctcaccattcaccaggaatcctgcccaatcttggaattc

SEQ ID NO: 199954 - DNA, 1000 bp, Homo Sapiens
ttatctgtagtgttgatgtgctggtctctaatttgatttcagtccaaaagaatatccgctaaggatgccttagcccacccctacctagatgaagggcgactacgatatcacacatgtatgtgtaaatgttgcttttccacctccactggaagagtttataccagtgactttgagcctgtcaccaatcccaaatttgatgacactttcgagaagaacctcagttctgtccgacaggttaaaggtgagtatctgttttggcctttggccaggcaatatgcctagtaacattttccattaggtggccatgaagagctgagatctggatggtaaccaaagctcccctctatgtttattttacaaccttgcgtatagctgtgtgtccggggcataacaaagcatatttaatattatatccaggggaaggtcggggagaggaatgaatattttgttcttattttcaaagtttatttagtgagtatgactcaaaatatgtttaatatgtattcactcagtgtcatttcattgattcaaacgtattgaactttatataacatacaaagttccataaaggataaacattcactgagggaattattccttggacgatgacaagagaagggaatttctgatagtgtactcataaaattttgtggcaggatctcctattggaatacagtgggagtaatgacatccaaaattctgagtgattttagtgtctactgtaggacattttacaagagagagagtagtccccaaagtaaccacctgaaactatacacctagataccaactgaggtctttaagtgatcttcaaaaaggcaataattgccagcaacttagaagagttcacccataatgccaaacctgtggagtctctctcaaatttataggccattttactcttcccactgatggggttgcagtctgtgtaatgccaccagtaggtttcttatatttagcaacagctgtcattttagttttaggaagttcagctgaattc

SEQ ID NO: 199955 - DNA, 1000 bp, Homo Sapiens
gcatttcagcctgggtgacagagcaagactccgtgtcaaacaaacaaacaggcttgaaaaaagcacgagtgctattatttctcatctgataacaatgatgtaaagtaggaaaacaaatcctcatttttcagatggagaaaataagtctcagagattttaagtaaccactaaatcatacatattaccatgacttaaactatgggtatatgtctttgggttttgtgtaaagggcattgtactttgcagtaaaggtccctgtttttttgccattatcatttctaactgccatgataatacatatccttgtaggggtttatatctaattctccttgctgaaaatagtttttaaaagatttgaaataccaaaaatgaggcagagaaatgtggtaacattttccatgagaaggtatatataaaagaaagtgtcttgtgttatgacttatctatgtgggaattttaaaagatcctggtggcaattctacttatatgagggtaagcaacaacttactttgaattttcatttagtgcactcccaagtaatgaacacatgaaggaagaaatgaggttatgaaagacataaaagtatattgtgcttacttttaaaatcttcatatatagctttcatttcaattgaatgaaagacaatagagacaattgtgagaagagattattcctgtaaagttgaaatatatttttagttccatgtgcatccaattctgaacctttaaagtaacatagaaactaagcactggatatccagttagagtagccaatataattattataatagaaatagctattactataaaagtaatatttcattgcttattatattttctttccctagacaatagatctattttccaataaaagagcaatagctaacaaatagcacacaacaaatatgtgaatgaaggaacacatacaattacatttttaaacaaaatatatattgtatactccagattttctctatgattatagtgcttttagtgaattc

SEQ ID NO: 199956 - DNA, 1000 bp, Homo Sapiens
cgggctgtctgtgtgtaatgccggctccttcactcttttatggcaccatgattgtgttttaccctcccgactgttaactgccaactgttaactgttaactgcccaaggttgccctgctgatgtcatgcctgaccatatgacttgctccagccaatgaaatgtaagcagaagtgacatatgcagcatgaccagtggaagcttcgaagagctattgccaatttccaccctctctctggaaactgtcattagggttagggaaactgtcatgagatctgcatattttagatagaggctgcttgccttatttgggcacctaatgaaaaagacatggaggccaggtgcggtggctcatgtctgtaatcccagcactttgggaggccaaggcgagtggatcacctgaggtcaggagttcgagaccagcctgaccaacatggcaaaaccccgtctgtactaaaagtgcaaacacaaagggaactgcgtggcttgtttctacctgaacattgtcaagtgatttcatcctttgaaacacagttgtgaagtgtgtccagcagtctgagaacaagaagaagaagaaaatctaatccttcagggtgtctgtgtgccagccctgctctcagcacttcccatgtggaactcctttacttctcctaacaactccatgacatgggttagactgtgattgttcccatattgttggtagggaaactgaggcatgcaggtgttacagagctctctcaagtggcaagctttctgggtggttacagagtggcagagctggggtatcccatgatgtcaccacactgctatatggaaaagaacattaatcgagcacctacgtgcttgattctcttaattctgtgactgaactctcaaaacaccctgggtaagcactatcatctcctattttcacaagtgaaaaaactgggattcaaaaaaattaagtgacttaccaaatattacagagctagtaagccaagacttgaacactgagatggaattc

SEQ ID NO: 199957 - DNA, 1000 bp, Homo Sapiens
tggcctacaaggacctacgggatgtggctccttgcttgttctcaccctgcccttactaactctgcctgccagggcatgccagtctaagaatgctcccttatgcctcaccattgctgtttttctgtcactattttattttcttcagatcattattattgacatcgtcttgtacttgatttgtttgctcatttattagctgttttcttccccaacttcttaagttctgtgacatcagggatctttgtacttcatggtattattgccaatgtctttaacagtgtctagcaggcaaacagccaagtgctcagtaggtataggtacttttgttgaatgactatatggcatccaaggtgaaatggaatatttctgagagaaatatgttaggaacattgaccacagaagtagaaagccttaattgacaaataaccacaaagatattgatttgatagccaaagattatacctattcaaagccataccccactttactgatatctctgtacctagcttattttttaaaaagacattacaaggactagaacaaataatttcatgcccatacaccaggcaagtactgggcaaatactgtatgatgctgcttaagattacaccaccattgagtacttggacagtattcttatcccattcaaaaccccttaaaatttttctgactggtacattgaacttttctaaataaatagcatatcctcaggtttcagtactagtcatgagtcagtagggaatggttggtaaatctgaatctgtaatagtaaatggaaaaaaatcagttcatgtagtttgttaaaatataggtgtgttgggttggattaatactaattactgttaccaagctggtagtgggaagactggtaatgggaagtaacgttgtgttcaatttaaaatcatccttctgataggaatgggaaaatgtacagtgatttgggattctgcaagaacaaactatgctataaacaactggtatctgtaggggaagggaattc

SEQ ID NO: 199958 - DNA, 1000 bp, Homo Sapiens
acacttccggcacatctctggggagttttcattccggaaggtgccttctttacactgacacactgtgtctctggtcatggtgcaggaacttttatgtttttgatctgacaacagagcataaggttttgggaatgtgtttccctgatgtatccctcgatcttccttaccacccaccccctcccactcagctcaaccaagttcaccaaggagttctaagggccagtttctgcaccagcacactcagggctcatacaggacacccacccttcagctgtcaccagcactcagaggagtcataaaaaggagcataattcattatttattacatcagattaggggaaaagcattgtttagatggcatggtcagtagcaagggaggtgcaagggcatcacctgagagactctgcaaggagacggaggccttgggggacttccccaaagcctgggcctgctggggaggaggaaggggcctgagaacctgaaggctgagtgaggccgagcacctgccaggagcacagagcctgggggagagagcctggccctggagcagacccgtgccactactgaaacctagccctgtccactgggccaggccttctctatgctctaatgatccccccaccctcttgcagctgacagtttagacgatttcccagccaggtggcatgcattatagaaaagatttctttctatttttttaatcagtcaaatatataatcatagaacagggtgatgaagaccaggttgggctggaacttggttccctgactcatatcggctacaactcccacctcattgccccacgctccacctctggacaagaggtccacacattctgtacctgatttacaaactgtacatgggaagcaagaaggttcattgttggaagcgttggtgtaatccacaccctctgtgcacgggttacaggctccagtatgttctgatctatgagatcctgggaaggaagagaaaagccaatgaatgagtcaccacagaattc

SEQ ID NO: 199959 - DNA, 1000 bp, Homo Sapiens
ataattgggtcatttttctacccactctgtcagtctcttgatgtatttacaacaatcacatttaaagtgattattgatgtatttggattaacatctaccatatttgtaaccattttctatgtgctgcacctgttttttcttttaaaaaaaatcttaccctcttttctgccttccctggtcttttttttcttttcttttttgagacaaggtcctgctctgtcacgaaggctgaagtacagtggcgggggcatagctcatcacagcctcaaactcctagactcaagcaatcctcccatctcagtctccaatgcagttaggactacaggcacaagtcactaagtgcagctaattttttttactttgtgtagagatggaggtcttactatgttgctcagactggtcttgaactcctagctgcaaatgatcctcccaccttggcctcccaaagggctgggagactctagggattacaggctctagtcctaattgagcattttatatgattatactctctcctcgttttccatgctgcttcaaattcagatatccttatagcagattattcccaatttctctcttctgtcccctgtaacagtgctgtcattcatttcacttatctataagctatattcaccaaatacattgttgctattacgttaaatgaatagttatctattaaatcatctaaaaataagaaaaataaaaggttttatttttttacctccattcattctttctgtaacactctttctttctctatgtagatctgagtttctgacctatacccttttcttgctctccaaataacttttgaaatttcttgcaaagcagatagactagcaacaaattccctcagtttttgcttgtctgagaaagtcattatcttgccctcactttgaaggataattttgccggataaagaattctaagttggtagagttttttctttcaaaatgtaaactatttctctccactgtctgcttgtttgtgaaaagaattc

SEQ ID NO: 199960 - DNA, 1000 bp, Homo Sapiens
agaaaatgggagtgagagtaccaccacgtggaggttatacaaggattaaattagtcattggaagagttttgagctcctcgaagttatgacatttgagtttctgcaaaatttcacagagcccagtgcagggccttgcagaggaaaggacaggattaacagttcagggctggaagggctaaatgttttgcagcccatccctccatctgataattcagtctctccacagcaccctctacaggtagatcactgccttcttatcgtgcacctcccaaggcagccctatcctcggcaactctcatgagagcaaattggaggcaggagctatatctctgtaatttacagcaacaggcattgggacagggatggataataatgttgatgggtcaatgtctaagtgaacaagtgtagagccaccaagcacagttgtgcagtgtgtgtattgcacaatcctagggaatgccatttacatagacctcaacactgaattggcattctccatcccccttattctaaataacatgtaccattacctatttattatgtttattgtttgtttttggttactccttcacccaatagaatggaagctctcccaggccaaagatttttggtttttatttactgccttatcctccaatatttggaatagtgcctggcatgtgataggtgttctatgaatattgattgaagaatgtgagaataaatagtgaaggcagtgaggaatgtacactagggatcattcaggctttgctgtcattcactaagtatgtgttacatacaaatcattttgctagacgctaaagaacacagaaagaagattacaataatattgtcttaaaaaaagaaatccagaatcatattaacttaatcaatgagtaattattgttagtttatggcaacagagttacaattacaaacataccatgtctgtattgcaattcgctctcaaaattcttgtaaaccttctacgtcattttgagtaaggtaggacaatgaattc

SEQ ID NO: 199961 - DNA, 1000 bp, Homo Sapiens
ccacgaagcataatcttatggtttatcaaatattttcagcaaagtgctctcttgcccaataagcaaagttctaaaatgatctcctggcattatacacggcattggtttcccaagagtatttttctcagcctagttttccatacgtttttaggtgactgcaaacatatgcctgcatgggccaagctggtgtgtgttttttgacaacaggaatcccaggatatagaatatgtagagtgtgatgggaactttggtagactagaattgcctgctcaccggaaagcattgaaattctaaaattctgtggttctgccacccagaaacagctgtctattgcagttttttacctctatttcaggtcctctttgactaggatttatacctagtcaggtctcttttgcagctacacacgccacatacgcatacaaaaccctcttttttatatatagaactgcagtagttaatttttgaaaaaagttcctgttcattcagtgaaagtgcactatgaatgctctcacccaaatgaagttctttttatcacatgcttccagttgtctctgagcctacgtttctccagtaatcttgatgcaatcactgccttagcacgtttcagatacttggttgaatcccctcagtcatatgtgcttggttgacattgcaaaggttatcacatttaatgaaatatgtgaaagacatttctgattatttcttcctgcttcttgacattatatcttcaatcttcaatttctttataatgtgaattctctggaattgaataggggctgaacttggctaaaattccttgctacattcaaaaagtttctctccattactcccttgagtttgttaaagaagagcggtccctataggccttttcatatttattacatccataaagtttctctctggtgtgaattctgcaatgttggctaaatgttgggcttcagctaaatcactctccacattgggctacatttggaaagttattttccaatatgaattc

SEQ ID NO: 199962 - DNA, 1000 bp, Homo Sapiens
atttttgtatttttagtaaagacggggtttcaaccctgttcgccaggctggtctcgaactcctgacctcaggtgatccacccacctcggcctctgaaggtgctgggattacaagcgtgagctaccgtgcccagctgcgtctttttcttttctttctttctttctgtttttttttttttttttgagacaggttctcactctgttgcccaggctggagtgcagtggtgcagtcatggctcactgcagccttgacttcctgggctaaagggattctctcatctcagtgcccgctccctgctcccagtacctggaactataggcatgtgtcaccacacctggctttttttttttttttttttgagatggagtcttgctcttatcgcccaggctggagtgcaatggcacaatattggctcactgcaacctccgcctcccgggttcaagcgattctcctacctcagcctccaaaatagctgggattacaggcacgcaccaccacgcttggctaattttttgtatttttagtaaagacggggtttcaccatgttagccaggatggtctcgatctcctgacctcgtgatctgcccgcctcggcctcccaaagtgctaggattacaggcttgagccactgcgcccggccatgcctggctcactttttaattttttgtagagaagggagtctccctatgttgctcaggctgatcttgaactcctaggctcaagcagtcctcctgcctcggtctcccaaagtgctggggttacaggcgtgagccactgcgcccggcctggggcagaatttaaattgtactggcggatatttaagttagactgccttgtaaggacgcttcaggtcaattaaaagagacaataaggaagcaggaccgcaggtcatgcggtgagtgctgctcaggcaggcggtaaactttgctctctacctccctctggtggtcaattaaggtagtgatggacaatgatcacctcttatttagagaccaagctt

SEQ ID NO: 199963 - DNA, 1000 bp, Homo Sapiens
ttttctcagcatgtctttaaaagtctcattgtagcttcatccagtttggtgaaagtttctacagtagccaaaaatcttgcaatcctatttctttatatagggactagcatttaacaattatgaagttatgtaagagtttctagtcaataattatttctgtgtagcggttagggtgttaagctatccatgctggtcaactttttattaaaatttcattatttactaatttattttatttattgaggaatctaaagaattctgtaaaactacttaacaaattcagtgtcatcctggtctctgtggtagactaattacaacttaccaaacaactttgtggataaatgaaggcccatcacctccaccccactaatctttgggggtaatttatatgtgaaagtctgattacacaaatttgcatcaagcatataatctcataaaactttatatcctttaatgtaatccaaaacaatgctaattaatgcaaaacatttaacattagatcttctttgtgaaattaatgtttgatatttatttgaaaaataacaccttccattttagtttttcattaacattcttgaaacctcaattatcagaaaatactctcttcagacaaattcttagttattaattattggtcttcaactcttgtttaatgtagtactataataattttgaagttataaagagtaaacaagccccaggaaatgaattttcatattatgtaaatctggaaagagtattaatttactatggtcaagaagatatatttgaaaatccttaaatctttttaagagaaaaaaactgtgtcaaagagaatgaaaaagttgtatcactaattactgtttttgcataatatacagtgatgcaacctactggtaagcaatactgctggcctaaattacattcttgaatgatttccagctgtcattgactcttattcgagcaccatagcaggtgttccagtgggagctcaactcatgtttcacaaaggatagcaaat

SEQ ID NO: 199964 - DNA, 1000 bp, Homo Sapiens
gatgcaaatcagactgcagcactggaaatggaggaaatgggttaaggtctgaagtcacttctcagaaagacatataattgagataattaaagaagaggaaataaaaggaggatatatataccaaggtagaagcaatcctctaaacatagaaacattctacctacaggcttcaccatcatcctagagataggaattgttagctaacacttgaccaatgataagtttgtatcttccacatagtagaggttctcttatgtcactcttcactcaaaggctcaaatggatctccacttttaatcaaaatccaaaatactcaactttcttttctgattcaaagaaactgcactttagtttctgatattgcagtttctgatattccaactgctacagtttgccccgcttcctcccagtcttttcatcagataagggtaattgctttattcctgccatccatcaagtaccactttctgtctccttccactttgtcccatacaaccacagttaaccttttaatgtctggttttaaaaaatgtatttggtgagttatgacatgtggctacagaatacttctggttaaatcccaccccagctaaatgaaccatcatttgtcttcatattccaatttaaacaaggctaaggttaatcataagtactttctagaccaagtaacaacggaataatattatgtgagacattgaaaatggtactcatcagcagcaccattcagaggccagagcccaagggcaaacaagggtatagatcaaacaatgtgttgttcaatttgttttcaggaggttcatctgcagcattgccaaggtcatccacaaagcatagaattcctcttaaggacccaaaccaaatgtgtgtgcctgtagtgcctatttgacctgctgatgaagatactgcagctgctgtgagtagaatgcagttgacccctcaaaaggagaaggatccaagaagtcagtagatgctgactctcatcttatgggatgaagaattc

SEQ ID NO: 199965 - DNA, 1000 bp, Homo Sapiens
attgcatcattcattgcactccagcctgggcaacagagcaagactctgcctaaaaaaaaaaaaaaaaagacagtacatgggatactctggtttctcttcagatcatacaaatctctcaccttttactaaagatttcttcagagagtaataattctaagtcttaacccaatttttgaggccctgcatctgcaaggctagtaagaaagaaaaaaaaaaaagtacatggggttcatactactttgtagttttcgttaaatgaaacactctcacacaaaaggtatctccagaatttacaaaaatatttggtacacattaggtaatcaataaacatttgttataaaaataaaatcctgtttacaactatgtagtaaaggaaaagcatacagaatgacaaccgataaattaatgaagtagaactacattttttctcttatttccaaaatgttcttagtgcacaggttatcttataatttttaaaactaaatgttaaaatatttgttagagatcaagacagtaaaaactaatttagttcctcattactatagttccatactgacaaatctttgattctaacagtccccatttaagagctaacaagtaccaggtcaacaagagctaaacttaattcaagaatactgaaacttgaactcaccagcttcttttgtgaaatggaataataactgatacctttgggagggctgaatttgtctgtttttttaaatatttatgtctatgggtcactcaggtatacgaaacacttaagactatcatttataaccccaagattagggtctcttcacagatcactctaacctaaaattttattatcctcattctgaaaattggcattatttggttttctttctctactatttttcactcagccactatttctgattcagatcacctgtcatcgaagtttaaagaaggggaaacaggagacagaaatacactgaaccaaaaaggtaagaagaatccacaaggctaatgataaaagctt

SEQ ID NO: 199966 - DNA, 1000 bp, Homo Sapiens
tgcccttgctttttaaaaaatttaatatattttaagacttttaagtatatttaattaatgtaattttagtacaggaaaatcagtcttttgccatatgtgctgtaaatattttctcagtttatcatctgtcttttgactttgtttaggtatttttaccatgcagaatttaaaatattgtatttggtcacatttatcaattttttttatgacttttgttttttgtcttttttttttttttttggtaagcctgtctcaaatcagagatgaaaaataaatccttccatgtgttcttcaaatgcttttatggtcttaactattttttgcggttaaatcttttctccatctagaatctattttggggtaagacttcattttaatccaatggctagatgctgaaccccaaaccaattttgaaataattgatctctcttttcccctctgatatgaaatgccaagaatgtcagtttcagaacttttagagaaggaaataaaaaaatccccaggtgatagggaaaacgtgagacaaggaagtctataccagtcttctgacttcttaacctatgtccactgttttatctcaacattttctgaaaaatctcctctgaaattagaaacccctctcaccactactaccaccacagcacttactcagtcttcactgggtatctgacatagtgtaagtattttacaggtatcacactcaatcgtcacgtcagctgggtaatgtaactgtctccagttttaaggcgaggaacctgagggagtgaggctaagtaatcttcctaagaccacaaatctggtagatattgcagcatgagcctgaactaattaggctgtttgatattaggtcctgtgtttttaaaccctgagttgcaccgtatctcaatagccccacttgaacaaaaacccaggtttcctctgaaaatattcacttccattatgtccttctaagtgatagtttattattttccaatacagcaggtaaagaaagatggaattc

SEQ ID NO: 199967 - DNA, 1000 bp, Homo Sapiens
gctataatcccagctagtggggaggctggggagggaggatcgcttgagcacaggagttcaaggccagcctaagcaacatagtaagaccccttctctaagaatctgcaaagcatgtaaaataaatgaaaagggctaagcttgttagtgcactactactgtgtgaggcagagttcaagtagttaatagaaaggggtgaaaatagtccttcacagcctgcttgcatcatctaataagggcaccactcccaggataaaggtctgtgtagtaaatgtgaatattttcactagatgtgacagtcccaagacctccactcctgttgatgctgtcccaggacaaatggggatctcctgagtgcaagagatagatcatatcaggacaaggcctttgaagttcatgggaatagaaaggcagatggtatagaagagcagtagaaaacattctattcatcagggccctctacagaaacagaaccaataggcgatagagacttggagagatggagatagaaatagaggtagagatatatagaaaaatataaggaatcagctcacacaattatggaagctggtaaatccaacatcagcagagtgattcaggagacccagggaaagctgatggtcccatcaaaggccagcaagagccaatattgcaactgaactccaaaggcagtcacagctgcggaattctctcttaccgaggagagggtcagtctttttgttctaatcaggccttcaactgattggatgaggcctacctacatggtggagggcgatctgcttcactcaagtccactgatttacatgttcatctcatccaggagcacccagaataatataggaccaaatatccgggcacctcaaggcccagccaagatgacacataaaattaaccatcacaaacagccacaaatcaggcatagcttaactgtcactggttgcggattagtgtagaagtttccatgttccatgggtcaagaaaagtccagaagacttaagaattc

SEQ ID NO: 199968 - DNA, 1000 bp, Homo Sapiens
tcagtcatccaggctggagtgcagtatcttggctcactgcaacctctgcctcctgggttcaagtgattctcatgtctcagcctcccgagtagctgggattacaggcatgtgccaccacacctagctaatttttgtgtttttagtagagacggggtttgccatgttggccaggctggtctcaagctcctgacttcaggtgatctgtctgtcttggcctcccaaagtgctgggattacaggcgtgagccaccgtgcccggcctaggaatgtttttttgtttgcttgtttattttggtagataccttggggctttttttttttttaatgtagaaagttctatcatctacaaatagtgacagttttattccttcctttacaatctgtatgtcttcccctatccccttgctttgttgcagtggctagaccttccagtacaatgttaaagaagaatatgagggaggacatcttgccttgtttccagcattagtgggaatgcattcagcttttcattattaagtatggtattatccataggtttttgtagatgtactttatcaagttgaggtagttctcctttatttctagcttgctgagagtttttattataaattagtgttggattttgtcaaatattttgctgcatcaattgaactgattatataatttttcttctttaggctgttgatatgttggattacattgattggctttcaaatgttgaaccagcctttcatgcctggaataaatcccacttggttatagtgtatgatttttttaaatataccattggattctatttgtattattttgttgagatttttacatctaggtagcatgagagctaattggcctgtggtattttgtttgcttgtttgttttcttttagtactgtagttctctggttttagtgtcaaggtaatactggcttcataaaatgagttgagactaatttcctcctctattttctggaagaatagattgtgtaaaatttgaatgaattc

SEQ ID NO: 199969 - DNA, 1000 bp, Homo Sapiens
tcagttttatatatgtaccttgatataaatatgcatacttttttttctgagacaggaatcttggagaaagccaaaatatttaaatgtatgcttctatgttgagggtattaggattcttgttgcactcctttgctggagattttcacgtttttactctttgctagtagggtcacgtggttttaattgcacacccttattgctaatagatttgcacacttgtttttctgcaatactatcactaccctgtgtcgagtgtccacatatattcattggctatgtgaattttcacttctttgaaattattatttgggctttctgttcatgtcctgtagttttaaaaattgatatatgacttttttaatatcaagaatgttaattccacaatataaactgctgttgctaaaaatataacttactatattaacatatttgcctcagcactttataacaaattactcagatttctgtacaagctcatcaccttgactgaaggtcctcttcagtatagtagcaatccatttttccatactggaataattttctatgatgttcctgtaaaaatactctttttttcaaaatgaattatcttttaccttttctagagagcattttgctcagtcttcatttgctcagtccaatccatcaagacatatcttgactatcacatcctccacaattttacccttgattctcatctagagataagtccttcctcattttcccattcttttcctatttttgcaaatttgttttgcttctgggaagtaaaggaactctaactttttgtgtctatttgctaaaatgtcagaccagattttatttatgtatttattttaattttatttcattttattttatttatttatttaaatcttcatcaaataatgtggcaaaaagtattaaacacatttggtagattaaaaaaaaaagctgaaatttgggtcaaggagggggaaaaccaactggtaatggtaaagccaaagttcagactcctttctgc

SEQ ID NO: 199970 - DNA, 1000 bp, Homo Sapiens
ccacagcaggaggattggttgaggccaggagttcaaaaccagcatcggcaaaaaggtgaggcccccatctctacaaaaaaaattgaaaattaaaaatcagctgagtccagtggcacaagcctacagtcccagctgctcaggagactgaggtgggaggatcccttgagtttcattgttccaggctgcagtgagttatgattgtgtcactgcactccagcctctgcaacagagaaaggccccatctcttaaaaatgaaaagaagaaaaaagaagccaatgaagtccaagctggctgataatgctgctcacatcttctatatccttaccaattctatttgcgccaattactgagacagggatgttaaaatctctattaattgtggctctatttttctctgtagtccaatcagtttttgctttatgcgtttgaagttctatttgtaggtgtctgaatgtttaggactgctatgttgtcctgatgaattattattataaaatggccctctttatccctaataatagtccttgctctgaaatttacattgtctagtattaacatatccttcagctttctatgaacttacattagcgtggtttatttttccacccttttactttcaacctatcagtcttcatatctaaagtggatttcttataggcaacatatagttgggtcttgctttttaaaaatgaaatctggtaatttctactgtttaattgacatgtttagacttctggtttctggtctggtgtataaggagcctggaggccaacactccatactaataagtaaaaacttaaataaactgaaaaatcaaaacctcttcttagatttatcaaagaattgagttcacagggcaaactggtgtctccagaagttgagaaattggctagactcaaagaatcacaacttaccagagcagaaacccactggcagaaccattccaggaagaagttcagggtagggaaaactcaacttaactgatgaattgctagacgct

SEQ ID NO: 199971 - DNA, 1000 bp, Homo Sapiens
ctgcctgatacggttttttcttcaaaatgactctctatcatctgaatgctgaaagactattaaaataatatgccatattatttcctttaacgcccaatggggaaacgtagatgatgggaagggaaaaatctaaaaagcaaacaaacaaataaaaacactcagagaaacaatacttatttctaatctaggagacaattgaaggaattgggtgggaggggagaagacacaatataaatactgaaaataacatgttatcattttcttctctcttcagtttacactccagtcaactacaagtaaatactacctagtacacatacacataaattttgcacgttgggtatcatctcataattactgtgtatacaaataataaaaagagaagataaaaaatgctaaacactgtttcatttttattaatttggttaataatttagaaactctttttaccctctgatcattcaccacatgtatgtcccaggaaattcacttccgttctagccttcaggctgtatttgggtgataactgaccaggtttggcagtgtcacctggttaatcaaatagcaggagcaaaacaaattaaattagaaggctccagaatgtcacaacaaaaccaaacagagaaaatagctccattaaaagagagagaggagaaaaaaaaaaaaaaactatgccaagttttttatgaccatatacaagctagcctgtatagaagaaaattaaacatcatcacctctggccccctgtggaaaacaagttttcataattaacaagtcaatggatacaacagatgtattggcaaacagaaaagttagaaagcttctatttctccatggtattaaaaaaacaaaacaaaatgaaccaaccaggtaccatgcaagtaactatcatacaggaaagaaaacacacttctgatataatatttcggtcttaaaaaaataaaaaaaaaaaagcatgctatttatgtggaaagtaaaattctgtttcattatggaattc

SEQ ID NO: 199972 - DNA, 1000 bp, Homo Sapiens
aaaactatttcacttctttaatgtaaaaaacagcaacatcacataagaaagagcaaaacatttttacaggaaaaggtaaaaaaggaagctaatcacaccatcacacacagttattgtgtaattcatgaataaaagaaaaaggcagacttgatgagtatcaagtacataagatggaaaacaagatatttattgaatcatttactagttatctatcacttcataacaaatttcacaaacatttagcagctcaaaaatatacatttgttatcttacaatttctgtagatcacaaatttggcacacttgactagattctatctcttacaaagctgcagtcatatcaaagcttgactgggaataatccacttccaaactcaatcacatggttgttagtaggatttaattccttgtggtctgctgttacactgaggtttcagttcctcatgagtagctggcttgttggattgtggtgtctcggagctccttgccatgtggactgctccacagacatctttttttttttttttttaattatactttaagacatcttacaacatcgtagcaagcaagcaagagggcaagagtgaataccagcgagagagagaaaagtaagatgacagtcacaatcttctgtaacccagtcacagtagcaacatcctatgctatattctgtttattagaagaaagtcactagatctatcccatactcgaggggagactacacaaaggtcctggataccaggagggcaaggatccaggggcaccatttcagaagcttcctactacactcagtcactctacaacttatggagactctactgcatgcaaatgcttgggccaggaatgtgtatgtgcagagatgaagaaactatggaccttgagcaaatggcctagtggattcagtgacataatcaaaaaaaatctgtttaagccctaataaccccatacttatattaccataccatagtaacaccttcaagtttttactgtatttagaattc

SEQ ID NO: 199973 - DNA, 1000 bp, Homo Sapiens
taatcggaatatgcagcaatggtagcatgttaacctgttcacagttcaaagctgaacaacatcttataaaaacctagtttaatatgctatctaacaatctggaaaagtaaattaaaactggccatagttcatgaccagtttccttaatgcagtattctcttttcatttttcttatctccttctgatacgtcatcacaatgataaaaggcaaagttcacctatacagttaataaagtactacataaaagtgtggaattaacaaccataattctagctatgggagattcacttacccttcggcataacctatcttttggtgattttccaacctaaaataaaaagataaaatgttgtaacatttaataatttaaataaaaagacattactatggcacaaataataaaaagtaaccgaatttaaaaaccgtaaatggcgctataagtaaatgtgacagcctcattaattagctgttggctctaccaacagtagatgcaattaaattggtggtgaaacttaatctcacactgggctcaagaataatccttttcaaatataaattacatatttctgaactattaaataagtaaaaactctaaaaatctgtacagtcaaataactgtgttgcctaaaaacccagagcctgggccgggtgtggtagttcatgcctgtaatcctagcactcgggaggccaaggtgggccgaccacttgaggtcaggagtttgagaccagcctcgccaacatggtgaaaccccatctctactaaaaatacaaaaattagctgggcgtggtggcatgcacctgtagtcctagctactcgggaggctgaggcaggggaatcacttgaactcaggaggtagaggttgcggtgagccaagattgtgccactgcactccagcccgggcaacagagtgagactccatcccactcctaccaaagaaaaactaaaaaaaaaacccagagcctaattcagggctactaatcaagaacacctaagaattc

SEQ ID NO: 199974 - DNA, 1000 bp, Homo Sapiens
atccaactaaagggaaatttgaaacaagcagtttaattgcctatataagaaaaatcttggttcgggtgtttcacttcagtttgaggtgttgcacctcacacctcgtaccttgtacctacctcatttccgatgaaaggagtagaaggtggttaaagtagttgcatggtttttctggttctgcattagattttttatttgatgttggaaaatcatgggacatcagacaacctgctacctggtgcgtaaattctattttgtgccattatttaccttcagttgataaatataatgcctgactatggttgttgctaatgaatgaatgaacagcattttttaaaaaattattatacataaaagactaagaaaaatacatgttaaaccatgatttgcttactgtagtttcatctcaacagacttctgagacttaaatttaaaaaggacctctttgttcacagtatacactttttttgttgtttaccaaatgaacctttaagatggaatatttcagcaggtacaataattgctattctgagtccctcccagttaataacttgcctttcagattttagcctgtttatgcaaattcataactattcatttagctgcctcaaacctgcatttagaaaataaatttgagtaagtaaaataatttctcttgagctgaaaatttatgcacagttctgcagtcaagtacaattgtcaacttttcttgagctcctaaaaagccaggttaaaacatgtttctgggaaagaaatctaagatagtaatataaatggtattctgtaggtacattctttatagggcattggtactctcagcccatgaatattaaagtcagcagttaggcagtgtattttccttgagatacaatggggcataaggtggttttggagtagactttattggaaaatctaactagaaattcaaatgttatataaggcatttaagtaccaaatgaggggtacatgtttaagtgctacaggagctgggatggaattc

SEQ ID NO: 199975 - DNA, 1000 bp, Homo Sapiens
gagggtaagtgttttcctttctccacattctcaccagcatattttggataaaagcaattttatctggagtgagagatctcattaaagttttgattttcatttatcagatgattagtgatgttgagaatttttctcatatacctgttggccatttttatgtatccttttgagaaatgtctatttagaacttttgcccatttcttaatcagattattatttttttctattgagttttttgagcttttatatatgctgtttgtcaatcccttgtcagatgaatagtttgcagacattttctgccattctgtgggttgtcactccacattgttaattgtttcctttgctgtgcagaagctttttagcataatgtgattctatttatctatttttgctttggttgcctgttcttttgaggtcttattcaataaatctttgccaaaccaacatctgggagggttttccctattttttttctagtagcttcataatttcgggccttggatttcagtctttaatcgattttgatttgagttttgaatatggcaaaagataggggcctagtttcattcttttcttatggatacctagttttcctagtaccatttagtgaaaggacttacctttgtccagtgtatattcttggcatctgtctgttttgatgccagtaccatgctgttttggttactatagctttgtagtataatttgaagtcaagtaatgtaattatttcagctttgttctttttgctcagaatggctttggctgttctgggtcttttgtgtttctatataaattctaggattattttttctatttctgtgaagaatgtcattggtattttgatatggattgccctgaatttatagattgctttgagtagtatggacattttaacgatactgattctttcaatccatgaacatggaatatctttccatttgttttttttccccttttcaattgcttgcatcaatattttgtaatattcattatagagatc

SEQ ID NO: 199976 - DNA, 1000 bp, Homo Sapiens
gttatagtgattattattattatttttaaattctatctaattaggttgccagtatgaatgctctcacagcctgagatgtaaaaaaggaatctcaggggaggaaaatgaagcaaaactttctttgaaaacataagagagaaaacattagaatagatttgggttccctatgtttggtcttgaagtttggtccgtattaacaaattcaattactatgtgacatggattctcttcacttttctctcctacatataacttacatttcaagcctaatatgttaaattaacaaggtttttgaaaaaatgttgctgcacgatactctgttgccaaaccatccatgggaatatttcataatctgaatgttgcattgaggaagaaaaataatatgcttttatgccacaaaatccaaagcatggattgtattttgtcaatatcccatgatttagtgtgttgccagaattaagggatagagataagccttcctggagtcgacctggtgagtctcattagattccatctcaatattcgctgcctaattgcacaaaaagcgttaccagagtaggaacatgttacgattgtgccaaaatccgctggcaaaatatgtccacattctcacgcgtatacatgggatacactcacaaacatgctaactgtgtatattcaaaactcagttcattttcttaagagaccccaggaaaagctataaatgaaatcactcttataaattctacagcacattttttttttttagacagaatctggctctttcacccaggctagaatgcagtagcacaatctcagctcactgcaacctccccctccctggttcaagtgatgctcatgcctcagcctcccgagtagctgggacgacaggtgcacgccaccagcccggctaatttttgtattttttgtagagacaggacttctccatgttgcccaggctagtctcaaactcttggactcaattaattctcttgcctttgcctccgaaagtgctaagctt

SEQ ID NO: 199977 - DNA, 1000 bp, Homo Sapiens
atttcaaaataaaatgatgcaaaaagctatatgatgtactttcaagcacagggtatacttgtaattacaattttctgtgaaagtggatgcatttgttatgctacatcaagttttgggtgttctgccccttttgtatttttcaaatactttattcacctatgttttgcaacaaagataatgtataataatttcattgcaaagacacactttatagattttcttcaaaaaatttttttgcccatagccaattttagaaagctaggataaaagctttcaaattgtaacaagctgagtgcagatgtcacattctgcccttggtgttttcatcatgttggatgccttgacactgaacactagaaatgccatttaagaaacctataaagataaatattataagtagttactggagatttctagatgaaactatcatccatactttgtggatttaatatactccttaaaatttagcatatatccatagaaaactattcccaaactgtttttaagcagcagtttagggataccactgtgagaagaatacaaatttaatgtcatattttagattgaaaacctactgtagatgatagacactgtaataaataatctaaacacttcctagataaggtttaacccttcttggagagggcaagcacacaacaaaaacaagtagtgctctttctctactctcttaagtccccaaaacctaaattacacccagaattaggtttaaaaacccccaaaacagacagtaaagaaaaataatagtggagtcaatagataacaatatgccatgtaggaaaaaataaacaactgattaagtggaaaatacatagtgcagttttgaatctgcgtccaattgcttaccacttatggtaggacttcctttgtacatagctattcaagttgactttccaacaaaggtgctatattcagaaaaatctattctcacttaatagcagtcaaacaaagacttgagcagataatagcacaaaaagaattc

SEQ ID NO: 199978 - DNA, 1000 bp, Homo Sapiens
cttagcctagcctgccttaaacatgctcagaacacatgcatcgacctacagttgggtaaaatcatctaacacaaagcctattttataataaagtattgaacatctcatgtcatttatcactgttcttttgaacttgttatagcttttgcaccattgtagagttaaaaaatcctaagtcaaatcatccaaggggactccaggactgcctgtatatacctcctgtgcatttgatgtcaggctggtccaactttgacttacaagctcctttccaggagcttgtagaaatgtgaacagggactgagcacttgctgggtgccaagttctgttctcagtgttttgcttctattgactcagtgaccatggctcagcatgaggcctacgtgggtggggagggtcactcttcaaccccactatagcttcatctggacttctgaagggagaccaggagactttggatcctgggaaatgcttgttggtgagcgtgctgtgtgccaggtggcctgactacataagtggggatgagtaagttcatgcatgtgggccccgatacagaaggccaccatcatgagcagtgagcacagatgtccaaggtgctgtggtatgcttgccagagcaccacactactaccttgctgtgtgacattgggctctttgcttattatgacaaaaggaacccccactgatatcctgcctcctggtgtccacacctttgtgatctctcctccccttgagaatgcatgggaacttcagcttgctactaaggaacagaatatggcaaaggtatataagactctatcacatactagagagagagaaagagaagagaaaatgactcttgttggcttggaagaagtgagtaagctgccatgtggtgagggggcttatggaaagggccacttggcaaagaatgtttctggcttctgggacctgaaagtggcctgcagctggcagccagcaaggatatggtgatcacagtcctagagctacaaatagatgaattc

SEQ ID NO: 199979 - DNA, 1000 bp, Homo Sapiens
aaacttaagggacagtcaaatacctagcacaacccattatactggctttcccttttaaatctccacaggctggtcaatcacttaactggtaaaatcaatttacagcatgactctcccatctccacatttgcaaagagaaaggtatatgcaactagcatccagcaatgaaagaaacggggtggggagggtaaaagtacccattctgagacaaataactgaactcaatgattctcttactggttcaatgactaaacacaaaaagcccaaagacagtcctgaagccaccacaaccacaaaggagattacaaaattatgagtccagatgagtggctgtcagggcttaggcatgggggaagcatggaaaaacaaaaggctagtatataagggagggtttgggggatgacgaaactgttctgtatcctaactgatagggtggttacacaaatctacatatgttaaaattcatagagctgtacgcccccgccaaaagtgaattttattgtatgatttaaaaatatacatattttaagtatacacaaattcttataggagccttatttacattaccccaaaaggaaaacatcccaaatatccttcaaaggatgaatggaatagacacaatggtcatccatccatgtaatagaaaactacctagtaataaaaaggaacaaagaattgagttacacaacgacatagatgaattgcaaagataccatgctgagtgaaagataaacatcttaaaagatcatatagtacataatttcaattatgacaatatggaaaatgtcttatagggacaaacaaccaatcagtggttcagtaatgagagggagagagagggcttgactataaactggctggtcaaggaaatttacaattttattatatttaattttttttagaagaaaaaagatataaagtttctaaaaacattaagtacagaaagcagacataagttttaaacacagtcctttgtgctcaataaaatcaagatgaattc

SEQ ID NO: 199980 - DNA, 1000 bp, Homo Sapiens
aaattagccgggcgtggtggcgcttgcctataatcccagctactagggaggctgaggcaggagaatcgcttgaatccaggaggcagaggttgcaatgagccaaggtcgcaccattgcactccagcctgggcaacaagagcaagactccatctcaaaaacaaacaaaaaagaaatgtttactcagaatttttggccatttttaattgggttatttgtcgttttactgctgagtcattgtaagaattctttactctggatattaggcccttatcagttatatgatttgcaaatattccctcccattctgtaagctgtcttttttttttttttttttttttttttttgagacagggtctcactttgtcacccaggatgaaacacagtagtgcaatcacagctcactgcagcctcgacctccctggctcaagtgcatcctcccattccagcctcccaagtagctaggaccacaggtgtgcaccatgatgcccagctaattttttactttttgtaatgatggggactcactacattgcccagtctggtctcaaattcttgggttcaagcagtcctcctgtctcagcctcccaaagtgctgggattataggcatgagccaccatgcctggcctacctgtcttttttactttgttgatagtgtcctttgaagcacaactatttttaattttgatgaagtccaatttctctatttttagtctgattgcttatgcttcatggcatcatagctaagaaaccactgcctaattcaatgtcatgaatatttacacctatattttcttctaagagttttctagttttagctattcatttagcttctttaacttttacatatgatgtgacatagggtccaaattcattcttttgattgtggacatccagttatcccagctccatttattgagaatactattctttctccattggattgtcttggcactcttgtcaaaaaaaaaaaaaaaaaaaaaaaaaaaaaaggtgggtggg

SEQ ID NO: 199981 - DNA, 1000 bp, Homo Sapiens
ggctccagggccccaaacccttaacaactgtgctctagtagagagacataccatgggcagctgagtctgagggtacagagttctgtggactccggtttgagtttagagttgctcagcggaccgagtgtcaaactgtccctagccctttccttatgcagtctcacaacatcaaatcctgctacttacagaggtccaggatcctgacacatccactcctcccctttctaccccttgagaggcaagcagttatgaacttgaggcaaggaacaattgccctctgagggaggcttcttcagtttcttctaaaatttccttgttgagttagcaacaataaatgttttccacatgtccagccacgctgggcatggtggctcatgcctgtaatcccagcactttgggaggccaaggtgagaggattgcttgagcccaggagttctagaccagcctgggcaacatagtgagatctcgtttctacaaaataaacaaacaaaacccaaacacttccagccaagaaactcaaaaagtggcacagcgacccccttcacagtcttactcttcctaggtctttgccagtgcaggctttgagcccagccaccttctggccaaactgttcactctccctcagccacaagtctaccctccaatgtaggcatgcactgtggctggtttctctcctgggggaaaagagggctgtgggggcttacagaccagtgtgagatctctacctgcttttgcttgatgacatcctgggtgcttgaacctggagtgaggcagcaactctaaggggtcatggatcaagcagatagcaaagggtaagtgtgaattggaccctcagagaagctgaatttggagatgggctttgagggtttggggctgacagcttttggagttttgaagaggcagatttccattaaaaaaacatttctcctttacttggctaaatccacttgctgtctcccaccttcctgggaaaagtcaataaccctttggaaatgaattc

SEQ ID NO: 199982 - DNA, 1000 bp, Homo Sapiens
ggaggagttgcagtggaaagttaaatgaggctggaaagttttggggtaatggagtgatcctggaatagtaaaattttcagtgtagctatggaaaaacaatagtaagtttaagaaggcatttgattgttggcttattatagtatcacaagactggctgctgtctacataatccccccagatattttctactcaaatattttccactcttcaaactttagaattgtgaagtgaaccttatagatttgtctaactcctttatttttaagacagagtctcactctgtcgcccaggctggagtgcagtggtgtgaactcggcttcactgcaagctccacctcccgggttcacaccattctcctgtgtcagcctcccgagtagctgggactacaggcgcctgccacacgcctggctaattttttgtgtttttagtagagactgggtttcgccgtgttagccaggatggtctcgatctgctgacctcgtgatctgcccgcctcggcctcccaaagtgctgggattacaggcgtgagccactgcgcctggcctttaactcctctatttttggatcacgaaactaatataggcggcatggtgactcacacctgtaatcccagcactttgtgaggttgaggcagaaggataactcgaggctaggagtttgaaaccagcctgggcaacatagtgagacaccatctctacaaaaaaaaatttttttttttttaattagccacacatggtggtgagtgcctgtagtcctagctacttaggaggctgaggtgggaggatcacttgagcccaggagttcagtgttacagtaaactatgatgacttcactgcattccgtcctgcctaggcaacagggtgagattctgtctctaaaaataaaaagaaattaatagctaataatgggtcacatgccccattagtgacagaactgtaattcagatcccctgagtttcatgttgccactctttacaagtatattttttcttttggaattc

SEQ ID NO: 199983 - DNA, 1000 bp, Homo Sapiens
tgtctgtgcttcacactggagttgtaaggatgcataaaatgaagattctgtcttcacatagcctatcatccagtgaggaggttgcattattgggaatctgtgccaagcctggattgcataagacataggtagctgagaacctggtgctgactggggactgggggaagttctgtgcccaaggagaggaggactcttcccttcagatggatgcccataattttatctttaacttttaagaatttggctttaatgtgcctcaatgaagacctccttatgtttaataaattacaaattatttggacttcatggattgagatgtttattttcctctccagatttggagagttctatgtatttttttctttaaataaactttctatcaccttctcctctgcttttattcctcctcttgagttcccataatgtgtatttcagttcacttgatggtgtcccataagtcccataggttttctttttcatttttttttctttttattcttctgactaatttcaaatggcctgtctttgacctcattgattccatcttctggtcgatcaagtctgctgctgaagttccttatagaatttttcagttcagtcattttgctttaccaccagaatttctgtttgggtctttttttatggtttatctctctttgttgaacttctactttgtttatgtattgtttttctgattttgttgtttatgttctctttaagttgagtttcttcaagacaattattttgaattctttgtcagacaatgtataggtctcaatttctttaggattggttactggtgctttagtttgttttttagtcatgtttccttgtctatttgtaacccttggggtcttgtgttgatgtctacatattttaagaagtagagatctcttttattctttaccaattagctttggccaagaaagctgttcaccagtcaagatattttgggtggattggctggcagggtctgagggcaagtttactgctggaattc

SEQ ID NO: 199984 - DNA, 1000 bp, Homo Sapiens
cacccctggggtgctacctgacacctgtgcaaagaaaaggaggaaaacttagaagaaaaggcagagacaggcaagacagcatctcacagcttgtcaggatcagggcattaccgactattttttcttaccaaaagagcactgaatttcctaggggaaggtgagccacctttacacctcctgtcctccctcccagcccgtcaagcgatcccatcacccagcctcatcactcagcttcttcctagtacaaaactgccatcggttgtacgtcctgagctgtgggacgtcagctttaaccctagcctgtctcagggcctcgccctccagccccccgccccttagggtgatcgtgggtttcttcccttcctcctgcacaatcgcttcccttcactgaattcccttcaaagccaaagtttcttgagcactttttcttgtgtgcagtcttgtgtgtttgggtgttggtgtttttaaatttgctttctattcccccctgcctctctccatgtcgttacgcagctgagcactggttgggatgcattcgaatgacttcagcaagatcctgctttcctcagcccccgctctgttttatttattgtttaatatttccaatgatccaaatcaaagtgaataaacaaagagctattttattgtttgggtgtgtttgttgcttttctacaagggtcatgcatttgcgcctccttcaacactccaactcagagggcctcctgggttggcgtcgccactaccgaatggccagaattcaggatacagaggagagccccagcgtaggccttggagaggcctcttctcaagcccaggagtcccattacctgccgtgtgactggcgagtcacctaagttctctgaacctcagctgcgtgtctcatgtattaaatgggcgcgacaacactggccttcagaggggatgtgggagtaaaaacaaaagcatctccagaggcccagtagacatgcaccacctgcttgaacgtttgctgagtgaattc

SEQ ID NO: 199985 - DNA, 1000 bp, Homo Sapiens
ttgtgctcaatacaagtgagatgattgatagttgttgttttttttttctgctcactctgaggaaaactccagaacagtgtcattgttattatacaaagccaaatggcatacttttaaatgcaatctattccagtttaccaccacaacagtgacatggattattatctttgtaatctggccccatctccagactcatacccagacatgccctgagaacatgagaataattttattacatgtgtaagggtagcaattggtggggcagaaagggatccactggaaagaaagaaaaaagaaaacagccacggtgacacagactctgtttcaaaaaggaaggaaggaaggaagggagggcggaagggaaggaaaaaagaaaacagccagggtgacacagactgtttcaaaaaggaaggaaggaaggaaggaaggaagggagggagggagggagggagggagggagggaggaaatcaagaagagagagagaaagagaaagagagaaagaaagagagtgagagaatgagaaagaaagagagagggaagagaagagaagagaaaggaaaggaaaggaaaggaagaacaagagaaaagggaagggagagagaaaggaagaaatcatgaagaaagaaaaagaaaagaaaagaaaaagaaaagagaaagagagaaagagaaagaaaggaaggaaggaaggagagagggagggagggagaggggtataagaacaaaggaaggaaggaatcaatcaatcaaaggggtcaagtttcactcttatataaagtttcactcttatgtaactctgtaacaaacaatggtagaaaagaaggaacagagagaaagaggggtaaaatttggccaataagaaggttaacctacaagactgtgctggcacttcattaagatgagtaaacgtttggagtttggtgctttcgtagcagaaaggatgatttatttcctctttcacttatatatgcaacccaggggtcagcaagatttttggaattc

SEQ ID NO: 199986 - DNA, 1000 bp, Homo Sapiens
ccccagcccagaaaaacccaccctctgtaatacagacatatattcaactacctattcagtatctccactaactatgttgaatcttaacatgtctaaaaccaaactcttgatcttcttcccattctttttctcacagtcccctatctgtggcaatggcaaatacactctgcttctgaaatggtctctctgttgctacttttgcctcccagcagtctggtaccaacacagcatccaatgcaacactgttatactgtgcatcagatcttgtgactcttgtggcagacattaccacttgccatggatatccaagttcccaatccttgcagggttacagaaaggagtactgcatttccccatactctcaaagtaaggcaggaaatatggcatgcaccatccaaggccatgtgagtggaagtgatgcataccacgttctcttggaagcatttcagatgcctgtactcaactctccacctccctcctctgttgtggcgcacagagaagcatgaatttgtagggaggcccacagtagatgcatagtatttacataatgaataaatgaataaatagatatttatcaaagtcatatctttttttttggttttttttggtcatatttttaaaggctttacaataaattacttttctttataaagtcttcctttagttggaaacaatccttccttgcccacaattctctgtacctctactgcagtattttctaccacatcctatatgtgtatatatgtatatatacacgtatatatacacacgtatatatgtatattatatgtgtatatatgtgtatatatgtgtgtatatatgtacacacacacacacacacacacagatcttttcctaccaccagaccgcaagaggcagggattacctatggttcacttctgcatccctacccaatggacactgctgtagttctttcagtgagctggactttcaaagctgcggcttggttaatatttgttgacctggatttattgaattc

SEQ ID NO: 199987 - DNA, 1000 bp, Homo Sapiens
tgagcaaatagcatcatacacgttgccatcaagaaaatgaaagcatttgcagtggcgcagcatccagcttctctctgtggcctttggaaacaattttgtgaccagagaatggttggagacaaaggtctttctatctgatctgctcaccaggctggcatgggatcgtggggggcctatgtccctctttcctggcaccacatggattgctatcactgcatttgtctcctctctttgattaggacaagacaggcaggcaggcagagggttgtatttcaactgcccttgactctgtttataatcacaaacatgaaaggaaggggaagagattgagtttataggactggttctttgtgtagcctaatttatctctctcaggcagcagtgggccgagcgagtttcctttttgtttccaatgcaggaaactgaaatatgaatctatgttgatgagagaataaaggaattgaaagaggcataaatcttatcttctcgcaaccctagaagatcagcttcttgtgaagaaggggattatacttctgtaattaactgctttgcagctcctggtgatggctcagagctgaataatagcacccagccaagttggataaaaggctgttggatgggcaggtgcggccgctcatcgtgaacaatggtctcagggcttgacatctttttccagtgccccgtgctcagagagtccaaccaggggatatttgttccctgtctatcaacattcacagcagagaataaaattccagaacaaatagctcaaagagacctgtttcactggaggccagtagctgcaatgagctgccttgaaggaccaacccagattctacacctctttgtgttccgaccagtgcccgggacctgttaggggcttatggaacgctggttggcagtgactgcttctcagccgctgtgctgtctcaggaaagttgcgtgagttctctgatcttcagagttaaccgtccacacaatgcaaggggttcttatggaattc

SEQ ID NO: 199988 - DNA, 1000 bp, Homo Sapiens
tctcagctctgctaagccagctgccaccgggccatctgctgctcattttccagcttttgttgccattttcttctctcccgttatctttgtcctcgtgttgtttgttatcatttagtgttctgtgctgttgtttagtgttttttattaatgcttattgcttgttaatgttgtagtgtcttgttttaacaggatttggggatgacagagctaagggcctttttcaattttccacttttaaccagaagacacggctataaaacaaaacaaaacatgattttcacggagaaaactgaaaggaaattggttaaattggctgttttcttgtttagttcttttaagacaatagaacttgtcattgaatggaacatgctttgtggggaagtaaaatttgagatatactttgaaggatgagaaacgggcttctcacagcattgcacagaacaccgcggtgaggaaaatctcaggcttcctctcactctgacatttcctaatcctaaaggacttaacgccagaaacgcagaagctcattagtggctttgtgtgtttgttttgcagatggtgtcctcagaccgaagccaactttcctttctgcccacagaagctcaagcccaggtgtcgccgccacccccttaccctgcaccccaggagctcacccagcccctcctgcagcagccccgcgcccctgaggcccctgcccagcagccccaggcagcctcctcactgccacagtcagactttcagcttctcccggcccaggtgagttctggcaggagcgttggtgcagagggaatgcttgttttgctctgagttccaagctaaatgatcatctccttattccctgaagggctcatctttgaccaacttcttcccagatgtgggttttgaccagcagtccatgaggccaggccctgcctttcctcaacaggtgggtgatcgcccctgccttctcctcccttggtgcataaactgtaccatttaggttgttcattctgtagaattc

SEQ ID NO: 199989 - DNA, 1000 bp, Homo Sapiens
catgacctattttgcagagttgctttgaggatcaaaggaaatactttatataaaaaacctggtacacagtaggtgctcagtaaatgttcattttcttttttgtctctgaccttcctagtacttccctgttcttcccctcctttcccttcatgacccctcttcaccctcatccccagctgtgttctctttccttcctctctagagcccaggggtttggctcgcctgactacagaggtcctgaggtcactcctctcccatcttcggctgcaggaaagctccttttccatttagaacatattctggggtttttctggttttagggaaggggagatactgcagtttacagaatgggtcagaaacctcagattactctcttgcttgctaatgagaaggttgagaaaggcttttgggtcctggccaaaacctcttggcttttatggggcagaaatttgatttccagtgagatgtcaaaacatgccactgagcataacttgcagaggtttgtatttcacttatttggttatgaaatgaacaaaaagcacttcctttatgttaccctcagcagctctcagtcttttggggactgagggacccttgagagatgctgtcaacttcagatctcttttccaagccctccttttcttcacaaagccccttcaggaatgcctcagcatctcgtctttgtttcttgtgacttgccctgtctttatgaatgttgttgctgcccagagagagaagtccaggcttagttgcttgacactcaagcctgtgccaaagatcaggccttcccttggcctgtgtcctcaccaccccaggtcttaccttaagcctttgaaggggaggtctcttagagaaagttttggtcttaaaaaaaattttcaaatctttcttctcctgctacatctagttattgaggaataaaatataatctccagcacccaaatttatctgttccttagtttcacattgtttaggatcagagtgacaggttcaggaattc

SEQ ID NO: 199990 - DNA, 1000 bp, Homo Sapiens
gtctatcagtagcatgaaaatggactaatatgataggtaagagaggaggaaacatgtgagacgacaaaagaccccacaaacatgaaaagcagggaaagtaagagactaccattattcacagatgtttggcttgaacaactaggtgaataatggtgatactgccaagaaatcatggtctatgtttgaggtggttcttcagggagactgaattctgtcaaaacaagtcgaaaccaggttcctatgagacatccagtagggtgtggatctggagctcaagagagagtctggctaaatcctcttccacggatgtatcctttcttctaagcgtatgttctcaccttttggttttacagctggatttggcatttgcaatattttaggctctgcctgtcctgtttttcacattccttcttccttgcccctcatgcttactttcctcttttgccccatcattccaattccccataacagtagactaacatttcactttctttgctgatgctggtgggcctggaggtgactgcagaattcaggcattgctgatatttggggtcctgtcccactgccacaggcttactctctgcctatctgagtcttactaattctcaaaaggagttctcttcaagcctttcctgaccaccctgctcagagtaatctccccacttatctcaactggcaccagagaagcgctggtacacaacagaagaggcaaacccctagggatccctcaggccacagatgctcactccttgcctgacccctctggaaagctaaaaacaaagtaagttaaactgagaacactggacaaaaatctgattgtccttgctgtacaccaggcttgccacatgccaactccttccttcttcttcatttcttcctcattccacacaaggtatagaaagccaccagctattaactaggaagaaacagataagccatatctaaaacacagaggaaccaattcccaaactctcaggtgacatgaattctgcaggaattc

SEQ ID NO: 199991 - DNA, 1000 bp, Homo Sapiens
ttcctgtagccggctagccagttccatatgaatacatcctggtatctattgaattggatattggggtgtaagttatgatctcagccttgccatgattagcctgtaacctttagcaatcattccacctttgtgagacctccgtttctcttattcatttgttcacgtgttcattccaaagccatctatgaagtactgtactgaatgctaaatcctagagggatagatagatcaggaagcatccactcagtatgaaattattccttttgaagttgagagtgtttatgtagcctcttttagaccgggtatttgctatacatcttgagtggaggaccaagagtcccaaatggacctttcagactgttccttggttcatatacaaagaaactctgatcaatggaatgaaatgttgaacagcagatgaatctgggtaaaggaaataggaatgtgtattgctctgatctcattttttcaaatttcctataagtttgaaattattttcaaataaaaaattaaaagaaaccctcctgttccagaccaatctatcaaaatgcaaataagtgataatatcatataatgttgtgtaatttgttactccacaacaaagaccactggatttggagggagaggatctgggttcaagtctcagctcattcactacttaggacctggcctaaattacctcactactctgagcctccattttcttcatctgtgaaatgacttccaaagtcttcctcacagggacttggtgaggattcagtaagaatatatctatatataatttctatagatcatctatatactgtatgcacaaatacatatatacacacatgtaaaattgttttgtcatccgtaaaatactatgcagatgttggtggctcctcaccttagctgagcttattttggtgtatgtgttttcctgagtagcatccgtccactcacaggctcccttctgatttcttgcagcctgaaaggatttcaggggagcagtatggaattc

SEQ ID NO: 199992 - DNA, 1000 bp, Homo Sapiens
gggactgcactgcaggacggcctgacgggggaagccatccagcaccctcgcatccaacgtcgcatcagtggacccacgaaacccgggactgcaccgcaggatggcctgaggggggaagccatccagcaccctcgcctccaatgtcgcatcagtggtccagggtgcctggatggaggggcaggcccaggccagacgcacactcaccactggagttgattcggaagacgttggccgacatctcctggaacagctcctggaggttgcacggatcgacctgggtggctgggagaagacagggaggaggaaagaacacaggctaagggtgaagcctgcaggcccagctctgctaaccgctctgggcagcccccaggggcagggacccgacaggcagcagagtggccctgaaccccctcactgcctttgcggcttggccaccctggagtcagtgctggacacccgcacctgccttcacagtaccttcaagctggaaggaaggagagacgaaggcagggggtggtccctcagaaaggcagcaccctgagtttccatacaccgcagcagctggcgtgtgtgcccggaagctacgagcacctgcacgtggaggctcagagcagcatcactaagagtcaaagcacagccccgctgatgaagcaacagaaacaaggtccagctctgcaccggcagctcagcattggaaacagaaacactggtttccgcacaatgcaggtgagccctgagcacagcacgcacagagatgaaagccagcaggaaaaggccacacgccgcacggttccacacatctaccatgtcagaacagaccaatcctaggacagagccagggcaggggcagtgagagggaggaatgggcatgactgctgatgggtacgggggtgcttttgggggtgatggaaacattttagaattagtggtgattatagaatgctgaatattctaacagacactgagctatatgctttaatatggataagatggtgaattc

SEQ ID NO: 199993 - DNA, 1000 bp, Homo Sapiens
ttataaaactgaaggtattctcataatatgctgctgaattttgtttgctaattttttgttgaggatttttacatttatatttataaggagtatttgttggtagttttatttcatgtagtgtggtctccctgcctggctttgatatcagtgtaatatgagcctcagaaaataagttaggaattgtctgcttatcttctatttttttggaagactttgagaagtgttggtgttaattctttaaacatttggtagaattcaacaatgaagctatttactatttggcttttctttgttgggagatttctcattactgattcaatcactttacttattatgggcttaataaaattttttatttcttcttgagtcaatttcttcttgagtaatttgcatatttctagaaaattgtccacttcacctaggttatctaatttattggggtacaagtgttcatagtatcatctcatacttttttttatttctgtaagttcattggaatgtcaccaattttatttctgattttaggtttttgtgtcttcttgctttttaaaaatatcagctaaactagactgattttttttttttaaaaaaaaaagcaagaagatgcaaaaactttgtcaattatgttgatcttttcaaagtacccacttttggttttgttgattattttgttttctaatttcatttattgttgctataatttttattatttcttttcttctgttaactttggttttaatttgttcattgtgtcagtcagagatcttcaaaaccaatagaagatatacaaaccaaacattggtttaaagatgtaacaccaattatacataatctcttccagaaattagaagaggaagaaacatattgtaaatcattctatgaggtaaatgttaccctaataataaaaccaaagacatcagaaaaaaagaaaactacagaccaacatctttcttgaataaatatgcggacattcttaacaaagtaatagtaaagagaattc

SEQ ID NO: 199994 - DNA, 1000 bp, Homo Sapiens
tctattgtcctggatgctacagattttcccctccttcttgaaactcttgctttttctttctgatcatgttcctcctactctccttagtcttcatggagtctcctaattcttctagccttctagatgttacattttctaaattgtacccttgcttcatctgctcccttcccattcttgttctctttctttcctccatacactgatattacccaagcccatgatttttcatgtgtaggctgatgactatgtagattcatatttcagtctgactggtacacgtcttcttattaatgtttcttaggcattttgaattgagcatgtctaaaaaggaattcatcattttttcctaattattttatgctccatcacttgttgaataacatcaaccttcaccaattcatccaaaagagaaaccccaaaataaacttggactccttccctcactgtcgttcaccctacctctatcccatcctcacctctctctaatcagttgcaagggttatctttggaatcactcctctcctctccatctctatcgccactatatgcgaccaaaaacctgtcatctctcaccaggagcagtgcccagctgcctgtctgatttctctgtctccaatctggctctcttctcatctgtactttatcctttccacagagtgaggcttctaaaatgcacatctaagcatagcacacacctgcttaaaatccttcagaggctcactggagcctttaaagtaaaatcaccttttctgtgtcatctcttgcctttctctccctgcctccttcccagcctcaacattctagccacacagaattactggagtggcatggagtggttgagcaggcaaattatgatattcaaaagactggtgctcgaagcccagcctaacttcttattatctttggttaatactaaggtatgttatttagcctctgtttttctcaactctcaaatagaaataagagtggtacctgctgcacagtgtttagatgagaattc

SEQ ID NO: 199995 - DNA, 1000 bp, Homo Sapiens
ggtctaaagacctaaacataaatcaatttaagcatcataaaataatatataattgtatgtgtacagtctttgggtaggaatgatcttcctaagaacaaagagcaaaagcagaatccacacaggaaaattttgtccaatttgcttatttataaattaaaattttctcaacacaagagacactaatgaatagtaaaacaaataccacactcagagaaaaatagttcaacagaacaaaagggaaattttattaaaagaatatacaaatgaccaataatgaaaatatgttaaatgtcacaagtaaatgccatgtaaaataatgagttatcactgttcacagatcagattggcaaaatatttaaaatgatcaagaatatgcattgatggtccaggagtaagacagcacactgatctcttaatgcaggttttcttgggaaaactgttttagaggaaaggttcgtagaatcagtgaaattttacttctaggattccattcaaaaaaaaaaagttggcaatgaatatgaagatgtttgtccaaggaagacaaatttgcattttgaatttaaaatttgaattctaaatttgattgtagattctagtttcttaaagttaaactgaaaacaaaaaagtactctcagatgtccactggaaattttatgagctataagggtaatggtggttggctgacttgctaatttagaaaattaggggcaatctaaatttccaagtttctttcaagtaatctaataaagtgtcaggaatcagaggttccaggcaggctagtttagtgtgattactaaggtcattatgcttgggattccatctctgttaacctacctactgttcttttggcttgtggaggcagttatattgttttctgcattgatcttgacttctaagttaccagcagttaattgtatcattgtctatgtgaacatatcttttccttttagggtagggtgtttaaagatataaaccttggactaaagtgatttaggaattc

SEQ ID NO: 199996 - DNA, 1000 bp, Homo Sapiens
atttcaggggcatcttgtttaatttccatgtaattgtatggttttgagcaattttcttagtcttgtattttattattattgtgttgtgtctgatagtgtggttggtatgatttcagtttttgcatttgctgagaattattttgtgtcagattgtatggtcaattttagagtatgtgccatgtggtaatgtgaaaaatgtgtattctgctgttgttggttgaagagctctgcagacattattaggtccatttggtcaagtgttgagttcaggtcctgaatactttaattttctgtcttgatgatctgtctaatactgtcagtgggttgttgaagtctcccactattattgtgtgggagtctaagtctcttcataggtcactaagcacttgctttattaatctgtgtgctcctgtgttgggtgcgtatatatttaggatagttaggtcttcttgtagaattcaacccttcaccactatgtaaggcccttatttgtctttttggtttaaagtctgttttgtctgaaattaggattgcaacctctgcttttttctgatttccatttgcttggcagatttttctccattcatttattttgagcttatgggtgtcattgcatgtgaggtgtgtctcttgaaaacaacatgttattggctcttgcttctttatctaccttgccactctgtgccttttaattgaggtgcttaacccatttacattcaaggttagtattgatatgtgtatatttgatcctgtcattgtgttgtaagctggttcttatgctggcttgtttgtgtggttgctttatagtgtcactggtttgtgtacttaagtgtggtattgtattggctggtaatggtctttcctttccatatttaatgcgcctttcagtagctcttgtaaggcaagtctggtggtaatgaattccctcagcatttgcttgtctggaaatgatcttattctccttcatttatgaagcttaggctggctgtatatggaattc

SEQ ID NO: 199997 - DNA, 1000 bp, Homo Sapiens
aaaattagctgagtgtggtggcgggtgcctgtagtcccagctactcaggaggctgaggcaggagaatagtgagaacctgggaggcggagcttgcagtgaaccgagaccacaccactgcactccagcctgggcaaaagagcaagacactatctcaaaaaaaaaaaaaaaaaaaaaaaaaaaaaaagaactagagaagcaagagcaaacaaattcaaaagctagcagaagacaagaaataacttagagcagaactgaaggagatagagaccaaaaaacaccttcaaaaaaatctatgaatccaggagctggttttttgaaaagattaacaaaatagaccgctagccagactaatgaggaagaaaagagagaagaatcaaatagacacaataaaaaatgataaagggagtattaccactgatcccacagaaatacaaactaccatcagagaatactataaacacctctactcaaataaactagaaaatctagaagaaatggataaattcctgtacatatacaaccttccaagaccaaaccaggaagaagtcaaatcactgaatagaccaataacaagttctgaaattgaagcagtaattaatagcctgccaaccaaaaaaaaaaaagcccagaactagacaaattcccagccgaattctaccagaggtacaaagaggagctggtaccattccttctgaaactgttccaaacaatagaaaaagagagactccttcccaactcattttatgaggccagcatcatcctgataccaaaacctggcagagacacaacaacaaaagaatttcaggcagccaggtgcgatggctcacacctgcaatcccagcactttgggaggctgaggccggaggattacaaggtcagtagatcaagaccaacctggctaacacagtgaaaccctatctctactaaaaatacaaaaaagtagctggacgtggtggcgtgcacctgtagtcccagctactcaggaggctgaggcaggaga

SEQ ID NO: 199998 - DNA, 1000 bp, Homo Sapiens
tagagccaatgagagacataggccacagtacaatagctggagattttaatgccccactttcagcattggacagatcttccagacaaaacgtcagtaaagatacatcaaacttattctgcactatagaccaaatgaatctaacagacctttatagattctttagatttctataaattcttttccttagcacatgaatcattctcaaggatggactatatgttaatcacaaaacaagtcttaaaatattaaaaaaaaaaactgaagtaacatcaagcatcttctctgaccacagtggaataaaactagaaattaataatgaaaggaattttggaaactatacaaatacatgaaaattaataatatgctcctgaatgaacagtgggtcaatgaagaaacagagaaggaaattgaaaaaaaattcaaaaaaaaaataatggaaatacgacatacaaaaacctatgggacacagcaaaagcagtacccagtgggatgtttataagtgcctacatcagaagaaaaatttcaaataaacaatattgcaatacatcttaaagaactagaaaagcaagagcaactcaaacccaaaattagtagaagtaaagaaataataaagatcagaacaaaaataaatgaaattgaaattaaaaatatatatatcaatgaaacaaaaagttgtttttttgaaaagttaaataaaattaacaaacctttagccagactaagagaaaaagagatccaaataaataaaaccagaaatgtaaaaggagacattaaaactgatactgcagaaattcaaagaatcattagtgtctactatgagcaactattttccaataaattggaagatctagaaaaaatgggaaaattcctagatacatacacgctgccaagattgaatcaggaagaaatccaaaacctgaatagaccaataaaaagtaatgagattgaaactgcagtaaaaactctcccagtaaagaaaagcctgggacccaatgaattc

SEQ ID NO: 199999 - DNA, 1000 bp, Homo Sapiens
ttaagacctcagatcagtgactgtaactgccattgactaaagaactccagttggacaggcgtttttgccactgtccctaaaagatggcatttggttgacattcattccaaaagcatgatgaaacacactaaaaatctgtggtgcctttgtcctcggaaagagaagatggcaagggtttatatttctcgtttggccaggagttcagtttccctgcaagccccagagggtgggtggtaacaatgggacatgtttggctcctcatcctcctgctgacagccaggtctcagagaggcaagtcccacacttcccaaactctggatccgagctctgccgccgccggaggaaaggcttctaactggttaggaagcacagaacttgcctggccttcaccagcattatcagatctgtcattctctttaggaactggctctgctctaggccttgttctttgctccagaggtaacaattgccatttttctttggtatttctgctgtagtgatcatacttgcccttctcataggaaaccatgggaatcagcccaagtcacagctggcttccagatggctcttgatcctgtgacaccaccaacattccaatgctgatttgcttgggaggttcaaacttggcttgccggggcaccatgcttctggaaccccaccctgggagatttataggcaggccttggagagaacaaatctctagaggtgggatggagccaagcagtttccttttgttacatgttctagaattctgcctaaaacagaagaggctgacctcattcttgccccacccgaagattgagcgggaataactaactagcaagctattactgacattgctaaattacctaacaaagaaagttcttcattctttctgtctccgtctctcttgatgtatactaatatatgtgtatatatactctctctctctctatatatatatatatacatatgctagaagagaattcttcatatatatgtgcatacacaagaggaattc

SEQ ID NO: 200000 - DNA, 1000 bp, Homo Sapiens
cttttgtttttcagaagaagctgtgtccttgcttctttccaagactgacttctttacctttgttcttcatcctgttctgaaactttactcttttaattatttcttcttctcttaattaaatcttctatcttttttcttttactgaattcttccccgtagcatatccatgtttaggtgtccagaactacacagaggaactccctgtcccctgggccttcatctctccccttctcattactgcatttcttgaagccattgcccgtgctgtgtttcttgattcttcccatcctctgttttgtttattattgtctataacaaagagtgcagaagtcatcagggtcactctttggggcatacattccatatggggcatacattccatatccaccttgatttctcttctgacattggagtactagtgaaggcagaatcaagtgcagacaccagaaggtggtgattcaaaacatgtgttggtgattgaccaaatgtttagggcaagggaagagagagagttaaatgattccatggtgtttattttattttgagacagggtttagctccgtcaccctgccggagtgcagtggtgcaaccacagctcactacagcctcaacctgctgggctcaagtgatcgtcttgcctcagtcgcccaagtagctggcactcaccaccatgcctggctgatcccctgccaaatagaggcagggtttgccatgttgccgaggctggtcttgaactcctggcctcaagtgatcccccgccccgccccaacctgctttggcctcccaaagtgttggaattacaggcatgagccaccatgcctggcccttgtttttattttacattagcagatcgtagtgtcattaactgagggaaattctggtgtgaattctgtttgttgatatgcacccttcctttgtttttgtctggaatgaccttcctttcatttttttcttcaacgccccccctccccccacccccccataatctcctacttcctct

SEQ ID NO: 200001 - DNA, 1000 bp, Homo Sapiens
aaaacacagccagtcttaaacacggaaccagaaccaggcctctgactccaaaatataacaacagcagcaaacatttactgggctcctattatatgtcagtcactttacaaaaaaattatctctaacattatcaattatccattagagtcatcattattagtcccattaacagataagaaaaattaggttgaagtaaattgcccagggccatgaaactagtaagtctgaatttgaagccagatttccttgggctcaaagctaatgctcttttcactacatacgcactgcagaaacaaaatataaaataagaagtgctgagctaacccatgccttaaaatgagaagtttgctgtatcaatctgaagttactattctcttatcaactaaagcttacgtcaggtggttttgtgggctgttaagctagcctttgaaaatacctttccttaaggttaaaagagaaagaacaattaatcgtaaaaagataagtgtgtaaaagtataagcacataaacaatggagtaggtaagctgttagagatcatgtttaacacataatttccacgtattctgggaaagcattcaggacaacatgacattctcactctatgaagatcaaacttcagtataatctcttatttcaaaatgacacaaacatttccataagtaattggtcactttattcaaactgatattttaatagtgtatttgcttaacgacttttttccttaaaattcaaaaatttttaatattttggcattcttgaaatacacatacttgctgcatttatgaagcagcacaaagcagagtcatggagctgagctgaggatgagaggtgattaagagaattactcagaaacacagagcttcttaatggcaggccaaacccagaactgctgatgagactagcactcttctacactgtgctcatcatcaggatatcattactcaaagttatgttcacctcaaaacatctcctgattgtttcttaatacattaagaattc

SEQ ID NO: 200002 - DNA, 1000 bp, Homo Sapiens
agattcttctgttcatctaagctcctgactttaggcccttctagaacattagagaggagaagaaatcacgtgcaaggatttagggacaagaggatgaggttttggtgtttcctttctggtattaggttttccagagagaggctgttagcctgtctctcgcccactccaccactgtgaatcctggctactggggctagttccttgctaggaaaaaaaaactctagagaaatgtgtttgtgtgtggtgggtgggcgggggccctgaggatgcagggactgtgtctgctgtgttgtctgttataagatgtttcagacctattttgcatactggcagcgacaagttgagacttgttcaacttgacacagtcctgtggtcatagcgaatctttctaaagctctgatcagtcaagaagggggttgtatcaatcctcagaaccctgagtggaactttctacaggatttattaggagaaaaaccttcccggaagctgcagaaggacaaatacagaatccgtgtctgggagaaacctcgtggcctggtctccattatttgagatgagttacatcttggaggtgaggacgtgcctcgtggtctaaagcttcggcacaagggcccaactggaattccacttacgggtatgactgtggggtatatgctgtacccattgaattcccagagggatttgttaagtggttgtgttgctgttttgcctggttaagagtggcttattcttgttgcctcatctatcttgagtgcagaatttttgcataaacggcttctcttgaaaaatagaagtccgtttttgttttgttttgttttttttctgattaactttccttttcctctgtcttaaacaccttcccccgcccctcgccacctccatgctgtgtttctgtggctggagcttttctgcactggaaaggaggagttctcccctctgttctgacatatctgatccccactagtttatatgattgctggtctgaaaacctggtgaattc

SEQ ID NO: 200003 - DNA, 1000 bp, Homo Sapiens
gtattatatataattaactctttgatgtttatatataactatatatatataattttttatatatttatttatttattgaaacagggtctggctctgttgcccaggcttaagtgcagtggcacattctcagctcactgcaacctctgcctcccaggctcaaggcatcctcttacctcagcctcccaagtagctggaactacaggtacatgccaccacacccatctaatttttgtattttttatggaggcgggtttcactgtgttgccttgactggtctcaaactcctgagctcaagtgatcggtccacctcagcctcccaaagtggtgggataacaggcgtaagtcactgcacccacccccaaaatatttttttactgctgtatttttttttcaaactaggatccaatcatcgtctacacattgtgtttggttgtttttacttctaagtattttttatctatatctcatctacatctatatctacatgtatatctatagatataagtccattgttcaaatgactgttcccaaatgtcatgtacccagaaaaaggacacatcctagccagacccactcaagtgaaacccaggctatttgtgggtaccaaatgctgtagtttggtcctcccctatccactggtaagagacgactgattatgggtaaaatccatgaccttggagaaaaccaaaggaaaccctatatgtggatcagcctcataggaaaaggactatagatatgtagtttctctctccctccatctttcttgtataattcaaagaggcaaatgggtgtaatgagaagaacataggcagataagactttaactctagctccatgactgtaaagctatatgaccttgggcaagtctttcacctctttgagtttcagtttctttatctgtaaagtgaggacaatgcccacttgaagtgttattgtgagggcaaaatgaattaatttatacagaatgcccatcacagtcctttaattctctataaagctt

SEQ ID NO: 200004 - DNA, 1000 bp, Homo Sapiens
agtcagctcaggttcaagggataggaaaacagattccaccttctttgaaaggagaagcaaaaatttcgtggccatctttaatcagccacagtcttccctgtgaatacaaattaaatctatttttcccacattcaaattacactcacctgccacgtgctccccccaccaacagggggcagatagtcatcactgggtccttagcaattctaaaattcagccagacacatgttatcagggccatctactctggagttagggaatgatccctgattagggcccagttctgctcccagggagtggttcactgtggctgtctttttttttccttttttttcttttcttttttttttttttcccccttaagacacagtctggctatgtcacccaagccagagtgcagtggcgtgatcatggctcaccacaaccccaacctcttagattcaagccatcctcgtatctcaatctcctgagtagctgggactacaggcacatgccactatgcctggctattttttttgtttttactttttgtagagacagggtcttgctatgttgcccaggttagtcttgaacttctgggctcctccctcagcctccttcctcagcctcccaaagtgctgggattacaggtgtgaaccactgtacatagcctctgtagctcttggccatgccctctgaattatccttctcttttcataagaaatggatcatatttacagccaagtggctttctcaacctgttccctgctcctagaaattttcgggaccctgagccttttatcattttgatctacctgtcccttttagtccaaactagtacaactcttcctttgtaaacttttggatttcccatcaaattacacaccactccatcagccaaaagctccacccacaaatcttttcaagacaggtccctctctaacatggaatccaagtaaaggtgcagtgggacaatgcccataagatcctttgaagctctttcatctagccaagggaattc

SEQ ID NO: 200005 - DNA, 1000 bp, Homo Sapiens
gtctccatctcctgacctcgtgatccacccccctcggcctcccaaagtgctgggattataggcgtgagccaccgcgcccggccctcaatgtaattatataaagagaaaagttcctcctccctttcttaccttcaaaccaaacaaaaaaaagtagttctcacgtggaaagagcacttactttaagaaaaaatgtaatttttagctagttttattaaaccaagaatgctctataacatgggaaaacaaggcttcccagcgtaaatatcatgatacatgaaaaaataaaattccctggaacagcatgttttcaccaacttgcagaaagagaaagagcttactgcttcgtaaccaagtcagctctgtttcccttgggagcttttaacagaggctggggctcatgcaggtttggggtttcaatgaattatctgagtggttcagaaacctccagtgagacattaatgttgaagaagcaaaataaacaaaaacaaattctctggaaaatacctccttatcccaggatgggagaatttccacagaaaacctcacatgtgagatgaactcacattccaaaattataaaacatctaaggaaacaatgcaacaagagcagtggacagtagacaaatgacaagatcagacctcacaggaattcagaaaattggatgaagaatataaagtaagtgtctcaaatgattaaagatataaaagaaggaattaaaaatgtgagaaaaaaagatgctatgaagaaggccaggcagacagatttgaaaaataatcaaatagaacttctacaaataaccactgaaatttaaatcatgatgaatgggtaaaaaacacattagtcaaagatgaagaaaataggaaaatagatgtgaaaaagttatctagcatgcagcacagagagagaaaaatgtggaaaacctgatgaacgaaacaaaacaaagctgagagacataaggtaaggacagaataaaaggcctaacaaagatttaatagaattc

SEQ ID NO: 200006 - DNA, 1000 bp, Homo Sapiens
agcttctagataggggaagatgagggtcggaggggaagcagaaaatttgtcttacctaattgcctaaatgtggtatgaagtctctgcacaacttcccagcctcagcccacaacaaccctcacccatttccccactgcagtcggggagggaagttatgccacaggcagccccatcaggaggcccacatggcaaagaaccaaaggcttttaccaacagtcctttgagtgacctcagaagtggctcctccagccccatcaagcctcggatgactgcagccctggccaacatcttgatcacagcctcatgagggaccctgagccagaactacccagccaagtcactcccagcttcccaactcacagacaccctcagaagcaaatagaagaaattcttgttattttaagccactaagtttggggtaatatgtaatacaataaataactaaccttaaccccttcacacacacccagagaagacgagctgataatcaggttgcaggtcccaagaggacagtgggccacatgtactgtgagcagagtcacgatgcattttaaaatcatcctcacatgagactcgctcttatctcttctttttcaatgcatgtcatctgatgcgtaagtcagcctggggtcttctcttcctgctaatcccactcagacaagagcctttaggggtctcctctcatggcatctgtgctgcataaacaagaggctgtaagctgcatggaagagcttagtctctagctatgtcttagagcttggacacattttgtttctggtttcaggaaactgcttggatatgggcttagaagaagcaaaagcctgctcccaatcccttaaatctcaagctaaatccatagggcccagcctaggttatcagagagcccttcactgaaaggtcagacaccaacacagcaaataataaagcagtggcttgactttccacttgctcttcttgggaacctcatggggagaagtggctgtaatgtgaggcagaattc

SEQ ID NO: 200007 - DNA, 1000 bp, Homo Sapiens
ttatttcctagacccactgcttacaggatctatggggtgagagaaagaaggtagtaaggcagatagagatagcaagtgaaggcctaattgtataacatatgaatcttgttcagttctaaaaacaaaacaaaacaacaataaaatttagttataaatcccagaaggtttcatcagaaatgatccgaaggcttagcttacagggacaaaaacatttatttcctacgtcatcaattaaagagttgttttcctgctaagtgaattctattctgagaaattaatatccctgggcacatcctaaaatttatgtgtgagtccagtgtgttccatcagcaaagccaaagtctcttttcttagctatcagattttcagctctggattttacaagacaaactttcccattcctgggacatatttacacctctgttatattgttttagcaaccccaaaagcttttgcttgaagtttagaaatatgttttgggtttggagaatatttttcagggaagattctcaagaagagattgttttcaattatctgagtaacagctgaatttgttgaggcatgagaacttatttttatttttggattccacatgaaatcattggtggcaaataaatttgaaactgtgcagaccctctgagatttcccttggggtcctgtgatactctgtaactatgttacacctttagaaagtagtctgagattcatagatgggttggtgggggtggggggtggtgtcctttgctatattgccccttgcattaagtgaagatagattcttatcaccataatagaatcctttaagaagaagaacaaatcatcagataggttgctgttgggatacaattgtaacgctgccctgtcccatcagctgttaagcttcctcaaggaatgagattccttttcatatatgagtgtatctaaacacataatctgtcctaggagaaagaaaaaaattgaagtttctaaaaaacgggggtaaaagacagcagctgaattc

SEQ ID NO: 200008 - DNA, 1000 bp, Homo Sapiens
tcttactacctttacaaagcctacgtcaatcctctaaaactggattagaagctctcaacctagtagtagagtgaatggagattaattgtagagtattaaatttttttcaaatattctcttcttaggtccaagtgtgcatattctagggcaattcctgcctctttttttcttatatctgtgtacgcctgactcaagattatgatatttgtgaggaaagaaatcatgtccatcgggtgcaccattgtattcccagtgcctaactcagtgctaactacatagctggtccccagcaaatgtctgtgggatgaatgaacaaatgagtaaatgaaagttatttattactacatagaaagaaagaggaggcatgaaaaagactagggtgagcaactttgaatagagaaaaatggaagataaagtatgcaaatctatattggacaaagctaactttcctgtgtatctcagtttttgtttttttctcccctgaagacaaatgctgtgacaagttcagatttcctcagcctagcaaggggtgaggctagatcatttctaaggtgattcatcatcagatatagctctcagtggaggaagtggtgatgttgatgattaagcagaaggcatttccccccaaggagagatgttaggagagccttgtgtcctggaagtgctgtttttcattgagatgcaaagttgagatcttaatctcttggaacattgctggttccctggactgctcagtaagagacaagcaatacaaataataatatacagtatcttactttgtacagcttttcgcagctcttagagcactgttatatccatcaccttacgagactagttgtcacagtgcacttataagggagacagaataggggatttgacaacagaagcactaaggctcagagatgaaatccaaactcatgtggctaaaaactggaacatttgggatgggaacctgggactttctatcacaggttttgtgtgaccagagttttgagaattc

SEQ ID NO: 200009 - DNA, 1000 bp, Homo Sapiens
cttctttattagcaaaaaataaccaacttttttttacacaaaagtagtgtttttcataagaattaaagatttctcataagcataaaagaataaaaggtgctcatttgtatacatgtggagcatctttaagatgttcaaagtaaattaaaatgtgagtctttctgaagtgagctttgttgcttacatgaatgcttgatcactgacatgttcacctgagggcaaaggatctacaatttacagcaatcatgcagaaatgggttttctttcatatggattctacttggttctgctcttatactttgttttttattaaaaaaattaaaatgttaagtggaaacaaacaaaaactaggaaggccctgagaagactgcaccatgaaaatagcatcatgaagaggctgcctgaattctacaccatagattgaatgagaaccgcttgctgcctctgggtcttcactggcttatgggtaaatttaggggaggaagagataattactaagatgtcttctcaattctcaaatgatttgcagagatgttatattaatttttttcattttgcctacatatatgcttgatttcaaaacttcaaactctacagaagtaaataaaatcttaaagtgtttttatttatgtacacctacccctcacataaatgcatacacttacacacactccacccacattcatattcagaaatgtaaaacactgatcctcctttacttgaactcactcgtggagtatctctcagactgtgttctctaagtccatggaaaaacacaaaaataactttcattcttcctactttagtctatgataagcaacatacaaatattacttgcagaattaaacttcatagaatctcagtaattatttgcaagtaaataactagtttttttgaggtggagtttttcactcttgttgcccaagctggagtgcaatgtcgtgatcttagctcactgcaacctctgcctcctaggtttaagcaattctcctgcctcagc

SEQ ID NO: 200010 - DNA, 1000 bp, Homo Sapiens
tggaacatccaggggtagtcaaatgccttctggcaagtgggggattctcccctaatagagaaccattcttctaatgtaactgccagctatttgtcactgggtgaagggtcagaagcctgtttggcagctgcagaatctttgtatcaaaatgctatggagtggagatttacactacaaccaccagatatcatgggggtagaaattatgccaaacaacagatttgtattcattgcagaacattttataagtacatataagataagggaaaagtaattttttttaaaagtacttataagccaaaagaagagacaatttaaaaaatcatctcacaatgtagagatgaatgtgacttaatgtcactacatcctgatagttttttttttctatacatattacacataggaaagacgtattgtacatatagggttagtcaagacatcctgtctgtgactgatgttatgcaatctactttttcattttatattgtgaacatttccccatttctttaaattatccccctttttttttccagcatggttcataatgggtggcatatttgtctcctgttccttgtcatttttagcagctgcaatagtgatcctccataaatgggccagtgtctacttttctgtcattttaatgttggacattttatttgttttcatttttttttttgttctaaataatgcttttagtcctcacgtatttatgtacatgagactgtatgccaggcacccctgcttcaggtaccttggatagaacagtgaacaaggctgatccctgtcctcatggatcttacagtccagctgcgtatgtgtagctaaatcattgcatatgtctttgttttgttaggattcgtcgtgccctgccattttctcagatgtgttgtcccctgccctttcaactttctttgctcatcagggtaacctcttcctgtataagggcccagcctctatgaaagggaggctctagaatctgctcgcctgtgagattagaattc

SEQ ID NO: 200011 - DNA, 1000 bp, Homo Sapiens
ggctgcctcatcagcacccctaatcctgcagggtttgcacactcctcttctgtcccacaatgacagctgaactcagtcaggaggcccaggccggcctgttggacagtacagaaagagaagcaagtgaagtctgagaggggggaattctccagggggggattggaggattgtaaatcttcaagggcctccagaggtcatcttgatcaccccttctccagcaagagctgcacacacccagctggagggaggaaggatattttgggtggacggagtctgaggctgacaactagactgttagtaagttcttcccaggcccatccctgctgggtggctcagaggatggactctggagccagagggtctgggtttgaatcccagctctgccccttccttgctctataacttgggtgaaataatttaacctttctattcctctgtttccatgcttgtaaagtgggaataaaatgatatcttgatgtttggggcaaggactttcaaactccagagtattcattaagcacctaatgtgtgtcagacactgtgttaggcatttaacacaggttgggtcatttggaaggactcagccggagaccgtgagaccatttatatgtgccagtgtcttcatgttgggagcacttattccactgtcttcttcctaggactgattttcgggcctcaagggtaactgtaggaggtccttccctggttactcctgctgcgcctgcccctcctaaccatggctggactgtccctgtcccaggctaagccagctgcagttggctgtgattaatggcctctattaacagcaagttgtaaactgataaagtacacagtgcccatgaaaatctcacctctgctaaattccacaccagtgagtacttactccttaacccccgaaacctcctgccttgcctcgtttgagagacatagtgacagagagtacacctttaaccagaggaattcaaaatgccttggaagcaggaaacaactccatgaattc

SEQ ID NO: 200012 - DNA, 1000 bp, Homo Sapiens
gagaccctgtctcaaaaaaaaaaaaaaaaaaattctgactgttcaggctcagatgcctactttatggtcccagttcaaaggctgccacttgggactgaatctccaggggactgtcacagaggtggagggtgagggtgggtgaacaggtgaacgggtgaacagggatgagctgctgaaaaactttcttggttttggtccgaggctcagctcacaaagcccgcccccctccatgagggacacttctttgctcctgctggcttttttggagcgtccactcttgaaggctcccctgtcatgccttttggaggatgatagttatactggttctgaatcccatgcccctgacattcctcttgtccaggtcctcgtccaagtcttggtggcaaatccaccttccaggctccatcttagcggcagcactggcaggctggtctcttgccctttggccctgtctctctcctggctttctgggccacacactctgtgggttctcctccctcttccaggccctctgccagctcctgctcctccctcgtcctcactcagctcctacacatccttcagggcccaagtggagctccctcagagaggagttgcccaaaacctctgcatctgctctggtccaaagtatgttcactctcttattctcttattgcatcctgttccttccctccaacaagcttccactggtcatttgctcatatttatatagatatactgtctgcttccctctttcagactaaactccatgatggagaccatgtctatgttgttcagatgctatagcgatgccttgcacagggcttggtgcatagtaggtgctcaataaatacttgttgaaggagtgaatggatggctgaatgcatgcttacagtgtactgtgtgatgctgagcgattctatatattatcttatttacgcctcatgtagatcttatcgagcaagtgttatgatcattttacaggtgaagaaactgaggctttgagaagttaagtgaattc

SEQ ID NO: 200013 - DNA, 1000 bp, Homo Sapiens
agatatgttctttaccataccccttacttaattctttctgacctctcaccaagggggttgttgacgtccagatttctactaaccatttgttccagtaaatagttttctaccattctcctcagaattcttttagcatttgcccattacccaactccaaagccaattctacatttttaggtatttgttacagcagcacactacttccaggtaccacaaatctatattagttttctaatgttactataacaaattaccactaatttagtggcttaaaacaacagagaatttcttctcttacagttctggaggttagaagtcctcctgggctaatgtcaaagcatgagcaagggctgtatcccttttgggggctctcacaaagaattcatttctttgacttttccagcgtctggaggccaccaagacctaggtcatgggcccttcccccgttttcaaaaccagcaacatggcatctctaaatctctctcctacgctgacatttccactcccctcttataaggactcttgtgattacctcgggcccgtgctgataatccaggacaatgttctcatctcaagatccttaatttaaatcacatctgtaaagtcccttttgacatgtatagcaccaaattcataggcttcaagaattaggacatggacatttgagggccattattctccctaccataccttttgatatcaataatgaccttattaaagcttttgcttgatagtcacctgtaatagtttgttagggctgctctaacaaaataccacacacaaactgagtggtctaaacaatagaaatttattgtctcatatcctagaggctagaagtctaagatcaaggtgtttactgggttgctttcttctgtgggttgagagagagattctgttccatgcctcttgcccagtttttggtgattttctggactctatgttatatcatggcttgtggaagcttaaccctgaactctgcttttatcttcacacagaattc

SEQ ID NO: 200014 - DNA, 1000 bp, Homo Sapiens
gaaactggcatcctttagggcatggtgcagtcctgatttatctagaaggactcatgggtcagtgggttcaaaacaaacagaacagagacatacagtcgtcccctcttatccttgggggtgtgtgttccaagacccccagcagatgcctgaaactgtggatagtactgaaccttatgtgtactgggttttaaaaaaatctgataaccaaggcagctcctaagtgactgatgggtcgagagtgtctacagtgtggatgcgccagataagggcggatgctggtcccaggagggagagagcagggcggtgagagattcatcatgctactcagaaggcactcaatccaaaacttacaaattgtttatttccgctattctccacttaatatttttgaaccacggttgaccacgggcagctgaaaccatgggaagtgaacaggggaaaagggaggacaactatagtctaataagtagacttacgaattccccatgcttttaatgaactctcccatgaggaatgccatgttagaaatgtggttggttctcctgcccacaagttgcttatagttaagtatgttagcatgaagaacaaaataattattataaaaagacagtagaagtgctctgtagaaatgttgaaaagctgccatttggacatctcctcgggattaactatgattagtattgcgagggaaagtagtagagaagtgactggctgaggggaaaactgaccgtgcagcccattggggtggtgattgtagcagaaataaatctctggagggatctagtggaagttgagcctggaaagataacatggcgcttgaccactgaaggccaagagcaccttactgaggaatgactacttactgaggagtcactgcaggtttcggagggaagaactgacttggtccaactttgctttacgaagatagctatgtgggtaatgtggcaagatctgggaggcagaaaggcagtgggacatgagggatttatgggtggaattc

SEQ ID NO: 200015 - DNA, 1000 bp, Homo Sapiens
aacatccagtatgtacagcttcaacggaggagagccagtcatgagcactaagagagagatgtgtggtttcatcaaagttgaaatagaccttctatttcactaactgtcttctaattcattccttcttcctggtgtggtagctgtggaatttagatgggattgatcctatcctatctccaaaaaagttcccaattagtgcaaatctgtcaggataatattatcccccttgactcaggagttggttttggtagtactggcttaattcaaataatgcaagtcattatcttgactatataattctattccaggctgttttaataaatataaaactcagggttttatttttccacaaataaagaaaaactatcttttcttccaggtgtaggtgagaaagcaatttgccctagatttggctgtaagctgtcttgaaattataaagaacacactcatggatgaaattgactcttggaggaagggcagaactcaaaggactgtatataaatggagctagaggccagaccaaactctatttgaaggcatcccattttactcctgatcttttcatatttgtattttgtcaatgacctgataaaacccctttattttttaagccagattttctagagttcagtaacttgcaatccagggccctcccatggatgcaaaatttagaagaaaagagtatctcaggaagaaaagggtgaccacagtgtcaaatgctgctgagattaatttaaaggaggaaagaaattagtgctcgaattttacaacatagatactgtcgatgacattgataaatggcatttctcctgtggcaaagtagttcaaaggaagcacacataattttacaagatactaggtattttgaatgcatatcactctaaatccatacttggaaattagaccttctctgaaggtaacacagtgtgcagatatgcaactctgcccaacatcaacaaacactcagactagcatatcaagcagtttagcacctgaattc

SEQ ID NO: 200016 - DNA, 1000 bp, Homo Sapiens
agctatctagttttgccactataactgaaggaatatggtggacaagagaagagaaacgaggtgttggtgatacatgagaaaagcaacagaggatgtcactatgcctatggaattaatgccctggtacttgatatcgggatcctgcttacttactatctttggtcttaaactagacctaataattgtgatgcacacttgctttcaaagtttgaaacatttgttttttggttgtttgctttttttttaagagggacaatttctcttgatttatgaggttttcaaaactgtagaaggaaaaaaactacatgtcatttggcctactgcccatgtgctcacatatgtgtattcaagaagatacttccaaaactgcacggaagatacctaaatcagtcataacttttctcctgttacaagaaagtgaaatatttcatcggttcaatgaaaagcaaatgcaacttaataaaccgtgtcctcatttcccaccaagaaaggtgcactcttgctgccatagaaaagctaaccctgggccgggcgcggctgttcacgcctgtaatcccagcactttgggaggccgaggcaggcagatcacctgaggtcaggagttcaacaccagcctggccaacatggtgaaacctcatctccacaaaaatacaaaaattagctgggcgtggtggcgtgtgcctgtaatcccagttactcgggagactgaggcggaagaatcgcttgaacccaggaggcggaggttacagtgagccgagatcacgccattgcactccagccggggcaacagagccagattccgtctcaaataaaaaaagaaaaaaaaaagaaaagctaaccctgtcccactaaacttgtgaaagatttaggatgtttgcttgtttgtttgttttgaaataaaaaagagtcttctagtaggtatcagacatatctgagtggcctagaaacaaggggggaggaggaagactgatgcaagtgcctaatgttgagtgttgaattc

SEQ ID NO: 200017 - DNA, 1000 bp, Homo Sapiens
ctgggctccactccgtctatgatctaggtacattcccctcagaaatgctggataccactcagtctgcgacctcagtgcaatctccttagagaagccgggcaccacttggggtaaattcggtgcattctcctcagagaagctgcgttccacttggtctgtgacctggttgcattctcctcagggaagccagccaacactcagcctgtgacttccgtgcggtctccttcagggaagtcagccaacactgggtctgtgattttggtgcattctcctcagggaagccatcaccacttggtctgtggactccatgcaatcgccttcgtggaagccgggcaccactcggtctgtgacctcggtaccatctcctcagggaagccagcacccattcggtctgtgaactccgtgcattctcctcagggaagccgtcaccacttggtctgtggacttcatgcaatctccttcaggaaagccggacaccacttggtgcattctcctcagagaagccgagcagcactcagtctgtgaaatccatgcagtctccttcaggaaagccggacaccacttggtctatgacctcggtgcaatctcctcagagaacctggcaccactcagtctgtgacttcagtgtattctcctcagtaaagccaggcaccactccgtgtgtgaattcggtgcgttcaactcagagaagccagcagcactcactctgtgacctcagtgccaactccttttcaggaaagccagataccactcggtctatgatctcagtgcgttttcatttatggaagccaggcaccactcagtctgtgacctcagtgcattctcctcagagaagctggtcaccactcggtgtgtgaattcagtgcattctcagggaagccgggtaccactcgctctgtgaactgcatgcactctccttcaggaaagccggacaccactttgtctgtgacctcagtgcaatctcctcagtaaagccggtcaccacttggagtgtgaattc

SEQ ID NO: 200018 - DNA, 1000 bp, Homo Sapiens
aaagatgtaatcagattagtaagtgttatgtcttaaaatgcaaacgctgtcaggaagttaagatattggctgtcactcaactctttgtgtaatcatctaagatgtgttctttctgtggcccatctcattcattccaaacatgaggactattagctccttaggagctgcaaaattcatttttcataaacccatatatatactaaacattgcatatagactgaataaatagtatgtctcacaaatatatgtgctgtcatttttcaaataaatatagtaatgggattaataaaatacaaatttttcaaaaatgaatagaatccaaaaagtttgggtcatcatatattttctcaattgataggttaataaaatacaaaattaatcatgaagggtatcaaaatttggaaagctctccaaattatctgagagggctgtatttcattctttctttggtcacataatattccatggcatagatgaactgcaatttatttagtcagcctttcctgtattggtgagctttctctgtatccaatgcttggccaatactaacaatggtacaataaacatcctctgacatatgatcttgcaaatagacacctttgtttctatgagttagattccagtaatagaattgcagaattaaagaggaattgtattttaggttaaaatagatgttgctatattgccttctggaaaggatgtaaggttttgcaatctcacaatgtacaaaagagccaggtgcagtagctcatgcttataaacccagctactcaggaggctgagccaggtcaggagtttgagaccagcttggacaacatagtgagaccccatctctaaataaacaaacaaacacactaatgaaaatgtacaagagaatccatttccccaattccccaccagtaatgggttttatagttatttttaattttgccaatccaatggatataaatgatattttgtcattattttcattttaatttttcttactacttatgaattc

SEQ ID NO: 200019 - DNA, 1000 bp, Homo Sapiens
tagacttctttacctagactataagtcgaggtaaactgtttccattacctattcctagaaataaaaaagtaaagcctaagactccagcctgaaaatagctccatggccctcttactcattctctagcctcactgtccccatttctcttaggatatggctttgtgcccgtttgctgtcttaaaatctgctcactttaaaccatttatctctctacagtctctgggatccagattggagatcctttccttaccctgaatgccacatttctaatcaggatagcctgatagtgcgttaacttttacagggccttgtcacactgagtcattgagcttgtgggcaacccaatcccttaagtctctcatatgatcttctccatcctatacttgtgagttgatttttttttttcagccctaagtgcatgacttgacatctatccttattaaatttcgaccttattaaagtcagctggtcattatatcctttgagatagtatcaggaatagactctatcatccttcatagtcactatcccttccaactcccagtcacaggcaaattccagtgtcaaatgattcagcaaatcccagcaatcatttctatctctgtcttccttactggattgtaaattttttgaggccaagaccatatcctattaattctccttaaaaactagttcctacttccattttgtcacatgtgacatagcggatacccaggaaatgttgccatgtgaatatatatttttttgatttaactctggggatgagggcttggtggtggtgggtatcacagtggtgaagaatatagagaagtctaggctgggtctcttgaggagcttccagtgaggaggaagagacaaaaaactggccagaccatgggtaatggatgtagtaaagagaaatttaaatactcctctgagggtactcagttgactggaggcttgagctaattcttcagatgcatttcgatgtcctccagaaaggcagacagtggaggaattc

SEQ ID NO: 200020 - DNA, 1000 bp, Homo Sapiens
gcacaatgaacaatggcctttctatctaccagtgatgaacaattggaatttgaaatttaaaaactagcctttacaatagcaccaaaatataaaatatttacaggatcttcatgcagaaaactacacaactctaatgaaagaaaccaacagagaaatctactatgcttatggcttgaagattcattttcttaagattcaaaatgtttgttcttcaaaagatactattaagagaataagaagaaaagctaaagcttgggataaatgagttttatttaaaatggacaaaattcttaaaacccaatgataagaaaacaggataatttaaatatcttaacagacatcttgccaaagaagatatacaggtggcaaacaagaatataaaaacatgctcaacattacgtgttgttaaagaattgcaaattaaaacaacaatgagatagcattatataccttctaaaatggctaaaattaaaacaaaaacccaaacctgccaacaccaattgctggcaaggatgcaacacagaacactcatttattgctgatggaaatgcaaaatgacacagccgtcactttggaagacaagcagataattattaagtaaacataatcttaccgtacagtgcagtagttgtgctattaggtatttacccaagtcatttgaaaacttagatccacacaaaaacctacacacaagttttttatttgtttgttttttaatttttctgttgttttgttttttgagacagggtctcactctgtcgccctggctggagtacagtggtacaatcactgctcactgcagccttgacttcctgggctcaggtgattctcccacctagcctcctgagtagctggaactccaggcatgcatcacgacacccagctagagttttttgtagagacagggtttcaccatgttcccaggctggtctcgaactcctgggctcaagtgatctgaccacctcggcctcccaaagtgctgggattaaggtgtgagcca

SEQ ID NO: 200021 - DNA, 1000 bp, Homo Sapiens
gttctgtttaaaatggtaggatggtatggatttcagaaagacttttttttttttttttttttttagatagagattcacttttcttgcccaggctggagtgcaatggcgcattcttggctcactgcaacctccgcctcccaggtttaagagattctcttgtctcagcctcccgagtagctgggattacaggcatgtgccaccacacccagctaatttttgtatttttagtagagatggggtttcaccatgtgggtcaggctggtcccaaactcctgacctcaggtgatctgcccgtctcggcctcccaaagtgctgggattacaggcgtgagccactgcacccggccagaagacttttttaaaataaaaaatatacttcaaataacatttgagtactttaaggagttagctttacttatttgggaatttcactttgtggcatgcttccttcccccaagaaactgatcaatgaggcatcactgtaacttgttgaggtcaagtactatttcccatacttttacccactcctgtttgaccacactgtaagaactcaataaatatgtgttggttgattaagcttccctctgggcattgggaaaaaaagggggtaaactcaattgttttatagttatcatgctgttgccacaatgcctgattattgcttttatcttcaaagcccaatgttccctgctgatttctgtattgtttgcttcttttcttctttgcagaaaatgaaatctatgcatggagtgcaatcttgctgagaacaatttgtttcctttctatattgtctctccatgccctgctcgctcccttcaggtactaatcataattatagtgcttgaagattcagtgaatttcatcattccttgttaccagctatgaaaatcattgatcgtttcaaggattggctatttgttgagaagacttattagggaagtcctaatgaattctgagagcatggtccctggacaagcagcattagaatcacttggaagctt

SEQ ID NO: 200022 - DNA, 1000 bp, Homo Sapiens
ggctcctgaaacgttatctcccgaggataagggaaaactactgtaaagttttcacccatacagaaacacatttttgtttcttttttgtttgtttgttttttggatggaatctcactctgttgcccaggctggagtgcagtcgcttgatctcggctcactgccacctccgcctcccgggttcaagtgattctcctgtctcagcctcccgagtatttgggattacaggcgcgcaccaccatacccagctaatttttgtattttcacttgagctgaggtttcaccatgttggccagacttgtctggaactcctgacctcaagtgatccacccgcctccacctcccaaaatgctgggattacaggcgtgagccactgtgcttttttaaaatgtaaaatgccatgtaaaaataggcaactaaaattttttatcatcaaacatgtccagctaagtttctgctctgagatccatgtcaaatgctactgcaaatgatactgtcagggagtatcaacttactttcaggactcttcactctcattttagaagaatacttctgctggataatgaagtttagttaacttttttccttcctttaatattttaagaatgttataccactgtcctctgtcttgctttgtttcaagactagaaatctgttacccttatctttgttcctttgtacatgtgttttttcccctgtggatacgctaatatttcctctacattaatatttcactgacttaaagcaatttgattatgatgtgccttggtatagttttcttcgtgtgtgtgtgtgtgtgtgtgtgtgtgcacgcacacgcatgcatgcccacaattggagcttgcagtgcttcttagacctatatagttttcactaaatttggaaaatttttagctatgatttcatcaaatattttttctgctccctctcctattactctcactagggaattattcccactagggacttcaattacacaaatattaggttaatttcaaagctt

SEQ ID NO: 200023 - DNA, 1000 bp, Homo Sapiens
tttagtagagatggggtttctccatgttggtcaggctggtctccaactcgcaacctcaggtgattcgcctgcctcagcctcccaaagtgctgggattaacaggtgtgagccaccgcgcccagcctcccatgggaatatttttcttgaggaaactgttaacgaataaactttacccaccaatgtatggcaaagggaacttcagcaaagggacaagcaggagcattgagtgtatataactgcaaaactaagacttaaacaaacccaggtttgggggagaaaaaacagaacgtaaatgttatctactcgacaatatagaaatgatgcaatagaaaatttaggaggacaaagattatggaagaagtgaagtagggtgagtttttgctggctgtttcatctataacaactgagagttaaaagatattacttaaatcacatttaattaacagtgaaagaatattaagaaaaacaacattgttggctaaaatcagataataggtcagtcacggtggctcacatctgtaatcccagcactttgagaggctgaggcaggaggatcacttgaggctagctacttgggaggctgaggtgagaggatcacttgagcccaggatttcaaggctgcagtgagctaatgattgtgcactgcactttatttagcctaggtgacacagtgagactccatgtcaaaaaataaaaataaaaggccaggtgcggtggctcatgcttataatcccagcactttgggaggctgaggtaggcagatcacctgaggttgggagttcgagaccagcctgaccaacatggagaaaccccatctccaccaacaataaaaaattaggcatggtggcgcatgcctgtaaccccagctactcaggaggctgaggcaggagaatcgcttgaatccaaaagttgaggttgtggtgagctgagatagcttcattgcactccagcctgggcaacaagagtgaaactctgtctcaaaaaaaaaaaaaaagaattc

SEQ ID NO: 200024 - DNA, 1000 bp, Homo Sapiens
gatgtgagatggccagtgaaaaattaccacctgtagaaaggctaaaaaccttctaagacagaaattttaaagttggtcacattgtaagaatatcataccccaaactcatgctaagacatacatcccacctaatcttaagcaggcaaatggcttgagtgggagttttgcttgttagttagtttatacatttactttatgtaaatcatagaacaaggataaatttcaggcctgagtcaacagagacagtaacctgagcagcctgttcgggcaggtgagataatacctaacctgaagcaaattatcggatgcagaggcttagagcgagtgacttgtattctttactgaagaatataagacctgggggcttcacttaaacgccaaagagggctgcggactaccaaagggtctgaaatgtagggtcagtctcagcctacccacctctgtggtggcagggagatcccagctgataatcagtctacattagctttctaaaaatttctcatagccaccaaatgctaatgggcctacatgtgtatttgctacatatcgaaacacaacacatcatttgatatttaactacgaggcaccagagtgggatcagaatttgatggttaatgggcaaaattcaacagatttgatggtgactaaggagatgctccaagcagacctatatagagttctgtcagtcaatgtgataattataattctatgtattcatattgtaattctacaaatccacttattatagattcaaagaaatatggcagtattaacttaattatcatgcaaaaagatattaaaaagaaatactgagcgttaataaaattttctctgaagagaagacaataagaaatgttgtttggcttcttttcttccactctgtatggatgtttttcataatatttttattttgtactagaaaaaaatcattttaattgttcatgaacatcttatttatttggatgtagttggagataaagtgcatacatacaatagtttt

SEQ ID NO: 200025 - DNA, 1000 bp, Homo Sapiens
ttttaattattttaattgggtaaatttgaattaaacagtcttgacttcatttgtcctcattaatatcacaaatgctattgttctgaattaagcatagcaaaattcttctttgaattaatattattctaaaataccatatgacactttattttttggaagcttagattttaaatatcttaattgttgcattttttatttttaagagaagttcatctatcaattatatttagtaattgatgagtctgtctttaaaattttgaactataatacatatgtataatataaatatccattacctgtgattatttatccacaaatgatcttatattgtacttatgacataaatagtaagaattctatagctagaagggacctcacagaatatcatctagcccattcctgtggcatacactggtggatgccttcccagcagtcacccttcttgctgattttgttcaggttttaagcacccacattttctgtgggttcctccccaatcccagtgactgaaaattaaacaatctatgccagagattctcattaaaggtggttttgacccatttggggcatttaggagatttgtgggcaggttttaaaatgccacaataaggggagaggtacagtttagattgatttggtttgtcaaagaatgctggttgtcctacaagaagtgagatgtgagacattcccacgcaatgaataatttctcacatacctcacaacttgtgagtgtcctgccaaagctttagtgaaaaatctgcctataatgttctgagtccagaatctaaaccaaagactttttgtataattttaacatacactaacttttctgaaaatcgaattctgatataatttgaaagatttaaatctccttgggctctgaacctctggattgataataaaactatttttcctggaaagttttggcatttcatctctaaataaaaacttgaaatagaagtactatctaattttccccatattcacttagaaagggatc

SEQ ID NO: 200026 - DNA, 1000 bp, Homo Sapiens
ttttttttagactgagtctcactctgccgccaggctggagtgcagtggcacaatcttggctcactgcaacttccacctccagggttcaagccattgtcctgcctcagcctcccaaatagctgggactacaggtgcgtgacaccatgcccagttaatttttgtatttttagtagagaccaggtttcaccatgttggccaggatggtcttgatctcttgacctcgtgatctgctcgccttggcttcccaaagtgctgagattacaggcatgagccactgcgcccagaccaaaactcagattcttttacttatgacatcatcaaaagcacatcagagttctactcctaataacaaatgtttaatttttaatgaaatgtaggtgttagacctttactaagtacgggcaggaatttctgacagaagcggattttagaaaccctggttcttatgtgtcctccctctctctcttgctctgtctgttcattcattatttatttatttatttttgagacagggtctcactctgtcaaccaggctggagtgcaatggcatgatcacagctcactgtagcctcgacctcccaggctcaggtgatcctcctgccacagcctcctgagcagctgggaccacaagggtgcaccacacccagctagttactttattttttgtagagactgggtttcaccatgctgcccaggctggtctcaaactcctggattcaagcaatctgcatgtctcaagcaatctgccttccgaagtgctgggattataggcatagccactgcaccccacccatttgttctttctttctctctagtcttcttttatttctcccaatcttaagagagagctttagctcctaggccttcatccagccatccatatctctggtatggacaaatgcagttttcaccatcatatatcaaatatgtcctcgaagccaaccctttccccgacccgcacatccagcctggtgccttaatctcaccctttgtggaattc

SEQ ID NO: 200027 - DNA, 1000 bp, Homo Sapiens
aaacttggcccaaataaactctctacttgtattacttttgcctcatcttcttccttagaatgtgttacaggagtctccatgagggaatctctcctctgcttttactccacttgctgtaaccccccaaaatgcagagacaggtggatcccatctaaaatctgcacacctggaatttacaagatagggtcagattttggattgaggatgtacagaaaacccatggggcacatttgtttcatcatgagagaacaacgtagaaatcttagtgctcttctttcagggtgaggtccttcaaattttccagataatgtttagtgacttgctatagttgtgtgatatgttcctggtgtaaacagaatctggtagcagaatctgtaagttaaacaagcaccttagcagaaggatgttagggccacacaatatccagagctatgaccacaattaacccacctgtaaactgtgtttctgtagtagagtattcttgttctttttcttacccaagagtgagctgatcacaaacaagtgatatcacacctggatccagggtctgcagctccaccagggcaggtttattctttattccgatcatgcagagttagcttgagtctctcctgcctggataaccacgggggcttcagtccaggctcactggggaccttctcaccagcacctgggagtctttgagacatttggggatgtgctgtgcagattggcacagctgtgtcaggctgacagcagggtctaattctgttcccatttcagaggaaggggaatgaatcatccaggattttttcctcccctcacagaaggaatctccttggttggtacccagatgggtgtttctccagttttctgggtaatgaacgaggagctctggagacagatcgataaatcaattgcttccattaaaaatgagcattagaaaaaacagataaggcagtcgctatctctacaatcctggcagtttcagcctagagcacatggataaatggttgaattc

SEQ ID NO: 200028 - DNA, 1000 bp, Homo Sapiens
tatcataggatgccagaagcccacaagaagataagaacactccagtgaggacctctgaagagaaacagcaaaagcatctccatcctgcactgagttgtgggttattattgtcatggaggtgaataaaggatgatttaggagatggtactataatgtggaggaaacatccagcccatttatggttcaggaaaaaggtttactcctttgagcttggttgggttaaaacattgtattgcctactctcataatgctggaagtataaagagatcaataaagtttcctcagattctgtaagtcagacttggctctattttcttaacatttccagggaagtcaagatcacaaaaagtggttgattctggtggtgggaatattgatattgattctataatattactgtaaattctttctccgagattaaatatattgtgcacaagtactctgaccacatctctagattcattttatgtaacctgctcatggactgatctttgaatagccacctcttagaatctgcaactttggacatgtctggaagactcatttcctgtctaggacctggcagcatgtcctgggaaaatggaattagaagacctatttaggaggatacacaaacacgtgccccctcccccctgcaaacaactagtgaattatctgagaatcactggaatctgcttcttctgcactgtagggacagcagccttagttccaaagttgggatcctgctgggaaatctttaaaatcaccatctatagagcatacccaataaaatctatattacacttatacaaaaactaattaccaagggttggggcctaacacattttgacactttctcttgaaagaaatgaatatggagatcacaacttttaaatgttagttatatttttggagtaattataggtcattgatttatcacaatagttttttagtgagtaaaacacttcaataataattgatattttaaatctgacttctgggtctttagaatactgaattc

SEQ ID NO: 200029 - DNA, 1000 bp, Homo Sapiens
atatcctaaaggatgttgtgctgattatcatgtgcatattaaaattaaatataaatttaaaagctcttatacagtcaattatatatgctatctattgattgttcctatgtgtatgattgcattagatactgacataatatatgttgatcaagaaaaatctttataatctaagatatgaactaaaagaataatatgaacagttatttctaaaatctaagacaatagcataggatgctttataaattcagcctttaggagaaaagcagtagtttaactatttgggagtgattgtttttatgattaggaaattagaatagaaaattatgaaaaatgaaatatattacaatttagtgattatgttatgatctagcaaaattagggaagaagattaagtataaaagagaagaaagtgtggagccagcacacagacagaaaaacacacacacctacacacacatgaaaacacacaatgtattgtacacagtgcaagcgctggctacaaagatgaataacatattggtctgtcgttttactcattaaacaactgttatatgtaatacatcaacaaatatgatttcttaattctcttgaaaaatagtttcaaatagttttaaaaccactttttaatttttttatttatttacttttatttatttatttatttatttattattatactttaagttttagggtacatgtgcacaatgtgcaggttagttacctatgtatacatgtgccatgctggttgcgctgaacccactaacttgtcatctagcattacgtatatctcccaatgctatccctcccccttccccctaccccacaccagtccccagagtgtgatgttcccctttctgtgtccatgtgttctcattgttcaatgcccacctatgagtgagaatatgcggtgtttggttttctgttcttgcgatagtttactgagaatgatgatttccaatttcatccatgtccctacaaaggacgttaactcatcgttttt

SEQ ID NO: 200030 - DNA, 1000 bp, Homo Sapiens
aaaaatgttactgttaattgacaaattgtaattgtttatggtgtacaaagtaatgctatatgtatatggtttgaatgattaaatcaagctaattaacatattcatcgcctcaaatacctaacaatttttgtgccaagaacgtttgaaaagtactcttagcaattttgaaatgtacaatagattattatcaattatagtcactatggaatgtaatagatctcaaaaaatgatttcctcctgtttatctgactgtaccctttgaccaacatctccctattcccctcacttcttggcctctggaaaccttcattctactctgtttctgagtttgattgttttagatgccccatataagtgagatggatcatgtagtatttgtccttcgtaccttgtttatttcatgtaacataatgtcctccaggttcttatacgttgttacaaatgacaggctttccttatttttttaaggctgaatactattccattatgtatacacagcatattttctttatctattactctgctgatagacacttaagttgatgctaagctctatattagcatcaggactggggttaaaccaatcagtacaagataaatggagccagggtgtttgtcagagaaaaacaagaggcattggaacaattcaagctgcctcaccttatatgatcagagctacttagaagattcatgtgttctaatatacagtgcttattctggaccagacactattctaagtacttaactaattttaatgaactaaatcctcctaacagtcctacgaggtggaactattatttgctccaattcaggcataataaaatgaaaactcagagaggtttaatgacccataacccagctataatagcaaagtggcagagtcaggtcttaaatttgggcagtctggctctggagtctgtaatctaaacctctttattatgatgtctccttcttgcactgttgcatcttttcactccacctccactctgaagttatcaat

SEQ ID NO: 200031 - DNA, 1000 bp, Homo Sapiens
gtagaacacatctggggctgctttgttctgctggctttggttcctgtctgtgggactggagtcacaaaagaggacgggatcagaaaaccatggcttaaattatctatgatgccaggattggatttaagcaagttattttatcgaaaacacagcatatgtgaaaatggattatttacatttttataaacaggatgcttaaatgaatgataaaagtcacacttacggtgtatgttcatccgtttttacactgctgataaagacatactcaagactgggtaatttataaagagaaagaaggcttaatggactcacagtgccacacggctgaggaggcctcacaattatggcaaaaggcaaaaggcacatctgacatggcagcagacaaaagaaagaataagaaccaagccaaaggggtttccccttataaaaccatcagatctggtgagacttactcactaccatgagaacagtatgggggaaactgcccccgtgattcaattatctcccacagggtccctcccacaacaggtgggaattatgggagctgcaattcaagacgagatttgtgtggagacacagccaaaccatatcaccatgtatcaatcactgtaatatgtcctttatagatatcatcacatttaatctctgtaattgctttattttcaggagagaaaactaaggtttagagacgttcagcaatttgtccacagcagggccaaaagctagaataccattatgagtaccactcatgctcttatctcctttgtggtattttcttattttaagaatgtttaaaattcatataattcaaatagagaacctgataataaagacagaaaattaaatgtacattatatattactatacatgaaatgctttcgtaagtgttaactcttttgatccttaccaaaaaccctacaaaaccctatataagttgctatttgtattaccttatttttacagacaagaaaagtaaagtttagggaaatgatgtgaattc

SEQ ID NO: 200032 - DNA, 1000 bp, Homo Sapiens
ccccctacctcccggacggggcagctggccggacgggggctgccccccacctccctcccggatggggtggctggccgggcgggggctgccccccacctcccggactgggcagctgccgggcggagacgctcctcacttccagacggggcggctgccgggcggaggggctcctcacttcccagacggggtggctgccgggcggaggggctcctcacttctcagatggagtggcccgttagagacgctcctcacctcccagacggggtcgcggccgggcagaggcgctcctcacatcccagacggggcggcagggcagaggcactccccacatctcagatgatgggcagccgggcagagacactcctcacttcctagaggggatggcggccgggaagagacgctcctcacttcccagactgggcagccgggcagaggggctcctcacatcccagacgatgggcggccaggcagagacgctcctcacttcccagacggggtggcggccgggcagaggctgcgatctcggcactttgggaggccaaggcaggcggctgggaggtggaggttgatagcgagccgagatcaagccactgcactccagcctgggcaacattgagcactgagtgaacgagactccatctgcaatcccagcacctcaggaggcggaggctggcagatcactcgcggttaggagctggagaccagcccggccaacacagcgaaaccccatctccaccaaaaaaatacgaaaaccagtcaggcgtggcggcgcgcgcctgcaatcgcaggcactcggcaggctgaggcaggagaatcaggcacggaggttgcagtgagcagagatggcggcagtacagtccagcttcggctcggcatcagagggagaccgtggaaagagagggagagggagaccgtggggagagggagagggagagggagaccgtggggagagggggagggagaaggagagggagagggagagggagacggagagggagag

SEQ ID NO: 200033 - DNA, 1000 bp, Homo Sapiens
tctttctataaaaattaccctggtctgggaaaagtaggtaaaattgaatttttaaaaactgtgggatataacatctaaaatcgggaaatggccttaggtgctgtttttacccgctattttcatgttttgacttctttattttaattttttatttcccccaccatttctcaagtcttatttttaatctggtttctttatgtagacacatttttttccctttacagtttgaatttgtttttctctgcatttttaaaggttctataattcttcagcttccttatcatgactgtttcatgttttctttgttgtagggttttcgtacatgtatcttttggatattattttttcccagattttgagtattctaaatttgattctttggtattggtttaatcttggacttaacagaaaacttgaaaaaattagaagctagtctttctccacttgagataggaattataacagaattatatttgaagatttaagatgctgaggagaaaattgaagtttaaaaactggatggccctttcatgccagccagactctttggactgtgaaataaatctgttttagggtagaagcactggatatgtgctttctttttgtttcttgttttttctgtacataaatggttcctgctaaacatggtatgatatgacactggaaaattattttactatctaatgtgctctaaggtgatgatattctgagaaaattttttaaaaatctaaagcttgtctttcagagttctaggaatacaaagatatagttctacagtttttctgaacttttgttaacataatagagtttttctttattatgaaacaaaaaataatatcacatttgttataatataaataaccttttctttttctaaaaaaaatttacaggtagaaaaaataattggccacctcttcctagcaattttcctgtcggaccttgtttctatcaggatttttctgtagacattcctgtagaattccaaaagacagtaaagctt

SEQ ID NO: 200034 - DNA, 1000 bp, Homo Sapiens
ggtgtgagccaccgcgcctggcctaaaacattatatgtaatgatagcagaatacatattcttttcaagtgtatattaccaaatagaccatgttctgggccataaaacaagtctcagctgggtgcggtggctcacgcctgtgatcccaacactttgggagggtgaggcgggtggatcacttgaggctaggagttcaagaccagcctggccagcatgatgaaaccccatctctactaaaaatacgaaaattaggccgggcgcggtggctcacgcctataatcccagcactttgggaggccaaggtgggcggatcacgaggtcaggaaatcgagaccatcctggctaacatggtgaaaccccgtctctactgaaaatatagaaaattagccgggtggggtggcaggaacctgtagtctcagctactcgggaggccgaggcaggagaatggcatgaacccgggaggtggagcttgcagtgagccgatatcgcaccactgccctccagcctgggtgacagagcgagacttcgtctcaaaaaaaaaaaaaaaaaattagctgggtgagatggcacccacctgtaatcccagctacttgggagactgaagcaagagaattggctgaacctgggaggtagagattgcagtgagccgagatcacgccactgaattccagcctgggtgacagagtgagacggtgtcttaaaaaaaaagtctccattgtaaaaggattcaggtcatacaaagtatgtcttctgactgcaatggaattagaaatcacaaacagaaaggtatctggaaaaatctgcaactacttttaaactaacacatttgcaagtaacctatgggtcagagaagaaatagaaagtattttgagctgagtggaagtaaaacacatgaaaaatcggtgagatgcagctaaagaagtacttagagggaaattgatggaatgaaatacctatattattagaaaagaagaaaagtttcaaatcggtgatctaagctt

SEQ ID NO: 200035 - DNA, 1000 bp, Homo Sapiens
gctgagatgatggggttttctaaatataaaatcatgtcatctgcaaacagagacaacttgacttcctctcttcctatttgaataccctttatttctttctctttcctgattgctctggccagaacttccaatactatgttgaataggagtggtgagagagggcattcttgtcttgtatcagttttcaaagggaatgcttccaccttttgcccattcaatatagtattggctgtgggtttatcataaatagctcttattattttgagatatattccatcaatacctagttaattgagagtttttaacatgaagggattttgaatttttttttttttttttttttgagacaggatcttgctctgtcgcccaggctggagtgcagtggtgcgatctcggctcactgcaagctccacctcccaggttcacgccattctcctgcctcagcctcccgagtagctgggactacaggtgcctgccaccacacccggctaatttttttgtatttttagtagagatgaggtttcactgtgttagccaggatggtcttgatctcctgacctcatgatctgcccacctcagcctcctaaagtgctgggattacaggagtgagggattttgaattttatcagagaacttttctgcatctattgagataatgtggtttgtttttggttctgtttatgtgatcaattacatttattgatttgcatatgttgaaccagccttgcatcccagggatgaagccaacttgatcttggtagataagtttttggatgtgctgctggatttggttttccagtattttattgaggattttcacatcaacattcatcagggatattggcctgaagtattttgtgtgtgtgtttcttcccagttttagtatcagggtgatgctggctttataaaattagttagagaggagtccctccttttcaattgtttggaatagtttcagaaagaatggtaccagctcctctttgtatttctggtagaattc

SEQ ID NO: 200036 - DNA, 1000 bp, Homo Sapiens
gtttatatcccaatcattgtccctcccccgtgctctcaggtgatatatatgatttgactatttctttatctcctgcttttagtgttaatttgtattttagtgagccctgtttactacctgattcgttgggtgtgagctgagttacaagccccgtgtttaaaggccggtgcagtcaccttccccagctaggcttaggaattcttagtcggcctaggaagtccagctagtcctgtctctcagtaccttcctctcggggaggctttcaccaccctctgggctgtgatcccactgccccattctgactcacatctggacttccctgtccctatctaatcagtcacagttagctgcctttgcctttttattctccacactgcttttgctcaacagcttctgcatttgaaggcatgttctgatccgttctttattaaggatttattatttctgcggaatagcttgatttgccctgtacccttctcctcccttactctgtacaagggtaaagtttcaaacaccccatcccccatatgaggccagacaaatcttcccataggaaggttagcatttggtttttaccctgcagtccccagttccaccacagagctccatccctatgttggtaccttcctgcagttcatttcagtgtgtggtcccttgagcagcatctgtggctagccagttctgttcttccaggtttgtccctgatatctgattcctaaagcagagatcagtggggaggccagaacctcccaaacatcaaaagagaaagagaaaaccatatagctgtgttcctggattaaaggtatgccctagaaagccatgtgctggttctaccactcctttccctcaggtacagtgtctccaatgtctgttgcagaattagaataaatctctacatttgaaagtctacctggaaatggttggccatgatttctgggctcttgtctggtgcttcccactgcaagcacatctgaggtcccatcctcatctgagtgaattc

SEQ ID NO: 200037 - DNA, 1000 bp, Homo Sapiens
tagtcttccttgaggtcaatttgtcagtatattttaaactagaagtgtgtgtactctgacctgacaatgttggccaagaaattcacctggacgagtatgcaaaaattcaggcgttagaatgttcattgcagcactgcttataacagtgagaaacaaaacaatctatccaacaacaggcggctggcagtctcttaaataaattactgtgcatctgtgctatgcaaccatttaaaaactggctcatatctatgttcattaaagtatatgaggtctaccaacattgcacgaggagaaaagcaggatgaagaataacacgattaatcttgtttatgtacttgtgcacatgtatgcataagaatgctcaccaaactgttaatgctagtaatctgtgggtggcggtattcaggagtttttacttttttatattgtttgaatttttaaaaataatatatattttttgtaacctgaaaaaattttttaaataagtaagtaaaacaagtccgggtgcggtggctcacgcctgtaatcccagcactttgggacgccgaggcaggcagatcacgaggtcaggagatcgagaccatcctggctaacatggtgaaacccctgtctctactaaaaatacaaaaaattagctgggtgtggtggcgggcacctgtagtcccggctactcgggaggctgaggcaggagaatggcgtgaacctgggaggcggagcttgcagtgagctgagatcgcgccactgccctccaggttgggcgacagagcgagactccgtctcaaaaaaaaaaaaaaaaaaaagaaaaagtaaaataaagcatgcattagagaaatttaaaccaactcaagccacagactcaaaagaaggaagctcaggagtttaagatcagcctagacaaggtggtaagaccccacctctacaaacaattttaaaaactgccaagcatggtggcgcacgcctatggtcccagctacttggagggctgaggtgggagaatcac

SEQ ID NO: 200038 - DNA, 1000 bp, Homo Sapiens
gaccaagaagtatgccagattcctttctgtattcctgaacctagtatagtaccttatatatggtaagccctcagctagtatgtgtagatacgaattagaaactaagagttgcaaatttcagtagggacatgactaaaaattactgaatgactgtgaatagttcatgcctccttaactctgttcctcctcttcagaatgtggctgagaccagcttcctggctctgaagatcagctattattgacacccattaaaataacttaaacacaagttagaattattcctagtcagttgttcaaaacagtggggtttatgttcatttataagtatagtgtgagatttttccaagtgtgacttccaaactgctttttatctcttgcagatctttgtagaatttgatggctgtaactggaagcaacactcctgggtaaaagttcatgctgaggaagttatcgtgcttctgctggaagggtctcttgtatgggcgccccgtgaggacccagtccttctccagggcattcgagtctccattgcacaatggccagccctggtgagtggcttttactgggtgggaacatgtctgagctttactcctataatataactatgacatgttagggacagagtatgtgtaagaactacatactttgtccttaacgtacatttattctgaagttactaatgcaaaaattaggagcagtcttttctcctttgtcctccaaaatgttttatattaggtgatatttgatatgaaagaatttttttggccagacgcggtggctcacgccttgtaatcccagcactttgggaggctgaagcaggaagatcccttaagctcaggagtttgagatcaccctgggtaacatgccaaaaccccatctctacaaaaaatacaaaaattagctaggtctggtggcacatgtctgtggtcccacctacttgtggggctgaggtgggaggatggcttgagcccaggaggttgaggctacagtgagccgtgat

SEQ ID NO: 200039 - DNA, 1000 bp, Homo Sapiens
tctttaaataagctttctacctatatttcttcctcagttccctctttaagtccaataatctgaatatttgctggtttgatgttgtcttatagatcccctaagctttctttattccttttcattatgttttctttctctcttccatgtattttcaaatagtctgtctttgagctcactgattctttcctatgtttgatcagttctgctgttgatgttctctattgaaattttcatagtatttttcaactccaggatttcactatttttttcttttttgagatggagtcttgctctgttgcccaggctggaatccaatggcatgatcttggttcattgcaacctgcacctcctgagttgaagcgattctcctgcctctgccgcctgagtagctgggattataggtgtgcgccaccatgcctggctaatattcatgtatttagtagagacagagtttcaccatgttatccacgttggtcttgaactcctgaccgcaagtgatccaccagccttggcctcccaaagtgctgggatttcaggcatgagccactgtgcctggctgatttcacatttaaaaaaatttttgttttaatctttctgttaaatttgctggtacatttctgaattaatcctatgtgttttcctaaagtttgttgagctatttagaacagctatttggaattcttttttttttttttttttttgagacaagagtctcacctctgtcacccaggctggagtgcatggagtatagtggggctatctcggctcactgcagcccccgcctcctgggttcaagtgattcttctgcctcagcctcccgagtagctgggactacagacgtgcaccaccacacccggccaatttttgtatttttagtagagatggggtttcaccatgttggctaggatggtctcgatctcctgacctcgtgatctgcccacctcggcctcccaaagtactggggttacaggtgtgagccactgcgcccagcctggaattc

SEQ ID NO: 200040 - DNA, 1000 bp, Homo Sapiens
aaaaatcagccaggattggtggcacgggcttgtactctcagctacttggaaggctgaggcaggagaatcgcttgaacctgggaggcagaggttgcagtgaactgagattgcaccgctggactcgagcctgagtgacaaaacaagattctgtctcaaaaaaaaaaaaaagtacatttgtgtactcagatctatcattattttatggcttctaatgttggtaattatgctgaggaagtctttctgaattctaaaattattaaactaagtatatgttcttttaactttttttatagttaaactttcaacttgttttgattgtattttgatacaaaatctgaaatgtggatctaactttattttcccaatggactgtagaatacattttgtccagatgaatttttccttctattctgcatttttatcaaagtacttcatagatgtggtttactaaatatagttcataagggtaaaagtcgcctgtcccattcttttccattttctgtttcaactgtgaaagcagttgtggggacaaaataaagaatttagaaaatttgcctgtcatataccatttctgagttcctgaagatatactccagcaaagtaagagtgaaacataacaggatgaagatgtgaaatatgagaaacagtgagtttaaccaaggaatccaactgttgttttacagatctaaaaagcaattgggcaattggtctcagttggaataggtaatcagtgtctcatttcccatttcccagaggtaatacattttaagtactccaacagtctcatctttttaagaaaatagaccattttttagagcagttttaggttcacagcaaaattgagcagaaatttcagagctcacgtatcctctgcccctatacttgtgcaacctctcccctactatcaacatcttgcatgagagaggtatatttatgacaactgatgaacctacatttgagagacaggactagttggatttcctaggctgactaagaattc

SEQ ID NO: 200041 - DNA, 1000 bp, Homo Sapiens
acgcgcctgtagtcccaagtacttaggagactgaggcaggagaatcgcttgaacctgggaggcggagattgcagcgagcagagatcgcgccactgcactccagacagagcgaaactgcctctccagaaaaaaaaaaaaaaaaaaggctctgccttctctctcttcaactgtctaaaccccaacgctgcagaaagcggtgaccccaagtcccagaatgatgatgctactgcagggtaacaaacaggttttctgtcaggcctgactgtgaaccagcagcaacttcaggctgacagtttctcacataagcacgtagggcttgttaaatttcacttccagccccaaaccaggaagcgctgtttaagatgagcccaagaagaaagcaatctagcttcagaaacaaaactcgccagactctagaaagactataagggtttaaatttgggactgttctccgttttgcattggaacctatgttctcctccccataaaagtttattaaaattcgaaactgccaaaaaacaaagtaaaatcatataaaacatacacaggcgcgtgcacgcacgcacacacacacacagaccaatttgtttttgtgatccgcttccttatctagactgtccaggcttgggccagatttgagttggtaaactctcgcagctaaagcggagcagaatgtagaaagagtatctacttctccggattgttgggaggagggtcgaagcgtagactggccacgcccgggtcccgctctctcgttgcacaactgcaagctagatctgggcatcgaaggaggaacgctgcaacctccaaccccttctttctgaccaaccgggaccagagcagtgctggggccggggcgggtcaccgggtgaggaccggggcggagggtgttaagttacagggcaggagcccgggtccctccgcgggcaggaaggggagggcccatcggggctaggggaaccccggcgcagacctggggtggggtcggaaaagctgtttc

SEQ ID NO: 200042 - DNA, 1000 bp, Homo Sapiens
gccttgggatgctgttaatctatgacatttcccccaaccccgtgctctctgaaacatgtgctgtgtccactaagggttaaatggattaagggcggtgcaagatgtgctttgttaaacagatgcttgaaggcagcatgctcgttaagagtcatcaccactccctaatctcaagtacccagggacacaaacactgcagaaggcggcagggccctctgcctaggaaaaccagagacctttgttcacatgtttatctgctgaccttccctccactattgtcctatgaccctgccaaatccccctctccgagaaacacccaagaatgatcaataaatacttaaaaaaaaaaaaaaagaataaaaagaaaaagggatatcatttaaacacagtatgtaaagaataattattgaatctgtactggtctttaacttttacactttgatctttaattctgttattgtgattgagtccaaagaaaaatagtagaagtaaaataaaaagaacaccaaaaatgctaaaaaaaaaaaaaataataataataataaactgactgggtgtggtggtgtgcacctgtggtcacatttactcgggaggctgaggcaggaggatcaactgagcctgggaggcagcagttgcagtgagccatgatcatgccactgccttcagcctggtcaacagagcaagaccctgtctcaaataaataaaaattaaaagtaattatcagagaaaataagagaatctaattctaaaaagtcttatgttagcctttttcctttcttcttgataaaccaagccattgatataagctattttaaattcttggtcttgttggcaataccaaccaaagggctagtctaccattagacaaaggatcccattttaagtatgtaacacaatcatagcattaattttatttagttttcagagacaggatctcattctgtcacccaggctggagtgcagtggtacaagtacaaccatagctcacagcagccttgaattc

SEQ ID NO: 200043 - DNA, 1000 bp, Homo Sapiens
aaagttaatgtagttactatttttgattggttcattgtttagcctttctacttaggataagagttatttatacaccacagttacagtgttataatattccaagtacatttctgcgtacttactattaccagtgagttttgtatattcaggtaatttcatattgctcattaattaccttttctttttttgattgaagtactccctttagcatttcctgtaggacaggtctggtgttgatgaaattcctcagcttttgtttttttgggaaagtccttatatctccttcatgtttgaaggatatttttgccagatacactattctaaggtaaaagagtttttgccttcaacatgataaatatgtcatgccactctctcctggcctgtaaggtttccatggaaaactctgctgccagacattttggaactccattgtaggttatttgttccttttctcttgctgcttttaggatcatttctttatgtttgacctttggaagttttattattaaatgctttgaggtagtcttctttggattaaatctgcttggtgttctataaccttcttgtacttggatattgatatctttctctaggtttgggaagttctctgttatctctttcaacaaactttcttcccctatctctttctctacctcttcttcaaggctaataactcgtagatttgcccctttgagaccattttctagatcctataaggcatgctttgttgttttttattctttttatttttgtctgctttgactgtgtcttttcaaatggcttgtcttcaagctcactaattcttttttctgctggatcagttctgctattaaaggactctccagtatgccaattgaattttttttggctccaaaatttctgcttgattctttgaaattatttcaatctctttgttaaatttatctgatagaattcagaattcctgctctgtgctatcttgaatttcttcgagtttcctcaacatggctattttgaattc

SEQ ID NO: 200044 - DNA, 1000 bp, Homo Sapiens
ccaatagtatttatttgaagacttatttaatgatataagaatatgattgcactgtaggtgacaaaaggtaggaaatgaaattgtacgttgtctttgtattgctataaaggaatacctgaggctaggtaatttataaagaaaagacgtttatttggctcatggttctgcaagctatatacgacacatggtgccaccatctgcttctggtgaggactttaggctgtttaaactcgtggcagaaattgaagtggagcctgcatgagcagagatggtatggcaagagaagaggcaaaagagagaggggagggaggtgccaggctctttttaacaaacagctcttacaagggactaacagagcaagaactcactcattaccaccaggatggcaccaagccattcatgagggatctgcccccatgacccaaatacctctcactaagtcccacgtttaacattggggatcacatttcaacatgaggtttggagggtgaaatagctgaattattgcatatgtatagtacaatttcagttttagaaaaagactgggtagaaggtgtctaaatattatcttttagtttatcttaatatagatgatttttattttcctttataattttctaattttctaagtgttttgttcatacacacactcacactatatatactgaaaaatataataaccaaacgtttcaaggaaagtgacttgtgttttccactaatttcagcaaaaagagtgaatgacttgataatttttctcctactttttctaatcagaaaaatttcctgcccttgagagcttcaaagcactgcagaaagtttaacagcacatgcaatggaaagcatggattgaatttgattttaaattgataaatttaaaattcttatgtgttctgaagagtttgtcatgtctcatccgctatcgcttttttcattaccatactgaaagctgagggtatggaactcagaatgcatttggaagaataaaaggtgatatgaattc

SEQ ID NO: 200045 - DNA, 1000 bp, Homo Sapiens
agaagcatgggacctcctcccaggggttcctcaaagatgagagagtgagccaggtaaagagaaagctaagggtaggaggggagggaccttcctgacaaaaacaatagcaaatatgagtcggtaagtttgagaaagagaaggagggctggggtggctgagtacagcagggaaagggaagacatggagagggctgtggaggcccattttctttctttttttttattttttatatttttaagtactttatttcttctatacaaaccagccaacttcttcacactatgagaaacagataattagtctttgcctgtatacaggattcatgtaatacctttcaattaagagttagtgttctaaggaggaagctcacctatggaggaacttgtatgtatccatttttccattaatgaaagttcagcctctcattaagttttaaaattttgattgcctagaaacccactactaaaattagtgtaaaactgtgttagttattgtcagtattagtttagacttatttcatatagtacgtaagttttaactttttatctctgttatacagtctaattacttacatttcttttatttatttatttatttattttgcctgttgaaagcatctattttagaaaaatttttttcaacttttactttaagttctggggtacatgtgcaggatgtgcaggcttgttacataggtgaacgtgtgccgtcatggtttgctgcacagatcatcccatcacctagatattaagcccaggatcccttagctattcttcttggtgctacctcataacccctcaacccctgacaggccccagtgtgtgttgttttcctccatgtgtccatgtgttctcatcattcaattcccacttgtaagtgagaacatgcagtgtttggttttctgttcctgtgtttgtttgccgaggataatggcttccaactccatccgtgtccctgcaaaagacatgatttcatttgtttttatggctgcatagaattc

SEQ ID NO: 200046 - DNA, 1000 bp, Homo Sapiens
tttcattgtttcttttatgtttattaaattttaaagataaagctctaaaagtgttatgctaccagctggcgagaattgtaggagatgcagatgtaaaggtagtttataggaggtagagagggtacaaatatgtcataagagagaggtagcaagaggctaccttttatggctgaaaagtgggaaatggagactcatttaagaatgttgaaatcatatatttttagtcccaaataaaagaagttttcaccaaaaaaataaagaagaaagtaatcggctagaaatgtgagaccttttttttcatttatgtatctacttctgtttgtttataaagagagagtagggttcaattaccatttctagagtaaaccaagttccttgtatttccttcttggctaatgctcactacaagtctaagggtctaaaccttggactgaggttcctaatccagtatttgcttctctggcttacagaaaccaccatctccatatttgctaagaagcagttccctgaagatgattttccctggaaaattccacagaatattggtacatctagtctttatatttggtagaaagattcagcaattttacttatctgaaaataaaattgctttctgccatttttatgtgaaaggaaagtatttaatatttatctcagtcttggagacagtttcagatcctggagatgcacaaattttcccatcaaactctattgactcttaatctttttaatgcttttgtcccttttagagttcctagaatatttttcttcttcattgaaattaaaacttgaagaaataggtgtactagcagcatatatggggaggatttttaccacaattaaaaaagaggtagacttagatttgggtagggaaagagagaaaactattagtatttaagggtacctacatcatgtggcagacaacgagacatgctttgtatacttcattatctactattttcaaatgagatgtctgaggattagaaggttcagtgaattc

SEQ ID NO: 200047 - DNA, 1000 bp, Homo Sapiens
cctgatgtttctcagcaaagtagagaggactgatggtagatatttttatcttgttttttggacaattaggttcaaggtaacacctgtctgtttttttgtagcctgggcccactgtgctcaggtcctgctgtagataatgaggggtttgggctggctggtgcctctcacagctttctccacccctgctgaggctctggctttctatggttgcactttggtttgagaaggtctccaggctctgcctttgctcttatttctgatgcccttctccttgtctgccccaccaccaagcagctgctctcatgggtgccccacttcactgtatctgccttgccccttcagatgggctgtgggttcttatggtgcaactggctcttgagccactttggaaaagatgctgactcctgagattggtgcaacacggatttatggagggcctggaatgtgtcggaagctgtggtgggaatagaaagagcaataagacaagattcctgactgggaggagtttagtaagatgcagacgtggagacagataaatccatgttgtgtgaagaatgcaaaccacccacaagtgcactcctggggtagtggctttggtctgggtagttgttcccctgcttctggggacaaaggaaggtcaagttagggcaaagcctgggttggactcagagaggtgcagcagtgaaggggtcgagggggaaactagccccaggagattttcctctagcactcacaggagaagcaagggcagaggctctgacccaaaactcagtcaccttgaggcccctctctcagcttctttctcacctccaaggctaagaaagcaggagcagcacatagagctcttccagtgatcatgagcggcacacaccattggcacagatggggcctcctgcacagcctgagaagggccagactctgcccagagtctccccttagtattcctaccagctgcggtccactctcctgcctccaacctcaccacatgccattggaattc

SEQ ID NO: 200048 - DNA, 1000 bp, Homo Sapiens
gaagtgaaagtcagatcttctaactcttttaggagtggtgggagtgaaggagtagtgagtttgtgccaagtgatggctaacaaatgccatgtagatagaatgatctgctgtaccagatcgatcaccactgtccaatagtactttctgtagggatggaaatgttctattctgtatcattcaatatggtagccactagccatatgtggctgttttgcacttgaaatgtagctggtatgactgagaaggaactttaattttatttagttttaattaatttaaatttaaatatccacatgtggctagtagttatcttatttgacagccatagtgttagcttttttagcatcaacctcagaagtcatgtccatatcttttctgtggatgtagaccactacctatttcataaagcctgatgcattcaaataagtccctccaaactgtgagccctaacatggttttacttgcctatttcctattgcctcgagaaacactaactcatttaatttaaaaaacaaaaaagactataaagcaggacaggtattacttccattttacagataaagaaagtaaaactcaggtcatcagagtaacttgcccattgagacataagctgatagttttgactaccatactattctgcttatttattttttctcaagtagcttttgatcaaactatacagtttttctttctgtttaggaattgtcttagtttttccagggtaccataacaaaataccaaatggggtggcttataaacaacgtctatttctcacagttgtggaagctggaaagttaaagatcaaggtgctttgcagatttagtgtctggtgagggccacttccccacaggtagctgtcttctctgactttacatggcaaaaggggtgaggaatctctctgggctctcttttataagagcactaatcccatttgcgagggctccatccttatgtcaaaaggccctcctcctaacactatcactttggaggttaggaattc

SEQ ID NO: 200049 - DNA, 1000 bp, Homo Sapiens
cagccagaggccacctccccaattctcctatagataacatcactattgtaaaacctaagattggtatttgaggtatttttccgactctgcattctgatgcagagtgcagctggcactacccaaattgataaactggctcatctggtcttgtgacccccacccaggaactgactcagctcaagaggacagctttgactctctgatttcaccctccacccaaccaattggcattccccattccctagcaccccgcctgccaagctatccttaaaaaaatcctagcctccaaattttcggagaggctaatatgagtaataataaattcctatccttccgcttagtgagctctgcatttattaaactctctgttgtgaaaacttgctgttctcagtgccccggcttttctgggcagtgggtcagatgaacccattgggtgatgacattatgactaggttatactcattgtggctagactatactcattccttcaaagatcataaggagtcccaatggtaagaggaaaattttctttgttctctaccatctcctcccagcctctgtgctgatttaaaaaacaaaacaaacaacaacaactaaaaacaatgcagtcacttccaccaaagaaaaaaaggtaaaggggttgtgtttggaggtgtcagaacagggaacaggaggggtcagggattaggcaggaaagttgaccatcttactaggctgggaccaaggagggatggggaggggatctgggctgccagagcatctgaaggctggaaattggggcaggggaaggtgagggaattcccacccatctccatactgagagtcacttggatttccaataaagggcagggaccccatggtaacctggatgttctgggctggctgagtgtgggggtgggggttgcgggggatggtggagtaggacctgtgagtgtcagacccgattagaagttagaagaaaacatgctcgcaagggtaatgtcagcattgtgcagaattc

SEQ ID NO: 200050 - DNA, 1000 bp, Homo Sapiens
cctgtatctcaatttcctgcctactggttgcattcctcactagcctgaaagaaatggtaatgtagtcatcttgttcttatttatgtctagtgagtcctgctcatggcattcataagtcacacaaaaaatttgttaaaaaaaatgaaaagctagttttatttcctctgatgccatgatctcaccccactacacgctcttctcctccctgcctgaggtatccatgagctattggctttgataggtaactaaagaaaaattcagaggactgtgaacttaggagagtatctattactgccccaccatttgataaatgagaatatactggcccaaaacaatgagataaccagcccaaggactttgagctggagagaagaaagttctggacctgaacccaaattttctaaatccttagtctatgctcctgccactataccaagcttcttaccaatgatcaggatttctcaactccctgaactcggttcttgtgctgaatactgatggagtaggtagtttatttcattaatgccccccatcaatgtgcttatggaataacatgtcaaagtaaaattaagaaggaaacttaagtcagtaatatcttctgtcaaaacctgaacacattaattacatttactttcctattgcttgaacctgacttactttcctattccataaactttttcaaaatgtaaaaaccaagaccattttgtttttgttgttgctgacattgtagttattaggagtttagaaaatattttagatacggggcttctttgccaaaacattattctgattctaagtgcccgtaagttggaagacaaagtaagactgtttctctaagacattattactgatgcatgcagattttatagtttttggggggaacaaaattatttacaaaaaatagtttaaggcatttttgtaaatcttaaacatctctaatttagtctaacctgcgaatagcagaaagggggcaagctggcaaacatgctgacttgaattc

SEQ ID NO: 200051 - DNA, 1000 bp, Homo Sapiens
cctgggtgtacagcatgggctttttcaaagtgctgagggtctgattttagacaaatcacatatccttcttagtgaccaatttccttttctttttccattttattatacaaaagtagagagaataatgaaccccaacttactcatcacctggcttcaacaatgattaactcatagccaaacagttcatctgtcacccagcctcccttcctggattgttgatgcattggttatctattactgcgtaacaaattatcccaaaacttagtggcttagaacaagcatttattatctcacacttcctgtgcgtcaggaatttggaagcagctgggtggctctggctcagagtctctcacaaagctatagtcaggatgtaggcaggaactgcagtcattcaaaggcttagagctaaggctaaagaagggaatggcaataggtccctaagccaaaactggcctacagcctgttcggtaaacaaagtttactggaacatagccacgctctttcatttacgtatgtctaagactgcttttgcattacagcagcagaactattagctgtgatagagactggatggcccacgtgcctaaagtatttattatctggccctttacagaaaaagtttgccaactcctagcccagagaatctgtttccaagatcacttgctcccatggttgttggcaataagccatgttcctagtcctgtaggcttctacactggctggctgagtgtcctcacaacatggcagctagcttcgcaagaggaagagtgattcaagagggagaaggcagaagccatcatgttgtttaatgacctggcctcagaagaaacataacgtcatttctacagtattctactgatcacacagaaaaatcaagatacaaagtgggagaggactccacaagggcataaatactaggcagcagggatcactgtagaacatcgtagaagctgacaacaacagctggagatccattccttaatctgtaaagtcagaattc

SEQ ID NO: 200052 - DNA, 1000 bp, Homo Sapiens
gtgccaaactcttagttaattctctactggatcaaggaaaacactttgaaagtgaaggggattctttacaggatgtagattttcttcacaaaagacagctttacagggtcatttcaaaatatgtcaaagaaatacattttagggtaaaatacttcagtttatttcagggcctgttatctgtcacatgagactatactagagtcaggttagaatttgatgtcttattgctataaagagtttgttttgggctgggcgtggtggctcacgcctgtaatcccagcactttgggaggccgaggcgggcgatcacgaggtctagttcaagaccagcctggtcaacatggtgaaatcccgtctctactaagaatacaaaaattagccgggcgtgttggcacgttcctgtaatcccagctactcaggaggctgaggcaggagaattgcttgaacccgggaggcggaggttgcagtgagccgagatcgggaaactgtactccagcctgggctacagagtaagactccatctcggaaaaaaaaaaaaaaagttttagtcagtctcaagatctctgttttaatgttaatgctggtccgtagtgcctgaattccaagggcataacgaggcaagtccgatcccctgcttcccatcatggcctgaactagattgccaggttttctttggaatgttttggctgagagaagtggtccattcagttggttgggggacttagaattttatttttggtttacaaaactgttgcatgaattgactcagttaattcactgaatttataaattacaaacttttaccattctcaactgataaattgaggcaacgatttaagtataacttgagcaagtccatatagagtggagccaggaacgcagacaatgagacaccataccccatggtcttaggtcacagtcattcagtgggagacaggggctataaattcattagaaggttaagttaggaattaagtaattaggtaaggaattaggaattc

SEQ ID NO: 200053 - DNA, 1000 bp, Homo Sapiens
atataatttgtgacaatcttgcataatttaagctttgcataattcaggacaattttctttttcataaaccaatactgaagtttttctgtgttaatgacaaatgtcattgacagcctaccagatgcttaaaatttggaggtgatttgcattatttttaaaatttccaataaattcatttattcaagaaacatgggagcaccatgtgctgccacatgtctaagcttttgggaatctccaaggaagagttgaccattctatctagagataataaatgttaatagatttacctattcatcacattttttttacattaaaagatgataggaagtatgggaaaaaagaaaacaaaattagggcaggatgaggagattgagagttccaggagagatggattggatctaatctaaattagagtgagaaggagagggagtgagccatgtagctatctgggggaaagccttctaggtagagggaacagccagtgcaaaggagctggggtctgagagtgcttggtgaatatgaggatgtcagcgaggctagagcaaagaaaatgaggagagtagtaagatatgagaccaaagcagtaaagatgtcagatcatgtaggccttataagggccgttgtaaagccattatcctttgtgctgagtaaatgagaaactattgaaaggttttaagcagaagaatgacatgatctgactgcaggggctgttcctgtgaacacttcaaacccactaggtcccgcctcttattctaccactgttgcagtaaccagtcatgggcaggcttcaatagctttgcaccagggcaacctaacactgccttgtcatggccccatgcagtgtatctcttgtttccttgcttagggcttctctgatgccgagatgtggggcaactgtgggaatatacttggaattcatgcatgcacaaaccaggaagtgaaagcgttaatgcccacatggtcatgttagtcaatgggggtgggagttatagatgaattc

SEQ ID NO: 200054 - DNA, 1000 bp, Homo Sapiens
caacatatgtgtcattgggaagtttgattaaaggtcccttctctctttgttttagagacagggtctcactttgttgccccaggcaggagtgcaatggtgcaatcacagctcactgcagcctcaaactcctagctcaagcaatcctcccacctcagcctcctgactagctgggactacaggcatgtgccaccatgcctggctacttttaaaaaatactttttgtagagacaggatttcacttagtcacctggtgggcttgtctcgaactcctggcctcaagtgatcctcttgcctcagccttccaaagtgttgggattacaggcgtgagccaccttgcccagcctgaaggtccttttctgtcttgtttttcatagtatggtctacctgctactcactcctgtcctctcttgcattgccaaaaacattgttccagaagtcatccctctctcccagaattgtccatttttccctaccactggatcattgccatcagcatcaacccttttgattttttctgtgactcccaaatcctttctctatctccccattctccctatggctctcgtaccatttcacctctcctttcagaactccttttaaacattttctatactgctatctccaattactgtccccactttctcagtttaaccagtcaggcttttgtcccattggttgtcaaaactgctcctgtcagggttaccattgaccatcaggttgccaaatccaagggtcagtcctcagtcctcaatttgcttgatccatcagcagcatttagtgcagctcttcactccatccttaaaagtgctccccctgccacctgccctccacaacatggcttctaggaaaatgcacactctggctttcctcctagttaactggtccctttttctgagtccctgtgctggttcttcatctctctggcttcttgacattggaatactaggggttcagaatttggaatgcttttcttttctctctctactcttttggtgaattc

SEQ ID NO: 200055 - DNA, 1000 bp, Homo Sapiens
atttttggaacatttggatgatcatactgtacaccaagaaaattttttcattacacttagctcatactcaaaaaagtgtttatataattttaaaaaaacctctaaaaatgaacagttcttttgacatgatgttgacagaagtcactttgatgtagtttagagtcatgaattttctatctgttccatttttcctggggctccatcaactcagacatcctgatctgtcatttttcaactctttgtgaaggccttgacagatacaggttttgacaagtgctggacatcagcagcaatttagaataagcagtgtatatttctccaggtaaagtgacaaaatgtctaaaagtgtcagaagaactatgtggcctgcaatcatctctaatactataaagcaagcttccatttaagtactgtgttgcagcattgtatgatggctgaaatttaaaattctgtcagaacctatgattagagggcatctggcttatttacaagtgtttgcaatattaagaaccttagggtcactagaaaaaaatcctttaaatttctaatgagtgaatgatcaggataatcacataatgtgataggagtctttaaaactataacacaccattatatatttttttgtttcttcagtactaatttgggtcattctttttaatgaaaacctacttcctgtgctgtcttcagagtgtacagttcagagttcaacttaagggaactttcactgggtgctaattataacaggtcattcaggtttcagatgtgccagcatttttcctggttgactcttctatcaatgactaagtaataactgtaaatatcatctcgcatattgaatatgttgtccttttcatataattattttgtgtctgtattcactcaagaaacagctgttaaaagttgagtgggatgcaaaatggcacagcctgaagatgttcttactcactcagctaactcccttttgatgtgatacctactggcagggtcgcgtggtgaattc

SEQ ID NO: 200056 - DNA, 1000 bp, Homo Sapiens
gtggggtgtgaacaggctgctaagggtaactgttgtgggcattgcccaagcattgctgatgataagactggtccagtccctgcttgctggtggggcccaggctctgaccccatttgctcaatcaggaaggcccgagcttataggaacatggcttcagaaacaggggccaagaagaactggtgaaggcaggagctgatagctggaaaagtaagacataagaaaaatacgaaatggaaatttaaaataaggtacaaatgatttggcatgtggttggtcaccaaatgaattgcagagacactcctcagaggattaaagtagtgggcagaaaggatttcaggatagggcactccaaggaggagatgaaatttctgctagacattatagggttttatcaaaccccaagaagagagttagacattctggacaggaagatgatgtgcaaaaagcccaaagatgtaaggctgggagatagcaaaccaggtcttgatgttgcagatttgttgtatatatatttatatagatagatagatagatagatagatagatagatagatagatagatagattagatagatagatagatagatagatagatgttatagatatatatattatgtatttgatataaactaatgcatatcaaacattgtttttttggtagagatgagatctcactgtgtttcctaggttggtcttgaactcctagcctcaaacaatccccccaactcagctgggattatagacttgagccactgagcccagcctgaagaaggctttgaaggctaaaggaaggaatgtcgtcctgatcccttgggatctaggcagtggcaatctctatggcctttgtaagttgacatggaggtaggtagtgtgcagcacgggacaaagagatgggacgcagagagactagtgtgaaagactattgcatggcttaaagaatgaattaataaggggctgcatcaggatactgactgtgaaatggaggagagagaatgaattc

SEQ ID NO: 200057 - DNA, 1000 bp, Homo Sapiens
aatcagcctcagcagggagaggacagagagagaactgtgagtagccaggagggagaggactgactgaccagcaagattccagcagggatagttaagtccccacataaggggcagtttggaccgtacaatgatactagcctaacctaaaccaggtcctgtccctacctctcccatccctccccttggtcactgagtaagaaatttactcttgataagttcctcatgcacagagagctggttgctggcatactcaaagaaatcaagatttctgcaccttggagaacattgcattttagggatgagatttttcaggggatatgtcaggtccaaaaaagaaacttcaccatgaattgtggcgaaccctagatcagccaaattgttccccttgttttcttgctaaggaaaagaaacagagaagacttgtatcagtcttggcagagaatcagcaccctgctttaatggaatctattgtttgtgtagactaggctgagatcatcgcctttactgtaattatgtggtataaatgagggctgccatcttcttagaaagatcctcatctccctgccacttgatccaggcttgacttgttgaaatccttcctctgaatttttaaacttgggaacagagcatggtagtggtggtgccacagttctgaggttgtcagtggccatgtcctgctccacgtggaaaaagctggtttgcagcaagagacagctatgaacccagtgtgcacagaaaagcaaacaaaagccaagaaaaagactggaggcattctcatccccggtgcacgctgcctaaaggcagagatatattccagcccttcctgttggttccctcttggcctagttcaaactgagtttctgttatttgcaaccaaaagttctggttaatacatttgtctcaaaaggtgatcaactgactaaaatttactcctttggaaacagacttgtaggaaagaattcctgctatttggatatagttctgaattgcaaaggaattc

SEQ ID NO: 200058 - DNA, 1000 bp, Homo Sapiens
ttcattatttttctcagataatttctctgtggggtcagtgggtgagatgacactcatcagctatgttattttagacacttagtttctctgagcctgagttttctcatctgaagaatggggatatacttgaccctacttggactgaaagccattcaaggtcagggatggtttcttcttcacctcctcttcctcttctatatccctgactacaacattgtctagcacacactgggcttctgcataaatttacagaaactaactaaatgatccctcaaggtagtagaaagagtcacgaggaatcaggtctgtggacaggttgtgtggtcagcttggctgtgctcctgaaaggtggggccatttgtacaagagctgaggttccagaatatcagaactgcaatctcgactgtcgtggaggaagggtgaccttggctgggtctgcttctgaggatggctgggggtgaaggccagactggaggagttgagatgtgaatagaagatagagaaatggcaacaggaggtgtagccaattccttcgagaggcctggctgtgacaggcaggaaaggtggggtgggggtacagggatagggacattagagaacttctgtgtgttgatgagacagggccagggataggaggcattcagtaaatagttcccaatttaaatgaactttgatatgggggtctttcttaacactttcaagaatggttgtgggtaagatgattggtaataactgagaaccaaaactgctagtaatgggttaaggcagtgccagatgctgcaagaggtaaacccagaatctcagtggcttaatacaatacacattaatttctcactcagcgacaatccagtgaaagtggtgggtggctgtccacacagtattttgggtcccaggtttcttccattttcaacatgtggcttccaaggtcattatggaagaaggaaggagtaaagagggctcacttattttctcatcacattctcaccaatgatagtggaag

SEQ ID NO: 200059 - DNA, 1000 bp, Homo Sapiens
tacagaaatattccgcatacatcttgcaccgtcacatgcacatcctcctctgttatcaacatcctccctccccagagtggaacatttgttacaattgataaacctacactgacacatcattattatgcagagtccatagttttacattaggatttactcttggtgatacgcattctatgaatttgcataaatgtataatgacatgtatccaccactgtagtagcatatagaatagtttcactgccctaaaaattgtctgtgctccatctatttacccctcccacctcccaaactctgggaatcgctgatctttctactgtctaggtttgccttttccagaatgtcatacagttggaatcatatagtatataaccttttcagattggcttctttcacttagtaatatgcatttaagtttcctttatggctttttatagcttagtagctcatttattttcagcacagactaatattctattgtctgaatgtaccaccatttatttattcattcacctactgaaagaaatcttggttgcttccaaattttgacgattataaataaagctactataaatacctgcatgcaaattttggggaacgtaagtttttaattcctttgggtaaataccaagtagcatgatttctggatcgtatggtacgaggatgtttagttttataagaaactgtcaaactgtttttcaaagtagctatatcattttacattcccacccacaatgaataagagtttctgttgtgccacaccctcatgagcatttggtgttgtcagtgttctggaatccggacattctaacaggtaggtagtggcatctcactgttgttttcatttgcatttccctgatgatgtatgatgtggagcatctttacatatgcttatttaccatctatatatcttttgttggtgaggtgtccgttcaggtcttttttggagcccattttttattgggttgtttgtgttcttattgtttagttttaagaattc

SEQ ID NO: 200060 - DNA, 1000 bp, Homo Sapiens
caactcacagtagcaacaatgatagatttaaggagaagcctgtgacttaataagccagttgaatccaattgtgtaaggccgtgcagcccagactcatctgatgagtgagagaatgacttccaggatgtgcagtagctatgcagcaacaatgtttattcctatgaagttcatggtttaaggacatgaagtcagaaatttttgcagccacatagggactccctagaatggcaagaagggcaactgtgcctaatgacactataaaggaaatcagatcctggggaatgacatgctttggccacctgaatgaagccttgcctgaagccatactttgaacttttccattacctgagccaataaatccttttattgtttaatccaatttaagttagttttcagttgattataacctaaagaaatctagctgatagacctatataaagctaactgctgggtgcagtgacaagcacgctggcttaagacttcagagacctgagtgcaaggtctcactcttcccttaaatggcagcattagttagggaagtccctactccactctgaacccagcatctgcagaatgaagtagctggaatagaacaggattttccaaactctagtcaagcagaccaggctggtcaatgaaaacatgtctaccagtcctcagttttgaaagaaacataaggaatggctgtaagttttcataaagttacatgtattttatttaaaggactaccctttattgtaagactataaaagtataaggataatgtttattttatttgtattttatgctctcaattgatgaaagtagaaatcataaactttctatagttctttctgatttaagtcatccaattgtttctccttcatgaaatctcaaaatctggagatccttaggccagataatattctaaggaaacctctaaataatttttttagattcaataacttttctattttatagggatatgtattcaacacatgcaaataatttaacagaattc

SEQ ID NO: 200061 - DNA, 1000 bp, Homo Sapiens
tgccctcctcccgccagctccaaccctctcaggtgtcttcgtgttcccagttagaaaagcaaatgcacaaacacgcctgaattcagagaggactggaggtaggggttctgacttcaggacggagtgaagcagctgggaggctcctggaagacagatgtttctgtgtagagtaacttcaaagtgatgctgtccaaagggttcacttgcctcttaaggtgccttctagctcctctcgtaacggtttgttcttttatattgaactgtcataaaaataaaatatctaacataaatgtccaggggtttattttatttattttatttttttgagatggagtctcactctgtcgctaggcaggagtgcagtggcaacatctcagctcactgcaacctccacctccctggttcaagggattctcctacctcagcctcacaagtagctgggattacatgtatgagccaccatgcccagctaatttttgtatttttagtagagacagggtttcaccatgttggccaggagagtctcgatctcctgaccttgcgatctgcatgccttggcctcccaaagtgtcgagagtacaggcgtgagccaccgcgcccggcctatttttttcttttgagacagagtctcgctctgtcacccaggctggagtgcagtggcgctatccccactcactgcaacctctgccttctgggttcaagcgattctcctgcctcagcttcctgagtagctgggactacaggtgtgcaccaccacggccggctaatttttatatttttagtagagacagggtttcaccatattggtcaggctggtctcgaactcctgacctcaagtgatccacccgtctcagcctcccaaagtgctgggattacaggtgtgagccacggtgcccagccatgtccaggggtttaaaagtaacactgcaagagccctcaactcaaagcaagggtcccacagaccagccatgataccacagaatcactggaattagaattc

SEQ ID NO: 200062 - DNA, 1000 bp, Homo Sapiens
tttataatatacattatatttctataaaaataagaagtttgataattttggtaaattaaaattgacattgatttgaaagactccctgtatgaggttgggatgagagaggaatgcaggaataagaactgtcatctctcttgtcattgttgctgtctggaaggacctgtgtaagggcgaggcctcctcatctgctctgttctgaggggtgaggatgaagggagggggatgactggtagctgaggggcacaccaacaccaactacatgtgctaggatagggaagataggaaaaacacgcaggtatgtgcagacgtgcatgcacacacacacacgcatgtgcacacaaatgcaagcacatgcatgcacatatatatagaattctaaggtcctggggcccaccaactaaaatttcacagaactttagaatttgttttgtacccttcacacaatatgctgcggtactgctgtcctcatttcataagatggaattttcacagccatttagcagcagaactagcctcaaccacagacagaaaatccaaatttgattcctctcccactgcatgggccctaaattcagccctctgggtttcctatcctaataggaatcccagaatctcaagctgctccaggtatggcagcccttgaagttctgcatcaggggataggctggtaaagatggacactgaaagcctttctgtctagcctcgtctctgaaaaccagagggaaagatgatgagagctaatcaagttcccatggcctcatatcctctcttctctcaaaagcagagagttttctcaaatggaacaaagcaatttctttgccaagaaagcttttatgttcaccttcaaaatagcatttctgctttgcaaagagagcctttcagagagacaacttgtttgaaaggaagtaaataagaagagagaaagtgcccgcagctccaatttttctccaataggattgtagtgctttgacataagagtacctggcagctggaattc

SEQ ID NO: 200063 - DNA, 1000 bp, Homo Sapiens
aaacattttctctaaaaggcaggatagtaaatatatgaggggttggtggacagctactcaattctgctggtgtagtgcaaaagcagccataaacaagacataaacaagtatggctgtgttccaataaaaccttgtttatggaaacaaattataattttgcacagttttcacctttcattaaatattccttttcttttgattttaaaaatgtaaaaaacatttttagttcacaggcccttcagaaacaggcaacaggctggatttggttcatgggttatggtttgttgaaccctggtgtagcttaaaaacaacagttttaaagttctaaagtgattataactgtatacacccgagtttttccttcctagaaaatgaaatcgaacactaggacagcatttcaaagcttttttcatccatacattaatgaggaggcaaatgattccatttaagaaataagaggaaactgttagttggtttgttaaagttattctcaagttgtcaccatttcacagcatagtagtattattaaatcttaattacattctgtatacactaaagggctttttattttaaggttaacagccctaaaggacctttattattgtagtgtgacattacatattcaatatgctttggagccaagacacacttacttgagaatttagagaaagcattcctctaattataccacactatactcatttaattttttgttataaatgatagaaaatacataagatggaattctatataaaaaccaaatcatgaacttctacttaattctaaactgggtgtagctttgcttttcaagtattcctcaataggataaaaacaaaagacaagaccaatttatctaataggtctggcttcccatttacaaaaatgagctggagtttccttagtggctgctaaattcacctttcattattctattccctctgccaattttgtcaactcaatacttaaaggtggaatttgagacgtagatgtttgaccagtc

SEQ ID NO: 200064 - DNA, 1000 bp, Homo Sapiens
tttccttggaaatctcaaaattacgacaaatgtgaaacgttgggtctgaaaactctatctaaagctttgtacctgtattgaaaatcctgtgtcaaagtgacctgtatggctcagatgctctggacaagaatgggatgttccattcacacggaaaggatgtcagacagcagagtttccaacattccataattttagagaatatttgtcagcaccatatccttgatgttaattaataaaaacagttttttcataacaaaaaggcattaaatattccacagtgtaatgagagtatacaacatttgggaaccaatggatagcaaatctacgaagaacacagctggtgggaatataaattgatacagccttacaaaaagataattttgatataaaagctagatatttatataaataacagataatacttgacgatattgcctgaggtttattctgtttatttccctctactaccaccaccattgttttgtacccactactcataaccaaggtacagtgaaagaaaacaggggttatctggcttaggtggagggctaaggaaagtttctctgataaacttaaaagtacacgtgcatgagaaaagacaagaacaagaaaaatgtacacccaatatctggcagtgtttatttcttttttttttttttttttgagacggagtcttgctctgtcgcccaggctggagtgcagtggcgggatctcggctcactgcaagctccgcctcccgggttcaagcgattctgctgccacagcctcccgagtagctgagactacaggcgtccgccagcacgcccggctaattttttgtatttttagtagagacggggtttcaccgtgttagccaagatggtctcaatctcctgacctcatgatctgcccgcctcggcctcacaaagtgctgggattacaggcgtgagccaccgcgcccggcctggcagtgtttatttctaagttgtgctctagaattcatagtgaatgctctggaatt

SEQ ID NO: 200065 - DNA, 1000 bp, Homo Sapiens
ctgagtgaatgaagggatgttggctgttgttattagggaggccagttaggaagttgatgggctactccaggtgaggacagactgtgctgtggagatggagtgggcagcgctgtggtatctggtggggaggcatgaggatgttctgggtgttttggcctgtgtgggagtgtggagacagggtgggaggagccggctgcaagggaagaggaaggtggcaggttggtatgggagaagcgtgaggtgtttctggatgtccatgtgaggattaggtccctgatagaaatgcaggcgggaggcatggtgaaaagtccagcgtggaagaaccctggaaacccccagagagtggtaaggtgaagcggctgggaacagacagagaaaacagagttcctcactccagtgcccacacggtcaagtgggttgcgtcagggagcagcagggcctatggcaaaagaaagtgcgagtgtcactgccaagagagacagggacatctcccagtttctgtcagtgtcagtgtgttgtcatgtgggagacaggcccaggcttgcaagagcttctggttcattgagggaagccagaaatctgaattttcatgtgaaatttactgggatttttttgaggcagttcattcaaactttgcaaaagcactgtatgggccaaataagccacctctgtgagctgaatgcagcccatgggcaatcagctggcaaactctggggtaagaggaacaaggaagaagctggggcagagccctggggccatggctgcagggtttgctctctgaaggaaatcacaggaggtaggaggttttgggagagagtgggttggagtgctgggtatcacagaaggccacgagtttgagaatggaaatttggcctacagagcaacacagaacaagtctgtgcaatggtaggggcagaagccatcttttcagagccatcagaaagtttccacctgctatggctgaatgtttgtgttcctcccaaattcaagtgctgaattc

SEQ ID NO: 200066 - DNA, 1000 bp, Homo Sapiens
gaaaccccatctctactgaaatacaaaaaaaaaattagccgggcatggtggcgtgtgcctgtaatctcagctactcgggagactgagacaggagaatcacttgaacccggggggcggaggttgcagtgagccgagattgcaccattgcactccagcctaggtgacagagtgagagactccatctcaaaaacaaaacaaaacaaaacaaaacaaaaaaaaaactaggcaggacatgatggctcatgcctgtaatcccagcactttgggaggccgaggtggtggatcacaaggtcgggagttcaagaccaacctggccaacatggtgaaaccccatctctactaaaaatacagaaattagctgggcgtggtggtgtgtgcctgtagtcccagctgctcgggaggctgaggcaggagaactgcttgaacccaagaggtggagcttgcagtgagccgagatcgcgccactgctctccagcctgggcaacagagcaagactctgtctcaacagcaacaacaacaacaaaaaaaaccccataaaaattaaataaaattttaaaatctaatagctaacacctggttgagcactcaacatgtatgggtattggctaaggctgtatacatacactatttcgtttaatcctcatattgtcctcatggggtaggtattattatcataacccccttgcatatgaagaagctgaaatttaataaataccaaataacttacctcaatttatacccctggaaagtggtggcagagtttttaacacagtcagttgaatgccagaagtggttaaacattaggccctgtagcacttctctgaaattgtaatattttggtttatatacattactcatctactagatcgagagcttcacaatgattgaaatcctgttttgtctttttgtttgtttgaggtttgtggtttcattttattttattaatttaaaagactgggtctcactatgttgctcaggctggacttggactcctgaattc

SEQ ID NO: 200067 - DNA, 1000 bp, Homo Sapiens
tcacctcccgggttcaagcaattctcctgcctcagactctcgagtggctgtgactacaggcgcccaccaccatgcccggctaatttttggatttttagtagaaatggggtttcactatgttggccaggctggtctcaaacttctgaccttgtgatctgcctgccttggcctctcaaagtgctgggattagaggcgtgagactgcgcctggccctcgaaatgaccatttcaccaaggagccctgggttttgttttgttttttgacagctggggaatggtatttaaaaaccaaagtatgggttccaggcttgctcattgctactagagcatctttgcttcttggctgtttcagcatatggcactagtaaatgtacatatataatacatacaaacatgcataaatatgtagataaatacatgcatatatacatattttagaaatgagttcttatcaatacctacaactccaattcatcctacagggtttctttttttctaaattttaaattcctttaaaaatttgtttccgctgcttgactcagagccacagggttttgttttttttgtttcccctcattccatatttgtatatctcttcttccatagtgagaacactgtctcccaacaatatcaatatatttatttatttgttcaatcctataagacatctcgaatagtctcagaattatgcaacctctttttttaaatgtatttttttcatataaaaaccccgtaacgggatgcagcctcttttgaacacactctttttatgtctgtggaatttcccaccatgtgagtcttttttccctaagataaaatctaaaaaactcccttcccagtcttctttgtaggtagggcacaaataagttacctgggttccaccagttaacttcacctgtgtgggatgctggtccacaacaaagcaatgggaggaaacaggctctgccctaaacatctatttatctggtgagaatggccgatggctgaaaagtctggaattc

SEQ ID NO: 200068 - DNA, 1000 bp, Homo Sapiens
gtggcaatctcggctcactgcaacctctgcctcccaggttcaagcaattctcctgcctcagcctcccaagtagctgggattacaggtgcccaccaccaccctaactaatttttatatttttagtagagatgggctttcaccatgttggccaggctggttttgaactcctgacctcgtgatccaccctcccaaagtgctggacctcccaaagtgctgggattacaggcataagccactgcacctggccttatttatttatttatttaggcagggtctcactctgtcacccaggctagagtgtggcagcgcaatcatggctcactgcagcctcgacttcctggactcaagcgatcctcccacctctccaacgtggttgagggctgcagcgagaaagatgtgaaaggggcatttgggggcgcaggaaggcgggaggtggcaattgctaagggccccgccgtgttcctgtcacagccctagctacagcttagaaggtcacaatggacgttcacctgttgtctttgatgtttaaatcagcaccgacttcccatgaggaggatttttttttcctgtctctcttaaaaaaaaaaaaaaaggcccctgcagtgtgggtgtctgcagtgttacggggattattagttgaggataaccactgggatgtgtttctggaagaagtggtgctgaggagcactcctggccggaggaaagctgtgtgaggaggaggaggagtatggggtaactggctcagtttgccttggctctttctgtcggactcatacagcaaagcatctgctgagacatcatttgtgtctcctgtgacagccagagacagcaggtcttgctctccccagatcatatctgagatgctggctcctgctctctgagctgaaggctgcagctgctgagagaggacgaggcactgagtcaaagcagctgcacaatgttggggaacagctgggtactgaggactcttctccctgtccttctacaggttggtgaattc

SEQ ID NO: 200069 - DNA, 1000 bp, Homo Sapiens
atgctgcttcgtcacccccgatctttgagagtgaaaaggccactgacctgggtagggcccaacatgagcacagccctggctaaccaagaagagtcgctatttaaactgtgggtgcttcagatgtccttccctgggctcctatttcccacttccgccccagggaacccaaatcccaggtgaccacaggatggggatatgggaaggtcattactgccctctgatacaagcttactttggggtcccatcactactctctcagaagttgtaaacagcaagggccctacctcaaaacttcccatgggtgcgaggcccagagacagccaaggacaactcatgctcagcagttggttttccaggaggactggaaacctcctgccttatcaacttctgctgaggtcaatggtcaacagaagccacaatccttttggggaagggagtgcagaaggtcaaaaagaagtcaattccctagaccaggcatggtggctcacacctgtaatcccagcactttgggagactgaggcgggaggatcacctgacgttgggagttcgagaccagcctgaccaacatggagaaaccccgtctctactaaaaatacaaaattagccaggcgtggtggcgcatgcctgtaatcccagctactcgggaggctgaggcagaattgcttgaacctgggaagtggaggttgcggtgagccaagattgcgccactgcactccagccagggcaacaaaagcaaaactctgtctcaaaaaaaaaaagaagtcaattattctggctagggtcctggaatgagaaattggctgcttgtagttaagatttcttactgccatttctcctcatggcagtaacaacattcaccaccactgccctctttgtctgtccctgaacatccttgctaaaggcagggagggcctctggctccaaggtaaattatctgttctcaataatatcttggctggccctgagcaatggctcagagaacaggagagtgaccaatgca

SEQ ID NO: 200070 - DNA, 1000 bp, Homo Sapiens
aggcttctgttagagcagcagctgtagcaatttgctttttgaataggcatatacatttcacaagcactttcacttcagcggcctggaggggtggagtaaactgttatatcagcttcatagatgaggcaacagagcatcagagaaaagggacctctcaaagctacatgggtcataactggaaaagccaggatacaagctcctctgcctcattcgccatcacaactccaaaacttgacctctctctctggggccatctcctcattggctcatcggcagaatgaatgaattgaactccagcagtgattttcaaaccctgttccctggagtattagtggtttcaaggctgatggggattgagatttgggtctctcctttagccaaaaccactctgcattcatctattttgcataccaatgttccacattgtctttaaagaaagcttctgtagtaagaaaatactttgaagattactgatcctcaaagtttttattacattctaaactttaacctttaggggccagtgcccagtttaaaaatcaattgaactaatataaacatgagtaaattatcaatgggaaagtaaattggtcttacaaaactaatttgtaactttcaaaaatgttatctgttgggtgaatccaagaggcttccccagaagtaaaactctctaggacctcaactcaatacctgatacctggttcccacttgactggcttataagaggggcccagtaaatgttgctaaaatgtaattaaaagaaaaaaatttattttgatagtagttttaagtaacacacagactatcaaaatgtatttattttacacctgttgtagtatgctaggattataaatattctacaattaattttaaaggacaatcacaattttagtttctccattgaactttattttgcttcattcatatatatattcagtgagtcttccctcttacccaagtctctccataaatgtcttcattattttactgacttgatgaattc

SEQ ID NO: 200071 - DNA, 1000 bp, Homo Sapiens
tggctgccacttcagtcaagttacgtgcactgttagtaacagacgtgttaagttgcaatgtctgctattgtctgaatatgtgcccccaaattcatgtgctggaaactgaatccccaatgtaacaatgttgggaggtagggcctagcgggaggctctaccctcacgaatgaattaatgccgctgtaataacggggtttgcaggtaggttctctctcttttgccatgtgaggacacagcaagaaaaccttcatcagaagctggttctttgatcatggacttcccaggctccaaaactgtgagaaataaatgtctgttctttaaaaattacccagtctgtggtactgtattatggaagcatgcaatggacaaagacaacaccattgaaaacgtcttcaaatgactgcattattatttagcattgaaatgaaaatgattttggaagagaaagacacagaaacagagcagtgagatatatatttgatatacctgtgacacaaacattcctcatttgaggaataactgccaacatctaagcttggaagacttttgacaggaatttggaagaaaatcctagtcaataatggaacacccccaactccttctcttgcctctctctcactcactcgccccagggaagcacatgactgtggcaggaggccattcaggtagccctgcagagaggctcaagtggtaagagtattagtctgtttcacactcctgataaaggcatacccacgactgggcaatttacaaaagaaagaggtttaatagacttacagttctacgtggctagggaggactcacaatcatggtggaaggtgaaaggcatgtctcacatggcggcagacaaacgagaagaaggtgcgggcagggaacctcccctttataaaaccatcagatctcatgagacttattcactatcacaagaacagcagagaaagacctgcccccatgattcaattacctcccaccaggtccctcccacaacacatgggaattc

SEQ ID NO: 200072 - DNA, 1000 bp, Homo Sapiens
catggcttctccccttccaccagcacatgtggccaagaatctgccagcggccgctcctcatgcctggtgcacctgttgagcatttgccaccacttgtcatgcgagtgagtcacagcctgcctgaaactgcactgtctctgctggggctttaccccggtttccttggctggttctccatctccctacctgctgcttcctgagcccttgcccgcctggcaatcttcctagccttcttccctccagaggattccggccccctctggagctgcttaccagccttggtcagctgcctaacaacaggaaccgagaggctgaccccagacactcttctgccagtttcttccagtctttggccgcatcagtgtcagatacagagtgtgtccaggccggcctctgatgtcctgttactggattggttctccagagccaggctatgctttcaacttcttttcccatcagtcagctaagcagcgtggaagatccctctctgagcctcagtcctttcatctgtaaaatggagatacttccttacctactctagaacgttactgagggactctcaaagcctgagattggtaaagtgggccatgggcagtagaaaagttacatggaaaacaggcaactgtgcctcacctattcattcaccaaacgctgatgtgcacctcctatgtgttggcctctgctgggtgcaggagatgtagggaggaaagacataccccatcccgagcagctcacaaactcagagggagggagagaagaggggaaggtagacaggagagtcacagacacacacattttctaaaaaccaaaaatcagacaaagactgtttagctctctagtctaatatggtatgtcagctgaacaaaattcagggtgatctcaaacaaaatgctgtgatgtgctaatttgttctctacccctgacttccccaaaccatgcccctggggaagcagcctggagctgtctaggggagatcagcatccctggccaaagagaattc

SEQ ID NO: 200073 - DNA, 1000 bp, Homo Sapiens
ttactgctttgcagtctagtcatctttcacaacttcttggttgacagttttttatttaacaagttgctagtagttgccatctttcaaaaagagtgagattgtgtgtgtgcgtgtgtgtgtgtgtatcaaaatataaacattatagccattattctagggtgtcatatacataacattaagaagactaacttcaccattatgaaaaatttggattgcaaatcagatggaattgcacagttcagagaagttgttatttctaaattagcacattacttcagtcttaaattatcatgaggctggtggtttgtttgggtgtttaactgaaaagagaaatgagacagctttggtttcatctttaagaaaagggaagtgaaatgaagtgctacatggtgatgtggggtttttcacaggctgaagagtagggtttgaaataactgtccccacaggtcagtgagcaacaattaattgggaaaaggcgactgaaaaagctaaatgtcacatacctacaagtatcctatctttcacaaagtcaacaaaagcagtgaggaaaggattccctattcaataaattgtggtgggatagctggctagccatatgcagtatattaaaactggaccctttctttataccatatacaaaaatcaacttaagatgcattaaagtcttaaatgtaaaaccaaaaactataaaaaccctgggagataatgtaggaaataccattcttgacacggcctggcaaagatttcatgatggaaaccctaaaaacagttgcaacaaaagcaaaaattgaccaatgggacctaattaaactaaagagcttctacacagaaaaaaatcaacagagtaaacaagcaatctacagactaggagaatatttgcaaacaatgcatctgacaaaggtctaatatccagaatttatagagaacttaaacagatttacaaacaaaaagcaaacaactgcattaaaaggtgggcaaaggacataaacggacacttttc

SEQ ID NO: 200074 - DNA, 1000 bp, Homo Sapiens
aaaattaagttctgagattcctaggcaaaaagaatagtcccatgcattccacagctttcattaactgaaaaaagaaaacataggcaaacttcattctagtactaaagtccaagtggaaattagttgcaaggaattttttatgtgaagcaacataatgaatatctatggcaattttacagataatttaaagctgtttttcacccgatcatttcttaaaatgacactgggtaaagctaaggggcataatgctaaatgatgtaaacaaacactgtattgagtaccaaagtgacttaagccaggaagggacttcagtgactccagggaggaaaaagtttagagaactgcaaagtaccctacatgctatccttgctgttttggcaacatctataccccttttaaaatgcaaagataaactttaagagcaccatttaatagctctttaatgaaactatgtttaacctgagcaagttgttgtgtatgcaagatactggaaacgccttctgtggaaggaaaggcaagtacaactttgtgcttctatttggataaaaggttttgaagtgaaaggcatttgtgcaaattacaagcagattttcaagtctagaaaaacaaaaatctcaactgtggattaagttctattttttaacaaaagtgaaatactctgctttaatttcagaagttaaaaaatcctttttaacaacagcaaaaaggggacctgttttgaatttaaaagaagtagagtgagacaagttaggaaaaaaagaattaccattgcctttctaaatttattattatcataattgtcattaagtgtattcgtctttctttagggtaaagagagctttccgatggccaaaatttactagtcactgaattgtgtcccaggacacccttcaataaaacttggcctaaagaagcttcaagttcccttcaagttcgagggcagagtctggggttcagcccaagccactggcatccctgaaggggctgcagggctcctgac

SEQ ID NO: 200075 - DNA, 1000 bp, Homo Sapiens
tccataatgttgtaattatatgaactagagacttgatgaatttaattctagaattacattctttaaataacagagtgctagattaggcatccttgctctggatatttctaatattattaatctcaggagaaactagttttttaaaaagttatgatgtagtatttgatacgtataacatgatattgcttagtttggcttgtttaggagttttaaaaaatagtatcatagcgtttttagtttcttgcaatttataatttgtattcaacatagtttctaaaaatatatatccattttgtgtgtagcaaaaatttattcattttacctgctgcataatatttcattagttgaatgtatcacaatttaattattcatcctcatcaatgggctttagggttgtcctgaatttttctactattgtatacattcttgtatatgtgtcctggtgaccattgcaacacataattaggaattaaataatagaatcaatacatttaaatttgcaatattataatatgcagcataattattttcaaactataggcttttcagtctttaagcttcagtagagtcattttctgaagagatcaaaatctatctgagctaagaattatagaattgatcaaacacttactggaattttgtgttgaatattaatatctgcagcctaagagaaatatacaaaacccatacagagttcacagtaagatcataaaaaattgatatattgaaaatagaactaagtgatggattcttatatataatccatgattattttgcctgtgactaaaactgttaaggatattaagtcttttcaatatgattggttttaagttagatgtaccaacttacaagaaattctatttttcaaaacaccatgatattattttccagctggaaataatacctgcatattagttacctgcatattagtctgatctgcattcctctctatagtcaacctcctgtgaggccaattttcatagctacctgggatgaattc

SEQ ID NO: 200076 - DNA, 1000 bp, Homo Sapiens
ctaaagcaaacaactgttagagtaaccatattcagatttctctactttgatagcaaaattaatcttaagctgtggtgctgttattcaggaaagccagtgtgttttacattttgttagctttttttcccttcccagtttttaaatctaatgaatgtctattacagaaacactagtgccagagaaattgttttcaaatatagaatgtctaccaaagtgtaggcatagacagccacacaggatttgtgtataaattggaactggaacctgtcagtcagacaaaaataatacagtaaaagggtaggtgtgtgagccattgtaggagatagagccagctagacacttaagcagtcagccagtgatccagtcttccagtcacatacatcctatcgtgggtattgtagtaatctccttacgggtcttcttgagcccacgttttagaatcagcaagtactcgactcctgggtccaccgctagctaactttcccatcacttgggaaagattgttaacttcataacctcacctgtaaatgagggtgataatattcatctcacttggtttagtgcaaagattatatgagaaaatacatgtcaagtatttagtgcttgactgactgtaaccattcaataaatggtagctgttttacaattattattattttatctagtcttgttcttttactgtttttcttccatgcatgtgttcacatgtcctttctaaacacagatctgatcatatcatgctcctgctcataatttttcagtagtcacctaacacctactagagaaaatgtgagcttcaatagcaggacattagagggttcttcactatctgactagtcattgttttcaacattctctctcccatatccactctgtttcaaccaagctgaaccacttaacactgtctttttgtatattctccctattgaccccattgactggaatgattttccccttggtatctgaggaaagtgttcattttgcttgactccaagaattc

SEQ ID NO: 200077 - DNA, 1000 bp, Homo Sapiens
taaagaagagagacccagtttcccaaacccaatgaataaaattaacgttttattctaagttctatacaaaatattaaaaattaaggccctgtcatcagtttttagcctgcacattggcatatataagaagatagtcatgaatggatatcactaaaacattttatccttgtagcttatttatttagtaacacagaattatctatgcaacttttagaatggttttaaaagatttctcgttttataaattagctcaaaaattagaaaatatattaatctgagtttagtacaatgaaaaatattgatacctcatttttagtaggcaagcgtaagcatcatggaattggtctagctataatagatgttcaggtgatcagtagtttggaaatcatctggtctaagtgagttcatttaaatatgggagatttgtacttttgctttctaggaaaatagtgcctaaagaagtgcatttgtgcgacaaatgaccataaagataactgcctgtttttgcagcacatcaaacatattaaagaacatacttatagtatatgtgttagtgtgttttgctatattcacatcttttgctgagcattatgagggcacaaaagaaatgtgagtcatgaaacctattgcctacaatcttactgtgcacttaaggcaagcgtaaacacatgtacagtatttgacaatgacaggtgtacctgaaaatgtgtgttgcctatggcagtatatcattatataccagaattgctaatatggatggtaaattctgtgactcttcaaagaagggagtggcaaatgttcacaggagctgataggagaggtcttgtggaagaggctgaaggtgaactctgcccagagtaatcattgggaaattaaagggaaggtgtgggatggaagggataggcaggcgttcagggtagaaaattgcagatgggtaaaaagaccccgaggtcaaattctggtatcgcctcagaaaataatttcataagcagtagaattc

SEQ ID NO: 200078 - DNA, 1000 bp, Homo Sapiens
caaataaaagaattactttccagccaggtgcggtggctcaggcctgtaatcccagcactttgggaggccgaggtgggcagatcacctgaggtctggagttcaagaccagcctgaccaacatggaaaaaccccgtctctactaaaaatacaaaattagccaggcgtggtggtgcatgcctgtaatcccagctactcaggaggctgaggcaggagaatcgcttgaacccaggaagcagaggttgcagtgagccaagatcgtagcctgggcaacaagcgcaaaactccgtctcaaaaaaaaaaaaaaaattacttccgtctgactgctttgagctgggaatcagtttttcctgtgttcagactagaactgaaacatgggctcttcttgggttcaggtccaccagccttcaaactgggagtaccatcagctcctctgggtcttcagcttgtcatgtgcaggtcttgggatgtgccagtctctataactgtgtgagccaattccttaaatgaaatctccttctctctatatatacatcctactggttctgtttctctagggaacactgactaatacatcatctgcctcctttagctccaacatagcatgaagcattctactcaattcttaatgaatattgctggaatgtctaatacatcggctctaattcacatatgtataaatgaataagttggattcgacaaccccagaggcctctcctgttctaagagcctctgatacttatcttgctctcacctttccattccaatgactccttttccctcaggtgtcctccaccaaaattaattcggctgtgcttctcagaaaaagcgacaaagctccctcccagctaatcagcttagaagtaattctaacaggctccagctacatagaaacctgttctggtttgattgtcctcacctttttggaaggaagctgaagagttcacaaaaattcaacattgttgtatgtttattcacaacaagggttgcagcagttgaattc

SEQ ID NO: 200079 - DNA, 1000 bp, Homo Sapiens
ggtgtgagccaccacacccagccattttactgttcttaatacagactctggtttccaaatccattccaaggggccactgcagtgtggagggtggggaggggagaccaacttctcagagctggaactccctcaacttcctggtgtataaccgtctcctcagctcctggcagagtccctggcaaaataaatgcttaataagtatctgctgaatgaaaaaaacaaggagaagctttgaactcatgcccttactcaaccataataactcaacttttgtttattttaaaggtgggggggctctgagtaagatttcatttggtcaaggcaatcaaaccacttaaaaaaaaaaaagaactgaaaaagacatgagatttatgagtatctatgaatacctcaacatttgccctcatttctttctctaccatgacattcatccaacatgaagggccattaaattgagcttattcaaactcttgcaaatttccaggatcccaaccatgtacactcacccacgtatagctgaaccacatcaatcaatagtgtggcctgtttaagaccacagtctgcaggccagctgggtttgactaacatgctggctcatccaggtctctgcccaggactgaaaataccctagcatcagctcaatgcatgagcctctcatcatgccagctctgatcctatgagatgttgaaagaggatattaacttgatggtgatacctcttgacctaagagctagaaaacagggcactctggaaatgcaggtaggtctgaggattgaaaagatcctatgaacattgaaagaatcaggcaaaggagtcaggggagggaattaacactataagctcaactcctggctaatggtaagctattttcctaaatatgcagccccagtaaatcaccaaacaatctgtaaactcttgttagatgggagtctctccttgcgaagatgtcaggaaggaccatggaaacgtatggtatatagtcactgccctcaaagaattc

SEQ ID NO: 200080 - DNA, 1000 bp, Homo Sapiens
atgaggtacgtttgcattctgtgggcctgcaagggttggaagtagcctttgccagctgaacatcaatttctccactgtgggagaggatctgagggtctcgacttatcttgctcaggtccagagtcacctcttgcagcatcccttttcccctcctcttacccactagtgggtgccaaccaggatttaggtgtcaactaggccgggcgtggtggttcacacctgtaatcccagcactttgggaggctgagaggggcagatcgcttgaggccaggagttcgagaccagcctgggcaacaaagcaaaaccaagtctcctcaatacaaaaatcagccggatatggtggtgcgtgcccatagtcctagtctgctgttcagggagaagttctggctggagctgtgttataaaggtgggggcattaagaaactaaggggctgagggggctggcagtcgactcctctgccttcctgagcctccagacccgccctctgatggcccccagtttctcttcatggttcctacccacccagagcctgactcattggtctccttaccccacatcaaaccagtccagcctctctctaacactttattcattcactcattcacttaatcattttttccagaaatgctttattaagccttgcttgtggttctctcccaaggatgggcagccccctttgggggtgtccggatatgtgaaagggcatttggttgtcacgtgactgggcagggagcagaggtgttcaggtccctcacaaaacaaactgcctctcaggatgccaggagcaccttatagagaaccttgttccacagccacctacagctggtttaggagggtgcgctgtgagccaacacagtactgtctgaacagtgagagtaaaaagataagggaagggcatttctacctgggagaggagagaggcttcctggaggaggtgacttttgagctgtgccttgaaggatgagtagggtttacagatacaggatgcggcaggaattc

SEQ ID NO: 200081 - DNA, 1000 bp, Homo Sapiens
gaacgaaactccatctcaaaaaaaaaaaaaaaaaagataatgcaggagagacaaatagcacaaaagatgcaaatataaccccagaatatcaataactacattaaattaattaattaatttatttttgagtcgaggtctcactctgttgcccaggctggagtgcagtggcaccaatcacgacttactgcagtctcaacctgctaggttcaagtgatcctcctacctcagcttcccaaagtactgggcttacaggcatgagccacagcaacccccggccctctacattaaatttaaatggaataaatgctcctgcttttaaaaaaagaaataccatcaggcgcggtggctcatgcctgttatcccagcactttggcaggccaagatgggcagatcacctgaggtcaggagttcaagaccagcttggtgaacatggtgaaaccccatctctagtaaaaatacaaaaattaggccgggcgtggtggcgggcgcctgtagttccagctacttgggaggctgaggtaggagaatggcgtgaacctgggaggcggagcttgcagtgagccaagatcgcaccaccacattccagcctgcagcctgggtgacagagcgagactctgtctaaaaaaaaaaaaatacaaaaatacaaaaattagccaggtgtggtggtgcacgcctataatcccagctactcgggaggctgaggcaggagaatcgctggaacccgggaggcggaggttgcggtgagccgagatcacattattgcactccaacctgggcaacagaagtgagactccgtctcaaaaaaaaaaaaaaaaaaaagccaaaaggtgaagtgaaagggtgaaagggtagaagaagacctgtcaggaaccctcaggcaggactgacaggtgtgcagccctgtgcaccactcccaagagcacctggaagtccttagtggataactgtgtgcatctatgacatggcaactccacaaccagatgtgtttccaagagaattc

SEQ ID NO: 200082 - DNA, 1000 bp, Homo Sapiens
attctgcattccaaaaaatttaggaggcaggctggtgataacctttcaactgatgatagcgggaaaggaaggaaagtagggtctagtcattttcaaactaattgtttctgagtcacactcattgtgtacaaatgtgtcttgtgatttgtttatatctatcaaaaagaataattcagtatgatctatttaaaaatcctatatcataggtaatgtaactgaccaaataaataaagtataacaaagattaaaatacagaattatagttagaaagtgggaggatattgggaaaacaatatatcaaaaatagtacctgaagaaagttaaaataacatgtaagtccaaaggtaagtatagatgattgtcttcaatgggcttacagtcagataaaatggttttaatttttttaagctaaatgatgatttttttagagaaaagcttgtaaataagccaaatatataaaaccctaaaaggtgagatacttggtttggaataagggagagaggccaatagtcccacactttcagcttctttatatgcctctattctaaggcaaagtctctttgaggtccctggagtattgtagattctagtatggaaacacctgggttagagatgagggctgactacagtggacatttataatttcttggcgacccaacatctatctcatgtgtccaacagcctgtattttctcctggtgaacaagctctcccccactgtctgctcacatggtttgaagggattgatatcactctcagatgaaggcttttgttctcattagctcaatcataagtatgtcctcctaactcagccacagtgattgtttaaaaaagtgggcatataacccaattctgaccaatgaaagttggacccaggacttttgttctagctttgcagaaaatatgctcttattcttctactggacaaaaagctgagaggaaataggtctgctatagccatgtgactgccactgtgggagaacctgtctcataatgaattc

SEQ ID NO: 200083 - DNA, 1000 bp, Homo Sapiens
atggtgacaccccgtctctactaaaaatacaaaaaattagccaggcgtagtggcgggcacctgtagtcccagctacttgggaggctgaggcaggagaatgacttgaaccctggaggcggaggttgcagtgagccgaggtcacgccactgcactccagcctgggcaacagagcaagactctgtctcaaaaaaaaaaaaaaaaaccctaaatataaattgccaaccaagaattctgtaaatggcaacactgtctttcaaaaaatagggaaaaacattggccgggagaggcggctcacacctgtaatcccagcactttgggaggccgaggcgggcggatcacaaggtcaggagattgagaccatcctggctaacacagtgaaaccccgtctctactaaaaatacaaaaaaaaaaaaaaaaattagccaggcgtggtggcgggcacctgtagtcccagctactcacgaggctgaggcaggagaatggtgtgaacccaggaggcggagcttgcagtgagctgagatcacgccactgcactccagcctgggcgacagagcgagactccatctcaaaaaaaaaaaaaaaaaaaggaaaaaaatcaagacattctcagataaacaaaagctgagggaggctcattaccactatacagaccttgtaagaaatgctaaaagggaattcttcagtccgggcacagtggctcacgcctgtaatcccagcactttgggaggccgaagtgggttggtcacgaggtcaggagttcgacaccagcctggccaagatggtgaaacccgtctctactaaaaatacaaaaattagccaggtgcagtagcaggcacccctaatcccagctagtcaggaggctgaggcaggagtatcgcttcaacttggagtgggggttggttgcagtgagctgagatcatgccatggcactcagcactccagccagggcaacagagtgagactccatttttacaaaaaaaaaaaaaaaaaaaaggaattc

SEQ ID NO: 200084 - DNA, 1000 bp, Homo Sapiens
gacacacctctttcttttgtaatgaagaacattctttaaaaagatagagtaaacccacacattaaggctttgtactatcagcacctaagaggctttaagatgcatgttctgtcaggatcaatgggaaaaacagaaccactgtgtgtgacttagtaaggtggttacccttgcgtagttgtgggagctggtggtctagagaagctgatgctctaactctgaagctgggcctgaactctttttttttttttttttttttgagatggagtctcactctattgcccaggctagagtgcagtggtgcgatctcagctcactgcaagctccgcctcccgggttcacaccattctcctgcctcagcctcctgagtagctgggactacaggtgcctgccacacgcccggctaatttcttgcatttttagtagatacggggtttcaccatgttagccaggatggtctcgatctcctgaccttgtgatccgcccttcttggcctcccaaattgctggaattacaggcgtgagccactgcacccggccaagggcctgaactcttaataggtcaacctgatcagctatcaggagagaaagatggatgtggacaaaagaaaggacaatctgaaatatgtgagggtgaactggaacccaaatctatctcttaccaagtccaaccttggtgttgctgtgggtgacctgcaggggaccctggtgcccttttacatggaactacactgcactgggccagtactcagagatgctgaaggatgacactggggggagctggaggagctgtgagtcaggtgctgccccatgcagatcaatggcaaggtgcatgaactgccagtgtccagcaccccacactgacctttgggggtaaaaagcatacttgctgttttgcttctgccttttacacttcacacaaagagaatgctgggaaatatagttccagttttaccaagtcaagaaagtatcaagacagcacaatgcagttgcctacagaattc

SEQ ID NO: 200085 - DNA, 1000 bp, Homo Sapiens
tatcccacattttctttatccacttgttgattgatgcgcttctggggtgattccatagttttgcaattgtaaattgtgctgctataaacatgcaagtgcaagtatctttttcatataattatttcttttcctctgggtagatacctagtagtggaattgttggatcaaacagtagatctacttttagttcttgaaggaatctccacactgttttccatagtggttgttttagtttacattcccaccaatagtgtaaaagtgttccctttcaccatatccatgccaacatctatttctttttattttttgattatggccattcttgcaggaggggtaaggtggtattgcattgtggttttgatttgcatttccctggtaattagtgatgttgagcatttttacatatgcttgttggccatttgtatatattcttttgagaattgtctattcacgtcctttgcccactttttgatggggttgttttttctttctgatttgttagaattcttcatagattctgggtattagtcctttgttggatgtatagattgtgaagactttgtctgttaactatgccgattatttcttttgctgagccaactgaattatacaaccccttttaaaaaaatcctttttactaaccttattatgacttacatagaacatttacaacatgcttagactttctgttttgtcctaaatatccctttttcttgaacaacccattttattgtaggacaaaaatttaccaaacaggattctttctagtataaaatgactttcctttttacctttctatcaaaagcacctctctatatttttaacctttttacatttcttattttttggttccttttatcttgttttatacataacccttaaataagctttcagttagacaaatacatttaccttttcataagaacattaaaaatttttttcctataatttttaattggaaattacccagatacttaatatttattaataacattagatc

SEQ ID NO: 200086 - DNA, 1000 bp, Homo Sapiens
gaaactgcatcaattaatgggcaaaataaccagctagcatcataatgacaggatcaaattcacacataacaatattaaccttaaatgtaaatgggctaaatgccccaattaaaagacacagactggcaaattggataaagagtcaagacccatcggtgtgctgtattcaggagacaaatctcatgtgcaaagacacacataggctcaaaataaagggatagaggaatatttacctagcaaatgaaatcaaaaaaggaagggttgcaatcctagtctctggtaaaacagactaaaccaacaaagatcaaaaaagacaaagaagggcattgcataatggtaaagggatcaatgcaaaaaaagagctaacacttctaaatatacatgcacccaatacaggagtacccggattcataaagcaagttcttagagatctacaaagagacttagactcccacaccgtaatagtgggagactttaacaccccactgtcaatattagacagatcaatgagacagaaaattaataaggatatttaggacttgaactcagctctggaccaagcagacataatagacatctacagaactctgcaccccaaatcaacagaatctacattcttctcagcaccacatcacacttgttctaaaattgaccacataattggaagtaaaacactcctcagcaaatgcaaaagaacagaaatcataacaaacagtctctcagactacatggaaactgaacaacctgctcctgaatgactactgggtaaataacaaaattaaggcagaaataaataagttctttgaaaccaatgagaacaaagacacaatgtaacagaatctctggagcacagttaagcagtgtttagagggaaatttatagcactaaatgctatagggaaagatctaaaatcaacaccctaacctcacaattaaaagaactagagatgcaagaccaaacaaagtcaaaagctagcagaagacaagaaataactaagatc

SEQ ID NO: 200087 - DNA, 1000 bp, Homo Sapiens
gcgaaggatctaaataagacatttctctgaagaagctataaatggccaataagcatatgaaaacatgctcaatatcattagccaccaggaatgtacatcaaaaccataatgagatactacttaatcgaaaaaataaataataaatgttagtaagaatgtggataaatcaaaacactcatacacagctggtgggaatgtaaactggtactgctactttggaaaacagtagggcagttcctcaaatagttaaacatacagttaccatatgacccagtaattccattactacgcatatactcagaccaatgaaaacatacgtttatatggaaacttgtaaatgaatgctcaaaataatattatttatgatagccaaaaagtgggaataaagcaaatatctatcaactgatgaatggataaatacaaatatcagaataaagcgagtcacatgaattttgtttcccagtgcatataaaagttatctttacattatactgtagtctgttaagtgtgcaacagtatatgtttaaaaacaatgtatataccttaattaaaaatggtttactcctaaaaaatgctaatgatcacctgagtggtcagcaagtaatggatctttttgctggtggagggtcttgccttgatgctggtggcagcaggctggccagttactgaaggttggggtggttgtggcaatttcttaaagtaagacaacaataaagtttgctgcacttcctcactcggccttgcatgaagtatttctctgtagcattagatgctgtttgatagcattttactcacagtagaacttctttcaaaattggagtaaatgctctcaaaccctgccactgctttatcaactaagtttacggaatattctaaatcctttgttgccatctcaacaatgttcacagtatctttaccaggagaagattctagctcaagaaaccactttttttttttgctcatccctaagaagcaactcctcgtccattcaagtttgatc

SEQ ID NO: 200088 - DNA, 1000 bp, Homo Sapiens
cctcccaggttcaagcaattctcctgcctcagcctctcaagcagctgggattacaggggtctgccagcacaaccagctaatttttttttgtatttttagtagagacagggtttcaccatgttagccaggttagtttcaaactcctgacctcaggtgatccaccacctcggcctcctgaagtgctgggattacaggtgtgagccaccgtgcccggcctcattattgttttaagctgctaaatttaggggtaatttgttatgtatcaacagttgaatacaatgatgatctatgggcttatgggtgttctacacaatactgtttgtgattaaggaactcgtttctcagctaaagaagtttaccaatgagctcatgcccgtagtttattggtcttgccatgtgtgacatctctcagaagcagcagggctaataaaacagcttactgaagtttctgttacagtgccagttgagagacaacactctgaaaggttagggcgctatcctataggatgtagggaattcttcgaaacagagattaaataatatagggtactctttcttcgccagaatacatggatcaaggggtggaactgggactggctcctccacgatgaccgttaactaccaaccagcaaaattttcttttccattctgcaactttgattgctgctggtttagaagttttagctctcaaaggaggaatgctttcatcagaggtcacaacaatggctccactgaattggaagatgggacttccatgctattgaaataacaaacaaaggtgggatcactgtttttgccaggacaattgctcccaattactaaggataaattgagtcgctgctacactaacggagatacaggagactatgtttagagcccaagacattctctaaggtgcttctgggtactatcaaatccagtaacaaaagttaaggcaaaaccacagcaacacataaacagacactaagattcagaccctttggaagtgaagttctggatc

SEQ ID NO: 200089 - DNA, 1000 bp, Homo Sapiens
caacattggtgattaggtgtcaatatactttggggtgatggggaggtgcaaacattcagaccacagtaagaatgaataaaatcagacaagcctccaggcctatgccatctgtgcagtgttccagttgaagagccctgcttttcacactccatagaggattttgccacttggtctaacttcaaggccagtcacagagcctcaccatattcaacttggaatgaactctggcttcaaaggagcagcgtccataggctaagaacacattacatgactatttgcagctacttgctattgaatttttgacacaatttaatccaggatttttttagtgtcatgtaactgaaacaaaaatggtatcaagtattgggggatggggatttatgacttctctgagttctaaccacaaggggcatttcacacttttaaaaatgattctataacgcttcacattactatttaattactgatcaaagccaatctactcagtagtacccaggaacaacacattttctttgaaattaaacaaaagagagtatattagaaagatgaactaaagcattcaaatgaaaatgtggggctcgtcgttaaaaaaatcatcaagaaattcaatataataatttcaaatcaagcattgacttttctgaggctatggtactacatgactgcataatttgcttatccatgaagacagagctatacataagatttttttttctgaaaaacactcttttctctcttttccctctttccttttctcttttcctctttttccttctttcatttgcaataatgccaaagatctgttgttagttttgatttagactcagagtaatgtaaaattaggagaaatcacacattgcccttaatactgtgaagatcgaatacctaaaattatcttatttacactattttacataggttaagttcatgctttcagagaagtcagtgaagagttaatctccaaagcccttggagttggaacaaaacctttatgatgatc

SEQ ID NO: 200090 - DNA, 1000 bp, Homo Sapiens
attaggtatacttatctaagtgagatattaggtatacttatctaagtgagatattaggtatacttatctaagtgagatattaggtatacttatctaagtgagatattaggtatacttatctaagtgagatattaggtatacttatctaagtgagatattaggtatacttatctaagtgagatattaggtatacttatctaaatgagatattaggtatacttatctaagtgagatattaggtatacttatctaagtgagatgttaggcatacttatctaaatgagatattaggtatacttatctaaatgttatgtgttttagagacttcatttgaatcattgaacttcatcagtgtatggataggaggcagaccaagtgcaaatctgtggagtaaatccctcaagctgtgtcccataggtatggggctgggcatttttagacccagagatttttctgagttagaactaaaatggaaaggttgctaaataattgtgtttggacctaattgtttacatttactctctgtaattcagaaccagaattcccataatgtagcttaatatgtatttaaaaatataaaatgcaagcacatatggttaattagtggttaattttttagctttggactaacatttctctgccaaaccctggaggcaacagtaaagattttttctgtttttgaggaaacaatcttaatggctatatatagatcataaatggttggcaaaagatgcatttcaatctaaaccaaaattaaaatgttttaaattatctaactgctgccagatattcaaaaggggaagatttgtactagaaagtgttcacagtttccatatacattcacactcactccactctaccctcccttctctactgttctctctccccctgctctctccctcttcctttctcttgttcttgctcacatgaaaaaaatgcatacaaattatcacaatactaacggcatataagaatagtgacagagctggtcactgaattc

SEQ ID NO: 200091 - DNA, 1000 bp, Homo Sapiens
cactttttctgattctgttttaccataatgatgacacaggtgcttaaccagctccgtgagctattggggtggctccttgccttgatttagtcttgtgcccacacactgacccatgcagacttagccatgcatccagcacaaattacgctattttacatgtttggtttaatgtattcgtacctgctagacattgtagccaaaagattgtttgctgcctaatcctagccagctcttagggtgactgcctaagcctgtattgctggcttcacaagtttttttgtttcaggtaaataaaaatcaaagagcgttcgaggcagccgcattgactcaccttgcagacaagcaagcagagccgcagagcagtgacccgtgcccagcgcctcgcagctagagctggattggaatccagggctttgcaggcttcctgcttcactcaatcctctttctgttgcctctggcctcaaggtgttggcctgggaggaagtagcagattaaattccatgggcacgaagtccgtagctgacgaatacttaatatgttgcagtttcacagtgaaagttggcaagtccagggtgggaacatgccccaagcagctgagtcttctggattttacttctgttctttgcctctcaatttttgattttgttatataaaaagcaaatcagtaactattgcattatattctgcagtgactcaacagcgacacttaattcagccaaccaaggtttactgaactgctcgtggtgccgggaaccgtgctgggataggatacagggaccaaccagtcctgatcattagcttagccagagaggtaaactgactgacaatcaatctgccagggatcaattactatggaagctcatagtgtgggcccctaacccagactgtgggtctgaggaggtctcctggaggtagtgctatcctaacagagacctgaagggtacttggaatccagccacagaatactatttaccatctcattttactctcatgagaattc

SEQ ID NO: 200092 - DNA, 1000 bp, Homo Sapiens
tttaacaccccactgtcaatattagacagatcaatgagacagaaaattaacaaagctattcaggacctgcactcagctctgggtcaagtgtacctgatagatatctacagaactctccacccaaaaacagcagcatatacattcttctcattgccacgtggctcttgctccaaaatcatcacataattggaagtaaaacactcctcggcaaacacaaaataactgaaatcttaacaaacaatctctcagaccacagcacaatcaaattagaactcaagattaagaaactcacccacaaccacacaaatacatggaaattgaacaacctgctcttgaatggcccctgggtaaacaatgaaattaaggcagaaatcaagaagttctttgaagctaatgagaacaaagagacaacataccagaatctctgagatgcagctaaagcagtgctaagagggaaatttatggcactaaatgccctcaaaaagctagaaagatttcaaatacacaacctaacatcacaacgaaaagaactagagaaccaagagcaaacaaaccccaaagcaggcagaagacaagaaataaccaagatcagaagggaactgaaggagatagagacacacacacaaaaaaaacttcaaaaaaaatcaatgaatctgagttggttttttgaaaaaaataaaatagaccactagctagactaataaagaagaaaagagagacgaaccaaatagatacagtcagaaaggataagggggatatcaccactgatcccacagaaatacaaacaaccatcagagaatactataaatacctatatatacataaactagaaaatctaggagaaatggataaattcctggacacatataccctcccaagactgaaccagaaagaaattgaatccctgaatagaccaacagtgagttctaaaattgaggcagtaataaatagcctaccaaccaaaactagcccaggaccatacagatttatagctgaattc

SEQ ID NO: 200093 - DNA, 1000 bp, Homo Sapiens
tgcccattctggcagacgaagttaaatcaaacactagtaaggcaattagcatttctaaggaattcttattcttcaaaggactttaaattatcaaacaatttatctgtatcatccctgcgaggtatggtaaatataatattcattttacagctgggagaaactgcctagggaagcagaattaattctatacatatatatgccaattctctttcttgtggtacatcctcaaattccttgtgtgaggatttgagtgagttacagattttcaaatatttttatatttagaagaaaaatagagaagaaaacagatgtgaagaaatggcttgaagagtttaaaaagtaaagaagcccaaatatctgcacatccctcccgccttgccccctcaatgtgcacaccaagataaggctcactctactgtgcatagtgatacctgaattcaacacaacaaaagagaggctagtcattacacagacctggaggacactgtggtacctactataattcacgcttctcccaaaggggtatccaggctagcactgccaccaaatgggattttctatagtaaaagtaacttttatttagaatatgctttttctataggtaaatacttctttttgttttgaggcagagtttcgctctgttgcccaggcaggagtgcaatggtgcggtctcttggctcactgcaacctctgcctcccaggatcaagtgattctcctccctccacctcccaagtagctgggattataggtgctcaccaccacacccagctaattttcatatttttagtaaagacggggtttctccatgttggccaggctggtctcgaactcctgacctcaggtgatccgcccatcttggcctcccaaactgctgggattacaggcgtgagccactgcacccggcctagacaaagacttccttacttcagataaaaactacccttcccccagaattacgttgttcttgcaaagtagtgtgtgtgcaatttcagggaattc

SEQ ID NO: 200094 - DNA, 1000 bp, Homo Sapiens
gttgaccaggctgctcttgaactcctgaattcaagttatatgcttgccttgactttctaaagtgctaggattacagacatgagccacagcatccggctgccctgactattcttgatgtttgtggctgtgggttggtgcctgtgcttttgaagaagtagggatttattccagtctttgtagactgactttgtgtgggaaagccttttatcagtcagcccttccaaagattctgggcaggccatctggtgtgctgtgtgggtggtcttgctcttggggttcatgggcaggctggcttgatgcctgggtcagtaggtgggcagacgttgcatctgaatcttcagggttgagccaggagcttggatccactggcgtggacctgttgattgggtccatgagggttagcctgctgcctaggtgcatgagggtagacttggagtttgttgtttgtgggaattggacttgagtctggatccacagaggcagacctgtcactggaataggccttgagcctgagtctgcaggtgctggccagctgctgtgatgagtctggtacctaggtccaacgggatgggcctggagcctaagtccatgggggctggcatggccctagggttggcctagagcctaagtctgcagaggctggcctgggatggaagcaaatctgtatcctggtgccacttggctagcctggagtctgtggcctttgaggtaaacctggcaatggagcaaacctggagaacaagtccaccaggcaggtctggagcctagggctgtgggatctggcatggtgccagggtaggcctggaggctcagtccatggttaccggtctggagtctggaattgtgcaggccctcttggttctggattttactgggttgggcctggcattagggtgtaaggcaatgtccattattcacctccatcttcttcccccaagcagagggtatctctccacactgtgctgcctgtggttaaagcatgggtgacctgggtaatgta

SEQ ID NO: 200095 - DNA, 1000 bp, Homo Sapiens
aatttttctcattgtcataatttttgcaaaggagatttcatcatgagaccttctgaagtatttaaaactaagatttttttctttagggagatgggagattactagcatttctcttataaacataggtttcaacaatttattttatagaacttccctttctttcttaacttacatttagcaacagaaggagatttttgtagctgtaacgaaatgatgaggaaaaaagtagactgagcttagtatatatcaatggtatgtgcacaatgttagcaaaattcttgcttacattttgcctaaatataaatatttttgacataaatcaaagcctattataaggagctatttttatactaataaatagaaactaccatgtaatcagatctttcattaactagctttgtgcctgccatagagatgggatgtttgtgtcctccccaaattcatatgttgaaatcctaatccacaaggtgatggtattggaaggtggggcctttggaaggtaatgaggtcctgagaatggagccacatgaatagaattactacccatataaaagagacctcagggagctcccttgctctttttgccatgtgaagacacatcaagaagacagtagtctgtggatcaggaagtaaacccttagatattgaatctgcaggtgccttgatattggactccccaactttcagaattgtaagaaataaatgtttgtcatttaggtcgctctgtctgtggtatttttatagtactatgaacggactaaggcagtatcattgggtacataatgtaaactctttgggcctcagcatatatatatgtgtgtgtgtgtgtgtgtatgtgtgtgtgtgtgtgtatagaaagagagacgtaaatataaatttatataaatataaatgttttagttaaataggttttctcccagttcaaaaattcaatcattggccaggcgcagtggctcacgcctataatcccagcactttgggaggccgaggtaggtggatc

SEQ ID NO: 200096 - DNA, 1000 bp, Homo Sapiens
ggactggcctgtcctggacatctcatagaaatgggatcgcgcactgtgtggccttttgtgcctggagtctctcactgagtggcccatcctcagagttcatccactccgtggcctgcgtcagagccttgctccatttcatggctgagtcgcgttctgctgtgtgtggtgccgggcgacctgctcccctgctgatgggcgctcatgtggcctcctctctggctattgggagtcgtgctgctgtggacattggtgtgcaggtgttggtgtggacgttggtgtgcaggtgttggtgtggacgttggtgtgcaggtgctggtgtggacgttggtgtgcaggtgttggtgtgggtgttggtgtggatgttggtgtgcaggtgttggtgtgggtgttggtgtgcaggtgctggtgtgggtgttggtgtgggtgttggtgtgcaggtgctggtgtggatgttggtgtgggtgttggtgtgcacgtattggtgtgcaggtgttggtgtggatgttggtgtggacattggtgtgcaggtgttggtgtgggtgttggtgtggacgttggcgtgcaggtgttggtgtgggtgttggtgtgcaggtgttggtgtggacattggtgtgcaggtgctggtgtggatgttggtgtgcaggtgctggtgtggacgttggtgtgcgggtgttggtgtgcgtgttggtgtgcaggtgtgggtgttggtgttggtgtgcaggtgttggtgtggatgttggtgtgggtgttggtgtgcacgtattggtgtgcaggtgttggtgtgcaggtattggtgtggatgttggtgtgcaggtgttggtgtgcgggtgttggtgtgggtgttcgtgtgggggtgttggtgtacaggtgtttgtgtggacgttggtgtgcaggtgttggcgtggatgttggtgtgcaggtgttggtgtgggtgttggtgtgcaggtggtgtgcaggtgtgggtgttggtgtgggtgttggtgtgcaggtattggtgtgg

SEQ ID NO: 200097 - DNA, 1000 bp, Homo Sapiens
tcttcctgagaacattcccgagcaccctggagagcctcccccgcacccctactgtccagttcccacttcccgactgcggtctgggcaaagccacccgcacttgagcccatcccacggcgtcccggagctttaggaagtccccatcccggactttcaaccctgccagggactgagggaaatcccagagcctgggctccgggacgaaggtcccaggacagggtcggggatgtagttgcagaaacagggtaggggacaaaggccggggctgcactgatcaggcgcgcaacgagcccggccctgcctcctgctccgcccaagggtatggagggccggactcggctggccttatacccggagctgattggctggtgagtccagtccctgcctctgatggtttgcgctcataactaagggtttctactgattggtttacatggacgtctgcccattggtcaaatccgagttggtgtaatcagatagttgacacggattggttggtgcgggaatccagtagcttgctatcgattggttgagggtgaaataaatgggactcttatcattggctggcgggctccgcaacggtccaatcatgtaatcagtcgagggccgcccgggagggtgggagttaattctttagcgactgaggccggcttgggctctttggctccacctgtgtctgcgcgaggctgttccctattggagtccgcattgttcccctggacctgagtttctcccctggtcctaaaggccgaggcctctgagttcctcaagtgcggtgaccgcaggtctcaccttctcctctccttgcagcaggctgagccactcgcgcacccgccccaggcttccaccttgcaacctctatccctggacagcgaggcctcagtttccccattcgcaccaatgagctcccggtcaacaccccgtcacgcctcagtttcccgaatgttcccagagggctgagttcccgatctctctcccgcgtgggcatccccgaggcctc

SEQ ID NO: 200098 - DNA, 1000 bp, Homo Sapiens
ccgtggggagaacttgcgcttttacctggagggaggtgggagccatggagggctgcaggcagaggagagacagggttgggccagcatttcacttttttatttttatttatttatttatgtatttatgtatttatttatttatttatttttgagatggagtttcactcttatctcccaggctggggtgcagggcgagatctctgctcactgcaacctctgcctcttgggttcaagcaattctcccacctcaacctcctgagtagctgggattacaggtgcctgccgccgtgcctggctaatttttgtgtttttagtagagacagggtttcaccgtgtgaaccatggccaggctggtctcgaactcctgacctcaggtgatccacccgcctcggcctcccaaagcactgggattacaggcatgagccaccatgcttggcattcatttttatttgtaaacacttttatcgtggaaagtttcaaacacaaaagtagagctgatcataacataagcccccagctacctatcactcggctccaacttaaagtcagccttggtcatttctgtgtcaccccactcctcgtgggtagttttaaagcaagcaccagacagtgtgttctttcatgcatgaatcctttggcaacaaggattcctttctctaacttcaccccaaagcaattatcatactttaaggaagtaaacatcccctcttcatttcttcatgtcgtctgagacacagtcagtggtggagttcttggcggcctcgtgcacatcttgtttgaattgagatctagcagaacccacaatgcgcctgggtgatgggcctctcacgtgaccaggacctctcaggctcctgggaggaagcttaggtccaggcaggcggagagagtggatcccattttgaaggctgagctgatggaattagctaatgagtcaatgtgctaggaagagagagggagagagagaggggaagggggaagggggagggagggagggaaagag

SEQ ID NO: 200099 - DNA, 1000 bp, Homo Sapiens
tttctctcctcttctttgggattccatttatgggaatgtcagaccttcctatgccctggcttctagagtgcagctcttcaggaatgcatctgagagcctggagctgtttaacaggtccctttgtccttggcaggttctgaactcccggtctccccagtccctggaggctgcctgcagctttgcttagcttctcagcctgttgatcactgccgtggaattggcgagtatcttccgggggaaagcagagacaaaagtgagcctcacctcaatgcccttcccatctctctggattcttggttccttcagtccttggtgcctcggtagctttctcgtgtcttcgaacatatgtttttaatattttaccttccttttctagttgttcttggcaggtagctttatctactgcaaggtagcctgatacatccagaggcagatgtgttgctgagcagaaatgacaaagaggtggtttctgtcccttgggcctgagggtccggtggcagagccagacatgacaacaatgtaaagcaccagcaaaatgtgatgtcaaagggaagcagaaatacattcaatctgataggaggacctaggaaggtctctgtgaagaacaggaaggattgcaccaggtgccatttggaggggaggggaggggatggaggcgcgttgttctaggtgtcaaaagctgaagctggtataggctgatatgatgggatgtgtgccatgggcagggctggggtgagagaagggagacaccgtcgtgggaaccgaagcagggaaggtaggcacgtgccacacataaaggcttttgtatccaagctgaaccaggactttttatatgggatggcacattgggagtgacccattctggctttgcttgcagtaactgtgcaactctggcaaaatctctaaccctctctggttcttgattttgttgtaaaataagaatcctaataatacctgcctcttctactccccaaggttcttgtgaggcataggtaagctt

SEQ ID NO: 200100 - DNA, 1000 bp, Homo Sapiens
ataaaagctaattactagtaataacagcatcagtaaacctaatcacacctggggtggttgagctggaaatagaaaacccagcttatcacattcttacaagcctgtcacttgtggtagtcagagcttaaaaagggagaggggcttttcagggtactgtcgtgttattagttcttagccgtgatggtcttgtttaggctaattgtgaaatactgcttctttaaaagcagatgttaagctttatggcaggaaaagagaaagacatttaagtagggagggtgagtgtgaaacagactgaagaaggctgagcataatcaggtgagataggttatctttcagttctgctttaaccagatgtgtgaatcctctgggcccacgctctccccatctgtggaaagggaggtatcaggtgaaattcacccctgatatttcacgtaggttcttttctagtttccctaagtgtcggctggtctgagaaataaagggacagagtacaaaagagagaaattttaaagctgggtgtccaggggagacatcacatgtcggcaggttccgcaatgccctctgagccgtaaaatcagcaagtttttattagtgattttcaaaaggggagggagtgtatgaacagggtgtgggtcacagagatcacatgcttcacaaggtaataagatatcacgaggtaaatggaggcagggcgagatcacaggaccacaggactggggtgaaattaaaattgctaatgaagtttcaggcacgcattgtcattgataacatcttatcaggagacagggtttgagagcagacaaccagtctgaccaaaatttattaggtgggaatttcctcgtcctaataagcctgggagcactatgggagactggggcttatttcatccctgcagctgcaaccataaaagacagccgcccccaaaaggggccatttcagaggcctaccctcagggacacattcccttctcagggatgttccttgctgagaaaaagaattc

SEQ ID NO: 200101 - DNA, 1000 bp, Homo Sapiens
agcttttcctttgcagtcattacagcttatgcctgtaatcccagcactttgggaagctgaggccagcggatcacttgaggtcaggacttcgagaccagcctggccaacatggtgaaaccccgtctctactaaaaatacaaaaattagctaagcgtggtggaccacacctgtattcccagctactcgggaagctgaggcaggagaatcacttgaacctgggaggcagaggctacagtgagctgagatggcgccactgcactctagcctgggcgacagagctacactctgtctcaaaaataataataataataataataatgctctttgctaatctcctggacaacttgttgcggtttctccatcagcaatttctgctgcaccttggtatttttgttatggagatggcttctttccttaaccctcatgaaccaacctctgccagcttccagcttttcttttgcagcttcctctctgctctcagccttcacagagttgaaaagagttgctctggattaggcttcggcttaagggaatgtttggccggtctgattccctatgcagaccattcagactttctcagtgtcagcaataaggctgttttgttttcttatcattcgtgtgttcactggagtaacacttttaatttccttcaagagcttttcctttgtattcacaacatggctgactagcacaagaggtctggcctttagcctgtgtcagcttttgacatgccttcctcactaagcttaatcatttctggctttttttttttttaatgatcttttaatatgctgttgaatatggcttgctagtattttattgaggatttttacatcattgttcatcttggcttataatttttttcttgtgatgtctttttccagctttagtatcagggtaatgctgacttggtaaagttagttagaaggtgttccctcctctttaattttttggaggagtttgagaaggattggcattaattcttctttaagaagaattc

SEQ ID NO: 200102 - DNA, 1000 bp, Homo Sapiens
ggtagacctcctctccatccccctcactaaggttcagtccaagattcaagtgccccagggtgttttgacgaaggatctcccagcctcggtgactgctgctctgggacgcggtccgggacagggaggaagttggaagagccaaagaggctctggctagagtcccactctcagccccagagggctgtttctcagatggatgctcctggtcatcctccttgtctgagttcttgaacacttccacatagcgaagcactcgcagaggattctgatcattgtggttctcaaccctgataaggggaaaggggaaaggactcaatccaggtggggagacatgggcaggggagaagtagaggtgaccatttagaaagcagggtcaagagggaagcagaaataaggcagcagagttgaaacaggaagagtatctgggatcaagtgaagggaggtgatggagggcaggctaacctgggatagagataatggaggctgagcaatcagggcttgcagggtggtaggacgcacacaggtgtgtgtgtgtttgtgtgttactaatacgtaggaatgtgaaagagaaaacagagccaactaatagataagcgtgtcacaaggatgacgagatgcaattcaggaagtaaatttgaggagagaggagagtcacgccgggagatgagggcagaatatgaaggaggaagttagatccaagccaaaagtacactggagatgaaggtcagctcagaacaaggttacagcaagtctggtaacccatgctgacgtctgagcatggacacatgcacacaaccttttacacgtggctgccctgaggtacacacagcattcttcgtacccctccacttcagctccagccccctcccctagacaggctaatgcaggctccaggacgcctgtcggtcacccttgcttccgtggccttatacacatctgcagttttgcatgtgcacaccatcactcaccgcaggaaccagcggtcccccagcccgaattc

SEQ ID NO: 200103 - DNA, 1000 bp, Homo Sapiens
cacagacacgcatacactccaaagatcagtcatcagtactgttccggcacacggcatcaattccaactgatgagcctcacaaatttccacccttttacggtacctggagtgccagttcttagtctttctgggtcttcagattggaaaagtaatttttacatagatcaggtaaatcagataaaaagacatatatctgaaatgattatcacagtccttaaaatttatatgaaattacaaagtgaatcaaaagcaataacaacagttaagatgacccagttacaggaaaagatgtaaatgattcacatttggaacaacgactattagtatctgatacttcatatttgttcaggaactgactagttccttgcatttcctcttcttccatatgcagcattccttttagtcatttaactgctggtgtgatgataaaaccaacatgaaaaactgaaacaaaccagccaatttatttattgactgcaggttgattaacctgaggcttggggattatccattaatttcatttatctgtaatgttccccttgttataaaagaaaattataattgatctcaccttgaaagtcatctaataagaattattaacataccaaactactgatatagccaagcctctaacacagggcttggcacatattaagtgtttgaatattggttcatgaatgttggaatgaatgaataagcaatatattaaaaatgtatgcaagtcctattcaaacagatgttattattctataaagttaaaacaagcttatgactttcaaatacttaagaaatacttaagaaggtttgtaaatgagtcactgttatcttgggtgagataattaatcacggttaattcagtgataaattttacattctaatttaccagccaaacttcctcaatattaaagaatatcatgctaaattctgtaatttgtaatttcttgattgatttaaaatatattctattttagggggactcttttaagaagtcttagaattc

SEQ ID NO: 200104 - DNA, 1000 bp, Homo Sapiens
ctatatttgatttttgctctctctactcagaggtcaaatagacatctctaacttaatgtgtccaaaatattgtttgatcaataaactcccacaaaccctaccagaacttccccatattttcttaaactcagtaaatggcatcaccattaacaccattatttaagctaaaatccctggtaccatccttgattcctccctttttctcatatcacacatttaattcagtagtaaaccctttgagctttacctagaacatatatcctggatccaacatctcacaatatccattattactgtaaccatggtctaaggaactggaaagaaagtggagagtggaaagagagatcggggtggagaaaaagaaagaatgggggatcaagaaagaacgggaagaggaaaggagacagaatccttattatatcatgtgtccattacatacctgaatctattctgatgtccattctcttggatttcccagttcagtaaaccataaaaaatctgttttattttttgaagtttgagttccatcgtacttacttacaataaaaagagcttctactcttggtcatcagtctcagtgacttaaaaatatacatgtgactaaatctacctaacagcctagtctcttagttacttaacctcctcatctgtaaccttctcttccacttcatctctgtcaatgactttcatggcaacccctctaagatcttatcactaaatatggcagctcttgtgaaatcttgcttttaaaacattcttttctctgaccaccacatcctttgctcccagcaagtatgatatgatgccctcctatatttctttgttttgactgagacctctaatatctaagctccttctcagtatccatctgctccctcatatcttctcttcctccttgcccaatttagattctacagtccatagtcacaactacaccctatcaaataccctcaactccctctggcacatacttaactaaaccataatcccattggaattc

SEQ ID NO: 200105 - DNA, 1000 bp, Homo Sapiens
aggtgactgagctcagtaaaaagcttttgggtaaaatcaaaaaatgccataataattttaaatattggacctatatgcattataatcagaatgcaagtaaattctaaaagagaaaaattaaaacttagactattagctagattgttgaaatacatgtgtaaatatttaaaatgattgatgtatagcagatattttaaaaacataacatctgatatgtatttgtttctcctgtctcagcctcctgagtagctgggactacaggtgcccaccaccacgcccggctaatttcttttttgtatttttggtagagatggggtttcactgtgttagccaggatggtctccatctcctgaccttgtgatcctcctgcttcagcctcccaaactgctgggattacagccgtgagccaccgcgcccagccttttttttttttttttttttttactatttcttgtttagtataaggtgagctttgtacttttggagatctatgaacaacaaccccaccccaaatttaaaaatacaatgaaataatttctaattaaacactaagtcattagatgtaaaatacattaattcattatttgctttataatattggaaatattataaatataactatgtttagtttttaaaatcatagagattttaaaataaagttattttttctttttctaagatttatttttagttttctaaacttaatttgaataaaatgttcttcatagaaaactgaatattttcataaggatgctttaattgcttaaaatgtgtaaagttaaaattatttaaaaattaaaatttgaaataagccttaatttcagtaaattggacaactataccttttgaaatacatcaaattgcaaacatttaaatgaagaaccatttgctttaaataattaaacatttgcttcataacatttgcaccattagcttgttcaaaaaaagacttaatcttagtaggttaaaaactactgctaattctgattcaagtgaattc

SEQ ID NO: 200106 - DNA, 1000 bp, Homo Sapiens
atccaagtgaatgtcccacaagcatagccattcggggaaggccatagaaacctcactttccactctttccaaaatcttctcctcttccctcacccaacaaaaagcattattatcctcccagtgtcataaccagagccctgggcaccacctgagatttctctacctgctgtaccccttgatccactctcccaccaaactctctccatgtctcccttagatccattcctcttcccgatgcccttctcttgggtgtcctcctcctttctctctctccagtctctctctctcctcctcccactcttatattggatacttgagacccctgggatcattcaccagtctctgaacatgttacagggaatgtcacatatacaactaattctggggaattaaatctcttccattcctgttgtcttacaatataactaaaaaaaaaaaaaaacaaaatgaaaaagaggccttctccttttccctgcccagctttcattccacaggcaactgtgtcacacatttgttcttgaagtttatctgcctccatagttctctggcaggtggtaaaatacaacctatcaggtcaagggaccaggaggcgagtcctgatgaaaatggtccttctgggaagcaaaaggccctgcagaattcgatggccccaggaccttgggatgactcgacatctaagaaggttttcagatgttgagttttcttaaactggagctcatctgggtaccaaaggaggctttggatgtgacatgtcaaagcaaaggagcaaaggaaatttgctcccaggtcaaatttattttgggaagtgcagggggatataaaaaattatgttggtaccgaaacaaaaaaaaatccaataaaagccatcacatacaaaaaacctgaagaatatgaggccaagagagattagcatgctccgtgaaatctcaagcatcaagaatgtccaaagtgttgaaacttcacttgaaatctcagagacaggtgcggctctgcctttgtt

SEQ ID NO: 200107 - DNA, 1000 bp, Homo Sapiens
caagctccgcctccctagttcacgccattctcctgcctcagcctcccgagtagctgggactacagacgcccgccatcacaccaggctaattttttttgtatttttagtagagacggggtttcaccatgttagccagggtggtctcgatcttatgaccttgtgatccgtccacctcggcctcccaaagtgctgggattacaggcgtgagccactgcgcccggccaaattactgtttctttatttcttccttgtaaaacagaaaaatacattttctattcataacattctttacatctctcttttctacttatgggttccctcatactttgaacctctcttttaataatttccaaattagacaaaagtgtttttcccaataaagactacatttctttggtacattttatataagcataagaagaaaaaagtcctgaactgcctgccagacattggcattctgtagacaaaaaaacattctaccattttaagatttaaacacaataagttcactatttaagcatctattccattcacatgtatttaactcttccacttttaacagtgaaccacctccaagtaccaagataccatgcaaagctagtcatcatttaaagccattttaaccattttaaaatgatttacccagataaaaatcttaaagttaaattttagaagacattacattcacttcaaactgataagctttgactagtcttatttaatttatgattactcttttatttacaagccaatttgacagcctgttagacacaacacatatcacaatacctgtatatatgcctaaacatattaagtaattaatgtgttttaatacatcaaatcacctatacagtacaattcaattcaattcattaattcaattcaattcaattaattcaattgaattaaccaattcaaaattggctcccaagtacgtggccaaattttgtttgccccaacaggtatagaaaacaggaagaggcagggaaggaattccgcg

SEQ ID NO: 200108 - DNA, 1000 bp, Homo Sapiens
catcttcctcccagacaagggggaataaagaaaggaagatgatcaggagagttctaagtggaactcagcagccagaggggaagccggaggaggtaacatcagagggtgcgtttgcccactcagtaaagtaggaggcagggcagccttgtgaaaataggaatggaatagaaagctcaagaaaacagccaaaagcaagggcaattaggggaggtttcgaactggcagatctacctcaactggcaatacagcaagcatgcaccagaaaagatatcctagctagcagtggggttgggaactgatttaatatcctaggctagcagtggggttgcgaactgatttattatttaattttttatatctattcatgtatttatgcacttatttatttttgagataggctctcgctctgtcacagaggctagagtgcagtgatgtgatctaggctcactgcagctttgacctcctgggctcaagtgatcctcccacctcagcctcctgagtagctgggactacaagcacgccaccacctaggctaatttttgtatttttttttgttagagacagggtttcaccatgttgcccaggctggtctcaaactcctgggctcaagcgatccatctgccttggcctcccaaagtgctgagattacaggcgtgagccactgcgcccagccaatattttttaaaaattggaaatcccttgtaataagccaagtgttgggggaagaaaagcaataaaagcaatgacatggactcaatatgaaacatccaaagcatttgacatgcctttaaaataaaaaaatcagtactcacctcgtgctcatttcaaactgtggatttccttggtctaaaattttaaaaaacaaaaaacagcactctcaaatttaagctaatttgaattgattttacatagtgatttttaaatacacatatatgcataaagagaatactataaaaatatataaaggtgtgtaggtcttgatcatattttcccaggaatt

SEQ ID NO: 200109 - DNA, 1000 bp, Homo Sapiens
agtctatcatatgttaaaatttatgaaaacttaagctcactacatggcgccattcacagttgagaaatgtaaaccaatgtaaagccatattaaatcataactgcataaaatactgttctataatatagccatctgttgctactatgagctcaagtgttgctagtatccacttaaaacaccatgtgtgacacttatcactgttttatagcctattactggttatgttttgggggactcaaaagttttatgtgaatttttgattggcagtcattgttcaggggtcaccttagtgaattaactgcaaagtgagcaattttgtatccgtgacacaggtcaagagaacagaacagtgccagtactccagaagcttcctcatgaccccttgtggtcactatcctgtcccacttccctctccaaaaggtaatcattatattggtctttattggtgctttgatttatggttttaccaattcagtatttctctctaaacatgttgagatgcatctatttgaactatagaaatggaataatagagtatgtatgatttttatctgtcttcttttgcccactatttgtgaaatgcatcgaggttgttgcttgcagctacacgttttttttgtttcattgctatatatagtattccttgtgtatgtctgtagctggctctcacacatatccattctgttgctaaagggtatttacattgtttccagtttgaggatattaccaacaatgttagaggaatactcttacatctcccttggtgcttatatgcatgtatttctaaaagtggaattgatggttacttccatatcccagtcaacccctgtcatctttttaattttgcctctctggtgggtgaataatgatttgtcatgatgtttagtttgatatttctaggttaataaggctggccatttagaaatctcccttttataaggtgttggttctaatacatttctcctggttttttaaaaatttattatgttaataggaattc

SEQ ID NO: 200110 - DNA, 1000 bp, Homo Sapiens
gagtaccggtggtactatgatgtcggtgaacacaatgaccaaaattatggccacactgatacatgatgagctaaaaactccagggccagccccttccttctgcctcaccttcagatcccaggaatatgcacatgcagtaagaatccagagttcaggcccaaatctgtgcctcagccgacaaagtggaccttctctgccagggaaatctttaaaactaccttaacagatacaaacaatccctgctgaaaggtacagtcagtaatagtctaaacacaaactacacatcatatagaaacctgcaaggaataaaaactgggacaaacattaatatagtaagggaattccatccaaagcagaaacggggctctaagaagcaaatgagtcattttagggtcttacattttaatcagtgtttattaaaaatcttctttgaatgtagcactgtgggagtgtactgcatcactgccaagcctcagccatcccacccatgcatttgtgtgaactagaaaaacattcccagccaggcacggtggctcacgcctataatcccagcactttgggaggccgaggtgggcggatcacccaaggtcgggagttagagacctgcctgaccaacatggagaaaccccatctctactaaaaatacaaaattagtcgggcgtggtggcgcatgcctgtaatcccagctacttgggaggctggggcaggagaattgcttaaacctgggaggcagaggtcgcggtgagccaagatcacgccattgcactccagcctgggcaacaagagtataactccaactcaaaaaaaaaaaaaaaaaaagttcccctctgcagggaggtagccctacatggcttggtgagcagagggcactactgtatatgcaagacaaaattgtaaagactcttcttcctctaggctgatgcagacaaggcccagagcctaagaagaagaacacaggcaaggtatcagctcctacttgccccctcagccaggcaagctt

SEQ ID NO: 200111 - DNA, 1000 bp, Homo Sapiens
acattttgcctggaggagaaacttaacatggaggtaaactccatgagtaggtcaaataagcttcttggtttggggaactagacagccttgatgattttctctaatgcactaagacttgaaagataccacaagctcaattctgtaagaaggttttgtatttatttacagggaaagaagacccaactgtagcaccaccttgaacatgatataagaataatcatagccaccactgattacttgcagcatgccagatcgtgtactatgtgttttacataaaggaactcatttaacccttaactgtgaggccaggcgtggtggctcacgcctataatctcagcactttgggaggccaaggcaggtggatcacctgaggttaggagttcgacgagaccagcctagccaacatggtgaaaccctgtctttactaaaaatacaaaaattagcccagcctggtggcgggcacctgtagtcccagctacttgggcagctgaggcaggagaatcgcttgaatctaggaggcggaggttgcagtaagccaagatggcgccactgcactccagcctaggggacagagcgagactccatttcaaaaaccactgtgagaaagataatatgctcaattttcagttgaggaaactaaagctcagagatgctgggtaactgccgcagagtcataaaggttgggctaaaaacctcactccgactgactccaaaaccagggcttttcagaacccccctactcgttcccaggcgcccctggctttcttcataatacagtctcattcaaattccacagtgtggcctctccgtagaaagaaggaagaacaggacgtgttttgcagagttagatgtgagagttttgtgttgatgcctgtgaatttgaaacccctttgaacgagtcacctttgttgttgtcatgagacagaaacttttatctcattgaggttatagaacaggccagagtcttaaatacagttacgagttatagggttgtgaattc

SEQ ID NO: 200112 - DNA, 1000 bp, Homo Sapiens
gccgggcgggcctctgacatgaaactctctgttcacttcttaattaactctaagaaatgtacctcagagtctcttagaaagggaaattgttctgcccggtagaaggacagaggtgacatcaagataagagtttgagtatgacaaaaatatcaagagcttcccaagtctgccttggcccagagaattaaacatccgtggggtcaccctttagatcatgggaccattgctccctgccaaatttctgctcacggcttgttttccaaagagagtcataagagctaccctcgccctgcctactgttttggtatcaaacacccttggtactcaagcatgaaaatatgaggaactctcagatcctgattctacacactttggtaattccagatatgcacctgaattacagaatcctatttaacatctgggtgtgaattctctccccattcactctgagcctgccaccagactagccctctctaagccttcattcatgtattctccatcagcatttagtataaaactaccagtatgcttgacactactctagggacttgaggtacaaacaggcccaagacatgatctatgccctcaaagggtttattttctagcagggaatacaaatgtatggattaataatagcagctactgtttattaagcccttatgaaatgctttttcttttagtgacaacatctcactatgttacccaagctggagagcaatgaccatgatcatagctcactatagcctcaaactgcttggctcaagcaacactcctgcgtcagcctcttgggtagctgggactacaggcacacaccactgcaccctgcatatgatatgcttttgataaacatcgagctaagtagttgtagtagacagcctctaaaataggccataatgatcttctcctgaaattcacatgcttgtgtagcacccttccacattgactagggctggtataaataataggatctatggaaataacagtacatgacctctgaggc

SEQ ID NO: 200113 - DNA, 1000 bp, Homo Sapiens
acacacacatgcacaaagtgatttagacaacattattttctgcctaaatgttaaagcttaagcagcttacaaccaaggtggtggctccatggttttgggatgccagcgccttgtactactgtattagtccgttttgatgctgctgataaagacatacctgagactgggaagaaaaagaggtttaattggatttacagttccacatggctggggaggcctcagaatcatggcaggaggcgaaagacacttcttacatggcagcggcaagagagaatgaggaagaagcaaaagtggaaacccttgaaaaacgcatcagatttcgcaagacttattcactatcatgagaatagcatgggaaagaccagcccccatgacttaattatctcctggatccctcccacaacatgtgggaattctgggagatacaattcaaattgagatttgggtagggacacagtcaaatcatattaatccacccctggcccctccaaatctcatgtcctcacatttcaaaatcaatcatgccttcctaacagtcccccaaagtcttaattcatttcagcattatcccaaaagtccacagtccaaagtctcatctgagacaaggcaagtcccttctgcctatgagcctgtaaaatcaaaagcaagctagttacttcctagatacaatgggggtacaggtattgggtaaatacagctgttccaaatgggagaaattggccaaaacaaaggggttacaggacccatgcaagtccgaaatccaacagggcagtcaaattttttttttttttttgagacggagtctcactctgttgcccaggctggagtgctggcatgcagtggcacgatcttggctcactgcaaactccacctcccaggttcatgccattctcctgcctcagcctcccaagtagctgggactacaggcacctgccactacgcccggctaattttttgtattttttagtagagacggggtttcactgtgttggccaggatg

SEQ ID NO: 200114 - DNA, 1000 bp, Homo Sapiens
tgtttaccacatgccaagcactagtctaatgactttatgtgtattttcctacttaatccacagtacgaatccacttcttctgtgtgtgtggttttttttttttctcttcaatacaaatataagcttcttgtacacaggggctttgttttgcttgctactttatctcccaacccccagaacagtgtctagcctaggatattactcataaaagcagctcaatgaatgaatgaagctgctcatattatctctactttgcaactgcagaaaccaaagcttaggcagtaaatgtcacttgctccagtacactcagcaaataaatgtcagagatggaatttcaactcagaccactggacacccccgacctacccatcctttgctctgtacagcaacctgctacatttccctgacagtctttgagaggctgtggttaggattcagcaagaggggagaaagagttgaaagggaatatttagtctgaggttgatttcttctttgagctccttgccttgtgcagacctgcagccaggactcacgctcaggagactgcctggcgtttcacagtaaagcagttggtaacacatcatggcggaattcagtcctgcaggtaacactgccccctcccagctttgtgaacttagcaacttattctaccttccccagcctgtctacttatttagaacctgaggataacaataacaacaacaatagttactatctggcagcacagatctgaggactaaataaattagtaggtataaagtgctcctcaaagggagtgcagatcaataaaatcttcaggagataaaatctgcaggagagcaccccaaagacagtgaagatcaataaaatgccctttccctgcctctgtctaccatctttaatatcatatctagggcaggaggcattccactttataaagaactgcactgaaaatgaactttatggccagatgtggtggttcatgcctgtaatcccagcactttgggaggcctaggtggat

SEQ ID NO: 200115 - DNA, 1000 bp, Homo Sapiens
caggctggagtgcagtggtgcagtctcagcgcactgcagcctctgcctccaggctcaatcgatcatcccacctcagcctccagagtagctgggaccacaggggtgtgccaccatgcccagttaatttttgcatttttctgtagagacagggtttcactgtgttgcgcaggctgatctcgagctcctgggctcaagtgatccttccacctccacttcccaaagcgctgggattacaggaataagccattcctgtattaggctcagccacagtcctacagcccagatgcttatagttgtatttaaagcatcaggtttccaattgtattagttttctatagccaccataacaaagtaccaccaacctggtgacttaaacctcagaaatgtagtgtctcccagttctgcaggcgagaaatccaagatcaaggggttggcagggttggttccttctgacggctatgaagtgggagcctgtctcagatctcacctctagcttttgaaggtttgttggcaatctttggtgttccttggcttatagaagcatatcacacccatctcttccttctccctcatgtggtgttatccctgtgtgtgtctgtgtccaaatttctctttcttatcaggacactagtcatattgaattagggtctgcccaattctgggatgactcgtcttaactaattacatctgtaccaaccctatttaccagcaaggtcacattgtgagggttaaaatttcaacatatgaatttttggggagggtatgtgatacataattcaacccataacacaaataaatatttctttaaggatcagaagagtaaagaaattgaagggattctaatatacaagttctcttaaaataacacttaaaatattaagcataaagttttttaaattaaaaaattgttttatttgtaattgactaataattatatatatttatggggtacaaaataatgtttcaatacatgtatacattgtagaatgagcaaatcagg

SEQ ID NO: 200116 - DNA, 1000 bp, Homo Sapiens
aatttttttatcagattttaaggttttgtgtgtatttctaatttttgtttcaattgcttttcctgtctgctttcaacttagcatgagggcttcctatctaatatcaaataaaattatgttaaatatgaatatattagatacagattgtaggagggggggatggttaagtgaggtatcctaattgatctatacttaactctaaattccaatactctacggcaataccatcaaatgacagtaaaagttgtgttatcacttcagtgaaatcatttcttaacataagaagactgattttgacttactagttttagaataagattaagtaagaagacttaaaggcccacctttgaactcataaaaagcctggcctagtgaaaaagcatattttactggtttgcttgcttaaaattatttaagactcatattttaccttggagatgattttgcctataaattaataaagatgtatgtttctggaaaaatggaagaaaaaccgtgtcctttttttatttcacgtttttaggcaaggccatgtgaatcttcctccacttgagttcaaaccagcattaatgttgggaacctttagcatcagtgctgttgtaatggaaaagtccgtgtgcacccctcagaactctaccagtgccctttcttttcatgatctcagcaagcggtattataacacctttcactgcaactttactatttcctgtcagtcaataagccagcatgtagatatggctttggttcgtcttattcatcagtttagcacaatgatagatgacatcaaagcaactcagactgatattaaacttagcagatatacagccggatctgcttccccaacacctaccttcaaaaccagaaaacatcgggactttcgttcatctgactttagccgcagttctagaggaagtcttaatggtggcaatagagtaaataatgcaaagaacaaacggaccaacaatgagaataacaaaaaggaatctcgaaacaagaattc

SEQ ID NO: 200117 - DNA, 1000 bp, Homo Sapiens
accttccctcttctcccattcctcttccacgctgaaacaagaacaatctctaaaaacaaatctgagtatgtcttctgttatttaaaattcctataatttgtccatgtgtacaggctcaagtccaggctttcagcacagtcgacaacacagtcgggctccaaacagtgcatctacctttatctcttgccgttttgcccctctccctgggcttggcaaatctgaactgctcttccttcccctttcccagtggtgctcttgcgcacgcgattctttcccctcgatgccttgccctctgtatctaggaaacagtttttcttccaacatccacgtcagtcttcctaaactcctcctgttctgatttttgcagcactccctgggaatatgctggtgtcacattttactcagaaatttggtttttaaatcaacatatggggtacattgctatagagagatagcttaaaatctacgaaaaagtagaatatatgtggtttgatgtatatagtgcagtaattctcaggcccacggaaatttaaagaccagcgaactaatctaaaggaaagcaaagtcagtatgtagaagcccacaagtttataccacctgcctggaccacagctgtcacatccccgtcaagctgtcattatggcatgggtggagaagtctagtgtctcccctggcctgcagaatttgctccattctatttttttaaataatccactctgatttaaacagatagtaatagatttgttattctttgagaaatgaaaaactaggtggtatgttggggagaggggatcagattttaaagtcagggcagaggtcctttccatcacacacaagtattgcaattacttgttcatgtggctgcttctagaatttgagttctttaagggcttacatggcttttccctcatttggtcccctcttctccccaacaccgtgagtgctcagtaagtgtttccttagtaaataaatgcaggattatcaagtgtcttctgaattc

SEQ ID NO: 200118 - DNA, 1000 bp, Homo Sapiens
atctcacaaacttcagcactgtgactatcactcatcacaagtgaactgatgcatttcgcacctgcttttaccctccagaactgctgcagcagccgccctagagccattctgcagttctgatgcacagcatgatggaagcatattgcagaagattattctggcttttgtagatagtggattaaattgggacagtgtagaatgggaattcagatagcccatggatggacttcaaaatatcaccctctaaaattggactcaaatttcatgttcagatgcccgttttccccactgcaagaggaatccaactttcatcagatccttgcatcaattaaactttctttactgcaaaaaaaaaaaaaaaaaaaaaaatgaattcctggtctagaaccctttttttttttttttttttttttgagagggagtctcgctctgtctcccaggctgagtgcagtggcgcagtatcagctcactgcaagctcttcctcctgggttcaagcaattttcctgcctcagcctcccgagtagctgggattacaggcataagccatggcacctgcccttagaacccagatgtttttgataatggaaatgatccgcaagtatttttaaactcccacaagtatttgcatatttatgtacaaattatgttcctagtttatcatcattagttaataaataaaggcacaatatccacttagaatgaagttaatcattaatgataggaaatgtaaattaatgtttaaatagttttgatggttactaaacgttcttatcctgtctaataaccttatactgaggccagtgaagacctcctgcctgaactaagaaacaagtctctcattttcttgtttatttgtggcttttgggaatcttttaaatcttttgaagccatttatctactctttgagttttagttaaaactaggttaggcaatccataaatccttttaacctggtccaccgaaatatatcaaaatatgcagaaaatgatgtaatgagag

SEQ ID NO: 200119 - DNA, 1000 bp, Homo Sapiens
ttggaccagtgaaaatccagatacaaaagcaaaacataagcccttgccaatcactaaggtcaaatacccaagagagcttggcctacaaaattatcaaagcctatagctattgccctagctactgtggaaggctcaacttctcctagatttcagcctgcaaacatcagcacttgggactatttcttaaggttcccagtccatgcgccaatatgttgaagtttatagtggaaggcaataaataacactcctctcttctctcaaattctgatccatttgagaaataattccagaactgacaaaaatttaaaaagctgttttactacatagaaaatgccttcttccttctcagtttttgtgctccaccccctgaattgaacacatacactctgccttaagcaaagctgcacaatacaaccacaacctctacctgtcagagaacttgtgtgtcctgggatcaagtctcttcaacagggggtgaaataaaacaaggataagtgccctcttccctttacttgtgtaaaaacagaaattcctactttatattctaaaagagatacagtaggagtagagttctttctgtcttcttacagccacagctatagctcacagtcctgttgtagttgagattttctgagtcttgccatccctcagggctataactgactaagccagttatcaatctatttaactcttaaataccactaatttctatagcatttctattacccacgtttctggaccaagtgacaggaatcaaatattagacaatgtagaaatgggatactgggctccatctcaatgacacaggccaagcctgcatctagtattagcatcactagtcctcttcttccttgtggctgggcaaatccttatttgggaggaattcgggggcatgagaggagtggactcttaccctatgtgtcattcatgaaataaaaccagtgatctcctataatcccagcactttgggagaccaaggagggcagatcacctgaggtca

SEQ ID NO: 200120 - DNA, 1000 bp, Homo Sapiens
gtatttcttgtcttaaaatgcctattgtgcttttcttttgttcttagatgtaaaatggggtaaactgagagattatcaggtccgaggattaaactggctcatttctttgtatgagaatggcatcaatggtatccttgcagatgaaatggtatgtgttggtagttttttttgaagggtatgttttgtattgaaaatatcttatacgttgataaaagtttcttacagtctacaactgttagcaaatggatcctctcagaaactagtataagcagcttgccttagttgcataagtgtgatctgtattttaattgtgagaaatttccatcgctgaaaatatgataaatttaaaaagaatacatttgagaaacatgtttttggatgacttttatagtacaatgatttatttgcttccagttttgtaaaacaaaagtgaggtcattaattgtttataattgataaatgttttttccaggtggtagcttgtacaattcttagaaaacatttatcttttgttaactactagttatgtaatgaatgtttaaaaaagtttccttattgctataatgctaaaacgtttaattggttggagaaagtatgaagtcaaaagaaatgtgtttcaatgctagctctgctagatgactttgggaatgtcacttaaacggggccttatgcgggtgataataatacctcctttagagacttgtgaaaattatatgacataacacttacaaactttgatatatgttaagtttttgccatttattaactgttataaatatgtagcatttcttttgaacatttctatatgttgggaggtataattgtgaaataatattttcatttttcactgcttcatggttattttgaaatctttcagggcctaggaaagactcttcaaacaatttctcttcttgggtacatgaaacattatagaaacattcctgggcctcatatggttttggttcctaagtctacattacacaactggatgagtgaattc

SEQ ID NO: 200121 - DNA, 1000 bp, Homo Sapiens
aggctgagcttggaggagtataaatcaagggcttaaggttttattatattctcaaagcacaggatttctgcatgggtgtgcagtgaagttcatccttcccagtgagcaccctcgttcaccttttgtcctctgggccccacttgtgtttacagtacatgtttgtaaaacagagagtgacctctaacaccaagtctagtaagaggcagtgccactgtgtatgttacacagtgtgaggcaaaaggaggagtagcgcgcgcacagaaacgccgtattcaagccttggcagcacaccacggcagtaaagctagcggagcccgtccctggggtgcctttaaacccgcctgcattcacacttgcgtctttattgtcttgtggcagaatatgtatataaccagacattcatctgctctttcccaagcccatctttatccgccccctgtgcatgcccggctgctgccctgaagccttgaaactcatgcgtctaccacccagagcacccatgcttccctggacccaggcgtctccttcctccagaccccagcccctttctggctggcattatagggtagaagaggagacgtcacgtgtctcccatgagccactccctgcttcctttctcctgagaggccacagcgcttttcctaacagtacctgcccaagctgctcccatctcacctcagaacaccaccgtctccttgcttcacccccgttcaactcacacgaagcactcagttaccaccattttctcagaggccaacgaggtccaggccccagagactcacttgtttttaggagtgcctgggcctctgtacaccagccatgcagtgcaggagatggagttcttatctgagcaaggcagcctggtctcagtcctggctctgttacttctttgtggtgtgacctggtcaaattacctgtgtgtccaagtttccccatctataaagtgggaggtgatagtaatggctaccttattgggttgttgtaaggattaaatgaattc

SEQ ID NO: 200122 - DNA, 1000 bp, Homo Sapiens
tttactgaatgctccgtatgtaagacatataaatctgtaaacataacagattacccctaccctcatggagcttacattctagtagagacaagaagttaagaaattcaaaataattaccaattgtaatgcactaaaaaagaagtaccctgggtagtgagataaagagtaacgattgtgtacatgtgcatgcgcatgtttgtgtttgaatgagagcgaggggttcagagagtgtgtttggggaaggcctcttaaggagtaattggtgagccatagcctgaggaagaagcaaagcagtcataaaaacactggaagaatattttaggaaaagtgaacaagtgcatatttaggatggcacagacaagactctttgtaaactatgtcctggttatccctccagggtcatttctcaccattctgcccaacttaaattcttcagccatccatttagcattgctttgcatcccttaaaacagtggcctcttgcctctggcctttgtgttaactgtctcagtaggcctgcttgtactcagactccagagattgcattctgcttccatatatagtaaacattctctacacttgcatgaatgtcatgattgcattaaaatggcaacataatattccactgaatactgtcataatttactatattatcattcacatacttttaaatacttaacattgtttttctatattaattatatataatacactacatattaaatgacatacatatagtgtattatatataattaataagaacataatttttcaaaacactacataatgataaaacaaatatcttcattatggcaaacttttaattcctggaagggttatccatatcgaattttcaaaatgaaatactaagagaaaataaaataattttaaccttagtttggaaaataaaaattttcaagattagcatatttcaaaaaaaatttatacaccttacataaacaaacactactctccatcatcgacaaagtttctatatata

SEQ ID NO: 200123 - DNA, 1000 bp, Homo Sapiens
aaagtaaaaagatataaataggagcccaaaatgttaagtggggttttacaatcaagaagacacaccagaataagatattttttaaataccatgtacattaaagagatcatacttccttaccctaataaacagccatgtagtacaagttttaactttttaattaaatattaaaattattaaaaatattaaatatacaacttctatttggttttatctgagccattcctttatactgacagttacatgatgtgatttcagttatatatgtagttattggtaatttttcaaaaatagaatataatgaaaaaacttcatttcaatcattactgaactgcacctacattaatcacaatatacctatgaaaagatgtataacatatactagtatgccaaaaaaaaaagtgacaaaacagtatttatagtataattccatttttttttttttttttttgagacggagtctcgctctgtggcccaggctggagtgcagtggtgccatctcggctcgctgcaagctctgcctcccgggttcacgccattctcctgcctcagcctcccaagtagctgggactacaggcgcccaccaccatacccggctaattttttgtattttttagtagagaccgggtttcaccgtgttagccaggatggtctcgatctcctgacctcgtgatccgcccgcctcggcctcccaaagtgctgggattacaggcgtgagccaccgcgcccggcctaattccatttgttttcaaagaatatatatgcctatgtctgtatttttttctacatacatacacgtcttatctacaaaccaaaaacatctagaaaaatatacaaaaaaagcttccagtgataacctctggggagtaaaactgaacttgtgatgtataccttttcttagaatttgaatttatgaaaagcacatatacctttagaataaaaaatactttaaagctctatcatttacagtaatgcaaagtgatccaactctgaaattccc

SEQ ID NO: 200124 - DNA, 1000 bp, Homo Sapiens
ggccactcacttcgtcttcactttctactcaagacaatagaggttataacagtaattaaaaacaatttttttttaattgagatggaatcttgctcttgtccaggctggagtgcagtggtgcaatcatagctcactgcaaccttgaactcttgggctcaagcaatcctcttgcctcagcctcccaagtacctgggactacaggtgcatgccaccatgcctggctaatttatttttattttttgtagagatggagttgcccaggctggttttcaaactcctgggttcaaataatcctccttctttagccttccaaagtgctgggatcacaggtgtgagccactgtgtctggctgtgatttttaaatatgagaaaagtgggtcagccaggagatcagaatctgaggttgggtcatgggaaccagccctagagtcttagctagacctcagaagtcaggatcccagcctcacacccacaagcatggccagaaagcaaggataatttaaatatatttgttcctatcaaccaaggcaattgtttcttgatatttgtgtaaaaaatttaaattctactctcaagggtatttgtcactcaggctttaaatgccagctttgtctgcccagtttagacccagcctgcattcctgacttagtttacccaaaggaaacggctgattttgtcaaacttggttccccctctctggcttgtatctctgaattcaacatgcagacaacaaatctatggtgtgcacatccacccaacacaactggccacccatgggtttggagatggggggaacagaacaaacctctctgtgtcatgcaaaccagggaacctagcagagcttctgagacacggtgggaacacgtttcacatttggaggtaggtttatggtttacatttgttacaaggtacttttgatctcctggcttacaactgagaaagctgaggccacgttaagggatacacccaagttcccacagctgtggttgatttggaattc

SEQ ID NO: 200125 - DNA, 1000 bp, Homo Sapiens
agggggagaaataacttgagtcacttaacacagtcattcaccgcacaaccaaccttatataatacaaatctcctctagatgcctttattctttctcctatagccccttgtcaattcccatttttgtccccagaaattcacctctggtcctcagcttgtgcccagattgaaccatgcagttggccagcccacccatctttgaaagcaggtcagtgatgacacgttttaatcaagcacactttgaagtctcacacctacacacatacccagattttcacacaaagcatgtttctttctaggcaggatgtggcagatattgttgctgcctgtttggccatcattccccagacttcctggccaaaagaaaagtccccaggtgccagcaatgaatcataattgatttaactcagtccgtccccttaaggagcctttttagatatgttttcctgattgcttcctcccatgaaaatttaatacttcagatacactgtatgtttatgtactttatgcatatctgtactttatacataaaaaatgtgatttttttttgaaatggagtttcactcgcgtcccccaagctggagtgcagtgacatgatcttggctcactgcaacctccacctcctaggctcaagaaattctcctgcctcagcctccctagaagctgggattacagctgcgtgccaccatgcctggctaatttttgtatttttagtagagacatggtttcaccatgttggccaggctgatcttgaactcctgacctcaggtgatctgcctgcctcagcctcccaaagggctgggattacaggtgtgggccaccatacttggcacagtatgatttttttttttgcccccaagaaccaattttcacccccttgagggtgacatcaccctcattaagaatacatgatctacatcaacaaagcaattgcttttgccagtgattggtctaaggttggcgtctggtcccattctggccaatgaaacatgaaggaattc

SEQ ID NO: 200126 - DNA, 1000 bp, Homo Sapiens
atcaacaactgaacaaaacagaatagaaataattatttctatttttgagagaatattatttgttgggagaaataaaagtgaagtgttagggaaaaaagacctcttctaaaacacatctatgcaaaaggaggtgtgatataatacataacacagtttttttcagaagccacccaaaagagaagcccatagctgtaattcctgagtacctctaccttttccagggactatgagccaatcattctgaatctgcgtttccagagcgttctaattcctagggttggctttcttctgggcttgtcttacttttagcctacgttttagtttttctctgttaagttcgttaccactcatccatttgcttggctgctaccaaaattttgttgctattgtttctcttcttttcctttgttcttgtgagtttttactttaaaaaaaaaaaaaaaagaaacctcttggctgtcattttagtggtgtttcaggacgaaacaggcaaatgtgacttaatatgccatgctatctgttactttccttttccctaagtctctaaattgcaattatcctatttggagatctttacttttgtatactgtgtgtgtgagtgtttaaaatgcatcatttggttcatggtttaatgggttaatgaatcacaaaaggagatacccaggcctggtccagatgactgggtataaattggataccctggacctcgtccctttcacaggaggtggctaagactcctgggaaaagtgcgagagcgtcggcagttgtacatggatggctgccttatgtgaagaaggaaaattctggacgtggaaatgtgtacgggaaggcttgtgtgtgtgcatgtgtgcacacagctatgtgctaggtaggaaaaccatggtctgctaacagtctcagttatttttctttcccaggatctctctctcttcttcttcttcttttttttttagagacagagtctcgctatgttgctgaggctggagtgcagtggctattc

SEQ ID NO: 200127 - DNA, 1000 bp, Homo Sapiens
tgagagtgtttaacttgaaccaacatgtccagggagtatactcttacctgttcattgccttttattcctcaccagccattcactttttaaattactagatggttgcttccactcccactgttgtcatctaaaaatattatttcagtgattatgaacaatctcctcattagtggagtgtttttcttctccattactagagtggaagtaatttgaggtcagagaatgtatgccactttgtttactctatgatacttcgtaatacttacacatagtaaattcacagtaactgtccattgagttcatgaagctgagtgcagtctaatttagcacaatccatcgagttcatgaagctgagttcagtctaatttagcacaataattataggtaaatatgaagacttcttcacttagatcgtttgtgttttgttttctacacccataaaatgagcataattgttcctaaatcagagttcttgtgaagattccaggagatgatatttgtgagtgttgttagattatatcaacacatggcagacatttaaaaagaatggctttggccaggcgcagtggctcatgcctgtaatcccagcactttgggaggccaaggcaggtggatcacgaggtcaggagttcgagaccagcctgaccaacatggtgaaaccccacctctactaaaaatacaaaaattagctgggcttggtggtgggcacctgtaatcccagctactcgggaggctgaggcaggagaattgcttgaacctgggaggtggaggttgcagtgagccgagatcacgtcattgcactccagcctgagcgacagagcaagactccatctcaaaaaacaaaacaaaacaaaaaagagtggcttctcttcctctctctatcatttccatacacaaccccttctcttcatggagtactttgagctgacatgtgggttcaaattttggacctgtgtacataaatgtttttgcctttctgtgtgatatgcatatggaattc

SEQ ID NO: 200128 - DNA, 1000 bp, Homo Sapiens
ctcttttttcttattggtttcaaagaacttctttatttctgccttaattttttatttacccaggagtcattcaggaacaggttgttaaatttccatgtagttgtgtgctttgagtgaatttcttaatcttgagttctaatataattgtgctgtggtctgagatactgttataatttcagctctcccacatttgctaaatagtgttttacttccaattatgtgataatttttagagtaagtgccatgtggtgccaagaagaatgtatatgctgtctttttggttgcagagttctgtagatatctatcaggttcacttgatccagagctgagttcaagtcctgaaaaaccttgttaattttctgtctcaatgatctctctaatattgacaatgggttgttaaagtctcccactattattgtgtgggagtttaagtctctctgtgggtctctaagaacttgttttatgaatctgggtgctcctatattgggtgtatatatatttagaatagttagctcttcttgttgagttgatttctttaccattatgtaatgcccttctttgtcttttttcatctttattggcttaagtttgttttttcagaaagtaggactgcaaccccttcttttgtctgcttcccgtttgcttggtaaattttcctccatccctttactttgagcctatgtgtgtctttgcacatgagatggttctcttgaatacagcacactgatgggtcaagactctttacccagcttgctatcctgtgtcttttatttggagcatttagcccatttacatttaaggttaatattgttatatgtgaatttgatcctgtcatcatgatgctagctggttattttgcagacttgatatagatgcttcacagtgtcattgctctttgtacttcagtgtgtttttgcaggggctggtaacagtttttcctttccatatttagtgcttcctttaggagttcttgtaaggcagggctagtggtgatgaattc

SEQ ID NO: 200129 - DNA, 1000 bp, Homo Sapiens
attgtgcatgaactaacatgggttgttgagtgcttgcttatgtctaggcattgttacctatttattatgtgtagtatctcctttggtcctattattaccttgtcaaaattaacattcacatatatccagtaaattgaccaagggtacctagccacaaagtgttagaagcaaaatttgaatccacatgtatgttcttttcattatactgtttttgagatttggaatgggagtggcagagacaaggggatgatcatgaagcagccatgatctgatctcattgccgtttttgactattcaactattcaacatcatgaacattaccttttttcagattctttatttgctgcttttcatggactctggacaaatgactagttttttgtctttgcctgtgtttcttgtactctttcaggatcatttccctactctaatgatgttgctaaggggaatggcagagtgctggtcctgtcatctttattgctaacatctcctttgagaaatatggttctggcaggtttttagaatgtagatcaacaagataagagttgtactaggccttcataagcagtgaggactggagaaatcacctagattcctcaggccagatatgaatgggctagtgttagctcatagtacaaatttcttttctaaacaaaagactatctccttgttccttcttttggaattaaaagttgcttgtaaataactttttcataatctctataactggtgtctacagattttggaaacagctttaatggtagcatatttgaaatgatctttgatctattaaaaaaaatttgtagcacgtttagaaaccaacttaagatgcagaacttttctttttttgcctttctctggaaatttctaatgatatgtccttatctttgtgtaattcttagctgagcatggaggtgtttttattttttatataattaataattttattactcaggaaattatacttgcaccttgaggacaccttgaaaatttggaattc

SEQ ID NO: 200130 - DNA, 1000 bp, Homo Sapiens
tcaaaactgctgctgcccagaaggcgcctgggcgaagagtgccaggcctgcattctggcctggccatgggcgcacctcaagagcctgcttagcctcaccttctccgctggcatggccacctctaaggcccttctcaagggctgtacccagaccaaagcttccttgcggatccttcaaggtctgaaagctgagccaaagagccagtgcttgtgcaagtcccagacttcaccaaaaaagggggtgaagttgggccagagaccaccttacacgccaagctactttctctaaatacccagtggatggaacaggtacaaagaaccaaggcttgggtgtcatttcctttatcctgaaccctgcaggggcataatttcctacacttcatattttaagagtttggtgaagacggaagcaaagtggagcatccttgcccagaaccacatagactccctcctttgagatctgtaatgagatgaagttcacaggtgtccacctgctcagctgagagaccattgttctcattaggccctggcagaagagagctaaggcgaggttccgaacaatggaccaatgtggtcggcatccaggtgccctgcacgctggggggcctgctcggctcatcccctccctccccaatcccaaagcttcatccttctgtccaggatccgtgggtccaggatgcccaatatcctaccataactgcggcagaccctggctgcttcctgccctgtaatgggcatattggcttaaaagcaggggccgcatgctgtactactctccatgtctggaatggccgagggttaggggccattttctctagggcttcactcaatggagaaaagcacatcatctcatgaaatgggattcatcccatgaagcacaaattcggcaaaggctaggctactctgaggacttggcagcttcagcaacactctgagtacttttggttccgccaagaacacatggctggttactttataccattcaacttcatgtggaattc

SEQ ID NO: 200131 - DNA, 1000 bp, Homo Sapiens
ttagccaggcatttgtggcacatgtctgtagtcccagctacttgggaggctgaggcaggaagattgcttgagcccaggaggcagaagttgcagtgagttgagatcccaccattgcactccagcctaggtgattgcagtgagttgagattaagtcattggactttagcctgggtgacagagtaagactctgtctcaaaaaaaaaaaaaaaaaaaaagtaaaaatatttagaactaaatggtggtatgtaccagaagcaactactagaaactggttgcttctggaaccctgataaaattgagctaggtaaggataggaactcttgttttcactaactctttttttattctattttaactatgtgcatatgtcactttgataaaataagtaaataagtaagatttacttgcaaaacaggtgatgcatttcctactgatacatagattcatcataaatcaaagattgcatttcatcacaccctctgccctagtaacctgatttcgggtccttatttgacaccatggtttgttttcttttttttttttccttttgagacagagtttcgctctcgtcgccccggctcgagtggaatggcgcaatctcggctcactgcaacctccgcctcctaggttcaagcgattctcctgcctcagcctcgcaagtagctgggattacaggcaccgacaaccatgctcggctaatttttgtatttttggtagggactgttggccaggctggtcttgaactcctaaccttgggtgatccacccaccttggcctcccaaagtgctgggattaaaggcatgagccactgtgcccggccatggtttattttctcattctactgggacttaatacttatagcagcagcacatggaatttgtggatctcagtatgagacactctgtaagatgtttctttcttttagattcccttagagaatcaccaaaggaaaattcatgcacagagtataaaatattccccccaaagagacttactaagt

SEQ ID NO: 200132 - DNA, 1000 bp, Homo Sapiens
atctcatgagacttactcattatcatgaacagcatgggaaaaacctgccccatgattcaattacttcccaccaggtccttctcacaacacatgggaattatgggagctacaattcaagatgagatttgggtagggacacagccaaaccatatcagaagttcaaactctcctagcctcatcagactactatcataaagatttttagtatttacctgattactgttatgagtccactacctcttacctagacaactagacagatgaaaatgttagctgaaattatgagagacttttaaagtccatttcctccccctcaaatactatggtaagttgacgggtgatattatagcaatgagtccaaagatcaaatagtcaagtgaaaacagaatagtaaaattgttttgttcagatctgcataggcaaggtgatctttagagctatatatttccactgttatttttgagagttctataaaacaaaccatcaggatgacttgactgcagtcacagagtttagatttttagatgacaaagcttatgcaaagcagtgtgcccaaatggttatttgtggccagagaaaacactcttcataaggaaccattgatagtgaacctttcaatctcactgaagcccttaccacatccttttggcctgcctttattgcagaggttatttccctttccacatcttgatagacttagaaactgccccagggccaccattatttcaaaggagcaatttctcttccatcttgcctgtgatttctctttgctctgggctctagattttgaaaacatgtggatgcagtgacttcagtctgataccctatctggggtatgtaatgtgttttctgctaattccctcagttccatcagggatatttctttgccagaattatttggcaagaatctgctgaagaattactttcagctttatttgtggttactagattaaattggaatttcctgcatctctctgtgattcaaagattctatggaggg

SEQ ID NO: 200133 - DNA, 1000 bp, Homo Sapiens
caaaattctccttacctctgaatctacttcctctgatccctgcctcctaggtactaatggtccagacttttatttcctttagcaagttatatctccaaagggatctaaggaagctctacgctgcatccttaggcatctaggctataaacccagggagtcttatccctggtatccctcccgatttaggtatacagctctcaacatgggcagttatgtgggacccattccccaccacccttgccggggccccgagtttgtaatggctaagaggaggagagagagagacggaggagagagagagagatggaggagagagagacagaggagagacagagagagacagaggagagacagagagagacagaggagagacagagagagacagaggagagagagagagacggaggagagagagagagggagacgaaggggagagacagagagacagagtcaaagaaaaaagagaaagatagaaatagtaaacaaaaacaaaaacaaaaacaaaaaacagtgtgccctattcctttaaaagccagggtaaatttaaaacctataattgataattgaaggtattctctgtgaccctataacactccaataccactttgttgtcagtgtaaataagggcgtagcccgaaagcactgaggccactgacaaccagtagccttcctatcaaaaatccttaacccaggaacctgcgggtggcccaaatgcattcaatctgtagcggcacctgctttgctaacagaagaaagtagaaaattaggctttagaggaaacctcattgtgagcacacctcaccggttcagaactatcctaagtcaaaaaagcaaaaaggtagcttactcaaaaatcttaaagtatggggctattctgttaaaaaaaaaaaaggtaatttaagaacaaccactgataattcccttaacccagcagatttcctaacaggggatttaaatcttaattaccatacaaaggtccgaccagacctaggaggaattc

SEQ ID NO: 200134 - DNA, 1000 bp, Homo Sapiens
taagcgcaccaatcccattcacaaggactccaccttcaggacctcctcgcctcccaaagacctcacctcttaatacctccactttgaggattggatttcaatatgtaaattttggagagaaaaacagtcagacaatagcactcctcaaaattcttatgttgaaacctaattcccagagtgatagtattaagaggtggggcttttaggaagtgactgggtaatgagggcttcatcctcataaatgatattaatgcccttataaaagaggctgccttgtctcttaggcaccttctgtgaggacacttagaaggcaccatctatgaggaaaaggccctcactgggcactgaatctgctggtcccttgatcttggactttgcagcctgtggaactgtgagccataaatttctgtcgttgataaattacccaggctaagatattttgctatagctgcctgaacacactaagacagccactttttggagattcgcaacgtacttagtcactgagaaacatactttaggaaattccagtttataagatcaggccttagggatgggggaggcttgaattctagacatttctaagtaaaatttggttatggaaaacaagggtttaacatgataaaagtgaaaggtgattactttggatcaactttattattttttaatgtcaaaaaatggatacattgtcatatgtcatggtagtcagcttgctaaataccattagcttccaagtgatcctgtcaaaggcaatccagaaatgcataattactattgagtcaatgcttatttaccgagtctaattatttattttgttggcagttattgttctttctggcattagttctaaagctatttggtaaaatatggacagttctaaagtataggtacagtattcatttgctagagctgccattaaaacataccacacactgaccgggtgcagtggctttcgcctgtaatcccggcactttgggaggccaagacaggcagatcacct

SEQ ID NO: 200135 - DNA, 1000 bp, Homo Sapiens
atttcctcatcggttcagcacgtatttactagccccgttgagggcctggcgctgtccatggggttaatgataatgccacctcctaagcactcacgggcactcacgggcacacggcttggttaagttggtgagaatccttactgcccacctgcagggcttgcttgtttatctcaaagtcgacttctcacaggtgctactgtcttttttgtcatttgctcatcatctttgggctttccgatccagtggggtagagtttgccagcatgtgactgaagaaccactgcattagaatcagctggtgacctgctgggcactctgaattttcaacaatctgacatgcaagaacacactaggtggagaatggcttgagcaggcagtggttctcagccctggggagctaaaagtaatgaagtcttgctctggtccagaccaactgggaggaatatctgggaggggcgcaagcatctgtgtcttttaaatgctctctctgtagattctggtgtacattgagggttgggaacaaccatgcctggccctttaccatatcaggccttggaacatgggttttaagaacactattaaatacgagcctctgcctgctttcagttttcccctcttggaccaaataattgggagaaaaggccattttcttccccaaatggtttgttctctttgtgtgctggaacatagccttttcctctgtgagtttgcagtgccagcagatcaaaattataatagcaaatgacaaaagctaagttgtaagataaggcagagtaactaagactctaggaaaggcccatagggcacttcatagttcctggcactgccaccttacagggctcggatgtgaccacacatacagcaagttgttctgtgctgagatgtgaacttaatagaaagatcctgacctagcacaaaacccgcgggttaaaataatagcataatgtattgattcattcctcagtgccagacactgggtcatgtgttgttgtgttgaattc

SEQ ID NO: 200136 - DNA, 1000 bp, Homo Sapiens
cgaattcaagcccacaaaacacggaggctcagaggaattaacttctctaaggccacagggagatttagagccaaaatgagaactcatggcagtgtgattctaaagttctcatggtgagcagctttactacacgtcccccaaactaaagagcagcgatgattcaaactgccacctggatgcctctacttatatacttaataaaactctctcttcctggtatctaacaggatgatctcattcatagcatggtgaaactggaggcgccctgaagattcctcttcaagggaggactgaatgccccagcaaccagcagaggcctccagacaaatgtcagctcctccaagcctgccttgctgcagggcatgactcatcaaggagcctcttatctgtggacaggagcctgtgtgtgatgcaaactcccttcgtgagtgcagctctccagacctgcactctgatgccagcccacacaaggtcattagcaatttgtttaaaaaaagaaaaatagctgaattcttcctacacacttttatgtctcttcctgggctctgcctactctctccctgtgggatcttgtttggttaccctgagcaaccttcactctctgatggcttcaagaaatacatgttctgtggtttatctgttttttcttgtttttcttgttgtttggatgggaataacattcttttcagtgttctatattctcagtgcacgtggaactcttatagcttattttttctctttgctgactttaatcaaattttcatatattctaatttactaatctctccctctgttatgtattctcagcaccttgtataaaaaatctttccccactcctaattataaaggcagtccccaatatttcctcttaaatgtttttatattttgtttttcacatttcacattaggaatgcaaatgtgttatttttttatttatggcataaggtaaagctttttccccccctctcatttggaccacccactaattttctgggcaccc

SEQ ID NO: 200137 - DNA, 1000 bp, Homo Sapiens
ggactcactatgtcacacttcttattagacagagtctcactatgttgagcaggctggtcttgaactccaaaccctcattttctatttttcctgcgaaccaaagtctatttccaacctatttctaacgggaagcacactggtttcaaagtggacatgaggcaggagaatagggtctgaaggcagggaacctaaggctgtttcacgctgacttcccagaactaaactgaaaagaaaaccttaactttccacgcctaagtaacaaatggaccaaaggcaactttgcaaacccccaccttttctgaaccgcaggtgggaaactgaaagtacctctgactggttgctttctgtaaccaatcagccatttgcataggagtataactttgtaacttcacttcagcctctgattggttgctgtcctcaaccattgattgtgggccaagtctttgtttgcatagaagtgcaactctgttaacttcactttagcctctgattggttgctttccccaactactgattgtgggccagcacttcatttacaggtggtgaataccaagtgtccaatgggaaacctctagagggtatttgggcctgagaagactcggtatccagggcccttgagccgctgctcgggctgctcccacactggcgtgtactttcatttttaacaaatctctgcttttgttgcttcattctttccttgctttgtgtgttttgtccaattctttgttcaaaacgcgaagtacatggacaccctccactggtaacagacattattatcaaggaacccttggggcagaaaaaaacttaccaaaatacaacttcctgggcctgaccctatacatatctgagaaagatatcattattgattgacatttctctaaaagcccagagtgggagacagaataattagctgttaatgacctcatggttttgggataagtcccttcatgtctctaggcccctgtgagcaggtggaccagaggctacctaaggtgtctgc

SEQ ID NO: 200138 - DNA, 1000 bp, Homo Sapiens
catattacatactatactaatgtttttactgtggaaactgtttccgtattggtatacacccaaatttatcttttatgttatctggtacataattttaccaataatatattattatataactaaatgtgcctatatttgaaaaaattattttgctgtcttggaggaagagtctttctattatttataacatagaataaaataaaaaattcagaaacttaactacatagaaataaacatacggcaaaatatcctaagcagaaccaaaagccaaatattcaaagaaataagaacatatataattcatattagagatagggttaattttcctatcatatacaaaactagaaatagataagaaaaagacaacaaaaaatccaacagaaaaatggacaaaagatttaaagagattctcctacctcagcctcccaagtagctgggactacaggcacacaccactgtgccccactagcaagcagcttgtgagcatatagaaatatacttaacttcattcactcataaaaggtgtgcaagttaaaccaaactgataccattttcccatttattagattgttacatatctgaatgtttgataacacaatgtgtacattgttacaggcaccatggagggcaacttggtgattgcatctaaactacaaatgtaatcctttgatccagagattgtacatctagtaatatgtcattcacctacatttgaacatgctccaaaagacatatgcaagattattcattgcagaatgtttgtaaaagcaaaagatggggaataacctaaatgcccatcaacagaacactggttaaataaattatagtaacttatataatgcaacattatacataagcttcaaagaagaatactcaggccatttgaatgtggaaaagatctctaaggtaaggtgcagaacacaatgcattgcatactatcttttgtataaaagggggaaataagaatatatatttgtattttcttgcttatgtataaaga

SEQ ID NO: 200139 - DNA, 1000 bp, Homo Sapiens
ttttgaaccgcaacaaaagtaagttagctactcaatgccaatgtcttcagtgatacaaatagcatatcctcttttaccaacagggatacctttgaaatacccagaaagtaaaagatgtcatagaataaatatggccatctttctggaatgctccttttgctgatacgtttgttgaaagttaagcaatttaactttgaaataatttaaaatgtacttttattaagatatgtatggagataccatgtactctggtttttctcattaaagatgaggacaatgacaatattgtacttcccttacatgaggttgctgtggggtctaactgaatctaagcactgtagctggtatatgctgctgctcctgacggcatgggatatgccatgaggtccaaactctgcatgaactttaagtcaaaatgcaaggtttcaaagaaattttgcccagaaccttcttcaggctctatccccagattcccaggggaaacattttcatttgctttggctgctagaggaaaaatctgaatatattacctctgctttctggattccccatgctttatcccacagcagtaactttcacagcaggaattttaggcattgtggcattcattcagttataaatttcagttataaaacatttattgaggttttcgtgatttgattttttaaacccacctgttctccttctccttctccttcccctattgttgttcctgaaacaaaataaatgacccagaattatctggcattcatctgacataaatcataacccacactggattactttcaactctacattatagtcctatggaaaactatagttctgaatgaggactacttcttccctttcaacacttctttatcactgtccaaaaaaaccagataggcaaggaaaactaaaaattgaaagaaagaaggaaagagaaagaagaaaaaagaaagctggaataatagtatcaaaaactaaatttactttataaactagcactttctctgaattc

SEQ ID NO: 200140 - DNA, 1000 bp, Homo Sapiens
tgataaaaatttcattgtatataaacacacaccactagctattgactgttttaatatgagcctgctttcaattcctttggaggtatttcaagaagtgggattgctgaatcacaaggtaattctatttttaatttttcaaagacgcaccatactgttttttccacagaggcttcaccaacacttgttatttccttgttcttttttttttcttttagtagctgtctcaatgggtgtgaaatgatatctcattgcagttttgacttgcatttccgtgatgatgactgatgacattgagcatcttttcacattcttcttggccatttatatatcatctttggagaaatgtctatttaagtcctttgtccattttaaaatcacgttgttttttgttgttgttgagttgtaggtgtctatgtattctgaatattaaccctttattatttacatatttgcaaatattttctcccagtctgtagattgcctttccactttgttgattgtttcctttggtgcacagacattttaaagtttgatgtagtctcatttatttagttttgcttttgcatgtgtttttgctgtcatagccaaatcactgccaaatccaacatcacgaagctttccccctacattttcttatagggtttcacagttttcggtcttacgtttagatcttcatccatttttagttagttttgtatatgatgtaaggtaagggaccaacttttgcatcacttgttgcaacgactgttgtttcctcattggacggtcttggcacccttgtggaagatcacttgaccatatatgcgagggtttctccctggtctgtctattctcttccttcggtctgtatgtctgtctttatgccagtgccacactgtttggattactgtagctttctaataagttttgaaatcaggaaacgtgatacctctggttttgtttgtttgtttcctacttccttaatttctttaatggtattgatatagtcaagtttcccact

SEQ ID NO: 200141 - DNA, 1000 bp, Homo Sapiens
cacaagtcttaagtgattaaaataaaactgttcttatgtcagtttcttgattggtaaaatttgcattttaattcaggaagagaaatattttttggccaggcatggctgtaatcccagcactttgggagaccaaggtaggcagatcacctgagctcaggagttcgagatcagcctggccaacatggtgacaccccatctctactaaaaatacaaaaattagcctggcatggtggcacacgcctgtaatcccagctactcgtgaggctgaggcaggagaatcacttgaacccgggaggcagaggttgcagtgagctgagattgcaccgctgcactccagcctgggcagcagagtgagactgtctgaaaaaaaaaggtgttttttgtaaaggctaacgaattcatttgctttccactggttctgggcaagagacttgccttgtgcctattggcacaaggtgtataggagacaggtacacccgaaaggtggtgcccaaaaatactaactgccatactgcacgtggggtttgtgaagccggggctgagttaacttctcaaccgtgggggagccactcctggggctcttttcccgtttgcaaaacaggtggggctagaggtcttcccagctggagttttgctctgctgtcccacatctgacctgtgtggactccagcacaggtttggattggtccctgtgtctataaaggccctttcctgactcggaatcccacccactttgataaagccttttagaattcatgacacccatccccaaacgaaccaatcattccttgtacctcacgccactgccattcagttcattgaacaaacagcagctctcttgtcaggtgacgttttctacctgcattttaattcaggaagatggggcgctgagccagaggggaggcccctccctctggagcttgggtttactcctagagaggaaaactgatagatgagtagatctgaattgttgggcagtggtgggggcagcagagaattc

SEQ ID NO: 200142 - DNA, 1000 bp, Homo Sapiens
taaaaatacgcctagctcctaaaatgaaagtgaagcaaaaagtgggattaaacaaaggaagaattctagagaacttaggaaaaaattatagtggtttgagaaatagtttcctgaagaaaaagttatttgagatggccttgagaagtggacagaagccgggcgcggtggctcacgcctgtaatcccagcactttgggaggcccaagcagatggattgcctgaggtcaggagttcaagaccagcctgaccaatatggtgaaacccccgtctctactaaaaatacaaaaattagccaggcatggtggtaggcgcctgtaatcccagctactcgggaggctgaggcaggagaattgccactgcactccagcctgggtgacagaggaagagcgagattctgtctcaaaaaaaaaaaaaaaaaagacaattttaactctcacatggaaatttgggaagaaaaaggtaacagacgcaaaaagcaagggagggctgggtgtagtagctcacacctgtcatcccaacactttaggaggctagtgcaggaggatcacttgagactagcctaggcaacagcaagacccgtgctcttttttttttttttttttttaaacggagtttcgctcttgttgcccaggctggagtgcaatggcgcaatctcggctcaccttaacctctgcctcccgggctccagcgattctcctgcctcagcctcccaagtagctgggattacaggcatgcgctaattttttttatttttattacaagcccgcctaatttttgtatttttggtagaggtggggtttcaccatgttggccaggctggtctcaaactcctgaccttaggtgatctgcccgtctcagcctcccgaagtgctgagattacaggtgtgagccaccgtgcccgaccaaggtctctatttttttaaaaaagaagcagaagaacaagcaaggggatattttctttagaaaagtgttacacgttttaaaaatactaaaatgaattc

SEQ ID NO: 200143 - DNA, 1000 bp, Homo Sapiens
ccggtggccaacgtgaacttcctaattaaggacccacacaaaagtaactttctcttcttctgggctctttgtgtttgtaaaaatgcggcttcaagctgaacaaactatttgatcatcttcccgcttccttcctcctttcctgtctgtctgtctgtaatgtttctcagctgatcaatagctgtctctctgtgtcatgaagtgtgcaataagctgttctttttcttttgtctcaaagccagaagacgctgtatggaaagaccagttcctcttctcccacccttctagctgtgcgtggcagcccagtggaggtctggacgcttgccactgagtgccaagagcaaaacccaggccaatcagcaggacggatccaagcccctgactgcagcagaggtgcctctccgcagccaggctgcagccacccacagccttggggctgccctgaccctgcctcaggcaggagccccgcctccttctcaaaggacgtcacagagtacctgcccttggggtgccacacatctttctttgctctcttttttcagattcaatttgcctgaataggaagaacctctccttcctgcctaatctattcccagaaatcccagctgctctccccaactttcacagagcaaatcagtaggcccaccactgtccatgttggagatcacactgagcctcgtctggaccccccactgcttctggagcatctccacagacggtcaaatctgcatatccaaacctgaatccttcatctttctctcccacttgacccccaattggcaacaacaccctgcgctccaggctgagggtcaggcttaactgtcccctctcctcatctcctacatcctctgcaagctttctaaattttatttcacacacatttctcaaatccagcccccagaatctagagataagaccacagccctagttcaagcccaaatccatcctcctcactgcccttcttgccccctcttctttccaggggccgcctaacacagaattc

SEQ ID NO: 200144 - DNA, 1000 bp, Homo Sapiens
ccaaaaaacaaagtcagagatttgaaacaaaagaagaatttggcatggaattgcttatttgaaggtagaggccacatggcaatggatgtgggtagctctctgggagctgagagctggaccccagtcttacaagaaaataaattctgccaataaccagtgagcttaggcaaggactctgagccccagataagaggtgaacagacgaccttgttctgtgcctggacttctggcctacagaactgtgagataataagtttgtggtaacttgttgcacagcaacagaaaaccaacacccatgtgtttgtcttttaaaagtatacagatttcttcaatacattgtaatgttctcaattgtcagattggcccttgcttcatcatggtgtctgtcaccgtgccccgggtgatgtctagtggcagaactcagctaatgcttgtctagtgaatgaatgacattttaaggttcacctgggtggagaaggcgggggcgggggggagtaataaacattctttaaagttatcccaattcagctgaacaacgtttgtttagtatctacttcattcaaggcactaatttaatgtgttttatcctgatttctttcagtggctgcaggtttttcattaaagttgatttttcctggactttcctgaaaggtttctttctttggcaaggatttaacaagagccatatcagcatataattttatttgtgttgtcttatcaacaccctgcagcatgtgtacactctaccagactgtatgaaatggcaaagtaatagctttttttttttttttctggagacagtctctgtctgttgcccaggctggagtgcaatggcgtgatcttggcccactgcaacctccacctcctgggatcaagtgattctcctgcctcagcctttctagtggctgggattacaggggtctgccaccacgcctggctaatttttgtatttttagtagagatggggttttgccatgttggccaggctggtcttgaattc

SEQ ID NO: 200145 - DNA, 1000 bp, Homo Sapiens
actgcaccagctactggatgaataaggttgatatggtttttcttcctaacaagcttgcattccagagcagaggatgatggtaaataaacaaacaagtaaacaaattaatagttgacaatttcgataatgagtgccatgcagacaataaagagagcacgtgacaaagcagtgcctgagggctggctttagcttggctggttagaaagggcctcacatggaactggcactcacgctgaagccccattcaacagaagagttgtgggagcatctgcgagaagaatgttcttggtgttggtgaaaagggtcaaactctgtaaaatatttggagaggcttgttctgagccaaatgtgaggaccataatccataacacagcctcagggggtcctgaggacatgtacccaaggtggctgggctacagcttggttttatacattttagggagacataagacatcaatcaagacatataaggtgtactttggttcagtctggaaaggtgggacaactcgaaggtgggaggcttccaggtggattcaaagactttctgattggcagttggttgaaaaagttaggttattatctaaacacctggactcaatagaaaggagggtctgggtgaagataagaggtcgtggaaaccaaggtgaagcctccagtagcaagcttcagagacagtaggtggtaaatgttccttatcagacttaaaaagatgccagactcttagcttattctctcttggatcatggaaagggaaaggggttctctgtagaatgcagactttccccatgagacagctttgctgggccatttcaaaagatgtcaaagaaatacattttggggtaaaatacttcaacttctttcagggcctgctgtctatcttgttggcatcattgctataaacagtctgttttgttggcagatttctgttttaatgttcatgctggtcagtgcctgaactccaaaggtaggagggtataaggagggatgttcaacttccact

SEQ ID NO: 200146 - DNA, 1000 bp, Homo Sapiens
ccttgagggggaatatcctcccagttacaaaggacctagaataatctaccagccagagtggaaaacctccataagtaacgggacacagtagagaagaattttgcctcagaagggaagaaaattagccacagactatattttgctagtctttattgtttccacagcttctcatatatctaaaatttgtttccattttttaaaatagctgctttagcaggagtgttagccttctgtgacttactgcattctacctagaagaggaacctctagcataaccttgataccaaagccctgtaagaacatttttcaaaaaaagacaatattattcataaacatagatgcaaacatcttcaatattaggcaaacctaatcaaaaaaagttaatactttatgaccaagtcaagtttatcccagaaaacctaaagttgctttaactttcaaaaaccattgtaatttatcaagtttcagaaggcctctcaattctgaaagaaatggttttgtctgcattgcttggaaccaaaaggctacatatgtttaatatgttgattgccttttacagttttctagtaagtgttacttctagcactatatgatttttctaattagtattgtgcttttgaataatttgccttagattagcttcaaatactttatttgaaagtctgctacttagtatagttaagtcaaccaatactttatttctgatcaaactaacagcaattaaaatatataatcaacagaagattgatttccccgtataacaatgaagtgccttcatttattagaatataaccaaccctgccaacctgattagcaactttgatcactgcccattttcctaaaaacctaatttgagtattattttaggagaagtgaaaaatgtttattataatttgataattctaattcccataatcccaattccaacagaaaatatcaaataaaacttttcacaaaatacctccaaattttacagaaagtcaatgggaatatagaattc

SEQ ID NO: 200147 - DNA, 1000 bp, Homo Sapiens
ctctgcttttctacacaggacttgtcacctttggacacactctgttttacatgtttatttgctcatgacatatccacccatctggaaaataaactctaagaagaccagatcttcgatttgttcactgttgtatcctcagcacctgtagtagtgtctggtgcttattaagtgctcaaaagtatttgtaaataaatgaatgaataattaatattaatatcttgcctctccttttctcccagttcaattcattttagctgctgtggtcaccttcaaagtttcttgagagagagagtttgtgtttaggtcatgtcaattaggtcatgcacactgaactgaaactgagatgaatgacatcatcagtcatcaaaatttaggttaaacatttcctcagtagttattcaatattttatacatgaggacagaccgaaagagaagtacttgcttagggccacacagggccaaagtttaggtctcctaattctgagcccagagtagtattttcttttctcttttcttttttcttttcttttttttttttttttacagagtctcactctgtcaccaagttgcagaacagtggcgtgatctcagctctctgcaacctccacctcccaggttcaatcgattctcctgcctcaacctcccaagaagctaggactacaggcgagtgccaccacgctcagctattttttgtatttttagtagaaatggggtttcagcatgtcggctaggatggtctcgaactcttgacctcgtgatccacccacctcagcctcccaaagtgctgggattacaggtgtgagccactgcacctggcaggccagagtattttctgctacatgtcatagcaatgtctatgcttttggtattcttattaccaggaatatttgagaaaaaaatgactaatatgggcaatcctcaattttattattattatattatattatatatatttttagagatgagttttcatcatgttgcccaggctggtctcgaattc

SEQ ID NO: 200148 - DNA, 1000 bp, Homo Sapiens
ctactaagttgtagcatataacacagaagtatggtatcaagactgaaaactaattgattatttaattcctagcttcttttcaagttctcaaatcccaagatttgcctatggttgccaccaagagctatggaattgttgtttggtaggtgattttcatcctccatattaaaaacaaaaacaaaaacaaaaccattctttttaaggaattcatccatttgtagatgcatctgtttccagtggttccagtgtgtttgttttgattatcacatatgaattcagctttgtccaaatatttatagaaaaacatagaagccatgttctacttgaaaagtgcttttcattttgtaagacccttgagtactttacttgtaataccacaattcaaacatatttggattaagcttcaatcctggagaggcaaggagtctggcttatgttccttggaatggttatttgcttgattttgaatcccataatccctgaatctatgaatttttaggattctgtttttaatctcagtcacatactcactctatatgtgtgagaaagatataaggcccaagtcacaaaataaatgaatagaatttcttaaatgagagcaaaaaattagtactcttggagcacaaattcaaggagaatggatctttagcatattggttgttaaatgctaccccagtgtttaaggagagagaaaagacacacagagagataaagagaggttgagctgggaagcagatgactgaggtctctcctaaaccctccatcctccaccctccacgcgttagaggcaaaccaagaagttacttgtagctgtgacattcctgactgacaggactccagaacaacttgtaacaaaagagacttgaatcatctttcatattggtttgggatattttttcattatgtattgctgctttttaaaatggttatttagtcttttaaaaatatatctttccccatgcatgccatttgtttgttaagtccttatttcagagaattc

SEQ ID NO: 200149 - DNA, 1000 bp, Homo Sapiens
ttttagtcagacttgcctaatgcagctcatgccatgcacttcagccatctcttccctttctgctgattgtcatctgactttgcatcctttctctcatttattgaaaagttgagcactttgattatagtcttcttttctaccctaaacgtcaacatcctggatgactttagtatctacatataagaactaccctatgccaggcattttaaagagacaatacatgtttgagccaaagctatggactgtgtagtctacctgccttcccatttctgaaccagaaagcttcattcacaacccccaaagaaagttactaaactgtcagtgtcttaattttctcataagtgaaacaaggataattataatttctgaatttaagattgtcgagagaaataagtaagtagggctgggcatggtggctcacggctgtaatcccagcactctgggaggctgaggcgggtggatcaccagaggtcaggagtgtgagaccagcctggccaacatggtgaaacctcgtctctactaaaaatacaaaaattaacccagcatagtggcaggcacctgtaatcccagctactcgggaggctgaggcaggagaatcgcttgaacccagaaggcggaggttgcagcaagccaagatagccaagatagcgtcattgcactccagcctgggggacaagagcaaaacttcatctcaaaagaaaaaaaaaaaagaaagaaagaaagaaagaagtagataaaatgtaccaaaaacgagtctggatcctcatagactctcaacaaactttattcttcctattattaattactttatcatcattcatatctccacagcaacccacccttaaagtcagatcttgaacttgtcatcacctcaaattgatgaacctataaaaatcaccatctcaacctcctttcttccagctcacatgttcaatgccagccctatgacttcattcacttttttggagactttcagtcactgatatcagtgactgaattc

SEQ ID NO: 200150 - DNA, 1000 bp, Homo Sapiens
atagctattaatttcccaacattagctttgagagatcgagttgtttacccaaagtcaccaagctagaggaaccctaaatcttggaatattaaaaccaatacttagaatgttaccagtagagggtgtccaggttcttggcgttttgaacaaggaattggacaaaatacacaaagcaaggaaataatgagccaagaaaagcagaaatttaccgaaaaacgaaagcgtactccacagggtgggagccggtgagcatagggcctcaagagctctgttatagaattttctggggtttaaataccctctagaggtttcccattggttacttgatgtacaccctatgtaaatgaaggagtgacccccaatcagaggctgaagttacaaacttagactcctatgctttggttgctttctgcaatcaatcagagatactttcaattttccatctaacgcacagaaaatgtgggggttttacaaagggagtagcctccagtccttctgttgcttaggtgtggagagttggggttttctttctgatttagttctaggaggtcagcgtgaatcggccttaggttccttgtctccagactcttttctgcctcaataacaccttaagtatgtggctcgaatggctctatgacaatttagggagagtgatctgtactttttgagatctttgaagaaaaaattattttaaaattaaataattttacagtgttagtacaatgttgtagtaacactgtctggacatgggaaagaagaaattttttttaatgttccccatcctgggcctcactgccataacaagtaatgtgcttttgtttttctgtctccttttaataacttttcatacttttgcacatgctttatataattgtagtccaagtgaagacacagtggtatttcctcatgacttcatttatttcactatattatttttcagtgctgttactttttctttatgatacccatcgtattgataaactagggtgttcttagcctt

SEQ ID NO: 200151 - DNA, 1000 bp, Homo Sapiens
gcaaaacaacttctggcagcttcagatttacattcttccaacctagtagtcccaggagaaagattcatatctgcttccagcatccttatggcaatccagggacgtattctgatttttcctgttcaggacatgtgaccatccctggcctaatcacttttcccaaaaagataagctgctatgataggccaggtatagatcttgtacttaatccagtgaccacatggaatagagaacatgcagttcctcaaggaaaataggggtcatggacactcaaaaatgacagcaatctactttaccttaatatcaatgttatttctgtgttactccattttgcactgctataaaggaatacctgagactcagtaatttataaagaaaagaggtttatttggctcatggttttgtgggctgtacaagtatggcacagcatctgtttggcttctggtgaggtctcaggaagcttttactcatgggggaacgtgaagggagaggaggtatgttacatggtgagagaggaagcaagaaagaagggaacaggtgccaggttccttttaacaaccagctcttgtgtgaactaatagaacgataactcactcattaccaccaagacagcactaagccattcacgaaggatctgcccatccaccaagacccaaacacttcccactaggcctagctccaaacattgggggtcacatttcaacatgagatttggagggtcaaatttccaaaccctatcagtctccgactcctccctaatatgaagccctccatgattatcttgcccaagtcagtctctttattgtctcctgatcatcccatgtttgtcccggactttaagactaagcctttgctcatgttgtttgtctctactagaatattattactcttcctttccttttttctaaatatccattactcaagcttaagtcaacctccttcttgaggaatttccatccagtcctgatacttccttctcctgcttctctacattcctata

SEQ ID NO: 200152 - DNA, 1000 bp, Homo Sapiens
atgacagttgtgccccaggtatagagaacaagcagttcagatcaaagaaagacagggggcaccaagacagatgtcaaatgttcctaagtggggagaaaagtattgctgaaagataatgggatatgccttaccataccgagaggcattttacataaagttttgggatgaattagaaataggtacaaaagtgataaaccaaccacattttagaagtaaaagcaaataacttatctcaagaaaaatagtagtaaaaaggtaaaagaaatgtaaccaaaatacactctgtatctcagcagtaaagattattatgagaatggcgtatactaaaggttatctaaacaaatgactatttttcaaattggctagctgggaaatggtagtggggaatatggaggagtgagtagaagagatgtaaatcttaatttgttataactgaaagtcagtaagtaatgactacagtttaaaaattcatgaaattgccggataagccctttgagagtcatgggacaaggcactactatttccttgtaaataatacagcactattcgacttttaaaaccacatgtaaatatttttaaataaaaattaaaagagtatatgctaatataattataataaatatgaaggagaaatattagaaatcttgagcgattgcttaaactagctttaagttgatccaagtaatacattacttttctgttttagcttggttccctttgaggtgaaaattgtgtgaaagagctttgggagggagagtttatgggaacaacagtaacaagagagtaaaggagtcaagcctggacaaaggaaaaaaataaactaagaagcaattgtagtgaataacttgcaagtagtcttggtactaagctagacctccagagatgccccagataaaacaaggggccagggctttaactccattgaccagtcactggatgccaaagaggaagtgtagcattggacataacattatggcagcttcctctgaaagaagaattc

SEQ ID NO: 200153 - DNA, 1000 bp, Homo Sapiens
gtctaaattattcttgcgtagagtgaattaccacctgactttgttttgtttttctcttcacttagattctatgggaagaagaaagggctgagaggagactaactgccaggcagtcctttgtggacctgggatgtggaaatggcctcctggtccacatcctgagcagtgagggggtaaggcccggctccatcaccttttctggtaacttgtccagagtttcctcaagtcaggcacagggttcactgacatctttttctgctgatacagcctggatttggagtcagccagctatcagagtaggtagagacttataaatttctgttaatctgataaacaaacagctcctaaaacaagggaaacgtggtgatctcattggacctaagaggaagtccccgggccccggcatggacctataaaatgacaggctttgggtagcatggatgtttttttgctgtcagatttttcttttgaaacccaccatctcaaggagctggagggagataaaaagcaaggcaggttctgcacttgagaagcttcaggccaggcacggggctcacgcctgcaatcctaacacttgggtggccgaggcgggtggatcacttgagcccgggagtttgagaccagcctgggcaacatagtgaaaccccatctctgcaaaaaaaagaaaaacaaataagagaagcttcagttctggctcggacggccagtcatgtatacacagacaacagtatggaacagtgtggtgtgtggtactgggttttgcccttattttctggatgttcagctgatgcagtgaaagcactcttgggctgagagcggcacctgcccaggtagcacggtcagtaggggtgggtgtcttgtgcctggaacttcctgccagcaacttatacccctcctggtgcgtccagcgcgtcaggtgccattaccccatgatatgatggccagcttagccacttcctgctagggggcaacagctggaacctgcagcccaatattgatg

SEQ ID NO: 200154 - DNA, 1000 bp, Homo Sapiens
agggagaagccgtgccggggccagaagtgaagaagaacagaacaggaattatagagagaaactgctgaaaattcatttcagagtccaaagactgaaaacattcctcacctagcaaggatggagacatacatttctccatttcagaaaattcatgcaaaataactagaataaatactcttgaataagggatggaactttctaagtcattccattgtaaaaatttgaagcagtgcaatcacatgatattatgagaaagtcagcccctattggtgcccttagccacttcctttcactcatctctgatttttcagcctcagctgcagtggacagttccaaacaagctcagacatgactttttttggcagcaacctgaatccaggaggcaccatacctttcttctttatggctggggccttctcaactccaaggaaacctgctcagcccttgaacaagcccattctgaagtactagaagagttaatgtccccaggggcaatcttcaatcaatgagggatggcagctaatgctcccaagtgcttctgcctcaagtccttgtaaagacaaccctgggatacctgatttgccttcaggaagtcttgatcaatcaagccctactgcccaaggcagaaacctcttcctctatctctctttctactctctccctcactcctgtccctctaaagtgacttccaaaatataccacttacacccaagtccttctcagtctctgctgcagactcagatgtttcaaaaagttgtctccttagagaaagctcttgaaagtaatgagaagtagtcaaacttcaagagcaacggtggtattgggaggcacgaaacctggagtctagttctgttactaagtggctgtatgaccttagacaagtcagctaactcatccaatctgtggtttttcacatccgtaaaatgtagctatcaggctagatatcttaggtttttccagttaacatggtctttaatttgaaaatatatctcccaatcta

SEQ ID NO: 200155 - DNA, 1000 bp, Homo Sapiens
ttttgtctcctttagtctttataaaaaccctgtgacaaagatattacatgagtatactataagttcatgtaatttgcttaaagttggcacaactagtcagtagggcaaccaattttttatttttttatttcattagtttttggggaacagtttttggggaacagtgtttgggcaaccagtttttaaacccactttatataactcagagcctaaatattttctccactgtatttcttcttctctttgttagtagttaaactgaagttggcagcattaagtgggagaatttgacatccaaaaataactgttttcacctttttctctcatattaatgttgaaagttgacaagaaaatgagtggaataagcccaataaagtcataggcattttttgtcttatatgaatacttacctactcagtactggtagccaacagctagtttgcctctatgggactttttactacctatttgctattcctcttcctctacaataatatctgtgcttttttttcgtaaaatatttgttgtctcttttaccatcatgctattatttaatacttagggactcataaattgcataataccaaaataagcaaaaatgggtaacagtgagtttttattgaatgataaagatattataaaatatataaactgtatccagcttaccaggagctgagaaaaactggaagtcagaggcaatggctgctgtgaattgtcttgtgttggacatgccattcacgaagcatcaattttcatcttccttttttattttgacttagaatcaagttttggggatttgaaggccagatgtttacaagaatttctgaactttctctactagactgtggtggtgttcattgatttatattattgaattgcaagtttttcattattactgttgtgaagcaggtacagtggcattcctgagacagatactttcatgctcaactctttagctgcaacgaaagctatgtagtggttaatgaatataaaggaattc

SEQ ID NO: 200156 - DNA, 1000 bp, Homo Sapiens
tcacttattgagcagattaaaaaataaaaacaattgaatttttaaaactacaaaaatgatcacagagagattatatgtgctctatattaataaagcagtagttgtatttgagaacattttaaactacctatgttttagcatgtatcatactaattgttaaaatgtatattaaaatgaaagttggatttctttctccaaatagagccagcaaattccctagaatagcttgcctacctcacttcatgaccaatgaaaatgtaccatgcttagtccacaattaaactctaccatgcttagtccacaattaaaatctaccctgcttagtccacaaaagtataatgtgtcaattaaaatgtaatatatggattctccacatttttgagaaatgctttgaaattaactcaaatctgtactttaagagaagattgtattcaataaaatcttcgtccttgaagtgaaagtatagcaagaataaaatgatgagaaaacaataaaggaagaaatgaactgattgttcaatggctagagcataaccaagtttttactggaatatagaggtattgattgtaaattgcgtcttggtggtcaaaccacaaaggcatgatgtaatcaatgataaaactatatatagtactacataattacttacataacactttttaatcctgttttcttctttttctagagtccttgtaaaatgtattaaatagtgtaactcatggtaacttttataatgataacatttactgaaatatagcttatggaacatgtcagtaatgacaaatgcatcctaaaatatccattttgtaatcggtttttattttcagactgtttattacatctgtaaattttgtaatatactataggttttacattgtaagattttggttgattttaatttcttatgtgtttaatgtaatatttaacttttataaaaagtaaaacttattttgaggtaacaattattttttctccatggccatattataaataataatat

SEQ ID NO: 200157 - DNA, 1000 bp, Homo Sapiens
tgttaaatgccagtttgttttttattttggggagccttgaaaagcttaggaaagtagaagaaagtgggaattgcagcaaatttcatttataaaaagcaatatacaaaatagatgattcagcaaaagaggagataaaaaaggcactcatgtgaaataattttgatctcctccaggtcgctaaaagctacaaggagccacggttcccacacaaagccatacttgaattcttgggagtatggaacctttagaaattattgaattttttcttgtctttaggcaaggacatccctaagccaaattacagacataaccctcttcctaagttaaaattgcctggaagaaaagaccccgcagccttctttgcaatcttcagttcgatatttgggagcactcactcttctttctttttattacccttgcattaattttctgtgcatacgcaagaattttactgactatgccttatgtaatttgtatggttgatgctgagaaatgtatcgccattcatcttctacaaaaaaaaggtgtaatgcagagcagttacacacagtaacataagtacacaattttaaactaagtgtttttgcaggctagattttgtttttcaagaaaccacagaaacaatgtccaagattctcagtgtgaatatttgcatgtttctgaatttttcaactggcttaagagattcagacattacacatgagaatttgctataaaatggcataaataacttcagagttaggaaatacatgataaatttggcagctgtcttgcgggcaatcagcatgctttcctccttaactcttcattattgactaggagaagcagtggacacagtctccgaagttgagagccatttgagaatcagttgagaagtttgagaaccaggtatgtggggtaagttcaaaaccctgtcttaactgctcaagccctgctgtgaaccacatcattttttccttttgtcctttctccagtctgacatggagacctgattgaattc

SEQ ID NO: 200158 - DNA, 1000 bp, Homo Sapiens
gggcacagtggcgtgtgcctgtaatcctatctacttgggaggctgaggcaggagaatcacttgagcacagaaggcagaggttacagtgagccgagatcacaccactgcactctagcttgggcagcagagtgagcctctgtagcaaccccccaccaaaaaaagaataaatttaaccaaagaggtaaaagatatgtacactggaaactataaaacattggtgaaataaattgaagacaagtaaatagaaagatattctgtgtttatggatttgaagaatactattaaaatgtccatactatccaaagcaatcaacagattcaatgtaatccctatgaaaattccaatgttatttttcacagacatagaaaaaaattctaaaattttttaataaataaaatatatatatatatattttttgagacaatctccctgtcacccaggctggagtgcagtgttgcgatctcggctcactgcaagctccacctcctggcttcaagtgattctcctgccgcagcctcccgagtagctgggactacaggcggccatcaccacacctggctaactttttgtatttttagtagagatggggttttgctatgttgcccaggctggtttcgaattcctgagctcaggcaatccacctgcctcagcctcccaaagtactgggattacaggagtgagccaccatacctggccagttttattttttaataaataaaaataaaatttttattttaaaaattaaaaaataaaataaaatgatgtagtatttgcataacacctaggcacaatcctcctactttaaatcatctctggattacttctaatacctaatacaatgtatgtgctatataaatagttgttcgactgtattttttgtttgtataatattattctttattgatattcttattgcatttttaaaaaaatatttttttggctggacatggtggctcatgcctgtgatcccagcactttgggaggctgaggcgggaggatc

SEQ ID NO: 200159 - DNA, 1000 bp, Homo Sapiens
gcagggggtagaacagtttggagggctcagaagaagacaggaaaatggggaaagtttggaacttcctagagacttggagggctcagaagacaggaagatgtgggaaagtttggaacttcccagctagagacttgttgaatggctttgaccataatgctactagtgatatggacaataaggtccaggctgaggtggcctcatatggagatgaggaacttgttgggaagtggagtaaacatcactcttgctatgcaaagagactggtggcattttgtctttgccctagagatatgtggaactttgaacttgagagagatgatttagggtatatgggggaagaaatttctaagtggcaaagcattcgaaaggaagcagatcataagtttgaaaaatttgaagcctaatgatgaaattaaaaacaaaaacccattttctggggagaaattcaagctggctgcagatatttggataagtaacaaagagctgaataataattaccaagacaatggggaaaatgtctccagggcatggcagagaactttgtggcagttgctcccatccaggcccagaggcctaggataaaaaatggttttgtgggacaggcccagggccctcctgctctgtgcagtctaggggcttggtgtcctgtgtcccagccactccagccatggctaaaaggggccaagatacatcttggcccacggctttagagagtgcaagtcccaatctttggcagcttccatgtggtattgagcctgtgggtgcacagagtcaagaattgaggtttgggaacctccacctagatttcagaggatgtatggaaatgcctgaatgtccaggtagaagtttgctgcaggggtggaacccacacggagaacccctgctagggtagtgtggaagggaaatgtggggttggagcacccacacagagtccccactggggcactgcctagtggagctgtgagaagagggccacctttctctagaccccagaattgta

SEQ ID NO: 200160 - DNA, 1000 bp, Homo Sapiens
tgagttatcttttagtctaaaaatgtaattttggaggaacatcagctcagaaaatctctggcataaggaaataggtcagcttttcttccaacatgaaggatttccaaattcagcccagaaaacttaataaaatgtccctaagggaagtagaagacagtgaaactggagttcatcttccatgaacatggatacaccctttgatccctatgtttcctacgaccctctgggcagagcaatcagacagctagtcatctatgtaggattcagtttatcattaaacttttgtcttaacagtatataataaacacttgatgaagttttgagattagatctcgaagaatgcctgatctttgtgatttctaaagcttatatgggagggcgtccatgtgtttttaaggactatattgcttttacatttcacccctttcctcacgtctttttctgccaacaagttgagtgtggttgtagattataatttaataattgtcaaacattctgtagacaaagttgttagctccattttgaaaataacacttgaaaaataactactgaggttcacacacagaatttttctctaaattggcaaatgatttgtgtgcatttacctgctggcttgcataatccttaagttttagaaatggtgacactggactgtgcctacataaccttcagccctttacagatggtatcattggtcctttgatacatatatatttactatgatggtctgggtgatattcatgctttaatgctttaaaatatgacccattcctttctgactggtggcatctcttctacactgacttcaggggggtttgacagtggtgaatagctataactcatttcttcatatagatatattactgtttttgtctttggactctcttcaatacatttagcccctcaagttcaattttattacctgtttaggaatcatgtcatgatcccagctcagtaaatctatctactaggatacaagtttggtgttcatgtactgatc

SEQ ID NO: 200161 - DNA, 1000 bp, Homo Sapiens
gttggggcagaaacctgctcctgattttacaaccagcttctccagtcaccccacaggggagctgttaggagagggctctttggaaggggcttctgggtcttcgccgagaattactagtgagatcattggggtccagggttcagtggaggagggtcagggcgtccactcctcgccctgggaactggcctgctccctttccacagatgccgcggctacgctggggagctccggggcctgccggctcacatgcccgcttgctaggttaagagctgcctgccgggcacagtttctcacgcctgtaatccccagcactttgggaggctgaggcaggtggatcacctgaggtcaggagttcgagaccagcctggccaacacggtgaaactccgcctctactaaaaatacaaaattagccgggcgtggtggtgggcgcctgtaatcccagctactcgggaggctgaggcaggagaattgcttgaacctgggaggtggaggttggagtgagccgagatggcgccactgcactccagcctgggcgacagagggagactccgtctcaaaaaacaaaacaaaaacaaacaaacaaactgcctgatgattccttctcccttttgtcagctcagagtcagaccctgcactgcagggacggcacaggtgatacagacccaccctccagagtgcaccacccgtgcaggcagtgagcccctggcactggccaccacctggtaaggtgacagtggtaggtctgcaaatagcgtgggcattgagatttctgggaacattggctctccaggccgctgcctcccactgtggcttcacccttggaggacttctgtcagcccccagggcctgctctcctaattcttcccttgctctggcccatgctttctaggtccagggaccccaggggagctctgcaacggccgcgggggcctcctccccgtgccggtgcccctctgtcctcagccaaccctcttgggcactctcaggggaaaagaattc

SEQ ID NO: 200162 - DNA, 1000 bp, Homo Sapiens
gaaacactttgtacccagcaattctggcaaaaccctccagattgtttctgactggcccaccttggatcctctacccacccctaaatggatcacagtgaccaagaaggaccatggggccaaacaggcatcaatacccagccagccaaaacatgagtatttactacaggtttcttatagggaagggctgtgtcatgtagtaaacagctttaaaatccttccattcaagatgtattttccctttagaaaatgacaactgtttatacttctgaaaatctcagtgagtccaaatggaaaatatgaattgaataatatcttaatatttcctgtctgaaatatttttatgatgtttattatacatgtatgcatatatttcatcaaaagcttcatttaaagtaaccagagctttaaacttcatccaacagagtctggacttgagcttttaccaaattcctactcccagtagcacaaaaaatgagtgtgaaaaagaaaattcttatagagcaaggaaagtaaaattaaattagtgttaggatgaatgagttggctaagcatacagcctagaggggacaaggaccttttttctgtccaacttttaaaaaattattattaatgcgaaagaagaaagcattggggagctcacatagaaaattggtaaatacagaggagacatgcgtttccctttggcaatgcagttttttagctagaacaacagtgcttttcttctgccttttgaggcacagtaagactggatgattggcaaacagacttgacataagtagagcattgaggcagatcaaaaccttctggatcatttcttcaggaggcaggcctggcaccggggggttcaaacctgctcactgtggcagcattttctaccacaaccaaggaatggccctttgcagttattctgatttttgagtgtgttttctccaagttgttgatactacaacttaataggttcatgaaatagtggaaaactacactcaaggtctctgaattc

SEQ ID NO: 200163 - DNA, 1000 bp, Homo Sapiens
ggcatagttgaggctggagactgctgcagaggtcattaggatggatcagtggaggccagactgggaagattgagggcttggtcagtgggacttggtcatgtagcagcaggcatggtgagttttatgtgtctctgaggtttccaacctggattcctggagtatcccagtgtggattggagaagaggcaagtgtgtggagaactgttgaccaagtttccattttggacatgttgaatttgagatgcctgtgggccatttgagggaagacaaggagacattagcagagtctggggagaggccagcctgggctggagatgtgggcattaccagcatgtgtgtgaagcctggatatgggtgaggttactctgaaaggagataagaggagcagtcctatgtgaagggcaggccaaagaagagaaggagagagaaaccagaaactgtgaggagaggcactcagctatatggcatgtaccagagaggccaagtaagataagggcagggacaggaacggggtcctggggtgcagcaggtgcttggtgagccctcagaggctgtgttagtggaggagatttagctggatagcaaactgggggggcctgcggagggactggcacagagcaagtggagatggtgtagcgtcaggctggaaagatggatgctttggagcctgttgcctggcagaagaggagatgccagtgggagcgagagacccagtgtgtgaagaaggggggctcattaatgccacaaagtcttggggagagactagaaacacagaactcatgagaatattggttggcagaagagcaggacacctcttggggagagggagttgatgtagatacagacttgctaaaatacgcacaccttacttggttttacctgttgtcttatcagaccaccctttggtacttcagaagttattgcatcgtggttgtaaactccagtttttaatgaccttagttccccccaccccctgcctccaacagtcttatgaggaattc

SEQ ID NO: 200164 - DNA, 1000 bp, Homo Sapiens
gcttactgttaacaaagtcatagctttgctacatgtttgaaacaatatgtgtagctatatacaagtccaacaaaccagtggagtttgataattattattatttctttactacagtctaaagtcctgaatacttctgtgataacatttggtgattgctggcaacctgttagggagccaagtaactcaactggcttacttctgcttgggtctcttcagcatttaggattttcttaaacatcccccaaataactgtcaatttattttctctacaatttttctctacaaatgtttacaacggagaaattagattctatgtagcccattacaacttagaactagaccagatttgccaaaccctatctggagctcgatgaaaatgtttacctcctctcatttcacatgcttgtcttcccaatgtgtatgctcgttaccctctgtccaatggtatatcctgattctatccaaactaactttgataataaaggaaaaaagtagccccctacatgctaaataccacctcaggcaggaattgagagaaacccaatttcaactatgacacaagagtaaagaatataaagatacaggatacaattatattcaaacatatatcaactgattttaattctattatacagcttagatatattaagtatctattttatttagcaaagtcagtatctttcttattaataaaataaatgtttactaaagaaattatccataatcccatattagcattaaaaacaaggcctaccttaatacattttttccaaatataaataaaaagctataatcctaagttttatacatgtgtcattatgaagcaaacacacaacaaagtctgcttataatatgaattttcaattagagtttatacttctttctcaagaattagcagcaaagaatataattgtgggaaataaaaaacttagaaggatgactgtcaaccagacaagatataagaaactgataaccttagccattcaatagtagggaattc

SEQ ID NO: 200165 - DNA, 1000 bp, Homo Sapiens
caccccactgtcaatattagaccgatcaatgagacagaaaattaacaaggagattcaggacttgaactcagctctggatcaagtggaactaatagacatctacagaactctccaccccaaatcaacagaatatacagtcttctcagcacctgattgcatttattctaaaattgaccacataattggaagtgaaacactccttagcaaatgtaaaagaacagaaatcataacaaacagtctctcagaccacagtgtaatcaaattagaactcaggattaagatactcactcaaaactgctcaactacatggaaactgaacaacctgctcctgaatgactgctgggtaaataacgaaatgaaggcagaaataaagatgatctttgaaaccaatgagaacaaagatacaaggtaccagaatcactgggacacatttaaagcagtgtgtagaggaaaatttatagcactaaatgcccacaagagaaagcaggaaagatctaaaatcgacaccttaacatcacaatgaaaagaactagagaagcaagagcaaacatattcaaaagccaacagaagacaagtaataactaagatcagagcagaactgaaggagatagagacacaaaaacccttcaaaaaatcattgattccaggagctggttttttgaaaagatcaacaaaatagatagactgctagccagactaataaagaagaaaagacagaagaatcacacaggcacaataaaaaaaaatgataaaggggatatcaacactgatcccacagaaatacaaactactatcagagaatactataaacacctctatgcaaataaactagaaaatctagaagaaatggataaattcctggacacatacaccctcccaagactaaagcaggaagaagttgaatccctgaatagaccaataacacttctgaaattgaagcaataattaatagcctaccaatcaaaaaaatccaggaccagatggattcacagctgaattc

SEQ ID NO: 200166 - DNA, 1000 bp, Homo Sapiens
aagtcctctgtgtctgtattttgatttctcctgagtaaatacccagcaatttcattgctgggtcagttgtccaaagtgcttgtaccattttacacgcccatcagcaatgtgtgggtgtttcagtctctcatcctcaccttggtattgagaataaagtagcattagtggttctgcaaggaggttttcgtttgcattttcctgatgatttatgatgttgaccaccttcatgtaattattggcccttcatatatcttttttgctaaatgtcaatttaagccttttgcccattttattaagttgttagtcttattgagttctttccatattctaaatacaagtcctttgacatataaagtggttttaaagatactttcctaacctatctgaaacagggtgaggagccaattagacaatgctgtaacagtctatgaaacttaaggactgctttgcttgatggaagtaacaatcccgctatgtacaaggaacagtaaaactgaggctaagggcaatgcaaggatggcacatttcctaagtacagagatgacaggaagctctcggctcacgccatcttggaaagcctctagaagtggtgtgtggatgtctggtctcccatgagattcctctgattctgcatcttcttcaacactactcatcagctgtgtcatgattatcattcctgagcccttgcttaaattttggatcaatttctttgctctgatctctgttgatttccttattcgtaaaacactgggttttgagcttcctgcaccaagatgtatgttttcattttctagagttaaaagaactccttcaagtattattgcagctaaaaatctgtgtcctgaccaggcaaagaagcaagtccctgtaaaaaacagagctaccacaagccctactctcgtatggatgtttcactcaacacttacgcagttgctctgtcctgccgggatactggatactttttatttcttaaaaaaaagaaaaaaaaggaaaagaattc

SEQ ID NO: 200167 - DNA, 1000 bp, Homo Sapiens
accccaccagactcagcccctcaacactggacttctcagccttcataactataagaaataaattcctttttaaaataataaaaaaaaaagccttgagttctttagaactcagtagccatcttgcaaaagatcttctggttctattgaatgggattctggagcaagtaaaggagagggcatatctgaaagctttggagaaaatcaagattcggttagcaaaaaggaaataaagaatttggtgaccagcctgaagcagcaaaggatgccagcttgactacaactatttttcaaaatgaagatgaaaagaataaggaagtacatatgactcttcttagggatgtaaaagcaaccctggcatcaaaatctactcaacaaaagactaacaggggacagagaaaagtgatagcttcaactatgatgaagaggagacatcacattgctgaggctgactctgaaagtgaccatgaagttctagaaccagaatcagaaatgaagatgaaactaccaagacaagccaaaacagcagtgctggaaaaaagtaaacttaatcttgcacaatttctcaatgaatatagaagttaggaaagatggtggaggtagagttctttaaaattatcttcagttctttgctttaataaagttacctttgtcaaaatttttaaaaaggccttcaaaagaaaatattgtaaatgaagtatttgtatgttttaaattcctagaataatgaatattggcagaataacttgaaaagccagttaataaccatcattgtcaattaaaaataaagttttcaagaaatagaagaaaaacacgttgagctctcattaatgctcttgagaatgctagtttgtattctgctctgcagctttactgaagagtgagaacttagggagagaatggaaactctcaccttagatttattacccatttttttgaaaagtgcctaagaggcatgagatttttttcttctgcgcgaggacagttgtcacctaaagaattc

SEQ ID NO: 200168 - DNA, 1000 bp, Homo Sapiens
aatgcaaaatggcacagccactttggaagacagtttggcaacttcttacaaaactaaacatacctctcactgtgcaatgcagcaatcacagttcttggcatttatccaaagaagttgaaaatttaagtccacataaaaacctgcacacagatatgtatagcaatgttattcataactaccaaaacctagatatgtatagcaatgttattcataattaccaaaacctagaaacaaccaacatacccatcagcaggtgattggataaacgaatggcagtacatccagacaatgggattttattcagcactgaaaagaaatgtgctattgagtcatgaaaagacatgatggaaacttaaaggcatacttactaagtgaaaaaagccactttgaaaaggctactgtgtgattccaactatctgacattctggaaaaggcaaaagtatgaagacagttaaaagatcagtggttgccaggggtcaggagggagacaggaatgaacaggtggatggagcacagagaattttttggtcagggaaactattctctatgatactctaacagtggatagagtccaaacccataggctgtataacaccaagaacaaacccgaatgtaaactatggactctgggtgataatgacgtgtcaatttggttcatcatttgtaacaaatgcaccactctggtgggggatggtgatagttggggagcttgtgcatgtgagggcatggggggcatacggaaatttctgtatcttcctctcaattttgctgtgaacctaaaactgccctaaaaagttaagtctttgtaaaaacaaaagcagcatgaacacatatggcactatcaccacagctcttaggttccttctttcaatggctccaccctggggccttggcacatgcctctgcctggaaaatgtccctctccctggaacgtgtccctctcccaactgtaccttcgcacccactttgcgtgttacttctcatggatcttgcagaattc

SEQ ID NO: 200169 - DNA, 1000 bp, Homo Sapiens
tgtggaaagagctagtaaggaggatgtaaaattagtctgtcttgtacaccaattcaggaagagtttaatgctgtgattaggtactgctactttaaaaaattagtagaatttttaatagaattttgttactgcatgatgaaccttatctattccatcatgttaagggaatgagtaagccaagaagaggagatatgaaaggttttaaacaactagaagatgggtaatggtagtgcttttccacttacaaaatgctttttacatatttttttctttcaacatctttactgagttcttactatatgcaaggtactatgctaagctctctggatccaaagatgaataagatgcagttcatgctattgaggagatcacagactattaaaatgtaacgttagaagcattgtcataaagcattatatacccatactatggagtcatagacagaaccaacaacgactttggtggaggctaaaaggtaaatttcccagggggtgacatttaagtaatagagtttctggccctcatattaactttgtgacttggttttcattgtctctattcacagttgaggtaactaagactaagcaaagttaagtagtttgttcacaaatttcaaatctatcaaataatagaattaggactttagcttacctgacacctcctgataccaccttctgtctcttttttcctgcactagaacatgcacaatttcattttgaatcataagagaaagtgcaaataaatttattgattgatgatgataccattactcccaatagctatctttgtatatttgaaacactgtcatgtgaaagagagatgaggctttccttctgttgacttgcagagtaagaaaatagaaccactgaccattcaggtcagatagatagaactttcttacaggattttaaacacagacacacacacacacagacacacacacacacacacacacacacacacacaggttaacatcaatcatcactgaggaaacaagctt

SEQ ID NO: 200170 - DNA, 1000 bp, Homo Sapiens
agtgtaacatttcttttcaactcacccttcccatttatctaaatctaaaatcctctgaggtctctgttctaggtttcagaccactcaagcctcaaaagtccttgatcaacctctacctatgatgctgttaaaaaaaaaaaaaagtcctgaaattgcagttaattctactttgtctgaggaatcatttcagtcccaaattccatttatagaccaaattttagcctgttttatttcagagctcttctttctctccccacacaccctggtagaagtcagaagagaaaatattgcagcaagctacagtggcctgtgtgctctggagcgaaaagctacggatggctgatcagaagggaagaattttctcctctcttaacctgagtccttagattttgaggctggcgtttgttattcccatcccatcaaatgggtcctaacccctgttgcagaaaggtttaaagacaaaactgccttctgaagagtttggaagtatccaatcaggttattagtatctatattttaaagcatatttaaagagaatggctcggcattgtggctcacacctgtaatcccagcaatttgggaggccgaggtaggaggattgcttaagcccaggagtttgagaccagcctgagcaacatggcgaaaccccatctctacgaaaaatacaaaaaattagctgggtatggtggcgcacgtctgtagtcccagctactctgcggctaaggagaatcacctgaccccagaaagtcgaggctacagtgagctgtgatcacaccaccacactccagctgcactccagcctgggcaacagagcaagacgctgtctcaaaaaaaaaaaaaaattaaatagaatgaagcaatgtttcaaaagctctcaaaattggtttcagcccagaggctgaatagattgcctctggggaccagcctcaacccccttgtttggggataggggttcctttgcaggtaaaggtagacaagcaaaaccacctttttggaattc

SEQ ID NO: 200171 - DNA, 1000 bp, Homo Sapiens
tctgcccagttcttaggcatgtaattcaatgagttttaacaagtatatttaccacattgagatttagaacattttcatctccccagaaagtcctcgtcaatctccatcttttgtgggcaactactgttctgatttgtatcagaattccttttgcttcctttgtaaatatttttagagaaaagaagttaataaaaaaataagattacaaatgttaacaatgatgtaaggagtatagaattgcacagaaggtgttgcataaatgatgagagttgggcacaatgacttgtttcatggatgtcttgcagagtttttctctttcccttaaaagtctttctgttgctacagtggagatagccacctgtattagacaggctattagataaaagctctggcctttcctctctactctttccatatatacttttctttcaagcactatttatataccttctatatgctatgtgctctagggcctgtagacaaataagaaacggttcctgtatccaaaagagagatggccaccataatctgatccatgggaatatttacaaatctgggccacaaattcttgtttcttccttatggatgatggctaaaattcacaaatccattgatttgcaagaggataattttagatgtatttgaaggaaatgagaaaaaaagaagaacaaagagggtagaattcctatttcacaatttgaatgtggtttttaaataaacaaaattagttttattacaaaattacatctggcattaacaaaacaaaaaggtcacccatactctacaatttaagcatgttaactactgaatcaatccaagtaaactaaaacaattgttcctctaatggaaaaatcaagttataaacaaaattactttgggttgaggacttttggataagagcctggtcttgctaaattttaatacactccttctttttctctacttgtttttgacttcttgtctttttatggtcaagcacctgaccccaaatagggaattc

SEQ ID NO: 200172 - DNA, 1000 bp, Homo Sapiens
aagttaacaagcaaaatgccttgagcatcccaaaaactgttgccatgacctttgctcttgatcagtctgcttttgctttgacaggaccaattccacatcttggtaaccaaccattgctttgattgtgctttgtcttcaggatcatactggtaaagccatgtttcctctcctggtacaattcttggaagaaatgcttcgggatcttcatcccactgtttaaaatttccatttgaagctctgttcttgtctgcgtctgatctgggtgcaatggttttggcacccattgactggaaattttttcaactttaatttttcagtcagaattgtgtaagcagagccaactgagatgtctatgtgttggctattgcttctgctgttaatttttagtcctgttcaataagggcatgagcaagatgatttttttcttgcaaattggtgtggatagtctgcaccatgggctttatcttcaacatcatttcatcctttcttaaaatgaattatccatttgtaaactgctgatttctttggagcattgtccccataaacacttcataaaacaccagtgatttcaccattcttcccgccaagcttcaccataaatttaatgtttttgcttcaattttagcagaattcatgttgctctaataggggctcttttcaaactgatgtcttatcctttttagttcttcaagctagatcttgttcagacataacaagttaacgacaagtttattttggtgcaaaaaaaattgaaatccatgcattttttttcataatacacattttccatgaactttttgaagacccccttgtagaaagtatatgtgacttattactatttctgtccttgggttggaaagatcacccaatactaaaacagaaagactatagatggcttttagtctaaaataacaaatatgtggtaactgaggagtggcatatggtttctttctttttttcctcttttgagttgcagattcagaatgttcttcaagaattc

SEQ ID NO: 200173 - DNA, 1000 bp, Homo Sapiens
tggtactttgcatcctcgaaaagcgcatttatagtttctatatcaatcctacagtgacaggtaagatgatgtccttctgctattcccaccccttttgctgctgctgagccaccactttgtgttgtgtctcgatgagtgccatagtaataatgcatcatactaggctttccaggaataacaatagagcccattggtcaactgacttcctccaaagacatctgttctaagttacacacaagaatccagggctatgcatgttcccactcataggtgggaattgaacaatgagaacacttggacacagggtggggaacatcacacaccggggcctgtcgtggggtggagggaagggggagggatagcattagtagatatacctaatgtaaatgacaagttaacgggcgcagcacaccaacatggcacatgtatacatatgtaacaaacctgcacgttatgcacatgtaccctagaacttaaagtataatttaaaaaatacataaaaaaaaagaatccagggctatgagtctgggtattacaaggacttctgtaaaacttttgaccagcacaaggaataactatgtggaaaagagcttgagattgaaccaacattctggcatgaggccaaactaaaatttaattgacatatgtaattaaatgttgagttagcctactggtctgggattactgagttaccgcctactcaacgacagtgaccccctaagaagcagtcattcccttttgcaataggtgtgttctcagttaagatctgtttacatttgtacacattttagtagtattccttgcatttgacaagtgagagtcattctaagtaatttagaaccgagtacttattaaatacaacatgctttgccttctctccaactctgcatgtcttctttaaataaaaaagacattcacagtcttgctaatattcacacatgagctctgatgagtgatgtgaatgtattattcataatcatggtgggcttttgttgaattc

SEQ ID NO: 200174 - DNA, 1000 bp, Homo Sapiens
tcaacaagaagagattttctctcaccaaatgaaagatccagaagatagcaagcagttcctggtgcatacagctgttctataatgtccttagagacttagtcgttcttgttttgtattccaccatccccatggtgtgctttttatactcaggtttacaagttgattgctgaaacttcagccatcactcccatgttttagacagtaggaaggaggaagattgatgacaaaatggaataaaatccagctgattgagactttttttttttttttttttttttttttgagaaggagtctcgctctgtcgcccaggctggagtgcagtggtgcaatctaggctcactgcaagctccgcctcccgattcatgccattctcctgcctcagcctccggagtagctgggactacaggcacccgccaccacacccggctaatttttttttgtatttttagtagagacggggtttcactgtgttagccaggatggtctccatctcctgacctcgtgatctgcctgcctcggcctcccaaagtgctgggattacaggcgtgagccaccgcgcccgtcctgattcagactttttttaaggagctttcctagaagccccacccaacaacttccatttgccataaattagtcacatgcctgatcttatttgcaaggaaggctggaaaatatagtttgctacccacaacaaaatcaaggtgtggttaataaggaagaaggaaagaataaatattacatagttaaatggttgtttctaccttgtacttctttcccaaaatgttgccattgcctgtggatagtgagaatatggatggtaatgggttgttttcatttaaaatttttttgtatactggttgttttatagcaaatatgtattattttttaatcaaccacacagaaatataataaccaactttattaattaccacatgctaggcgtgctctaaacagtttgtgtggtgtgtgtgtgtgtgagcatgtgtgtgtttatgaattc

SEQ ID NO: 200175 - DNA, 1000 bp, Homo Sapiens
aagatacacaagtttcctcccttcttgaggatgcagcattcaaaacaccatcttggaagcagagactggaccctcaccagacaccagacttgctggcaccttgaatttgaacttcctagtctccaaaactgtgagaaataaatttatcttctgtataaatgacccagtttcagatattttgctatagcagcacaaatggatgaatacagatatcttaattgatgagttctaccaaacacttaaagaactagcaccaatatttatcaaatgcttccaaaaaaaatgaagagaagggaacacttcctgactcattctatgaggccagcactatattgacaccaaagccagacaaagacagtacaagaaaaccatagaccaatatcctttatgaataccaatacaaaaatcctcaaaaaaattagcaaactggattcagcaacatattgaaaggattatacatcatgaccaaatgagattgattcttggaatacaaggatggttctacacataaaaatcaatgcaatataccacattaacacaataaagggaaaatccatgatcatctcaactgatgcagaaaaagtatttgagaaaatccaataccttttcatgataagaacgcccagcaaactgggaatagaaactacctcaatataataaagctcttatatgagaaatccacagctatcactatactcaatagctatactatactcaaaagactaaaagcaattcccctaagatcagaaataagacaagggtgcctgcttttgttacttgtgttcaacataatattggaaattctagctgaagcaattaggcaagaaaaagaaataagaggcatacaaattagaaaggaataagtaaaattatttctgtttgcagatgacacaatcctatatttagaaaattgtagcaattctgcaccaactcccccctggccccacaacaacaaacaaagataaaccaaagcaaactgttagaactaataaatgaattc

SEQ ID NO: 200176 - DNA, 1000 bp, Homo Sapiens
tatgatttaaatgataaattcagcaaagagataggtagcatcaaaaagaatcagaaatcctagagctgaagaagctaaaaaatttattacagaacttcaatagcagactagatcaagcagaagaaggaatctctgaacttgaggacaggttttttttttgttgtttttttttttttttttttgagacggagtctcgctctgtcgcccaggctggagtgcagtggcgggatctcggctcactgcaagctccgcctcccgggttcacgccattctcctgcctcagcctcccaagtagctgggactacaggcgcccgccactacgcccggctaattttttgtatttttagtagagacggggtttcaccgttttagccgggatggtctcgatctcctgacctcgtgatccgcccgcctcggcctcccaaagtgctgggattacaggcgtaagccaccgcgcccggccgaggacaggttttttgaaatgactcagaaaaagggaaaaaaatgaaaaaaagtgtagacagcctatggggcttgtgggacactgttaggattttaaagaaagcattgtggattttaaagaaagagacaagactgagaaaggaacagaaaggttatttaatgaaataattcctgaaaacttctcaagccttgggagagatatgagcatcaacatccatgaagctcaaaggatccccaacacagataaaacacaaagaaggattaatatggttaattttaacaatattactaccattctaccaaaagcaatatatgcattcaatgcgatgcctatcaaaatcccagggggagggatagcattaggagatatacctaatgttaaatgaggagttaatgggtgcagcacaccaacatggcacatgtatacatatgtagctaacctgcatgttgtgcacatgtaccctaaaacttaaagtataataataaaaaaaaatcccaatggcattctttacagaaaaaaaaaaaaaactttgaattc

SEQ ID NO: 200177 - DNA, 1000 bp, Homo Sapiens
gcctccgccttctgggttcaagcaattctcctacctcagcctcctgaatagctgggattacaggtgcacaccaccacacccagttaatgtttgcatttttagtagagatggggtttcaccacattggccaggctggtcttgaactcctgacctcaagtgatctgcctgcctccgcctcccaaagtgctgggattaccggcctaagtcactacgcccggccaagaataaagtaaaatttcttaatgttacactagccccaaatgaaaaaggacagcactctcttctctttgctttcccacctcagaccataccacttgatccaggcgctcagcttacaggacccaaatactgaagcatgcagatgacaaatctgtcccaactctcctttctgcaagatggacactgagtcagtgtgagatggcggcccctgggggagtccctggcatcagtctcttcagctttctctattttcttaatagatggataatggagtagaagctctatattttatcatgatctcagcaagataaagaggaatatattttaggaagacactgctggtagaaaaccgaattccagaacacaaaaacctcagtgaactcttcttcccagtaccacagattaatcacgcctatcctgcagaaagggaaggaagggggaagtgaatagaggaaagggatggatttccaatgatggcttacgaaagcgtgcttccaactcccctcccatatgctaaaggaggagaggatgatggtgccccagctatctgcttagacttacttcctccaagaaaatgatgactgcacatttgctttatgccttaaagagtctccaagtactttcaatccatacaatttcatcaactgctaaagtgagcataggctgtcatccacatttcccaagtgaggaggaagaagatcagagcaggtatggtgtggtcccctcgcctagaagcaaaaagctggaattctctctgcccagctctgaagtgggcaagctt

SEQ ID NO: 200178 - DNA, 1000 bp, Homo Sapiens
ctttagatgctgaaaaattttaaatgtttcatggaacagtcactaaaatttggcaaatactagtctcaaaggaaatgtcgaaaaattacaagtagtagaagtaatacagacgcatttgataacaattacatacgtctaggcatgaacaaaatcagaaaaaaattatttagctcttagaagttaaaaatatatgtctcaagtaagtataggttcaaagaaaatctacaaactcaaaatacagaatatctacaaactactgctaatgaaacactgcatatcagacctcatggggtactgtgaaaatagcagtcagaagaaaactcgtagtcttcaatacatacttcaataaacaaaaagaaataaagatttatgaattaaacataaaagcaagaaattagaaagagataatagcaacaacaacaatgacaaagttagaagaaggcagaagaaaaagaataataaagacaaaagcaaaaattgatgatttggaaagtgtgaaaagagaaaagctgatcaatagaaaaaaagatgattgttggaaacaaatacactacgagaaaaggtgttgggattatgtggaaatacatgacatttttaaaagggaaagaataacaacagaaagagaagaaattagattcataaaagaatatgctgctaaaatctctgcaaatatgaaacttagatgaagtgccattgttccagagaaacacatattcccaaagctagaagacatgaaaaggaatctagactggacaatttgcatgaaagaaatagaggaatattgtcaaaggacaacctcctccacaaataaaacaccaaatctagatggcttcatggtggatttttgccaaatacttaaggaacagatagtttcaatgctattcaaacttctccctaatatcaataaaaaagaaaaacttacaaattctttgtatgtcatgtgcatagcattgactccaaaacattaaaaaatcacacggaaatgaaattataggaattc

SEQ ID NO: 200179 - DNA, 1000 bp, Homo Sapiens
tgtctatatgcagtgccctcttggtcatcttggctcaattaggcggtcaaactcatgttactgccataggccacatttagcatcagactctcctgagagtagtagtacaggaccataaacaaagtatgccaaaaaaggcagcagctggcatttctctcatgtgaaagtcctcacggctgtcctggaaactttttttttttctttttttttttgagacagagtctcagtctgtcgcccaggctggatggagtgcagtgacgcaatcccggctcactgcagcatctgcctcccaggctcaagtgagtctgctgcctcagcctcctgagtagctgggactacaggcacacaccaccacgcccagctaattctgtatttttagtaaagatggggtttcaccatgttggccaggctggtctcaaactcctgacctcaggtgatcggcccacctcggcctcccaaagtgctgggattacaggcgtgagccaccatgcccagtagaaagtcttttatagggccctgaaagcaaccagttaaatttaagaggacaggaccacagtggtggatgcaggaaccatttatgtctaagatagaaatcctttgtgagtgccccatgggttgtggcttccagggccttgcaaggaacacacccagttaccatagtctccacactcagggcagcttctagctatagctttccaccaggtatttttaatcccatttcacctcctcccccagcaattcaccagtcaggagtgatttttactgtaaagatggttgcttagtaaatgaattacacactcctacttaccagatttctagaggaaaacctaggaagctaccccaaggtcacatatgtccataggaaaaaagaaatggttgtcgtcgtctttcttctccttcacttcctcctcctcccttcctccccctcttcctccttccttcctcctccttccttcctccccctcctcctacttccttcctccccctcctcccttcctcc

SEQ ID NO: 200180 - DNA, 1000 bp, Homo Sapiens
ctaacataatactcatggtaggcactcaataataatcagtgatttaaatatgtgacagctattttcagggcattttattagccctgcagattggcatttgcttggattgctcacaaaaaatgttaaagccaagggccaggcgccgtggctcacgcctgtaatcccagcactttgggaggccgaggcaggtggatcatttgaggtcaggaattcgagaccagcctgaccaacatggcaaaaccctgtctctactaaatacaaaaacaattagccaagtgtagtggtgcacgcctgtaatcccagctacttgggaggctgaggcaggagaaccacttgaacctgggaggcggaggttgcagtgagccaagattgtgccactgtactccagcctgggcaacagagcgagactctgtcacaaaaaaaaaaaaaaaaaaaaagttaaagggaattggacaaccagttataggagaataaatatgatcagtactttcagtgatgttattatcatgtaggtcctggaggaacatgcattgaggaaggggaagactgctctctctaagacactggtttaagtgctctatgtatattatctcactgaatccacacagtaaccctacgaagtagatatgtgctgttgttatcccattttacagatgggaagatgaaagtatatggaggttaaatgattggcagaatgggattcaaacccaagcaatctgactttagagtttgtagttctaatcacttagttatgctgcttcagtctaaaaatccttgcaggtgtgaaaaggatttcactagccctttattagtggtagctgtcatggggccaagagaataacacacaaccactcaacctagtacaatacagtggttcccactcctgactgtatgttaaaatcagctggagagctttttttttttttttttttttgagacagagtctcgctccgtcacccaggctggagtgcagtggcgtgatctcggctcactgcaagct

SEQ ID NO: 200181 - DNA, 1000 bp, Homo Sapiens
cctttattcatcaaaattatttaagaattttatcatatgatttaccttaacaagagtaactaatttccagtagtgatgaatataattttttcccaaatggatgcagtagaaatagaaatatgacattacaaaggattgcaagactgttgcatttttttcctgcttatcgtcactgctgttgatttatatgccatcagtggagaagtgttaacagcctgagttatttatctgtaacatggtttgggttctgaaattattcatgctactcaagcactgaattcttagaagatgtatactttgctatttttctatctactggttatgcagtcaggtttataaatatgccataaagaacgtgcctgggaagaaatgaatttttatcagtgtctattatctggcaaatatttttaaaaagactgattttttttaacaaaagactaaaactcattacttttaaaagcgcattctgcatgaagatgttggttttattcttttacaaatattttcatggtatgtaggaaagtaattttctaatgggtataccttgagtaatttaagtaaaataagtagagtcacgctattgccctaacatcatttattcatatattcattaaacatttatttactgagggctgctatgtcctggaccaaggataaaacagtagaaggtagagaacctgctgtaaggcaggagctcaaacatgttatttcccttcccttgctattggatgaaatcactgtgccaaaaaattatgattcagaatcgttaaacgttatgtaactgaaatgcattggaagccgtggtgtgaattcagggctgattttcagagagtgtccatcagtttgtagcaaagagaaaatacacaaaaagttgaaggcttctatgggaattataaaatttatgacttgtttctaagtcaagggcagagagaacattcctaaataaacacttttctcatctagacaaagagaaggaacagaagacgaagctagcaagctt

SEQ ID NO: 200182 - DNA, 1000 bp, Homo Sapiens
tttttttttttttttttgtgacagagtctcgctctgttgcccaggctggagtacagtggcacaatcttggctcactgcaacctccgcctcccaggttcaagtggttctcctgcctcagcctcccaagtagctgggattacaggcgtgcaccactacacttggctaattgtttttgtatttagtagagacagggttttgccatgttggtcaggctggtctcgaattcctgacctcaaatgatccacctgcctcggcctcccaaagtgctgggattacaggcgtgagccacggcgcctggcccttggctttaacattttttgtgagcaatccaagcaaatgccaatctgcagggctaataaaatgccctgaaaatagctgtcacatatttaaatcactgattattattgagtgcctaccatgagtattatgttaggaggacttgcatatttatataatttggttcttataacaaccctgtaaattagatgttattaccctatttttcagatggaaaatctaagggtaagtgagattattaacttaacttagtaataaattttttttagtctttttttagttattattacttcaataggtttttggggaagaggtagtgtttggttacatgaataagttcttttgtggtgatttctgagatttggtgcacccaccacccaagcagcgtacactgcacccaattatccctcatcccccttacccttccccagagttcccaaagtccattgtgtcattcttatgcctttatatcctcatagcttagctcccaattatgagtgagaacataggatgttaaattagtaataataaaagccaaaaatggaattcagatctacatgattgatactcttccctttataccatgctgcctcaaaaaagatcatttcatacataatgattatatttagataacagaccaatccacactactccccataaggaactcagtgatcctaacaccaggccttacaggattaagctt

SEQ ID NO: 200183 - DNA, 1000 bp, Homo Sapiens
gaggctgaggcaggagaatcgcttgaacccgggaggcggagggtgcagagagccgagatcacgccactgcactacagcctgggtgacagagcgagactcaagactccatctcgaaaaaaaaaaaaaaaagaagagtcaggttcagaaagtggggccctagatttccagttgccccaactccccgggcgattctgatgtccactccagtggagtttctcacatggtactacgcacaccgctcacatggggctctcactaaaatgtgtattctgactcaagaggaatggggtagggcctaaaagtctgcatttctgattagcttccaggtgacaccagatgcttctggttcaagggccacactttgaggtgcaagatgataaagttttgtcttgaatctaaacagttattctccatgatagaaagcctaaacaaacaaacaaacaaacaaactggctgctgtggcttaattaatcagactctggagatggggtcaggcctggctatggtttaaaagcccgctgggtgaggctgccgatcacgcagggttgacactggcccttcatagcgttcctctcttcccaagaccagcaaggatagttctgggattcagaactgggtgaaggaggtgggagtgtggtccgtggcagggcagtgaggtgggtagttccatgcccttcccacccttggccagaggccagtgctcaggaaggttcccataaggtgggacccatcgcgggaagtgccaggaaaacacccacagccagagacagcatgtggtttttcctgtgagtccccggattttctcagatcataaaagggaaaggtgagagcgtagcaggtgctgggccagtcacagggactgttgctgtgtaccaaggacaaatgaggtgtgagtgccagggacacgggtggcgtgtgtgtggcagagctctaccagggggcttcggtgcttggctctcctgcctaatcctggggttccaatcgctatcaaagggaattc

SEQ ID NO: 200184 - DNA, 1000 bp, Homo Sapiens
aggaatacttacacatacaaacacacatatgaagaataatcctactacttttggtgttaggggaaaggggctgggaagaatggttgcaatattccatccttatcatggaaaacatattttcactaagacggaaatctttgaagcttctttgttctgttttgttagtcatacctccatgtattcattattcctatctcaaaccactttaattcttggcccagaaactacttttaatttaatagacatggcaagtggcctgaaaaataaaagtaattctttttttccataccatattttagtgttacttggttgaaaacttcgctttgtgtggtctgataaatacattgatatttaggttgaaaatgtacagtgactacatttcagtaatttttttcacttacaggttttagaagtattgtttttcctctgtgccagcagttatggtgatttgtagttatgctataaaagcttaaggtttggtagtagagaaagaaggtttgcagagatacctaagccagttatttcagaactacagctcaatctttgactggacttgtgatattgggaaaaattgccaacaaaaataacattgtagatattcatccatgttttagcattgctatgtatcacagttcctttctagattgtctctagtacataaaagtatctttttctttttggcaggtaatataacattacaaagcaagatgggtaacatcacagtaggtatgtgctaagctactagttcgtgtattttgtccacttttaaaaatgggtatatttgtgatgactttattagaataaatgaattctacagtttaactgatgaacttgacaggatcacaagtcaaatataggcagaaccaatgtactaattatgtccactcgaagaaaatcgcctgagctggtattaagaaatgtcttatatttcttgctaaacttctctgaagaaaaaaaaaagaaaagaaagaaaaaaagatcttacaaatttcttgaattc

SEQ ID NO: 200185 - DNA, 1000 bp, Homo Sapiens
taaaggggacagcccctgctcaacttctgccaattgctggcttataggagtcaaacactctgtgtcgctagatctttagatttttcaagaaaggtcagaaatctggatttttaaaagttgaattatctcaatttttaaatgttaacaacaaattttaaaatgtatttaattgcagggcagacaaatactgtgtgggtgaaacgaaacttctatgtggagggcctaaaggtctgataaaagtggtaatgtggaaatggtaacatggtagagtatgcaagatcaactggagaggggaccaggcctctgctgcttcttcaaacactagcttttctggccagtttttgttttagtgttttcttaaactcagggatgcacttacattctcaattgggcctgtcaggtgcttagaggcaggagcttcattttctctgaacattccatggaaaagggcatagtgcctgggttttagtgggtagggcaaacaacctggtagaacttagttatttcttcttcctcccccagtctcattctcagacaattggagatgttgttttgtcccttcaccccttcaggagatctacgccctagggatttgggtttcccttgactgaggtatggtgggatggagcagtactagaggggtggggcttcctggagaggccaggacctgtgtccagttcccctgaagtgcatgatagagatgtccatgaatacccaggtactgaccactaaacgccacagctgtgcaggaagttggaagtcttatggtccagactgtggctgggctatgcatggtggtggcatctctgtgggccccagggcagcttatgtcaagtgccagactaatggtaagtaggaacaagagtaccaaccacagaccaaggagcaggcccctgacctatttttctgactctgtataagaaacagaggctaaaataagccatctggtcaaccaggtagaaccagatttagaacaagagcactgttactgccaatccca

SEQ ID NO: 200186 - DNA, 1000 bp, Homo Sapiens
gagatagtctggcctttaatccataccctgtccttctaatgatgatagtgatacattaagtttaatctatatattcgttatgaagttctttacatagatttcttctattgctaaattggtcacagtaattcacatcagagcaatcgggctgaaaactattgcctacatttatgtatctcacccatacatgagataacttccttgatattagatatagataagtattaaggtgtttctaacagcttggaggaattttgcttggaaaaaggtttagatttgaacctctaatggggttaagtgtgctactaaaataagtgctccattgaaaagtcacaagcggagcattaatgatgtaggtctgagaaagggtttgaaagaaaacagagtaatcagagaagccatttatcttgataactaggggagattagcgttccctaatcaagctgtgaatgattgtatgctgaggtcagttcagagaaaaggtaatgttcatacctcttacaaaagcaagagattttcctcctaactatcattgatacaaatgtacttggctaatgctcaatctatgtcatacaaattatatggttctgttcctttgaaagtgtcctgcttctacataaataaggtcattctgccttctctccacctatgtttgaacacaggttattagggtcttactctcctttggtttaaaaaacaagaaagttgagacaattaatagttaaatgatttttttcacagatataggaaattaccacactagagctcaagactgcatatactcaggtctgggatttgattgagtgaatttcatgatttttaccaatgtttcttaaagcatggtcccatagataacctatatcagactcacatcaagtgctggctaaaaatgcagatttctgggcaccatccttacaaaatcagaatctctggaggaaggcccaggatcctgcattttgacaagcaccccccactttcatcctcacctgaggaagaattc

SEQ ID NO: 200187 - DNA, 1000 bp, Homo Sapiens
gaaaatatcactaagtagcaacatggaaatacataaaaataaaaactcactggtaaaagtaagtatatagtcaaacacagaacacttgtactgtaattgtagtatgaaaataaattatatctctaatataaaggttaaaagaagaaaaactattcaaaacacatatagcaactatactttgctaatggacatgccaaaaactatttaaaaattgtcaataaaaacaaattgttggaggggatagtaaaagtttagagtttgtacaagtgatcaaagtgaagtaattataagcttaaaatagcttgtcattagtataagacgttttatgtaagcctcctagtaaccacaaaggaaaaattcttagtagatacacaaaagataaaaagaaagaattcaaagcataccactacaaaaaatcattaaattgcaaaggaagcaagcaagagaggaaaacagaaaacaaaagatctacaaattaaccagaaaacaacaaaacaccaatagtaagttcttacctaccaataattactttgaatgtaagtgtattaaattctccagtcaaaacatattgaatggttcaatggattaaaaaaaaagacccaactatatgctgcctacaatagattaacttcacctctcttaacctttaagaacacatataagctgataatgaagggatgaaaaaagatattccacacaaatggaaaccaacacaaagtgggagtagctatacttctatcagacaaaatagactgtaagtgaaaaactgcagaaagatatgaaaagttattatataatgatgaaggggtcaattcataaagaaaatataacaattatatatgcacccaatatcaaagcaccgaatacataaagcaaatattaatagatctgatgagagacatggactgcaatacaataatgtcccgctttcaacattggacagatctagaccaaaaatcaacaaggaaatattgaacttgaactatactttaagccaaat

SEQ ID NO: 200188 - DNA, 1000 bp, Homo Sapiens
aatgttcagaaatagagaagctgctggaaatttaagacgagacagaatgtccttttgtcagagagtcctttatgatatgggaagttagaacagtggacctccaagccactttccaataccaattcaaagattgtgtgctgagacactgcccctaatcatctcccaataccacccctttcagcccacctgtcaggggtaggcaatgaagtaactgacaaccggcaaagttaagaggatcaaatgttacaggtatgcaatacccaggaagcgctgctgtggctctagattcctctccaacattttcactgagggagtgatcatgctcctatcagggagtgtgtgtaaggagggtggggtgagcatgcgggcatggggaaatgatttttactttgccatttcactgttacatcaaatcccctttaagaaggttttcagatttgcctctcgatgttaataaatagctcataatgcaaaaaaagtgtcattttttttctttggttgaaataaataaaactaaatatttaatttttcctgaagagaagtcatttagttctcaaattgcatgctaaacccaacattgttaagttaataagtcatcctaaaattctgagccacctgtccagtgggaagaaaagatagtaacttatgagattacatcctaacaccattgccaccttcccactgggaggcagcatggggtaatggaaagagcacttctctgtgagtccaacttcctgctccaacaacttgctatggtacgttcagcagccatttcacttctgctgtcaaaggtcactgccattttctaactcaaccataatcactcaacagagaagactgaataccacttgactacacaattatatttgaggacacacactcagggaaaatgggttcaaaatgcatagtactctctacagctcttagattttcccaattctcaataacttgagtatttgatgtgaactcatggtttttcaaacccacccttccttccttc

SEQ ID NO: 200189 - DNA, 1000 bp, Homo Sapiens
aaaacaagctctaatgttacttgctttttctaaaataacattttttaaaaaagtattattgtactcgtgtaaaaactgcaacttaaggaaattgagattgccataaataatggagttgggaatatatcttcagccctctgattattatactttaaagttagaagaattatgtcagaattttttatacgttccataatataatgatagacaactctggtacattttaacaaaaatttctattatcttcattaaatacttatgagactctaatgatagttcatattttatgaaaacaatatatgccattattatatggagttaattttttactatgtaaaacttttgtatgtgcaattaatacaagatattctttgaactgtgtactcagggatagtcttgttagatttcatggtgttataatgaaaagtggttctttgataataattatttatttaatagccaatcttattttattgatatcctccacttttctgccctgaatcattaaaaaaattattttaaaaaatatactttacattttagtgccattttaggttcacagcaaaaattgagtgaaaaatacaaaaaagtattcatatactctttatcccctactcccccacaaaacctgtaccactgtgcataacctacatcagcgtggtacatttgtaataattgatgagcttatattgacacatcattatcacccaaaattcatagtttacattatggttacctggaaaatccccatactctttgaggctaaataacacatgggtcaaagaaaaattctcaagaaaaaaattaaaatattttgaactaagtgaaaatgaaaatataacttatcaaaacttgtggaggacacagggagaaaaatggcagataggaggcaggacttacttgcagctcccacttggatggacagcgtgtggagactcacattatgaacttttgctgcaagaaccactgcaggaacataacaggaaaacttaaagaattc

SEQ ID NO: 200190 - DNA, 1000 bp, Homo Sapiens
attgtgtaaacgttaacgttggtttcatgtcacaaccttgaatgatataatctttttttttttaatcacatcaagtctaaacccatttctggacaatactatctatgataaccttattttacatgatcctctagaagacatcctctgctttagtcagggagaatttttacatttccgtaatacatcatgattatgcctatgtctgcctctcaagaaaatctaattaagtgactcaggcactcaaaatactctaatggctccccatcacaataggaataaactcagatgttttctgtagtctacaaagtttataatccgggccctacttatcatacctttatctccttccctggccttctgtctgttcctcccagacactgggttttctcctgcctagggctgaatagctggttccattgttgtccttcaagtctcagattaaatgttaatttttcagagaaaccttccttgaataccctgtgatattcctcccgtctttctccaatcacttctcctcatatcaccatgtggtcttagtcattttaggctgccgattagaattgatggcttaaatgacaaacatttgtttgagaagtccaagatgaaggtgctggcaggcccggtgtttggtaagggtctgccttctggtttgcagttggtcatcttgctatatcccaacaatgatgatatggctccaatgagtggaggaacaccaggttctttgtctctagtcaaattggaaaaaacgacatggacacacgtggagtggttttaagaagtagagagtctaataggcaagaaagatgggaggaggccgaagatagatgctcacccgtacagagacagagggaggggggctccaaagccgaaagaggagaccccaggtgccatggataccagccagttttataagtaggctggcggaggtggtgtctgatttgcacagggctcaggggattggtttgacgaggcatgtcattcacgtagcccgaaaaagctt

SEQ ID NO: 200191 - DNA, 1000 bp, Homo Sapiens
agcttggacagggagactcactgggaccaaaggacataatggacagtgtgactgggccagggagcctgtattagtctattctcatactgataataaagacatacccgagactgggtaatttataaaggagagaggtttaattgactcacagttctgcatggctggggaggcttcaggaaacttaaaatcatggtggagggggaagcaacacatccttcttcacatagtggcagcaaggagaatgcagagtgaagaggaggaaaagccccttataaaaccattggctctcgtgagaactcacttgctaccatgagaacggtatgggggaatccagccccatgattcaattatctcccactgggtccctcccacagaatctgggaattatgggagttacaattcaagatgagatttgggtggggacacagccaaactatatcagagcccatggctcataagcatggtgtttgtgcaatgtggcctcagacagagagaggggtctgagcattgagagacaggattctcctattcccacctcttgaagtccaaacaccatcaccttccagaactcagcctccttccacttagccagtcctatccctgtgtcccctgtctgctctccccaccgggaacctgggctcctattacactttcattgttaccatttgttcacctcatacccctgcctagaaagccccttcctgtgccatctgaactaattttactctttctactgggtccacatcaaagtccacctccctcatcaagccttccagatccctcccagttgtactttctctgaatgccacagcccgtaatcaatcacttcttaggtactatctcatgttcttgtctgaaaatctggtctcttctaataagtccctgaaaggaaccctgagcaatgattattgctaacatttttttgtccaccacaagctgtagctcagggctgagcacaccatggttgccggattgccttgcctcctttctcagggaattc

SEQ ID NO: 200192 - DNA, 1000 bp, Homo Sapiens
gtaaaagggcatatctgaaaaggtagtttctgggggcacctggccaagaaaaggatgaagttgttgcagtcgtcatttcaaacaccaaggcagtaagaccagcagaggacctggaagagccacaaccccttgtgggactttgtgctttgagtgggcctgggagaacgtgacacagggacagtctctgaccttcacccggaagcacggagggctcaggacgccttgtccccaggaggcccctgtgaagtgagggccactctgcctggaggtgacaggagggctctgcgctgtcaacactgcaggtacccgagacttgcagcccagctgggaactttgcagaggaaaggggaggaggcacatgagcagcacggggcactgtgaagtgggctgggcaggaaggaacacagcaacaggctaattggggagactgacctttttcccagtctggcctaaggtcagccctaaaaggttcccaacagggactctcccttcttgccctcttgagtccccactgggtcacatctgggcactgcggcctacttaccaaggactgtgtcttgggtcttaagtaaactcatgctcaaattttttccagcccagttcaagtcctataaatgattcctcagagattctacagcctgagctctctggaagctgttttgagaagtgttctctcccagaaagaggcttctgcgttcttacctcaggaacccctttgaacatggctctgagagccaaccccgagaaagctagtgtcagaattcaggatacccatgctcaccgcaaacacttttaccaggggcttcaccatctcacaagtgcctaatgagtcttggacttcagagcaggttaaaagcgtattaatctagcaactgtgtcattgatgtaattcgttccaccatgtgtggttttaagaaagaacatataaatattcacagtgactctgtccaattgtgcctctcatgtgtactcataaccctggaggaggaggcaggaattc

SEQ ID NO: 200193 - DNA, 1000 bp, Homo Sapiens
ctgaggtaagtgttttgccctcatttcacacatgtgaggcattcccatgagttcccacggtcacagaggctgggcgggtgtagttttgttcagcaggagtccctgtgttgggtggaatgaaggaaggacccaggctccattggcgactgtgtccaagcttggtctgacgtcaccatctgttcctgtcctcaccttcaatgcccacctgtcaaacctcacctcctccacaatgctcttcctgactccttcagtggggccttgggcctttttttaaccttttattacattcatacctacctcttactactaaatgaggagttcctgaggacacaatgcacagacatgaatcacagcgctgagcacctgccgcatctgacagacattgaaggtgtaatgagtgcttgttaaatgaaggaagagaaagaaaatagcttgaaaatcattgtgtctgtgtcttgtcatatgtctgtggcacatgtgttgcctttaactctaaatgaccaccttcatccccaacttattttagtcccaggatctattctagaatattcgaggactaaatatcggactgggtctcccccatttgagttgtgttctgccagcacccagcgtgacccatgtgggaggcggtggtatctttaagtcggaatgggtgaatttttaagtagggagggagagtgaatctcctgcaacattttttttctcattttgaaaggaatgtaattgtggaagacagtgtggcgattcctcaaggatctagtaccagaaatgccatttgacccagcaatcccattactgggtatatacccaaaggattataaatcattctactataaagacacatgcacacgtatgtttattgcagcactatttacaatagcaaaggctatttgctacgtaaatgaaccaacccaaatgcccatcagtgatagactggataaagaaaatgtggcacatatataccatggaatactatgcagccataaaaaaggatgaattc

SEQ ID NO: 200194 - DNA, 1000 bp, Homo Sapiens
tgcctaaaaggacgaaacaacagattttgctgggtctgtgttggaggaggacagctggaaactcagttagcagcagagtaacacctgttcaggcatatttatgggggaaagtgctcactaacagaaaagtgaagtcataccagaaggagttattccacagaaaaaaggcaacagaacacagagtacctttgtgacgtgagccatcagcccctcgtgtgccaacctggggaggaggaagcagagactggacgtgatttgatcctagctcctgctgatggacagacaagcacgcaaatgagggtctgagagtctgtttacagcctgccattgtggaagagaaatgctgagggttctggccactcgctggtgttcaagactaatcaaattagccagaaattagaaaataagatcaaagagagaggaagagaatatgtgcagaagggctagactaatgttaatgcttactttgtttatgattaagcgggtcttaatttgtgtaggacatacacttcctgaggacagggaccaagcctttcagaagattgattccaacactaggggcaatctgaaattattcaagagaaactaatgtaagaaagtagatgaaaatactttctctgaagttatggaaacttctgataatgttcttcatagggcctggtctgcaagaaactggcttaacaatatccttttgctacctgagcttgttcactgcaacagcagagtaccctcttaactgcccatcggggactcagtatcatgtgtgctagtgccacacagcaagatttccttaacagggacaggatttacatcaatggttacttttcaagtgaggagaagaagcacaaatactgatgggtctgatacttgtgtaggaaccaaaagtcaagatcctggagttttatttctagcttcataactgacttagagagtgacctggctaagtcatttaatctgcccctacctaggtatttcacctgcaatatgaagataagaattc

SEQ ID NO: 200195 - DNA, 1000 bp, Homo Sapiens
cttgagcagccagggcccctccttgaggccgagcttctagcccatctctccacagactcgctcactctcctgcccacactgccctgtccagatgtcagcaaagagcccctccctcaggcgttcccccagcaccatccaagctgcagcctctactcaggcacctgtcagcctgcacaggagcaagtcaggaacacttggccccaacatgacatcaaagccttccccagagtcccccagagtccacatcagagagtctgccgattgtattttcaaggtcttacaaacaaggagaaaccagcaaaaaaatcaataatagcttgtttcaactaagcgctggagaacgtaagaagtccttaagttatcaataaccccgaggtgacctcaccaccttccagccctgctgcaggctccttgcttctgcctgaggagagcatgggctgcccggctgctcctgccccacctgggccaagctgggggccagccttggcacctgggcagtcagggcacccactggagcactgccagccatggggccgggcctcagggctgccaccagcccacccccaaccccagagtgcccaaatggcccacttgccagcctgcagcctgcttcccaccatggcttcccacaagcctcccaggccgcccaatgcctgctgctctgggacgcagagcctggggcgatgctggccccttggagccacagcatgacaaagctagggtacagtcctgctcagaggccaggtggggccaagcaaggcaggagggacactgggccacactcgggacactgggccaccctcgggccccgggggttcatgttcccctccccatcaacctctttccccaaattctaagtacaggagcccccagacctggcccagctccattcccgtcgccaaatgcacagcctcccttcggctaaaatcacttctaaccttgggaaccagagctcgccctccctcccaggtccagcacatgccaagtcctctaggaattc

SEQ ID NO: 200196 - DNA, 1000 bp, Homo Sapiens
caagaaatgtggttctgagaccaccttagcaaattctgataaaatctagaagaataaagtaaacataagaacattcagtttcactatcaagtaaatgcaaattaaaactataatgaaattcaactttgtgtctatggaattgacaagaattaaaaagaattctaatattctgcatgagctaagtcatgagaatgctggccatcagaggcccttccacaccaccctgtgatgtgaatattatcactatgattctcatatcatatgtgacaaatatcttcagataagcaaattttatatatccacccaacaaacaattcttgaggccaaggaggtatcagagggtggcttttgtctaagggcctgcaatgaagaagaggtggaatgagagatggttccctggtctcctgacccactccaagctctcccttcctggggtctgagcttcagaagccaccttagagttcctgggtcctatgagaacccccatggcttttgaagcactaggggccttgtggttctaggcctcagagcaaacagatttgatgtgggctcctgggagcagcccccaacctttacctggcaaaagaagatgggaagctctgtggtgtctgggggaccagtcttcgccctacctcccgaagtcatagatgcaatccaatggcatgggaccacctctcctctgagtccagggcccagcacagcctggatgcagaaggagaagtttcttcctcagaagatcctgcagggtaggagtgtgtgcggtgtgttggtttaagcacaatggtctgtgtttagatttgcatgtgaccatgaggtcacactttggggttttctctaatgaaggttctgagtagggagaggggatgggagtctagtccttaccctccagcagagttaagtcaatgcccctctgctctcccccaagctccctgtcagagaggtctcccaaggaggatcttggggcatttgaggccagagacttaagcaattcagagaattc

SEQ ID NO: 200197 - DNA, 1000 bp, Homo Sapiens
gtgtgggtgtgtgggtgtgtgtgtgtgtgtgtgtgtgtgtgtgtgtgtgtgttgtggatatgtccgggaatagagaagaaggcaagagtgtgatcacaagcaggaaagaacaggactttaaagaatgacttctgtatatcacaaagttctcaggcccaggatgacctgcaaccttgtcagcaaaagagtttccctggagatacacggttagcttaggtcccgaatagctgccctgaaacagaatggcccactgcaccctgggtgttgtctctaaacccacaggcaggcctcatcacgcccgccctctttctccttatcctccctgtagcactaacactgcagacgaccaccttctcttcaatgtcctcttgtccctttgcatccctatcactacagccccctggttcccttcccctggggttgttccttccctgattctacttttttctccaccccgatgcagacattccccaagggtcatggctcagagtccacagctccttcctcccctctcccctttcctgctgtctcctaggatggggaacacccacattcctgttgatcctagcccacatactgcctgtggtcctggatttccattcacctgctcagcattcccaccaggattccctgctttcacctcaaactcatttagtgttaatttcaagtcctcaacttcctctcacatctgttcttccccactgggcatccctctttgtgtcaggtttgatgttattccagtcaccttgactcttctctgtcctttacccccttcatgaaatcagccatcctgccacattgattccctcctgggagtgtctccagaattcctttctcacgtccatttctttcctcttcccacaatcagtgccacatcaggcccagataactgtggccacctccttttggtccctccctgcacatcaccctgcacacacctgctaggtgagtattcgtacagcatctccttaaggtgtcaccaccttccccaacccagagc

SEQ ID NO: 200198 - DNA, 1000 bp, Homo Sapiens
catggggagggcggctaaatgtgtggcagcaaggagacatcaaagggcaggggcatccctggctgggagaacacaacttaagctcagaccagagaatcccctgctggcagagtctggggacagctggggaagcatcttaaagccagtggtcttcgttccctggactggtgtgcaaaaagcacaagactagaagcccaggcagctgacagccaggctccccttgccccgtgcctatgagctcttaggacagtcatcctccgccacaggggagctaacgtggtagagagcagcagtcttcaagctttttgttttcaggaccccttaacactctcaaaaagtattgaggacccccaagagcttttgtttatgtgggatatgtctgttgatatttactgagaaattacatttttatttacatgtgaatttaaaatatcagtaataaacccaatataggttatgacataaatcacatttttaatggaaaaacgattttacaaagcaaaattattttacaaagcaaaataaaattagagagaaagtgtcatttctttacagttttggaaatcttttaaatttggagcttcatagaagtgaaaagggcaaatcatgtcttaacaatattaggaaaattgtttttacctcagagacttcctgaaaggttctcaaggacccccgggctcccagggctacacttggaagagccgtgcatggaaggacgaccgtgaaccttgaagctgggcagagtgggcggaaatccctgctgatacctttttcttctggtgcgacaggcctcacttttcttgtctgtaaaagggaattactatcacctgcctcaaacgattgagaggattaagtagggaaagtacagagcacttgcgatagcaagcttagggggcctcagtttcctcatttgttagacaaagggctggactgaaaaatatccaaagcgcttcccagctttaacaggctgtggttgagcgtgagaaatgttccagaattc

SEQ ID NO: 200199 - DNA, 1000 bp, Homo Sapiens
acagtatcatctcaagtcttattaataaaagaataggttgctagaaaaaatacagcagaagaacaagagcaaactattagaaatttaaaatatgactaccaaaaattttaacagaaaagatgaaaccaaaggtaaaggaaattccccagaacatagagcagaaaagttagagatagaatattaagaaaaaaatcaaattaaaaaacatcaatccagaatgtttaatattaattaaaataggtatttcagagagaaagaaaaaaagaaaatgaagggaagaatagtattgaagaaataataagatatttctcagagccacaaaaagacaaaagacttgaatctaaaacatctcataccatggcctcttgtaatttcagaacattaaagaaaatagaaaattgtaaaagttttagagacaaaataaaatacttattgaggaacaaaaatcgatgtggcatcagacttctctttaatatatgaaatccaagaaaatacagaactaatctaaaatgtaatcaaaagaaataccaggataacaaatatgcaggtagagtcagccaagttagagtaggaactcagagagaagaaaaataaaattaagacttgtatactgcaaatagcataaggtttagagatagaagataaaaagggaagaaaaataagggtgttaattactcatctttcccagtgggaagttataagatatcatctaaaattggtaggcaagaaattgaggttctctcatggggaacctgtccttttctcactcttctttcttgtcttctcctgcctaacctataaacaccagggattcttaaggagtggtcttagcctccatttctttttgcctcatagtctcaccatgtaactcatcaaccatcatgtatttggaaatccctactgatgataactccaaattgagtgagttccagatatccccacagtccacttgttatttccacttggatagatcaaacgtatcatccctaaagaagaattc

SEQ ID NO: 200200 - DNA, 1000 bp, Homo Sapiens
gcatttatttctaaaacccattatcccaagtgactagttctgtggactagacattttcataaggggtaagggggacagggagaggaaatagtcattgttttagaaatgaataaagtttaaaagacactgtaatcatccagcatctttaaagagtgctatttattaagaattaacatataaaactattatcagtatattgaaaacaagacttttgtaccatggtgaagttgacaatatgctattatcctgtggggtacgtaagaaattaataaatgagttcagaaataaagcactgataacagcagctaaagctgtgcttcacaaaagttcctttaaatccagatgctatcaatgggttcacattggacgcctcctcgtaaaattaccaaattctctttatctctcatgactgatcatttaaatttttcctgtcatctgttttcatactgagtgttgagctttttttattttccccaagtccctggaagggaggaggaatcaaagcctatcttgatatgcagaatctacaaagtagctagaactggaaagcttcctatcggcagacaaagcaatccaaatccaagctactgttatatcaaaacttgtgaagagtggatggaaaaatatactgaggaaaatgctgacgacctgctttaaagcttaaatatctttgttgcaaggacagtgataaatagagagcagttaagagtcatctggagtaccaaaatgtcattccactactgtatttatttttagcatttattattattcattgggcactcctagaataatggtggtgtgaattatgcatagcagaatggaatggaggaatggtatttataatgctaaatttacaaacatgagagaaattagtaatactatggttatcaaaggaaacaggcctaattaaagaaataaccgctacaaaaccatatgcaactcaaagcagaaaaagacaattcaaatttaatgaatgcctttaatattaattacagaattc

SEQ ID NO: 200201 - DNA, 1000 bp, Homo Sapiens
gggaagacggaggacctggctgggccactatcagagcaagtgtgcacaggttatgtaacctctttgagcctcactttcctcacctgcaaaactgggatagaacatctacctgccttacacagaggactatgctaagagaaaaagggacaatgtggatgaaaataccccttgcagtttccaatccatagtacacaggcaataaatgcttgtttaaaaaggtgtcacctggctgggtgcggttgctcacacctgtaatcccagcactttgggaggccaaggtgggtggattgcttgaggccaggagttcgagaccagcctggccaacatggtgaaaccccatctctactaaagatatggaaattagctgggcgtgatggtgcgcacctgtaatcccagctactcgggaggctgaggcacgagaactgcttgaaccagggaggtggaagttgcagtgagctgagggctgtcaccactgtactccagcctgtgtgacagagcgagactctgtctaaaaaaattaaaaaaattaaaaaaagtgtcccctggctggaaaggtcctccctcccatctcacctctctggctaccttcacattacactgccctgctaggaaaagaagtcagtcccttgtgctccggcctctacacactatgtggcaaaagataaaatggtccccagtcttcccttccataagcaaaagatcttcagggcttcctctgctccatcccaagcaagatctcggggcatcttcctcccttctgggccccctcaccaccaggagtgggggccaggaacaccataccatctagctggaagcaatacatcagtgtccccgtccccaggagctggcaagaccaatagcagagccttgcctcccagtcctctcagttgtcaatcaaagcccaaggatccaatgggacctgaacccttgtcccctactgctctgtaggtcagggtgcttaccctcctcaaatcagtcctggaagtcttagtccaagctt

SEQ ID NO: 200202 - DNA, 1000 bp, Homo Sapiens
tgtacttgcttatggattcacattatttgctgctaaacacaaaggaagactaatatctgtggaaatgaatgaaagaggtgaacatataacaagtatctgagatgtttcaagttccgtatagaaattgtctttgttatttaatcttcaccacaaccctctaagatatttagaggctattcttataccattttacatagagacaccaaaggattaaagtagataagtgctagggtcctttcctgcctttaaagagctgatgtccctctgaggttttagtgttcctggcaaaaaaatgctctctgaactcttgtgaacccacatctcaaagagactaaggttgtcaatttatgttatagacaagggactttcctgctcactgcctcttttaacctgtaaatatgtaaaggctttgtcatcaatccagccaggcaagggagaatgcaccataatatatttttctcctcaaaagtgatttccaaatcatctggcatttgaatttcaaagctgatgcagctcagaatgtgtgggtttggaacagcaaacttgcttgaaataccaagtcatatttttgtcatgcactgcattgaaggtggggtgtttacagccaagacaggattgaagcccctttgcccaacatagcttctgtctataatagaatatcttccaaattcatacacagattttaataaagtcaaactttgcccccaatgagtttaaaagctaaaataggaaattcaggttcaagcccttgattgattgaaaatcagttaaaacatttgaatcatatttcattcctcccaacttgtcaatgttactttaatatttaagcccatgagttttacataattgtcttagagatgttttaaaacacttttgacttttcagtttaatttcaagtgttttaaaattactatttcagtgaacaaagcaatcaaactattaaaccattttttacatgaataaattaaaaacatttcctgtgaatgtaaatgtagaattc

SEQ ID NO: 200203 - DNA, 1000 bp, Homo Sapiens
tgtactgtgaacctaaaactgctcttaaaaaaaattaagtttttttttaaaaaaagaaaaacttaagtaacttgttccattacaagcttatttacttaactttgattgatctactatgtcataattccaaatgtgggaataagaacatttctgggtacaagagactagaaatagaaaattaagtatttttatttggaaggggacagagtttggttcttcagaatactgaggaacttgtaacttctagatatagtctcaaaagaagattcaataactcacattggctagaaaggggaggatcactagattgtatgtggacttcaaagaagtgatctagtgatcctatcgaatccaacacaggcaacatcccctttctagccaattaacctattgcaaataggttaatacaatgcctcaaatataatatatgttcaagaagaaataaattttctctatccttgacatcttcattaccaactgcaggaaactgaattattaacatatatgttggcagatcatgccatttatttattttccctctggttgcttttaagggttcatgcttatctttagcacaccagagtttcaccacaatgtgtctacttagaggtttaggtttgtttttcctacttggaatttaggattctcaggtctgaagattcacatctcacatctattttgtcaggggaaaaaaagtcaataaatattgcttctctcccactttctcctcctgagagttgatagaaataaagaatcttttcattctaacatccagatctgttgactgtatttcacatatcatctctattttcaatgttgcattctgggaaacttctttataaccaccttccagttcacttatagcgtctttggctgtgtctaatctgctgtttaatccatttaatccattaaggacttccaacctccaaaaaattctttcattataaaaattctgtagtccttatgatagtatctggtgtctctcttgtaatttgaattc

SEQ ID NO: 200204 - DNA, 1000 bp, Homo Sapiens
cagattgggaacagatgcgggttttccagattgcgctgcagattgggaagagatgtgggttttacagattgggctgcagattgggaacagatgtgggttttacagattgggctgcagattgggaacagatgtgggttttccagattgggctgcagattgggaacagatgtgggttttacagattgggctgcagattgggaacagatgtgggttttccagattgggctgcagattgggaacagatgtgggttttacagattgggctgcagattgggaacagatgtgggttacagattgggttatagattgggagtggcaggaaggttgtttgctgtaaagtggaacctttgaagaggaactcactgtatctaacaaatgtaaatccaattatgtcgagtctacttcaaaacttcctgccaggtgtggtggctcacacctgtaatcccaggaagtgggcacgttttccatggccagagcaggaggaggagaggagtggggaggtgccacatactttttttttttaattctccaatttaaaacttttagttaaaaagtaaactttaatgttgaaaatgcaaacttggggcaggtagaaagattacacacaaggctatcacttcacatttggagggttgcacagcagccgggcaaaggcgctcctcacttcctagacagtcgggggacccgggcagagacgctcctcacttcccagacagtgggggtacccgggcagaggtgcccctcacttcccagacgatgccgaggctggggtgccacatacttttgacagaccagatctcaagagaactcactatcaccagaagggcaccaagtgggaaatccgcccccatgatccaatcacctcccaccagaccccacctccagcattgaggatgacagttgacatgggatttgggtggggacacagacccaaaccatatcactcctgaagagctaggactacaggaatgctatacctggctaattgtttttctttttt

SEQ ID NO: 200205 - DNA, 1000 bp, Homo Sapiens
gtcaggagatcaagaccattctggccaacatggtgaaaccctgtctcttttaaaaatacaaaaatttagccaggcatggtggcgggcacctgtaatcccagctacacaggaggctgaagcaggagaatcgtttgaatccatgaggtggaggcttcagtgagccgagatcccgacactgcactccagcctgggtgacagagtaagacactgtctcaaaaaaaaaaaaaaaaaagaaaaaaaagtttatattacatgttatgacttgattactgtttggtttccagtatccttctatcccatctagatgagctcttagttgaaattgacatacagcagggtgggggaactttcaatcatacccattgcttttgtctagcactgtaacccttcaccttgcatgtgggaagaccactccccttttttactaggaaaatgcgccatcctattccatgcagccttgcaggggtctgtctctccctgataaaggtgcagcacatgggaaaattgcacaatcacgtcaaccagacttcaccagaaatctaaattataaaaagagttgcactcagattaaaggcaatttcttcagcacccttttcggaggcaattccctgggtctgtacatgtatgcctggccaagattcagggaattcctttgcttcccagctttcactgggtataatcattcagcattttcttccatcttttaaaacactgtattggcttcctacggctcctataacaaattacaacaaacttagtggcttaaagcaacacaaatgcattatctgacagttctataggctgcaggtttcagatggatctcagtgggccaacatcaaggtgtcagcagggctgagctttcttctggaagctctgcagttttcttcctgcacctttatcccagcaatgacaggttactcctgggcaccatagcttccttcatacattttcaaagccagcaacggagcgttgagtcctcacattccatcattctgaattc

SEQ ID NO: 200206 - DNA, 1000 bp, Homo Sapiens
aggaggccttagggcacacgatgggaggcctggagttcctcctcaggacaacagggaaatggctcggggttcatacacgagttacctttcttcaacttaacacatcaaaatgtcctaggtaacattctcctaaatcgtaagattagatacacagttgtgctgtaataagggatttaagtcaaggatggactctgcttaactggggatgaaacttcttaaaaaccttttcttgagacctgtcttctccctgcccctactgttccagctcagagtcaggtgtcaagccctgtgactctcctgaggacagtgctcacagctgaggagaagggctgagccgagtagggctgcacagtggcaggtggcacccactgcaaaagcagccccatccatgactcacaaaattctgacatgtccaaatcttagaaaccacatgaatcctaattccacgcatttccaaacatcactcactgggcgggaaagtaattattttataagttacctgtgtgttcccccttatctacagacctctcacccaaatgtatgggggccttactcaaggagagtccctcttggtgaaccctttgattatttttaacgtttgtagttgagttaaaatctctcccatactgactacattcatagagcttctcttcagtatgaattttctggtgttgaaggaagtttgacctctgaataaagcctttcccacaataactgcacacatagggcttttctccagtgtgaataatctggtgcagaagcagcttggagctctggatgaaggctttcccacagtctttacattcgaagggcctgtccccagagtggatcttctggtgctcagtgagatgggctttctggagaaacgctttcccacattccttacattcatacactctctctccagtgtggattttctggtgtcgaataaggtatgaactcagaaagaaagctttcccacactcgttacattcatagagtttctctccagtgtgaattc

SEQ ID NO: 200207 - DNA, 1000 bp, Homo Sapiens
agaacagactattctgggaatggtcttttagtcttttttctctaagctaaactcttcctcatctcattagcattcttcatgtgatagtttactattctgattgactttctcagaatatatttcaatttttctaagtatctcacaaaatgtggcttccgtaattgagccaggattctaactcaactggccagagaagaggatcatggccctctcccattctcctggtatctagatactctggagccgcattaatagaagcttactaatagcttcatactatgatggttgataataaccaaaatagtccagtgctttccgtctgaactgtggtcacgccgcagcttggtttggcataatacccttgtgaggtgtgttgtgggcccactgcagttcaaaaacttgtctaggtcatgtaggctaagtggcagtgtccatttagaatccaggtgctcccattctctagagctctttcctctagaactgaggtgggctgatgacgcaatgttcttagaactaatgaaagatgtctttactgtcatggtagtaaatcactaaagtgacttttttttttttttgtaagacattgtaggatttctcacataggaaatctgtaagaagaatagatggtttattcttaaagaagatgcctagaagaccctttgtaactttgacaaagcagcaaattccacctcccatcctgcccctagtcccatctatgggtttgtcagttgcctcctccaacaatgctggtctgctgttatcttaaacagcagcacaccaaagctgaacttagcttcccactttaggctgggcttcttccttagtctggtccggggattcccttaaacctgtcctagaacctaggaggtgggggtaaagggcctgcgtggggagtgaggacactggatgcttcccttggttcctctgtgacccttccttcagacttccctcccagtcccctgtggcaagtgggacttctgtcactttacatcctgaattc

SEQ ID NO: 200208 - DNA, 1000 bp, Homo Sapiens
gtttgcagactgatgttccttcagtctttgaagttgctgtccttgggatggtttttttttctcttgtatcctatttgatgaccttgagggtttgcttgtgttataagatgagttcaaatgactggcttcatttctggaaaatttcagggagccaaagctaggcttccaactcctagactgcataccctaaccctaggggattggtatcaggcccaacttcgttctctggctcctcaaggttaggaacccactgtgctgggtgcagccaaggtgctccctgactgctggtcacaacactccaatgggtggtgccagccaaagcattttgtagggcagtggcagtggaatctgtcctcattcacatgtgccagtggtagtggcagtggcagcgcagcagggtgcatgctcattggctatggcagggtgctagggggtgcccaggtgccagcctccatgtgggcattggcagcagcagtggaggcagcatgacatgggaaggtgggcccctcacgcccaatggcaacttcgcatgctgtcccgctggtagtggtgttagcatgggagcgggagactggcaggtgctggtctgcgtgcaccctctgtctgagtttttgcaggcaagggtggctgctcagggtgtggtaagtccactgttctccctgcctagtttcactccagcagcagtgttagtgcaggggcaaggcactggtgaaggtgaggctggtggactctgtgcctgccaaggctttgactgcaatgatggcatggtgtggggaggaggaggctgagttcactcatgccagcagcagtggcagggcagggcacatgcacacatgcacactggcagggcagagaaggcaagatctgcctgctcacatgtgcaccagcagtgattgggggggatggccatgggcccagcggaaactgcagtagaggaaggaagtggctgggctggtgcatgtccataggggctgctgtgctggagctttctgctttgggt

SEQ ID NO: 200209 - DNA, 1000 bp, Homo Sapiens
caaatcatttagatttgaagctacaaagaaaagagaggctgtattcatttactccctcactgagaccatatgacatactaggcactataacagatcatgggatagaaaaatcgctaatatgtttccttttcttaagtgagataattacataaacaactaactacaacacagtgtgaaaggtactataagataagagtttaaaaccaatacacttagccatcgagatttaaggtttttctggccaattttaaacagaactctcttaatgtttaactgacctctatcctttaagtgaaagatttagaacactgctgactgatatggtcttctttctcttttgctaaacctcagaatcccatttaacactccactgattcctgttgccatttagcatttttggaaaatccttagagagctctgccctcccacattcctgcatgatgactatgcacctcctcatattcctcctttcacaccacagtggccatccagaatgctgcaggaaaagaggctgtgtaggagggcctctccccacctgcaccagctgactgccatcagcattccccactcactgagatgaatcctctaggtgcccatctagtcccagcctgtggccttatcctgcacgtgtattcatatccacaaattcataacacagctggcttttagaagcctcagatgggaatcaactttctttacatattaaaaagaaactaagcttattataagcacatttttaagtcaaggataaatttatttctcttctggcaatatttctgagaagattcttgtctgttgaccctgtttaatattttgtgaacataatccctcaaatacttaaaacccaggcaaaaatgcagccaaaactaacttcaaatataacttaaataggcatttccatgtagtaactcttactctttctccaaaactgtcagaattgagtatatttaatttagaaatagtatggtggtactttcacctctaaattatactcaagctt

SEQ ID NO: 200210 - DNA, 1000 bp, Homo Sapiens
agacagatgaaagtgagagcctgggaggaagccaggaagaaaatacgatttctgaggtgacagaaggaaattgtagtcgagagctgatgaatgagaggacatgacccagcctttcgagagaggaatgcagaagctctgccccacagcatttgggcagcaggagcagaatctcctgctggaggcagccggggcgttgggtgagcccagtccctgaaatgacaggtaggaggggttctggtcatggtctcagagggagggacccctgtgctggcttaggggtctccgatccccccacctcagaaatgggaggtgagtgtgtggcacctgcacgttccccaaggcccctgcaggctccctccctgcttgcgcagcctcagtcacatctgtgcattgggctgtgcccagctcctgagtctccttgggacccctgatgagcacagcccaggctctcagtctgcgggccagatccacggctgatttgctcttctgaccctgaaaacgctggcatggaggctcccgcgtccccagacctgctgaccgtgtgatagaggccccagtattgaggaggatttggacttctcatctcagcaaggaccagagtgcagctcaagaaatgaacagggagcctctgttgtgatactcacgtctgacctaaccaagagtttcaagcacattttgagacagaaaggggaaaacatgcttttaaaactgagaaccagatataataaaagacaatacttgtggcattgaaaaaacaaaacaaaaaacttaaatatacctcgtgatcaatatcagagtagctgcttagaaataaaccttggggcctgagacagctccatgttcacccgtgaggaatcacttcaccctgtgacactggaccacaaatcccagccggcatgcaaagtggaagtgaacgccttccgcggaagtacgtggttgcgatggaggatggagtttgccttctgtaaaaactctcttcatctctctggcgtctgaattc

SEQ ID NO: 200211 - DNA, 1000 bp, Homo Sapiens
tgaaagaaaaaaaatatttcacagaaacatctcgaattatattagaccaaatatctgagtaccatggcctagtcaagttgacacataaaattgaccatcgtaggattcatcctttattttctctttcctaattgaatctgaatatgtagtctaagtatatagaaaacacaatagatgtactgtcagggacacatccaaaattccagaaacacgcatacacacacacgcactgacacacatgttcaaagtatttcacagaggtgctgggtgtttaatagtttatatggatcttaataatgagggtagcaattaaaataacttttatatcatatcatatcatatcttactggtcactccattaatcatgcagggaaaacagtgactcctgaactacatgaataaacttcagcaactcagaagaaacagaggaagaaataccttcattagtattataacttccatatgatgaagacccctgcaactttgacaaaaagaatgcttccaggctctgatgtaagaagtgaaaaactgccatgaactttggattaggggcatttgtatttgtgcagaataattgattttagttgccctctattgcttacttcttggcttactaatacagagttggtagtttctgcatctttaaagctgccctaggtaaaagttatttcactaagatctgattatatttgtatttcatagtgtttttccgcatagcaatctattcatcatttatacaaggagagctgatggcatcacttcccacttctgttatgtttgtcaggatgaactatgttgcacacctttctatcagaaggcatctttgaaggaaaaatagaactctgagaaccagtgaataacaggagcatctccagcaccagagaaacaaaggagaacataatataataatgtgttccatcagtacaatcctgcctatttatatttatcaccatctgacatggtttggctgtgtctccacccaaatcctcatcttgaattc

SEQ ID NO: 200212 - DNA, 1000 bp, Homo Sapiens
ttgctactaacgcattattattttaactttgctacaagttacaacgagcctataacatctgccctacagtattgcagtgaggcatgctttctgctgtgaatttttcacctctaacaatttgtttttcttgtatcagcactacctgtcaatttttattaagcaaagtaacttgaggcattttgaattttttttaccctggatgtccttggtggggagtgaaatgaccaacaaaaccattggttaaggatgcaatctttgagagccactaaacccaggagcagaaagcaagggctaaaaaaaattacccagggcagaaaacaaatttggaaaaaataatctacaccagtcacactgagtctcaaacatgattcagttgctacctgctgatttaatcaatccttttcagttaaaaaatataaattggagtgtaatatgcatgatgaaaaattttaataaaacatatagggatttttttaatgggaaataaaaatgatctgaaggtgaccactgcacattttaaaacctcctgaaaaagaaaatcaaatgataggaaggcatcaaagcctgtatgcagtcctgcacatttattataatatagaacactttagttcttacttccttggaatcagagaggtaaatatagtcaatccgatgacttgaggccagtctttagttgaggtattttgattttgatcttcaagaagatcaaatagttttgctctcctccggacataaaacttctgtggacataaggggcaaagaaaagggcttgaggcaaattattgtaaatccatttccactgtcattggcaagtagaagcacttgtacccctgaatagcaggggccccgcaacatctataaacaaaagacacaatatgctcatcaataggtcagatgcaaagttcacctttctctgtcagaataaataacaagcttactagaaattaccttctcactgccatctaaaagtggtagacttcagattttctggtaagaattc

SEQ ID NO: 200213 - DNA, 1000 bp, Homo Sapiens
aagacagagtacaaggaccaagtcatggtccttggggtggggtttggagagagagaaggagggaagtagtgacactcatggcctaagtttgctggctgtggacctgctaagaccccttctggcatgaaacagccccagattcctcacatggatgaggaggagactctcaggttgtgtggcctccccaggacatgacagggtagaggcagggctccttgttagccctgggtctccatgccttcctgatacccacagatggccctacaggctggcctgagttgtaggtggcctgccactgcccacccatgcaaatttccattctactgtcattgtccccttcattggccttccatgaatactaagggtggtagttcataggtgccactgtggtacaatgaacaggggtgggaccctcagccaggcccaggcaagtacttgtgtggtccttcttcctgacactcaggatggataggtctcctccaagaatcttggggcagagatgctcaggattctctggtggcttcaaaaccaaccaactgcactttggtggaacagaattttcttcccactctgcctagatccctacaactgagaacagagagcagaggagcctgggtcaggctcctggatcactttgtcttgctgtcttgcttccaagtttctgtctctgccattctttttgtctttcatagtctctgtttgtccttttatttcttcttcatctttccaaacttttctttctcatatagatattcattcatccactcaatgagttacacattcagcaaatattaactaaatacctactatgtgccaggcactgggccaggtctgtggactggtcagaggaaactgcaagaggctgggaactcaatagggatgggtagagaaaccacctcgccttcctagagcttgccaacctagccttacctgtgctcttttgctgccttggaatcttctgagctagtcagacagaacaggaaaagtgaagcctgaattc

SEQ ID NO: 200214 - DNA, 1000 bp, Homo Sapiens
gtgcccaatagccactggaagcttgagtgatgattggaaagactggccctggctctccatcatggtggtggtgaggatgcagaggaatgacagaatcatatattttgcaagctttaaagatgtctgttttgcctgttatgcctgaaatactcagaagtccctctttctgtcataggtatcctgacgttgagtgtccttaagacacagtcaaggtttaagtcaggacatgggcattgagctgggacattagcatcttgtccagatttttcagtgatctgtaaatgacctttagcatgccaggagctccctgtgctctgcagctgctgactgtaccggggtgatttgcttgaggaaaagactaggctcatgctcctttgagtgcctgatggtcggatgtgttccttggggaaaatacccaaggtcagaaactgagccaagagaaggctgatttggagaagaggaggaggtagctggggaagagaaaggaacggaactgggaaaggacagaggttacctttttaaaccaacctgaccttctgctcctggcaagcaggcttggtcctgggtccagatccagtgagtcccacagggagcagccaggtccactgtgaatccttggcaagcagcctgccctagaaagtggagtgcactgcatagaggcccaggagtcagtacaggcagtggcctggcctggggccgaccctgagctgcaggtcaccctaacctgtttgccttccctctctggctagagagaagagaatctttggctcttgaaggttgctaatgcagcagctgcagtggtttccaccatgcatcccctgtccctgaagctggggtggaggaccagcctctgaggagtggtggcctggggaaaggggctagagcctgacccctccctgcagatgtgtccatccccatctctcagtcccaaggcagctgcaccccccactttgaccactgctggtgtaaagggtgctgaagattcctgagagtccactgt

SEQ ID NO: 200215 - DNA, 1000 bp, Homo Sapiens
gcagaacttgatttgcaagaccagtgctagttttaggactccatttctgaaaatttagaattctgttttacactaaggaacagtgtttgccaactagtacctacttcgccacaaaaattatagtttttgtgtttaattgcaaaactatttgaaaatacctgttctataatagtgctaagtaaaagcaaattaacttttaaaaagtggaaaaagatcagattgcatagaaccgaaacctttctgcagtgtgaatgatataatgcaaaagaaatcttttattttgcaaattacccctgaaatttaggagttttgtttctttttaagcctttaatctgtttcacaagactcttttgcaaaagaaaaattttagggctaggaaaagacaatgtaattgaatttttaacaatctttgtttttattttgttttttgttttcctgttttttactttttttcttctctttaatgtaattgaaaatattaaacattccatttcagaccttgagtgacattgtaattgcccagtgggttcaccttgcccgctgtctagacagagccgatttatcaagacaggggaatcgcaatggagaaagagtaattcacgcagagctggctgtgcaggagaccggagttttttgttttgtttgtttgtttgttttgttttgttttgtttgagacggagtctctgtctgtggcccaggctggagtgcggtggcatgatctcggctcactgcagcctccccgtcctaggttcaagcgattctcctgcctcagcctccccagtagctgggactacaggcgcccgccaccacgcccggctaatttttgtattttagcagagacagggtttcaccatgttggccaggctagtttggaactcctgacctcaagtgattccacctgcctcagcctcccaaagtgctgagattacaggcataagccaccgcgcccagcccggagttctattattactcaacacagtctccccaggattcggagatc

SEQ ID NO: 200216 - DNA, 1000 bp, Homo Sapiens
cctgcccctggggctcaggtcggggctggacaccaccacagtcaccccccggtcacggcttcttggaattgctggggaaggggaggtggcactggggaaggggaaacaccgatttctcaagggcttatgaaaagcacataaatggaaagagcttctcaagttgctgctcttttcttgaagacaattctgtcttcaccacaaggtctctgggagccatatccctgtgtcccctttatggtcagtcctgcccccaccccaatatgagcccgaggaaggtcttcccgcctaatcagccagagaccctgagcccccaagaggtttgccacaggaagcctacctacccaccttcctggggcctcccaagaccccctcccccgcccccgccaccccataagcacaatgttgtaagctttgggtgaggttgggggctctggaaccaggagcaggaggtgctcctgggctggctgtgaggcagctgggcctccgggtcctggcatccaccctccagaccatttatttcctcaagctccttcccaggcaactcatccatctgggcatgcccaagccaccctgcgttcaggcccccctgcgctcaggcccagcagccatggccctacaaataggacctatgtattttgtatggtccctggatgttcacagggccacagccctagcctcggatcccccatgtctgggcccatccgcccattgttcctgcctgactgtgttcttgccaagagctgccacagggagccagtcggaggaggttccgatagcttcttcatgcatcctggaggaagccagttccgcttctggattcccggccacgacttcccagaactcagcatctacacctccagcccagccctgctgcacaagagcatggctaagagaggactgatgacttctcagagaagggcctccccacctcctgggaagcaaatgggagaacctatgctctgacaggccagttgcttctgacaggagaaagggggaattc

SEQ ID NO: 200217 - DNA, 1000 bp, Homo Sapiens
gaaaccctgtttctactaaagaatacacaaaaatcagccaggcatggtggtgtgcacctgtaatcccagctactcaggaggctgaggcagaagaattgcttgaacctaagaggcggaggttgcagtgagccaagattgtgccactgcactccagcctgggcgacacagtaagactctgtctcaaaaaaaaaaaaaaaaaaaaagacttgtaatataaggaaggggccaggtatggtgtctcacacctgtaatcccagcactttgggaggccaaggtgagcagctcagttgaggccaggagttcaagatcagcttggccaacctggtgaaaccctgtctctactaaaaatacaaaacttagctaggtgtggtggtgcacacctgtaatcccagctacttgggaagctgaggcatgagaattgcttgaacccggaggcagaggttgcagtgagccaagatgtcaccaccacactccagcctgggtgacagagcgagacaagtcttccaggcaatcccaacccctctgtttcacctggtccccttcttctggaatcacaatgtatcagtgaccttcatatggtgttggtccagaaccatacatggttatgcaagcatggagaacagagcaatcatctctgcttgcagatgccattgggtgatgagagagccagaacagagtcccattctgctgatccccaggcacctgggatgatggagaaaacaccaataagccagcaagagaagtgactagccttcccaacatgcaaacactatgtgtggaatttaccatgtttgtatcatcattcagggaccacagaccatgcatctaaacaccaccagtacgtccatagatgcagaagcactgaccaaatggatgtactatcccctgactcaaaccagtgaaaattacatggccaatcttttaaaaagcaagtagtgggccaggcatggcagcttactcctgtaatcccagcactttgggacgccgaagcaggtggatc

SEQ ID NO: 200218 - DNA, 1000 bp, Homo Sapiens
acttcagctcatagcagctacccatcactcatgcccagggcaggcagctgtgatgtgttcctggagcagcttgctggcaactagcggaaggcaggacagacaataaggaccctctgctccaaaaattggggatctgtgttctgattactgattgttgcttctgatcttgaagatgcaggcacaggcaggcagccattattgctccctttcccctattgttgcaagtcctttctcctcaagcagaagcaaattctgggggatttaaagtgctgtgtccttttcctccctgctctaccctttcatttttctctttttccccttttgggagccaaacatgtaaagtcttgtacattcaagagcaaccatacacacagggcagtttagaaaatgattgtgcatgcccagggaaaggtgcaggctttaaaaagacctgaaaagactttaggtttgcacctcaggctgatccttggcatagagacagcccacaacaatcaaaaaacaaaaatgaaaatcagtaaaccttggggaagagttagaatctgatttccagagttactgcgatattagattcaaatgtccagtttcaataacaacaacagaaaaatcacaaggcatacaaagaaacaggaaagtacggcttcttcaaaggaaaaagtaaaccaacaaaagctgtccctgagcaagaccaaatcacagacttgttagacaaagaccttaaaacaactgtcttaaagatgctcaaagaactaaaaggagacatggaggctgggcgcagtggctcacacctgtaatctcagcactttgggaggccgaggtgggcggatcacctgaggtcagaagttcgagaccagcctgaccaacatggtgaaaccccatctctactaaaaatacaaaaattagctgggcatggtggcaggcacctgtaatccaagttactcaggaggctgaggtaggagaatcgcttgaacctgggagatggaagttgcagtgatacaagatc

SEQ ID NO: 200219 - DNA, 1000 bp, Homo Sapiens
tgatttttaaatgaaggattttcagctcttaacttttgatggatagtgattactgaatgaactcaaagcttttctctttcagtttattcaataactggttctactactataggatctacatagctttcattaatgtagttggaaatttaattcactgctactagaaaacactcaaaatgtattcctgatgatgtattgttagcataatcttcatttttaaaaggttaatacagcaggtgctcacactcccatacctgttcacatacacgtatgcatgtacacacacacactcacacctattcaccagcattctttatgaccgctaagtaaaatcctgtgtccaatataatgccatttaatagactttgagcattcctgtacatttactggtaaaagtgagaagagatgagtgaaatgtgcaaagaaggtaggagtggaagtgcagcagtgtgatggtgagtgatacaacctcttatacagagaacagtcagagcatctcccagggctgtgaaggaagaatcttagagtaatttattcccagtagagacttgcctagtcatagatagcattgccagatttagcaaataaaaatacaagatgcccaattaaatttgaatttcagataaatggttaaaaaatttagtatatgttccaaatattgcatgggacatacttaaaaatttttttaaattggatttccctgaaatccaattttaactcggtgttctgtgttttatctggcagtcttagtcaggagataaagatggttgttaaagagttacagctgccatgtgaggaccctttaggacccctaacaggatctcgagtccctcgtctagaacgtgtctcagttatcctcagtgcagcactcagtcagatccctcatctctgttacagaggtgctttgcgaaatgactggtggcatttcatcactgtaatgagggagaagggaagggactttctgctgcaggctgggacttagtataaagttattgaattc

SEQ ID NO: 200220 - DNA, 1000 bp, Homo Sapiens
tgtcacactgcaaaagcaggagcaagagacagagttggagggggaggtgccacacatttttaaacgactagatctcacaggaactcactcactgtcacaagaacagcaccaagccatgaaggatctgcactcatgatccaatcacttcccacaatgccccacctccaacattgcagattacatttcaacatgagatttgggtggaacaagtatctaaaccacatcaagcccccacacagagtccccggcagggcactgcctagtggagctgtgggaagggggccaccaccctccagaccccagaatggtagtgctaccagcagcttacaccctgagcctagaaaagccacagagtcaattatgacccatgagaatagccatgggggctgcactctgcaaagccacagcggtggagctgcccaagccttgggagcccaccccttgcaccagtgtgcccaggatatgaggagacctggagtcaaacattattttggagctttaaagtttaatgcctgcttgctgtgttttgaatttgtgtctggcctgttgccactttctttttgccagtttctctcttttggaatggggatatttacccaatgcctgtaccactattatgtcttgaaagtaaataatttgattttggtcttacaagctcataggaggaaggaacttgccttaagtctcaaatgagactttggaattctgaactgttgctagaatgagttaacacttttggggactcttgggaagggatgactgtattttgcattgtgagaaggacatgagatttaggaggcaaagggcagaatgatatggtttgcgtatttgttccctccaaatctcatgttgaagtgtgacctccagtgttggaggggggcctagtgcaacgtgtttggatcatggaggcggatccctcatgaatggcttggtgccttccctacagtaatgagttcacacgagatctggttgttaaaaacaccagactgtcccaggtcta

SEQ ID NO: 200221 - DNA, 1000 bp, Homo Sapiens
taaccacctctttatctttcttcatcttccattagattgtaaaccttaagggaatatatatgatattcatattacataacctcacaacccaagaacttagcgtacctggcacattgaaagtactctataaatatttgttaaggaaatatgaacatatgaagaagaaaaagtgttgaaagatacagaccaaattgttaacagcaatgaagggcttttagggggtataattacgaataattgttttcttcttaatgaattcattttcaattttttcttactgaatatcaataaaggagaaaggtaattattaaacattaaaggctatatttaagtacgatttttcaaattcaaatacattattactgatgtcagaaaaatggcagagtaagaaatttcagatatcaattgcaacaacaaaacaactattaagctggaaaaaaacaatcataatcacctgtgcagaactctggaacctcatgggacccagcaaccaggggtaaacacctggtctgatggaggaagaggggatgaacctcaacagtgaagggaatctatgtcagggtcacaggctgaccataaagataacagaactataacttcaaggtctacacaaaacaaggaatacagactttgtgaaagtagtttggaaaagtcagaatggtggactgcgccctacaagaaccaaaagcaatctagaaagagaggaagaaccagatttttagagttatcacattatagtacttaaaatgtccaattcctaacgaaaaactacaaatcacataaagaatcaggcaaatatgactaattcacagggaagaagaaagaattaggaattaaccctgaggaggcccagattttagagttactagtcaaagacattaaatcaactgtcttaaatatgctcaatgagataaaagaaataaagataatcatatgtatgaacaagtagagaatactgataaagagacagaaataattaaaaggaaccaagtaggaattc

SEQ ID NO: 200222 - DNA, 1000 bp, Homo Sapiens
aaaacttagcagcttaaaaacagcaataaatatttattaccttaaacagtttctgtgagtcagaaattcaggagcagcttaactattttattctggctcaaaatctctcattgaatcaaaatcatggattactttgtaaattttcgccatttttaattctataaagccaagttagaattctctttcaagatttggcctaaaaactataaacttccttattggcagggaggtggtgatgtggggctaagttgataatactgaccacatatctaactatttttttctgtttatggatttttcttgtaaaaagaattccttgtctttttaattccttaattttaaggagcttgagaagctgaggggatattagtgattgttgattatgtgtgctaatagtaattcctcatacaaacttatagttgtatgtcaggtttttggggatgtttgtttgagtttcttttttttttttccttttaaccaaagttcagcttagttttttgagtatctttgtatagggtcttggtctttttcactgttatgctggcagtttcagtggtttgtcttagatccaccatttagaatagaagccagcagcttatgattaagaagtttcctgtttatctccttggcttctcaagaaagaaaactcttagaaactccaatacaagataaagtcaagattattaactgttaccagtggataataaaagtttttcattgttgtttctcccagtctttttttttttttcaaaaggctttttaaacatgttagacaaaatgttcattgtggcactgttaattatctcagtttttctttttgctagcctgggttatagtaaaagtgaagggaaacgtaaaaagaggacattgaaaaggaaatggaagcattataaggctaaggggaattttatatatatatatatatatatatatatatatatacacacgcacacacacacgcatatatagatatatatgttttttaatctcaagtgaattc

SEQ ID NO: 200223 - DNA, 1000 bp, Homo Sapiens
ttagcctggcgtggtggcacgtatctgtaatcccagctacttgggaggctgaggtgggagaatcacttgaacccgggaggtggaggttgcagtgagctgaaactgtgccactgcactccagcctgggcgacagagcgaaactccatctcaaaataaatgaataaataaataaataaataagtgatttcttgtccacctattatgtgacaggcattgggcaaaaaagatgcacccctgcactcaaattgttccattcaatctccttaggagagacagatgagtgaaggcaattataatgcaaaatgatgagtgctttgatgagggtaactacaaggtgctatggggacccttggagggcatttacccaggagtgaaggtcaggaaggtgtctctagaggaagacctgaagcatgagtgcaaactagtgcactgaagcaagtgggaggaacggagagaactccaagcagaggaaatagcacatagcaaggcagggggaagagaaagaacatgacactctcaggatgctgcaagttgtggggtgcagctggagggtaagcgattggggagctgagcagggaccaacgaggacattggtgagcctgcagtttgaagcaaaggaaagtctcatggaaggtgtttaagcagaagagtatgaatcagatttgtcctggctagagtatggaggatgaattgcaaggggcaagcctaaagtcagaaagacaagttgaaggctggtctaggcatccatgggagagatgatgatagacctgcgtaggtagtgacaaagggatggagagaagtgcatacgctgaagaggcattgtggaggtggggtctgcaggacttggagcattcatagaatgtgaggagcgagggaaggttagtgtctagatggctcccagggtaggagacggatttggcaatgtagacgaccaggttaggagatgtggcccaagctggcacctgagctccaggcttgaagacccaatttacctcttctc

SEQ ID NO: 200224 - DNA, 1000 bp, Homo Sapiens
atgttggccgggctagtctcgaacttctgacctcaggtgatcctcctgcctcggcctcccaaagtgctgggattacagacgtgaaccactgtgcccggccaagtggaaccattggaccttgttcaagatgactgccttattcgaaacaccttcagtttaggattatattgctgcatagactctaaaggaagaattatagccagattccagaatatgtacaaactttttatgtatttaaaaaaaaatcacaagtgtgtttaaaaatgtaaataaaggcagaaatatcaaggctatgtgtcagagacttgaaatagcatatttaacatcgatcataaaaggggcctcttgcagattgtgaagtggtggtttttaaaattagaagccgggtgtgtggcaagctcagaagcatatgacatagctgttgctagggtaagcgtgctgctttgggccaatagctgagtaaataaacaagataaacccacgtaaattgatggctctggtcctcctaactcattggccatctgcttattattttttttttaatcctgggttttctcaccctgcaatgtccatgtatctgacactttggaattcagatctgctctatgagattagtccgtcatctttgtgttctgctgtttgcttttagtgaaagtttgaaaaaccatgaaggccatggaatcaatgataagacagaacgtttcagaaagtcacgttctgaaacttgtctataagctgtgaatgttacttctcagatttttaaagtgttacttactttttggaagctggctctttatttttaatacaaagacagtctaagtcttttccctgcatgttatgtcctgttggtatgttcagatctgtctataagcatttttgtgttgggcacatataaaaattgggaggattgggctgggcgcagtggtttacacctgtaatcccagcactttgggaggccgaggtgggcggatcacctgaggtcgggagttcgagaccagcc

SEQ ID NO: 200225 - DNA, 1000 bp, Homo Sapiens
taccagtacactgaggcctgtagattattttgttatactcatttattattaaatcttaacagacagtaattctgatgatgaattgaagaaattgctgtttaacgaaggaaacgtaactgcttatgtttgaaatcctgtaagcctggtgtatttgcctactcataactgtggtatatggagcagttatgactttcatttatgcagagcttagccgagttatagtattcttcaacgcatcccagtgacaactcgtcagcaatcttaatgaatttttttaagtacattatgggtgaagaactttgtatctttgaaggattagccaaaaaaggttgctttagcatttcaaaatttgcaattaaatttaatgatattaatttcagaatcccatggttgtcaagtgctcctttcccccaatcatatttatctcaaataatgagacagattaatgatgttaaaacagtagatcaggttattagaagaaaagataggttttccaaaaaaaaagttgaaatacttattcatgtataatttccactttattaatggttcttttggcaaacttacagttgactgtatattagcgtgtttctcaaattgaatattttgaaattatataataaatattccttgtaaaacagcatctaaaattatgtgatggaaatggaggttacctcaatcctatttgtttttttaaagtaagaccttgtaatatgtatatgtagtataaaaaatatttaggaattgttagtagatcaattataatggatacattcacttgtatttttacttagtctccagaagatgtcaaacaagaaggaaaaaacttgggctcacaagatcttttcaattgaatatcttgaatctacatgcagaaaatgttaactagattgtttggagtaatattattactattatatgtaagatagtacagtttttcaacatcccttaaaatcatatgataatctttcagtcaacataagatgatttttttctgatactg

SEQ ID NO: 200226 - DNA, 1000 bp, Homo Sapiens
tttcaagaacctgtctatgacattaagaattatacagaatagggccaggcaaactctaccaaactctaccaaaattcaaggatgctcaaggccctgatacaaaatgtttgttatatttgcatttaacctccatactcccttcatatactttaaatctctagattacttacaatacctaagacagtgtaaatgctgtgtaaatggttgttatactatattgttttttcattcattttgttgttgttatattgttaatttttattagatttttttcccaaatattttcaatccatggttggttgagttcacagatgcagaacccacaaataagaagggctgattgtatagccttttcagattcgcttctttctttctttttggcaggggtgggggcgcatggtagtagggccagggacatgagagagcaagggaagagaaaataggatatttaagaaagggggtacaacagggaaaatactaaacagtgagagagaggagtgaaaaaagggggagagtgggaggaaaaaaagaaaggcaagaggggaaagaagaagggggaaaggaagagagagcaaagagaagaaaagggagtgataagggaggagacgaggcagtaaagaagaaagtgaagaggaaggccagcttggcttatttcacttagtaatatgcatttaagtttctttcatgtgtttcagagcttgttagctcatttccttttagtgctgaataattgttcattatctgtatgtaccacagtttattcacctactgaaggacatctgggatacttccaagttttggcaattatgaatggagttgctataaatacacatgcgcaggcttttgtttgcacgtagattttcaaatcatttggttaaatacccaggaacatgattgctggcacatatggtgagagtgtttagttttgtgtaaaactgtcaagctgtcttccaaagtggctgtaccattttgtgttcctaccagcagtgaatgagaattc

SEQ ID NO: 200227 - DNA, 1000 bp, Homo Sapiens
cttgtgaggcttactctaaactatgcagtaacattttggagggggagggaatgagcctcaaaaggtggacgggaatactactaaggttaacgtttatttaagttttaacaattagtccttatatttataactatttgccagctaaataggatcaatatgcaggaaaaagggagtgttatcagtatttcatgatgctagttaacatgtattttgaaatgctgtttcattattagctcaatagtataatgtgtgatattatagacaaatataatgtctttttttattcaaaagaattggtaataactgataagagtctaagattcttaagaaccttacatctgttttcttagattctcacttgacgagggcataataagagaaaaggggctcggtaaatatttgtcaaataagcggtttttttttttctaatgcattttctctggtatataaggggtggcagaacacgtaagggatacttagtgaatgtgtttattttaatagagactatttttatttaaacatgaacatgtagaaagttgatatttatgtatatgaggataggtaagtgttgtccataactttctcaattctaagatctttgatggcattcttttctctttctttgtagagcctagtacagttgcttatatggcaatatacttcatcaattctaagatgctctcttttttaacctttaaacattatttgggtataaacgtagcttaaatgtgttttcttgtttaaactgctttttgccacaaagttacatttgtgatggctaataaatagtactgtagcctaatttgctcattgacgtgtgattggaaaattttagcttactaaattaaatacccaagtttatcttaataaccaaacccacctatttaagacattgaatttagtgttatttaaggctcatgtgtgctcatacactttaaaaattattatatgtgattttgggtaaataagacaatatttagtaatttgtgaatgtggaaaa

SEQ ID NO: 200228 - DNA, 1000 bp, Homo Sapiens
agtgtagtggcatgatcacagctcactgcagtctcaatctaccaggctcaagcaatcctcccacctcagcctctagagtagctgggtctacagggaatgcaccaccccacctcgctaacttttgtgtttttttgtaggatggggtttcagtgttgcctaggctggtctcaaactcctgagctcaagtaatcttcacaccccagcctcccaaaatgctgggattacaagcatgagctactgtgcctggcctaaactgtgtaagttttatctttataaacacacagatttatccactaaacctatgggttattcaactttacacccaggtaagagagtatagttcatagtaggtattaagaaatgggggtcttggccaggtgcggtggttcacgcctgtaatcccagcagtttgggaggccaaggcaggtggatcacctgaggtcgggagttcgagaccagcctgaccaacatggagaaaccctgtctctactaaaaatacaaaattagctgggcatggtggcacatgcctgtaatcccagctactcaggaggctgaggcaggagaatcacttgaacctggcaggtggaggttgcggtgagccgagatcacaccattgcactccagcctgggcaacaagagtaaaactccgtctaaaaaaaaaaaagagagagagagagagaaaacaaatggggggcctggtagaggccaaggttaggagtttgagactagcctgggcaacatggcaagatcccatctatacaaaaaatttaaaaattagctaggtatggtggtgtatgcctgtagtcacagctacttgggaggctgaggcaggagtatcactcgagcccaggagttcaaggctgcagtgaactgtaattgcaccactgtactccaccctgggtgacagagcaagaccctatttctacaaaaaacaacaaatgttttcttaaattggttgaaattgaaaatataatgcaaaatttaatacggtggtgaattc

SEQ ID NO: 200229 - DNA, 1000 bp, Homo Sapiens
cttcctggcagggtgacgtctgcggggcactacggaagtagaaatgggtttagtgcggtggcctctttggggatccgaagagtggctctcctgtgcgggcttcaagaccccgcccccactgctgtgaagtctgcggccagaaaaggccaagaacatctctctctccaccccccaccccgcactctgctctcccgcaccgtcccttgcccagcgctggggtttaggcccgcccaggagacctgggccggagaggctgcggggactcgggggcgggggtgcgcggggctgcggcgcggcggctccaggttcactaatcacatcagcagcgctctgcgccggctccgagcttgcagttgcctagcaatacccgcgaattcaattcctcaatcaataggcgcgaggctctgcatttaggggagcgctagcaaggttgggtgggtctggggagtgggtctcaagacagctacgaggggctggcaccgggaggctttggctaacgcggcgaggccccggggcctcggagaccagacgcctccggcctgggggtgtggcgcgctggaggatcccgccagaggaaagtggaacccccgacctcaggcgcatcctcccgggatccccagattctgcccggggcccgaagaagtgcagccagtaggtgcggagagccacggattcccccggacgggctgaggggagtctgccccagcggcctcccacgcccacctctatcccagccaggtgggttccccagttggggaagggcctttgcaggaacggtgcccccgcgatgggggcgaggatgggggcgggaggacgggatgagtactgagagaagagggacggatcctctcctcccgggatgcctcttccctttgctcagggaaggaaaaagaagaataaaaccaagacatgtctctatttacaaagtatatatttaaacacgtaaaaagcggtattggatacagacattcacgaccgcagaagataggtaccgaagctt

SEQ ID NO: 200230 - DNA, 1000 bp, Homo Sapiens
tgcaccatccccaattggtgagtcccagtcactccccgcaagggggcctctaggatgccatgagatgcagccgtgagcaggtgtgcatgggaagaaggttcgtgctggagaagtgccttttcatgggatctgtggcagcaaagtgcagtgccaatgactcacggcaaacacccgccaggagaggtgctcaggagagccaccctagagggctgctggcacgaggcgctcaggagagccaccctagagggctgctggcacgaggcgctcaggagagccaccccagagggctgctggcacttgtccctgggctgtcatgacatgggcagtgttcatttcgtttctctaaatgtttagtctttttcaaattttctgtggtgagcattggttatagtttgaatctggagaaagatggttgagtggactcagcattgatttggagaaagtcatcttatttctgagtggggaacctgagctggggaccctcagggggtcttgagggagctgcctgtcctcagctggcccaggtgtcccacatggaaaagtcagaacttggctggacgtcggcagtctatggttcagatgtgggcaagacctgacttatccagggagttcacaaccccacccctcccctcctttttgggcaactcagagaaggagcttgatttctctgaacctcagtgtcttcatctacgaaatcagcattgcatccagttcatggggagaatccacaccaatgctaggcaggttccgccataagcagaaggcaccgtgacgcagtgagacgcaccgctgagctgaggaggagcagcaggccaccctctagaggccctggcttaaattcatttttcatttaattcaagtttacaattgagatctgcttgcccatggagagtttatacatgggcttttgaaagtatctgatcccataacacaaaaggtcctacacagcttatagagacactgcaataaggcaggatgtaattaataagtgatggaattc

SEQ ID NO: 200231 - DNA, 1000 bp, Homo Sapiens
agtttccacaggtaacacaagaagagtttcttctaagaggggtccaccaaaacaatttcccaggctacagctccacttcaaaaacagctgcaaagttcacagccaaaaagtctcaaagatgcaattctgctggaagccagtgtccagcttccaaaaacaaaccagagaagatgggccctttaagtcctcgtctccaacttacttgactttactaaatattcctaagcaccatgtgcacaaacctcatccaccatcctcatgttcaataaaaatgcatccatcccaatttcaaactcacaaatctaaacctcataagcccataccttgtccacatcgacctaaaaagtatccatctcagaattctggagaagcagctacttcatcacacagagcggcagctcctatccttgcagatatcaccacggcagccattggagataataatgatatcactactagcatgtctcaaattacacctacctcaaaggacttttctactaccctcttacctactacaactatctctgtatctcaatcatcacccactctgcagattacactaccaccaggcaaggtaccactgcgtttgaaagcatcactgttgtaactaacactactactgccgcagtaggtaaaaccatgtttgaagttgaagccactactgctaaaactgacacaactattaaagagactgctgtaactgcttctatgaccaacaaccactatagatagcacttaacagtgcaactgacactgaaatcactatggaggctctagaaaccatgacagctactctaagagtgacaacttctaccctcgacatgactctgcctgggaccaataacacttccactgctgcccctaattccaccactgccctggatgatgctaccagtgccaccaatactactgttgacactgagcctgaaagaaatgtcactgtccctgaagagtatacctacgatattgaagattataatccagcttctgtgagtatgac

SEQ ID NO: 200232 - DNA, 1000 bp, Homo Sapiens
tctttttaataacacatagcttaaaacacaaatacaggttcagctttacaaaaatattttatctctttatatccttattctataagcttttttctatttttcagttcttttactcatttatttttttactttttaaactttcttgttaaaaactaagacacatacacacacattagtctaggtctacacaggataaggatcatcaatatcactgtcttcctcctccacattttgttcctctggaaggtcttcaggggcaataacaagcacggagctgtcatctcctatgataaaaatgccttcttctggatacctcctgaaggacctgcctgaggctgcttaacagttaactttttttaataagtgaaaagaggagactctaaaataacaaagagtataatatatgctgggtgatggctcatgtctataatcccaacactttgggaggccaaggcagaaggatcgcttgagcccaggagttcaggagctgcctgggccatacagtgagaccttgtctccacataaaaaaaaaaaacttaaattagccaggcatgtggcacacacctgtagtcccagatactcaggaagctgaggcaggaggatcacttgaatccaggagttcaaggctgcagagtaagctatgctgaagccactgtactctagcgtgggtaacagagggagactccgtctccaaaaataaaatatatatatatatatatatatatatatatggtgtatatatatatatatatatatatggtgtgtatatatatatgatatatatgatatatatatcatatatataagtaaatatataaaccagtaacataattgcttattattatctagcattatgtactttacataagtatatgtcccacacttttatacaactggaagtacagtaagtttggttacaatagcatcaccaaaaacacctgagtgatgtgttgccttacaatgttacaacacctacaatgttgctaggcaacaggaattc

SEQ ID NO: 200233 - DNA, 1000 bp, Homo Sapiens
atagagttagataaatgaatgaataatgaatgaatggacacgcctgcttgaattgttaagttctttagagacttcatttcccatttacgatgttttgcaaaatctcaagtcttcttgaaaaatgaaatgtaggttaatggaaatgtcatctcattttagtactctttttgctattaaataaagcatattttaaattgcttctaaaaacagaaacttgggttacttacgttgaccacctgtggttcttcagaaaagtagtatgtttacataatcatcaaatacaggtggtctcaggtaggcttcacaataccaaatgaggtcctttgctgagtaaccggtcatatcctgctgcatgaaataaaaaaataaagggagaaaaaaattccccaaatgtcactctgtgaaggtgagctatcagaacaaaatctttgggctaatctgatcttatatttagggcatactcattttttaatagcttcttttctaaataatgtatttttaaagaaattgaatactagaaatttatagatgatttcagtgtacagcttaatagtcactgttagattatttctgtgtaaaatatgtgggtaccaaggtaaattagatttataaatgtttaaataattttaactgaataagaaaggattattagaactggtatagacaaaatagaaattttagtcagatatttttaatgcattccgataaatcagtttaaatagaatacaattcagcagtaaaacttggtgatggaaagtaaagaagatctttgtaaatggggttaatagttgcaaagtgtccaattatgcactgataactaattccaatgagtgacctctaagccactttagaggacccagtacacttgggaagtgatctccaacaaggtaaggctgtggaaagagtgtggagtttggagacagaagtcagagattattagttgagcaccctgaaataagccacttaacttttctgggcctcaatttcctaatctgtaaat

SEQ ID NO: 200234 - DNA, 1000 bp, Homo Sapiens
taaaaccacactggcagaaattgcattttgaaatgtcttttgtaatataaaaaagtacctaaagcaatttaacatgactgtgtttatgtagggttgacagcctctgtgatggcccataatgattttcacatcctaacattgacagccttgagtaatacctctcccctgaatgtaggtgggattagtaaaccacctctaaaaaaatcaaagtgataaaagtgaagtgatttcacacttgacgttagggtatcaaaatgctattgtttccattttgaggaacttcttatatactgtctcattattttctggattccttgcagagctattgtggaggcagctatgtggagagacacatgtggcacaagatcaagggctgtcaacaaccacatgagtgagcttggaaacagactcccaagttgagcattcagatgagaccacagcccctgctgacagtttgactgcaacctttgagagtccttagccagaggcacccagttaagctgcactaaaatttttgaaccacacagattgtgagataataaatatttgtggttttatgttgtgaggttttggggtatattgccatgtggcaataaatagttaatacattatgtaggtgagaatcctattgtctgatacagtaatatgaagtattgatttttctggtgtgatgtggccattttcaaaaccaatatgtataatgtacacaccctgttgctttaccttcgtcttcaattttcagttcttgcttactcctctttccctgaccttgcacacaaaaaatcatccccactatttttgggattgatctactggcttaaaaaaaataaagctgtacttaccagatgaaacatgtactaactttagtgaattttagttgtgggaattacttctaattttcttctttgaaacagtttgcttttccatagaatcctctgtaggacgtatagccttttatatgcagattggtataattatgctttgaaatagctctgaattc

SEQ ID NO: 200235 - DNA, 1000 bp, Homo Sapiens
atggaataatgtactgtctaatttcggtgcctcgagggcccgtgcagatcacagaatcttgctcctggcattggatagtttttcccagagcagtggcagatgtccctgagccgtgtctgttttctctctgtgacttcttaactgcatgcatttttaaggtggccgatttgagaaaagacatgtgatcccaaagaaaggttttttgtttttttctttgcagagccaactagctcttgcttggctttctagatcaagaataaaatataatcagtatgacacaaatagatttgatggttgttctatgctgtcttggtcactcatttataagaaattgttgaaagggtatatattaaaccaatattctcttcaactttttccttttcacaaatgattttctgggtcaactaagtttgcataaatgcaaacttctggagtgaaattcaggtttaatatattctacatgagggcagcaggcagctgatgagcaagttgttcttattctgtgtaccttgataggattcaactttggcccagatgaggggaatttgtttttccatgcagggcactctcatgagagtttcagaaaaacaatatgctcttgtcagaacagtatgcagttcttctaaaactggggctgaactacattttaccctttaaaggtcaggagatattattatgcagcaaatttagcctatgatttatcttaaaaaggaaccatcacatataaccctcacaagatctgggtaacgttaaaaatgagaataaatttcaataacagtacgaataatagctcctcctgtgtataagagatggcactcagcactgtcgcttatttactctccacaacaagcccacaggcaggcattagtttttcagttttaagatcaagaaacagaattttattcttcatctaccttgcactcacggcatcgttttcaccactggttacctctctgacattttcctatgtcgacttttctttccactttcagatcatccc

SEQ ID NO: 200236 - DNA, 1000 bp, Homo Sapiens
caaatgactggttagttcagagtgtctaaagccctgttcaacttgccttcatttgggacaattctgaaaggataacccagctccagaattccctgtagggttggctgagatctctgttgcaactgcatcacagtttaacttctcccctgtccagtttgcttcccttattcttacagacattgttttgagaatagtctcccataaacctctctcatgcaaatctccaactcacagtgtgtttcctggggacccaatctaagtcaattggtaccaagagtggtcctaggaagcaaatgctaaaatggaatttttggagttgactagcccactacctggctggcaatgaggactccaaagttggtgtaggcaagctgttgatagcccctagtatcctgtaatacaggttgcatattccttatgcaaaatgcttgggaccagaagtgttttggatttgggatttttttgaatttggaatttttgtattatatacttaccagttgagcatcccaaatccaaaagtctgaaatctgaaatgctccaataagcatttcctttcagcatcatgtcagtgctcaaaaactttcagattttggagcatatggattttagcttttacagattatggatgctcaatctgtactacaattgttaagattttcacaatggtgagggatgagatattggtgaaagggaatgcatttgtgggtgccaattaaggcattcaagagattggggggaaatgataaatacaagcaccagggaatcagatggctattgctggttgttaacctattgatgagttggagaaaacaatgaaagaccaagggtgattagacacaaatttaagtgaattgtgaaagtcaaagggtctctccttggcagcttattaagtgactatcagttcctgtagccaaaagatagaaaaggctgaggatcagacccagaaattataacatcagggaaactccagagaaggttgaattttcacccctaggaattc

SEQ ID NO: 200237 - DNA, 1000 bp, Homo Sapiens
tcttgaaaatattgggaaccatttggttacaccagaggaatttttctctagtgacattaaaggcacttataaaagactagtatgagtggtattttggggtatgtgttaaagtggtagcttttaggctgtggcgattttcatatatgtaaagggagactttgatggacatatgcagagttctttttttattatttctatgtggattgtttttgataacattttcatcctcagctgaactttctctttgatatccaatatatttctaggtagcttattgcttctatggattttctagtaataattttaaaatagcattactttttattatcacaatattaaaaaataggaaagtaattgtgatgtcaaaatactcaacacatggtatttttatttaattaaaatatgtattttggggaatagctgatgattattactatttatcctcctccttaccaatatacaaatataattttttagccttcaataatataataagactatattaattccttaatttagaaagaggctatttccttttctaggaaaagggcattgaagtgatgttttctccccacccttgccctacttggactcttgattggaatgttctccctgcagcagtcagcccaaaggaaggtgagttttcttttttctttaagttttattcatactttggatactgtcttcagatatgtcttctaattctctaaatctccctttggctttatctaatattctgattatactatcagttgagttttcattttatttttcttatgaaaattatatatacacacaccacttagatttaatatttctcacatttttctacatttgttttatttgttactgttttttctttgctgacatattttgatttttgttttgttttaattttactttaagttctaaggtacatgagcacaacgtgcaggtttgttacatatgtatacatgtgccatgttggtgtgctgcacccattaactcatcatttacatta

SEQ ID NO: 200238 - DNA, 1000 bp, Homo Sapiens
tttgatgtctactcattatgcccaaggtatttggctatttcaacagattggattgaacaacgagcctcactaggtgacgattagctatggtttccctggtctatactggatttgggttcattggtaaatcattctattcatagcaatacaagatatcttgtcaaaggaagttaaaaaaagagactcaagaaatcagtcaaccaatcagggtactcttttcgattagaagttaaaaagtgacagagcaatctgtcagaaaagaaaaaaagaggatttatcttgttaactctaatttgttatgtaaatgacatcaatacagtaatgaacaaaattaactcaaattgctgtcttcatggagcttacattctagctgaatgagatgactctaaagtcattgattttgaaactgcttacatgcataagtaacagggtgtgaagtggaatgtcaactgaccttgtcttgctgccttgatgttcacaggctgaaagcccccattgagtgccgaagagtcaataatatctgactcaaagtcacgatgattcttccgatacacaaacaaggccacaactacagagatcgccaggcaaacgatcactgctatcacaatcccaacatagagagcaacatcatctgaatcaggagcagctagagaggagagtgaaacattgaaccagctgcttatagaaatttcccacagtacacatatgtattgctataattttttcagacatttactgccttttttataggttaatttcaaatctatttcaaaagctatataaaatggctgtggcctttcagtggaaaattgtctctgatttcttttcctttctcactctgcatctatccacccactaatctatcttataattgggcagcataacagactgtttattactaggcatataaagaaactggaactaaaaccatcccaacccacaggaaaaaaaagtttattactcatttcaggtggaaaagtttggaagggtttttgaattc

SEQ ID NO: 200239 - DNA, 1000 bp, Homo Sapiens
actgcgaggccaaggcaggcagatcatctgaggtcaggagttcgagaccagcctggccaacatggcgaaaacccatctctaacagaaatacaaaaattagctgggcgtggtggcatgcacctgtagtcccagctactcaggaggctgagacaggagaattgcttgaaccttggaggcagaggttgcagtgagcagagatcacgccactgcactccagtctgagtgacagagcgagactgtctcaaaaaaaaaaaaaaaaaaagactgcctcccaggcctggactactaaggtatggtggtacctttcaacaatatagaaaatactagaaagaaacaagtgcatgactatggggaaatgatgagttcacgctggggcatgctgagaccgagagactagggacatgagaatctggaatgtataatctctactatctcaaaattgcagtgaagtcagaatctcttatctctttgaatccattgtctagaagccaccttttattctcttaagccatagataagtgtacttcaaaatacaatgagaaaacctttgttcctttaactgcaatctgctaggcaaagaataacagattctctagaaagttaggaattacatttcttaagggacaaagtgtagtgtagaacaggctctgcttcgaattctctttttcttactagctctgctaacttggacagtaacttagcttctctatatgccttggcttccttttctccaaaatgggaataataatgaatgtgcaaaatgcactcaggacagcacctagaacataagtgttggttgcttttattgtgttgctaatggttcctgtcctgaggatgacacgtcctctccccaatgacgttgttgttaaacatttatattgtgctttaccgtttatcagtaacttcatattactatttcttttgttcttcacaatccctaatgaatgtcaatgtcaagcgactagttcagtgtacaaaattaatggcaaatctagaattc

SEQ ID NO: 200240 - DNA, 1000 bp, Homo Sapiens
atattccctttaatcaaggaggtctttataccctcctgatacctcttaacttttctggatcaggcctcatgcctgattgcataatagatgagagtaactagtaacaccctaaaatctttctgagggtttataacaaggtttgacagtccaaggtcagtctttgcatactgatccctaatcttaagaccccagtcttgagacctaaggtctgttcctacatatgtaacatatgtgcatattttccaaaattgttattctcttgtgctttttgtcattgtatgaacctgcatctcttacttaactatatattgtgattgtctctccttgtttcaatagtctgatgtggtggtgctgaagctactggtggtgatggactcctttttcccctcacaactcatcatgaactgatactttcacaaaataaaataaaaatgaatttataatacaaaataaaataaagccataaaatataagcccaaatatttttcaaatggcataaaactggccaggcatgatgatttacacctgtaatcccaacactttgggaggcccaggcaggaggattgcttgaggccaggagtttgagaccagcctgggcaacacagtgagaccttgtctctacaaaaaattaaaaaattagccaaccatggtggtgcatgcctagagtttcagctgcttgcgaggccgaggtgggaggatcgtgtaagcccagtagttgagggttggcgtgagctgtgattgtatcactacactgcaatctgggtgacagagcaagactgtctttaaaaaagaggaaagaataaaaggcataagactacatttcagttaacataatgagaagacatattaaatagggaaaagcaataaaaggtacacacagattgcaatttgggactgccagtggtccacggaacacgtttgggggagcactgatctgctgtgttgttgttgatggcttcatagcattctatgtgtgtctcaatttatttaaccaatttct

SEQ ID NO: 200241 - DNA, 1000 bp, Homo Sapiens
ctaatcattatatttagttgttttacatttatattgtttaatttatattattccctcatctcgtcattttaatgtaagctagacatcagcaagcattatggtttgttttagttaccattcctcccagacactgtaaactctgcctggcacatagcagaaactcaatatgtaatttgtgaatcaatgaataagtcattccatttaagaaaaaatataatgtctggcataaaacaaagcacaatttttctatatttattcaagtaataaaaagcggttgccaactggataattcccaatttggcattccagaagcaagaacgaagtccgtaaaaaaaatcctacctccaaaaaaaaagaaaaatccctgatatattttttgttttttaaaaataaacattaccagtgaaggatttgtgatcatatccaaacatttcataagaccacacaagaaattaatagcccagtgatgcctaagccaaaatttaaccttcatacacataaaaaactcacgaagacatgcaagcattagattcagttacatcaacagaggacaaaaacacaagatggcaaattcttctccttaagaactgaatacacaaaagtatttcaatagaaaaaaatctcataaaggcaggatttcaagtgagtattaaaaagttaatgattcttttgagattttaattccagacattcatgagttacatgtcctctagactctacagcttgagcaattgcgatcaaattctttatatggttaggctacttttttttttaagggcatatggaagaaaagacagaaaataatatttcagagatttctgaggccaaaaaaatagacttttaatgcatcacttctatctagcaaaaccagatagaaagagacattacatgtctgtagacattttcacatacacacaaatgtgcctacacccacagtcataactttctgataataaaagtgttcttgtgattggtgtcatacataccttctacagaattc

SEQ ID NO: 200242 - DNA, 1000 bp, Homo Sapiens
agaggttgcactccagcctgggcaacgaggtctcaataaataaataaataaataaataaataaataaataaaaacacaaaaaccctgaataaagaccaaattcctaaaatgattatctttggtgaaagagtttggtaataatttttctttttgctttctacttttctatactttattggttttctggttgcataaaatgaagtaaacctcatttgaaaagacaaaggagggaatagagggaagacctgggcaggatgttgagggctgagttaagcagtttcacgtctccagtttataaagggagcctgcagtgttttatatgtggaagtgaggagataaaagaggtgtttcagaaaacaaacaagcacctctgtgcaagctggactggaatggggaagtaacaagggtgtgtaatgagggggtgaaaatgctgtcaatggtacagggcaagctctgtgttcatacgttatttctacttattctattgcttgctacacttgtctcaaaccaccctcacttctttgagacttttgtcaaaaactcgatatgattaagctacaaagctggaactcacacctgcaccattcatgagccaaatctcagtcctgggctttgtcaggctatcaggtatgaaaaagatgggattgtggactacatcttgccataggagtactttctgtccagagccaattgcatttcaaccactcaacagactgtgttcctaattgttaaatttggaaacaaacccaggtccaaatcctaactccacaattttctagctctatgaacttggtcaagtcacttaatttctctgaagggtctgctcatcagtagaatgagggtagtgataggatctacttctcaagcttgtagtaagaagtaaatgagatagatggggtaaagctttaccgggcgcttagtacaaccctaaatgttccccaagtggattagaagtagcataaagccaattaaaaattcccaactttcacctttggaattc

SEQ ID NO: 200243 - DNA, 1000 bp, Homo Sapiens
gctgggattacaggcatgcgccaccacgcccggctaatttttgtatttttagtagagatggggtttcaccatgttggtcaggctggttttgaactcctgaccttgtgatctgctggtcttggcctcccaaagtgctggtgtgtctggaattggttacttctggtgcgttcttcgtctcgctgacttcaagaatgaagccacggaccctcgcggtgagtgttacagttcttaaagatggtgtgtccagagtttgctccttcagatgttcagatgtgtcccgagtttcttcttccagtgggttcgtggtctcgctaacttcaggagtgaagctgcagaccttagcagtgagtgttacaactcttaaaggtggcgcgtccagagttgtttgttcctcccgatgggtttgtggtctcgctgacttcaggagtgaagccacagaccttcacagtgagtgttacaataaagctagtggggacccaaagagtgagcagcagcaagatttattgtgaagagccaaagatcaaagcttccacatcctgcaaggggaccccaacggtttgcagctgctggctcaggtggccagcgtttattcccttatttggccctgaccacatcctgctgattagtccattttacagagtgctgattggtcgtttttacagagtgctgattggtgcgtttacaaacctttagctagacacagagtgctgattggtgcgtttttacagagtgctgattggtgcgtttttactgagcgctgattggtgcgtttacaaacctttagctagacacagagcgctgattggtgtgtttacaatcctttagttagacagaaaagttctccaagtccccacccaacccagaagcccagctggcttcacctctcactgggattacaggcgtgagccaccacgcccaaccggtaggaacaaaataactttaaacaattgtccccaggtgtaggcaccggctacagggggccagggaatgactggaattc

SEQ ID NO: 200244 - DNA, 1000 bp, Homo Sapiens
gcctttccatagattaggagaggaccatgaggctgttgtaatacaccatgttaaatcatgtgctatgaaccttcatgaagataatagtaaaagagtaatgagcagatgttaaagccagagagtttgaattctaaggatttgaggccaaatgtatatgtgcttttgcagtctaagattatagtttttaagcctgagtatgattatggtgattgtagagccgttaagaaaagtatgtaagtcacaaagtaatgagtttgaagatgctgtatttagtctggataaatgaatgatttccaagcatgtcacattttaagtaatgagatggacaagtggtgggaaatgagcaaaaattccctaaaaaggggagatttgttgcagaaatagatttgggttatcaggatgtatagtcttgacaggtgtccccttcaagggaaagaggatgaaataaaagtagagaatataaaaatacacaagtgggaaaatgttacattcagaagacggtaacttaacagtaaaagttgaaaaagctgtattattaagacaacttgaacagatacattgagagacagatttttttaaggaaggtaatgacaagttattccagtgggtacaatgtgatgaataatgataaaaaacctttgaatttggttactgagatgttgatggtgaacttcaaaaacagtttcagtgaaataataagaaaactgcacataaactttgtataattgaagttgaagggaaagagataagatattaatggggagaggggtcatttattcatctgtatttctgttaataaattccaagacagtgcttggcataagtctcagataagaataagaccaatttatatgcacatatatgatgattaagttgaagtttctggtaggcttcctgtcaggttacaatttaatgcatcttattcagtattatatgtacataaacacacacaatatacataggcattttatgtatctacatataacattcaagctaataa

SEQ ID NO: 200245 - DNA, 1000 bp, Homo Sapiens
aaattcctgtttctcaactgtcttttctttttttgttttttctttctttagatggagttgcactcgttaccccagttggagtgcaatggtgtgatctcggctcactgcaacctctacctcccaggttcaagcaattctcccgcctcagcctcccaagtagctgggattacacacatgcgctatgctggtctggatataagcaagtgttaactacagatactggtccatccttccttagtcccgatgtatatccccccaggtcaatactgtgttggttaaaatgaaatactagtccatccttccttactcctgacgtgtatccccccaggccaatactgtgttggttaaaatgaaaagatattttactaagattttcttattttttaaaaatttgagacagggtctcactgtgtcaccaaggctggagtgcagtggcacaatcatggctcactgcagcctcgacttgccaggctccagcaatccttccacttcagcttccccagtagctgggactgcaggcacctgccatcatgcctggctaatttttgtatttttggtagagacgaggttttgccatttgcccaggttggtcctgaactcttgaggttaagaactccacctgccttggcctcccaaagtgctgggattattggcatgaaccaacaagcatggccttttactaagatttttataaaagaaattaaatacagaaatgaccacctctgtagcctctgaacacagaaatttaagaaagcacaagcacattggcttttataaagaaagggagacttgtttttatcaatgtattatccatcaaaattgtaaaacatggctattttaaaatctctttttaattcattaaatcaacaaaatcagactccaccaccacccctaaaaaaaacagagcttctggagggcagaaatcttagtcatcatcatctctgaacaccacctatattgcttagccacagcactcatagaataaatatttactgaattc

SEQ ID NO: 200246 - DNA, 1000 bp, Homo Sapiens
tatatccatcgtagaaaacattttgaaaagactggccagggcaaaagaagaaaataaaaatccataaatgatctatcatgcagaggctctgctattgataatctcattatatatcctgccagtccctcttagtccatgctttaaggatggtctaagaagaagtcccaactgctaagctgtatatcagaaagtgttgagtgaactaagaaatgcagagtggcagaaaataggggctgatttttccaaaagtcaatacaggcagtttagttaggctggacattcgtatctccagttgctagtaatgtctttttttcaaagtttttatttatttattactttttaaaaaaatagatacaaggtttcaccatgctgcccaggctggtctcgaactcctggactcaagcaatctacccacctcagcctcccaaagtgctgggattacagatgtgagccaccacacttggcttgcttttttatttctatgacttacgtgcaactttgggcaatgatccaaatctagaattagctgccaaataacctaaggagtaataaagaaaaacattattatttcatttcataaattaaattataagttataaattataagttattcttaaagtataaagaaacctccaaaatttaagacataaaatttcttaaatgtatacatattctgactttaaaaagatgatcttggctgggcgcagtcacttacgcctgtaatccagcactttggaggccgaggcgggcagatcacctgaggtcaggagttcgaaaccagcttggccaacatggtgaaaccccgtctccactaaaaaaatacaaaacttagccaggcatgatggtgggtgcctgtaatcccagatactcaggaggctgaggcaggaggatcgcttgaacccaggaggcggaggttgcagtgagctgagatggcaccgatgcactccagcctgggtgacagagcgagactccatctcaaaaaaaaagatcttaaaggagt

SEQ ID NO: 200247 - DNA, 1000 bp, Homo Sapiens
tggaactcctgacctttagtgatctgcccgcctcagcctcccagagtactgggatcacaggcatgagccaccgcacccggcttcactgcctaacttagattgttcacatgcagctccttccctgcctacaaaacccttcaggaggacaagggcttctaattcatagtgggcactccataatcaggtattttggagatatctattggttgaaataacgaatgagtgaatgtatgctaaagcctagtcactttcgttcagatcgcatatacactccagggcaggtggcaactctattgagggggtgagacccttctgcaaaagagatttattaattattcctttccttggaagggaggcatgagtaagaatgaagttatttaagctcagtggctcatgcctgtcatcccagagctttgggaggcgaaggaaggaggattgcttgaacccaggagctcgagaccaacctgagcactatagcgagacaccatctctacaaaaagtttaaaaattggctgggtgtggttgtgtgcacttataatcccagctacttgggaggctgagagcaggaggatcgcttgatcctggtaggtggaggttgcagtaaactgagattgtaccactgtactccagcctgggtgacagagcgagaccctgtctcaaaacaaaacaaacagaaagataataacccctccctgctgggctttttatttttccatacctctctaaccttctaacatactctaccctttcattatgtattctgcttattgttaccgattttcaacccctgtagaatgcaagccccatgaggacgggggactttgttttgttcactgataggtccggaatagtgcctgggctatagtacatgcagaatgagtgaatgagtgaatgtatgcaggaatgagagtgggatgcagtgtacatttcctcccagccaggctcctttctgcctgccatgcataccacatggattctcttttggtcctctcaggaattc

SEQ ID NO: 200248 - DNA, 1000 bp, Homo Sapiens
accttgcttctgtgcctggcactggtatgtgctccataaatgccaaccacaccagtaatgatggcgtgtacctgctagcccagcctgcctctctgaggaaggggatagggctgggccctctggtcctgggtggctgggttaagttctaagacaaggacctaatttgaagttggaattctaggcactcctggacctcctccaacatgagctaatgcatttccgtattgttgaagccagtgtgagccactgatacttaagggaaaagagtttaggtaaattattttaacctactcagtctagcagcgctcgtagagccctccttgtgctgcttcctcattcacagggacctgtcaactcaaaactgcagactgcaccctgattttgagggacacaggctttattgaacaggttaaggtcaaacatttcaggaaataaacatacattttgtatgaagttggatttttttttttttttttttttgagagggagtctcactctgtcacccaggctggagtgcagtggcgcgatctcagctcactgcaagctccgcctcctgggctgatgccattctcctgcctcagcctcccaagtagctgggaccacaggcgcctgccaccacgcccagctaaatttttgtatttttagtagagatggggtttcacctgttacccaggatggtctcaacctcctgacctcgtgatgtgcccgccttggcctcccaaagtgctgggatgacaggcatgagccaccacactcggcctgaagttggatattcttgagagcaattctgaacctttaccaacattctacatgtttgtcagtataaacgattccatataaaataagtaagttaaggctgtaggtttattcacatatatacacatttatatgtaagtggtctatcccatgtgaattttttgatgctgggtaagccttgagctacgattaaaagctttgccacagtcattgcatttataaggcttctccccggtgtgaattc

SEQ ID NO: 200249 - DNA, 1000 bp, Homo Sapiens
catgaccatttgttttactctaacattatatggctatcttaaggaaattataaaatagactttttttttttttttttttgagacagagtctcgctctgtcgcccaggctggagtgcagtaaagtgatctcggctcactccaagctctgcctcccgggttcatgccattctcctgcctcagcctcccgagtagctgggactacaggcgcccgccaccacgccctgctaattttttgtatttttagtagagacggggtttcaccgtattagccaggatggtcttgatctcctgacctcatgatccgcccacctcggcctcccaaagtgctgggattacaggcgtgagccaccgcacctggccaataaattagattttcatgggaaaaattgtgtttcagggttatcaaataaaataaggaacaaatagattttctacgtaatcttttttaaagtcacatttgacatattttcagagtcagtgtagtaatgagacatttaatgccatttatcaccaaactgtgaactatactgctcttaaaactctcgactctcagtacttggatcttggaaaatgtgatgtctacaggacacatgcctgcccctaaatttctcaaagattttgttatgcctggtattttcatttttaaagttatttctttaggttgagttaagaaagtccaaagattctttactaaatgaaaaaatactgacagaaacattatgatattaaataatattatgacatgtgtgaacagccgtgtcctgccaggaggagggagcctggaaaacccttgtgtttagtccccacacagggaaagtgccagggaagatggaaggctgtgagctataccgacgccctggtttacaagaaggcccgagattattgaagcacatctgcgtaaggagacatcacccacaggagctgagaggtgtctggagggccccagagccgaggggcttatggtgaacccctctgcattccacggctcccttctgaattc

SEQ ID NO: 200250 - DNA, 1000 bp, Homo Sapiens
gaagcattttgtatgaatcacctccttaactgtgaggagttgaattgtcttaggtctgcttatcaaatgaccgggaataaagacatcacagtatctaaccctactttttggtggaaagaaaagctaaaagtagcaacatttaatggaacaaaatatcaataattgaagaaactcccctgtgaaactctaatattattttaaaatcagcattcttctaaggtagctgaaatgtgtgatttttctattttgccttttcactgacaatatacccataaatcttggtggtgattttctctccaaagttaatttctggaccattggtgacagcactgtctattgttctaaattgttgtcttaactacattctttaaaaatgtaatgttgaaggcacataatattgaagatgactccaggatgaaccctgagtttgcagaccaaataaaacagctcgataaagaggcgtcttactaccgcgacgagtgtggcaaggcccaagcggaagtggaccggttgctggagatcctcaaggaggtggagaatgagaagaatgacaaggacaagaagatcgcagaactggagaggtaaattttacagttatataaattgttggcagtgagagaacatggactgcgtggttgcccatctccggttgtggtggatttggactgtacattcatattacaagttagaaacaagtcataaatgaggaatatggcctgtgaaagatgacgtttctgtggaatactaagaatgcaattggcttatcttctgagggattatatacttcttcagtgttgaagaaaatagtggtcaactttcttgagtgatgtccatgatctagcgtttttccagcgaagtgtgtaagaaattggggctttgactacccaaaacctcagttcttttccatcacaggtaaatatttgtggtttagttttgtcttgatcaaacaacaacaacaccaccaccaacaccaaaaaccgaagaatatagttgggaattc

SEQ ID NO: 200251 - DNA, 1000 bp, Homo Sapiens
ccctaccctaatttgtggggagaggaacctgacctgggccaatggaatgaggaggcactgccctggctggggattgccagtgtgtgcgagagacctggtcttgtcctcaggcccctcatgtgtcccattggtgcccccttctcctgccctggccctgatacttgccccgattcttgctccagagccacccgtcccacaaggaagtggtggatggcagcccggcagcagcatcaaccatctctgagataacagcagtgagtcctggggcccctagccttccccacagtggcctgggctccgacagcatggtcctgatgggcaggggaagtgccaggcccttgtaagtgggaggggctgcagttggaggtaagaggcctgtgggttcagtgcagcctccctgtgggctactgattccccatcttccccagcctgaggctcctctctggacaggaagtcaacaacttgcggctatccagatggccgggcaatggcagggcaggtgccgtggccctgcaggccctcaagggctcccaggacagctcagagaatgatctggtgcgaagccccaagtcggctggcagcagaaccagcagctccgtcagcagcaccagcgccacgatcaacgggggcctgcgccgggaacaactgatgcaccaggctgttgaggacctgccagagggcgtggaccctgcccgcagggaggtgggcaccccctcactgccccagcactagtgcatctgacactgagctggaggagcccaaggcaggatccactggtggcgggcagtgggcaactgccccgggagatgtgtcttctagctggggtggtgggcaaacagatgcgggagtcccaagccctggatgactgacactactgagtggggcaggattctgggctcagatgacaccctaccctgtacctccccctctctcccctgcccagttctatctctcagactctgacttccaagatatctttgggaaatccaaggaggaattc

SEQ ID NO: 200252 - DNA, 1000 bp, Homo Sapiens
gttctgataacccatgacactcaaaccagctctctgctaggttcttgaaaagtttggcccaccaccaggtttttacaccctgcggtaatgcaacatacttaccttaggctaggtgagagataagtcttgttcctgaaaagggcaacagtgaaggaaaacctgtaggtagaatacccatactttctccagcaaatcgattttaggaaagaatgcatctaaaagctaaagatacagaaactgcctgcatcgtaaccctggaaatttctgctggactcccagaaagctccagtctgaagatcagtagaggagcttttacccctgctgaagtattaggaacaaaacagtaactggtgacctttactccctggatcaccacaagggaggagtaatatctgattggtgagtttgaaagaagaaactgagcatgtgtgactcagctcatttgagccttgcttatgtgttttctccacgtggaccccagtgaaggagggagaagtgtgcttgttctgtctagctttgattttgtggaacaggtaagtaagtataagagggagaggaggagtgaaagcaaaggtgaaacgtgcaccagaaaaacgtattatcaaagcagctatggctacaagtgtgtattaagtctctctacttcaggattaggaataacaaaatcaatattttatctgtatcatatctgtatagacagaaaaatcctgggaaaggaatgctttgggggagaatcaaaacagcaaatgaagttttagaattttggctcatccatgatgggttgttcattttgctggaattttgtacttacctggtagcaggagctaattatgactgctatttaagcgggaggtgggggggatttgggggtggagaattttttttaaaagaataagagttttaattcagaaagcaggatttcatttaagcccatatgtcctagatgttgatgggggtggtaggtttgggtaggtcatagggtgtggctgggtcttagata

SEQ ID NO: 200253 - DNA, 1000 bp, Homo Sapiens
taaaaaccttacaattaataaaatcaatgaaaccaaggctatttctttaaaaggacacaggactccttggagaaatagttggtttcaggtctgtaagtagagaaccgcttaaaacagcttgtgccagaaagcaaggaggaacttaaagaattggaagacatactaacaggacactagagccagcttgaaaggggatctgtctggccaaattagggacagattgagcatcaaaataaatgatagttaaggattataacctgttcaattacataagaattcattattccatatggatataaacaaataaatagcactgaagaacagttccaactaacagatgtagaatgaatggacttgtaatatcaccactgggaaaccataatgataataattaatacaggaaaggttcatcaatggacgttaaactagtgggttaaagcttgggaattaagaatatttacagacccaaactcccttcccacaagtattttctaaagaagaatatactaaaattttagtggatgacccttttaaccaagttaactttaccagtaatgagtcacttcagcatcatgtgctttctactacaaaccactgaagagaacacatcaattctgtggtatccatgtccaaaatgtaaatcctgaatctaataatgaagaagcatcacacaaacccaaaatgagggataatttacaaaaacaactatcttgcattcttcaggaatgtcaatttcatgaaatacaaagaaagattgaaaaactatccagatcaaaagaaactaaagaggcacaactcaacgcaatgctataacgcgcatgattggaaaattagcaaaatcagaattaactctgtagattagatcaggagttggcaaactatagcttgtgggaccaaaccaggtcaatgcttatttttgcaaatgtgtttttggaacacagccacacccattgatttatgcatcatctgtagctacttgcacactacaacagtggaattc

SEQ ID NO: 200254 - DNA, 1000 bp, Homo Sapiens
tgataatgactggggaagatatgtgagtataggggtagtgaggagactatgtgggtaagagttgcaaaattggataaagcttccctaaagaaaatgaatttaaagctgcagtggatacattagaagagatagtgctgagagaatcattatgttcttacaggaggaggggtgtgtgtgtgtgtgtgtgtgtgtgtgtgtgtgtgattgtagacacacctgagctagagttggagctgtgtggctgcctcaattagtcagtatttgtttgccatcccttgaagtcatggcataacacactggctcatgtccaagagagataaaatgaagataaaattaaagtataagctaagaatgctcagagaatggaacaaaatgaactacaagtaaagttgttgggaaaacatgatcatagattttcaaggacactgatctgatgtcaggggagtgatgtgctaagggaatggacagccttaaacagtaattataaaactggaaacctactattaagtaaaggatttaagtgaggccttaactatagagtcttttgtataataccccatcatgattgtgccaacctctaccatttttattcaaaatcaaattccatttcattaacgttagattcatttcttttaacatctactgtgccctttggcacaatctaggttttctaaatttttatttcttcattttctcatatattttatgtacacacatacgcacattatatatatatatgtaactcatatattttatgtacacacatgcacacattatatatatatatgtacatcctcagataattttaaaataattttcacattacattgagaaactatagtacacccgaaaaaattcttaagattttatttatatagcttagatgtcctaggggtgaaggtatacaaaattttgcttttactatatcttccagttagccaaattactgcctagcccaaagcaagtatttatagtgatgaaatggctctctccattcaaa

SEQ ID NO: 200255 - DNA, 1000 bp, Homo Sapiens
tcccttagagtgttttggctgagcctgagaattaagttgatttaagatggaacagtaggagaaaagcatacaaatttatttcatacaagttttatgtggcacaggagtcttcataaggaaatgaaggcctgaagccacagttagagttgaacgcttatgaactgaattgagcaaagaataaaaagttgtaaaaaagcagctgaactatgtggggaggctaaaagaagataagtgattttcactagctttgttcagaattctctcagtctcagcttctcatccttgatgataacactgttactttccttctagtatggggagggcatctttcgtaggggaacttcatctgcttttaagaaacagcatggagcctggagtgatattcttgcacttgctgtttttcaagtgcctttcactcaaaggagtcgacatgccagagtggaatactttggggtggcatgttcttacttcctttagctgtgtggtcactttaagtcccatggccagggctcaggaacttcctaggtcctgtttttcagaaagtatgtaattctccactgcagatggcatggccttcctgcagaatcctagtcagctacattgatccttctattgagacttgttacaaactgcaaacaacatcttttcccaccacagatacctctaataccagagggtctgctggtccataaacccaagtggctgggccccttgtactgcagcctggacctgctgcacggctctttcctgctcagggacccgctcaagctggctctgggcctgcccatcagtacctggttccaagcagtattcacaagtgtgtcatatgcagccttcgagtctgaagaagctgaccaggcattatacttccttcttagggagaggtacaagaagccataatgtgctcgttacttaggaggggtgttctggaatgccttggacccccgggctcctaaacacttgcccgatctggtgggtgcctgagtccccataggaattc

SEQ ID NO: 200256 - DNA, 1000 bp, Homo Sapiens
tatgtcaggggctacctgggacagtcctgtttcagacacagtgacacccccaggggtcccctccacaacaccagttaagcacgtctgtgcctagttccagaatatcacaggggtgggcggggggaggctatggagtcacggagggcacagaagcttattttaaaggcatagtggagcggagccggaccatggtatcacgcgcctgtagtcccagctacttgggaggctgacgtcggaggatcacttgagcccaggagttcaaggctacagtaagctatgagcgtgccactgcagtccagcttgggtcacagagcgagaccccaacttttgaaaaacaaagggagtagtgggcagtacctcaaatccagcattctgagaatggagtgactcggggccaacccttctgcctctgggcgggcctgcacaggattctccactcccagctgagagggtttcagtcctccagaggggcaggctccagtcttccttttatgaacccttttgggtttcttgggaggagaggagagattggctcccagagccctcatggtggagcatgaaggcagaatggaggtaggattgtgggaagccccaggcaggttccttcagagagccttctgcttctccttcctctgtccagatggtgagtcccggcgcacagccagccctgccatactcgctcgaagcaccagtcagacagagctgggtcagagcgtccgctggagtccgccctggggtcctttctggcctattctgacttggtggaaggagagaggtccacgtgggagtgcacacacacatgcacacacacacgcctacacatgcaccgcccccgctgggctggatttagaggacagcctagaaggccacagacagctgcaaggtgagggacaaccctgaacccgtagctgccactgtccagctgaggggccccgagttagttctttccggcagtgcaggcagccagggaaaacgaggtggcggccacaaggggaagctt

SEQ ID NO: 200257 - DNA, 1000 bp, Homo Sapiens
ttcatttgcttgtttattcattcactcatttatttgctcatttttaagtacctactatatgccaggcactgtgttcaaggctatggagaatgttgagatgaataaaacccagacacatgtgtcctcaagggccttatatctgagtgagtaaaacagacaagcaagcaagtataatgccagaacagaaggaaatgctgggttacaaagtaacagtgtactaaagagagtcagatgaaggatccatttgagaaagctgactgagacattatgacagggtacatgcaggaagctcactgcactgcactgcatgtgtggggatatcagagaggacctctgacttcaaccagtgggctctgtgatgtgacgattctataaaaccacaggaggcattcatatgtcctggggagttggcagcgactaggctacagcctcccttcagagtccagtggaggaagcaaatgtgtgaagcagacaatggcagagactccaagcagggagacgaccatgcgatggggaggggggaaagccctggggtatcagaaaatgagggcaaaaatggggacactagtccatgacctacttagttccagacctttgtgaagacaaaagctcctcaatgagagaacaccatccgataggagagaccaatacatacgtgactgcccttgacaccattcacctagctcccaaggtcatgcagccttcagtggggatgcacaggggatgtgggaaggtcatacttggggaccattttgtcactgccctttctctcactctgatctgtaaatcaaagaagaaccagcctgacctacttcaaagatttaaaatgcctggaaagtacagaatgggggttacctgctctgtcattcactcccctgaatggccattgtcccagcccagtccatgactgcctcttagctggaccacagagagtttcctaaccaggctccctgcctcaggctgtccccacacaatccactctacacagcagccagaattc

SEQ ID NO: 200258 - DNA, 1000 bp, Homo Sapiens
acttgtggtagtgattatgaggggtgacctagtttcatgaaaaagcaccccattattttgtttctgcttacaaaaagtatcagaaaagtcagggaccattaagtaaaatgtaaaaaataagacataagctgcacgcagtaaaaatataatgtgctattcactgtttaatatttgttaaaatgattccatcagttcaaggactgcctgtgtatttcctgttttactttctgctttctttttgttccagagaaatcaggcacgagttactggaaatgctatttttaaagtttattaaagagatttgatgaaaaagaaaatagtttctttaatttcttatactcaggtttgctctttggaataattcctgattagggacaaatattcactggaagctctccttgtgtgcagcatgtcaggatggaaagaatgaggacttgggggctggagtaaaactttgctttccatttgcagccgacggccagttgagtgagcatacttcacctatcttatttctttaccttcatgtccttgtctattaaattagggcatttgaccaactgatttccaagttatctttagcataatctataatattaagaaaaaaactatgtgttttcagaaactctaaaatataaaagcttattgtatcaaaatgaataagttgattctccatcaatatgttgtgaatttaacaaaatatttcttattcaaattatgtaataatacattttcaactaagattcactatctggaacttctggggccttccagaatagcactagcatgtaattaataataaataggatgttaagatataataatgatacatttgtcctctttgattgaacaccagtaactcaagacctctttgatatgacaaaagaacaaaagaacctggggagaacacgtaaacctaagtttgaaaatgagcacggatgttccttaccttcaacacaaacccagacaacagcggcagtgtgcgcggcctcccggcccttaa

SEQ ID NO: 200259 - DNA, 1000 bp, Homo Sapiens
ataaatgccataaatcagggctttcttgggagacaactggtgttggttgctaaacagttaccaacacaccaacaccgcctacctagtaaataaggtattctaaaggtgccaaaagtaccataaatagcagtcctagaatgaaagtggctaacctctagttgtaaaggtaacacataaaataaggtaaaaatagtttaggtaattagcagaaaagatgttaggttggcaatgtaacttattagctaagcacccaggcttggttcaatttgcatcggtccccttgctagttgaatacctgtcagcaactcactcacttctctgaacctcagtttaatttactgtaaaatggaaataaaagttagtttcctcatgtggtggttttgaggattaactgagatgatgaatgtatatagtggttgcttggcacacactgagggctcaatacattttggccattattattaaagacacgtagttgaaaaattgtcagcctcatcttagttgcagttgcttatctacctaattccacctatgcatgccttctttattgtcgtcaggtgtaccaagtttgttctggcctctgagcctttgaatctgttgttccttctgactgaaaatctctcctgtggaattttgcctgattggctcttctcgttattctggcatcaattcagatgttaactattcaaagaggacttccttattcactcttccttggccacacattctaactctcacccacctggtcatcatgtcccagattttcctgttccatacttctatagaagttatcatcataagaagtttctgctttgtttggttgtttttaactatctctcttactgaatcaaagacccatgaaagcagcaatctcatttgtcttttcctttgtgtaatcccaagcaccaggaataatgcctggcatgtagtaggcatgcaataaatatcagtgaatgaatgaacaaataaatggtgactttggagccaaaatagtgaattc

SEQ ID NO: 200260 - DNA, 1000 bp, Homo Sapiens
actgagaagagggactataaagggaagcagccaggcatccgagcctcatttccatacccctatgcgtctgccttcaacatgttggacctgctttacctaagctgccgtgatggcagagagacgggctgggaactgtcctgactggggggctgcagcagctggcctcttccccaccaacatgctccaaggagctggcctccttttggctgtgcctcctacaccaagttcagtgtatgtttgggggatacaggagggtgcagtctcgaaggtcccagtaccatggatagctcctggcccagggatttagagcacatcgccatggaggccttagggctctgctgggcacccatccgcccccttcagaactcccgtccacctcccctttcctgccctttgtgcctgtgtcccttttactttgtcatctccttgctcctcttccatcacaggttctgtctttgtctgtgtctctgccccattctcttttttctaaattctctccatctccccacctcccctttcttgatggggacctgggtcacagaaccttgaagaagcagccaggctaaggtctcaggaaattcttgaagaagggacctgaccaacacatctcccctccccctccccttgttttaaaacttccatcaccatagcaaccctttactctagtgccttcctctgcatttcccctcctccacccacagggaagcagagcctccagtggattctccttcaggggttcagagatttggaccccaagtgcttgggaggagacagctggcctttggctttgcctgcatgttgacagctaaactttcgggatgtagcactggactgcatgcccacccccaaaactggagagacctccccacaatactccctcattagatgggcaaaattcagctgtaggaacttctaccatgatttagctcgagccggaggctcagtcagggcagccccttgaccggtcccctgaagcaattggatggtggtctagaagctt

SEQ ID NO: 200261 - DNA, 1000 bp, Homo Sapiens
ctggttgtctgtagcaagcctttactgtattatctccaagagacctttgtgttggggcatagcactctgatggaagatgtaatgctttcagggtaacttattttctccctcatccatgctctcagattgcattacaattatgtaaaatatggagttcacctttactgtctatgtggagggtcccctgtgacttcatcataagatccttgcagacttcgggactggaaaggggaaaccatgttcaggctgactttcttttagaggacctctgaatcttgtagttgattatgtccctctttgtcttggtgtttaagaagcttggacttcagtttgcatccagcctatctttgggtggcatttgtgtaggatttggtggcatgcaggtgtttgagccttgcctctgacttcatctttttttcacacatcctcattaaaagcaaaatgaacctaatggctttttacttagggtctcagaaagtacaaaatacctttgtatggtatttcataaggcacagtatgaatatttttaaaaggaggaaatgggaccagcctaggcaacacagggagaccccatctctacaaaacatttttaaaaaggtagctgtagtggcacatgcctatagtcctagctactcaggaggctgaggtgggaggatcgcttgagcctgggaggttgaggcttcagtgagctatgatcatgccactgcactccagcctgggtgacagagcaagactgtcttgaaaaaaaaaagagagaaaatgggaaattctatcctactttgtaatggaaatgtcatattttctcattttcattggggaaaaaatggtgctcttttgcacagttaacatatctgtaagattccatcagcatctatcccatgtttaaaattcgatttcctctctgttcatagctggttgtgtaaagccacctttctcaaatggacagactccattgtagtaagcaaaaaagcatttgcaatctgagatctagacctggatc

SEQ ID NO: 200262 - DNA, 1000 bp, Homo Sapiens
ccatgagttcttaataatactcccttcccctcaaaaacctagttgataaaattgataaattaacctaaaaattgataaataaaagaattaagcaaaagtaagtaattaaaactggttttcagagtcaccaaagagttgctaaggaaaacttcctcatagaggctaaaaaaatgcaaaggaatgatagaaatataaaaatcactactttgtaattcctaatgaaataacgtattaaagtaaacatcaatggttgctaatatcattaagtgaaaggttgtagagaattttataaaagacaaattcagctgaaaatccttggagtcatttatcagtcttaatattattaaaagacaaaaaaagaaattgcgtcttgatatgctataaaagaaaatacacaggcactgggtacagcaccattgtaaaatatgaagtagtcctgccaaaaagacagaatctgaatacaatcaagcttccagataaaactaacagtttagaagagctactagggagacaggaacatgtaaaatggcaccatgggattgcaatcagataaatccagactgtgggaagaacctatatgacaaatgacctggtttcttcaacaaataattgacattaaaatttttttatttttaatttttgtggatacctagtaggtatatatatttatgaggtatatgagctattttcatacaagcatataatgagtaataattacatcacatcaggggaaatgggatatccatcacctcaagcatttatcctttctttgtattacaaacaatccagttatacacttttatttttaaatgtacaataaattattgttgagtataacagagtgaccagccagcgtcaccttgttgtgatatactagatcttattcattctatttaactatatttttgtgctcattaactatccccccttctccccaagccccgcactacccttcccagcctctggtaaccatccttctactctctatctcagtgaattc

SEQ ID NO: 200263 - DNA, 1000 bp, Homo Sapiens
atacaaatgaaaactagtcatcaataaaaaggaattaagtattggtacatgcaagaacttggatccagttcagggaaattatgctaaagaaaaaaatccagttgcacaaatataaaaaccatatgattttgtttatataacattcataaaaccatgtaattagagagacagagaaccatttaatggttggaaggagagttagagatgagggaaaagaaaaatatctatctacaaaggggtaatgttagacaaccatgtagtgatgatacagctatgcattgtcattgtgatagtagtacataaatctaaactgtgataaaattgcatagaacaaacacacacacaaacacacagacacacaaatgagtgtaaatatactagagaaatctgattaaggtctctgtattttaccaatgtccatttcccagttttgacattgtaggacagatttgcaacattttaacattggtgaaggatgagtgtaggttgatttattcttcttttaatttacttatgtatatatttatttcaactacttttttcatcctaaattaactgaaactactttcttcagtatcatctactaataaagtaccccaaattctaagttgtgggaagaaggaaactcattctaacaacctcttggcatatattttttcttgatcttcagtgtctttaactcctttgctctaagttgccatattaagatattcatacatctagttatatgccacttcagcatatttgacatatgaatccattcctcaagcatttattcaggtatacaattctaatagtaaaataaaggtttagtaaaaacaaatatatttattcaggacttttcatcaaatcaatttaaaaatgttcagtgccacagactactcatatgctgtaggcatgaaaaatttaatgatttttctctttcaatattacagttacctttaaagattgaatttgattgtgaattgggatatcacaataggtgacatccttggaattc

SEQ ID NO: 200264 - DNA, 1000 bp, Homo Sapiens
gcagaggaggcagactgctcagaagccctcttcacatgagagcagccacagccgggaaggcctcttgtgtgactggcgataatcatgaggatgtctgaggagagctttctttcatgtgccatatgtcatctcatcctccctgtgcccctccctctctctcacctcccacatagatctgtagatctgaccttggaagtctcttgaattgtccatcttgttccatggcctcaattcagtgccagccttctgaccaatttcctgctgtcattatctcccagtctcacctaccctccatcttcataaaggatgccctggtcctgagtctcagcccctttagatgccaggccctgcagggccatcccagagcctttgacgttgcagacctcagttgcttccaccagctgtgtcccctgccctcagtctgggggtcctcctgttccggcggaagcattccagaccttcccaggcctgctgacgtctgcctgcaggcacagctctgggctttccttttgaagcctggtctacctgccctctgctctgtatttattgagttcccatggggcaccaggcactgagcacagaacagagccccttgccctcgtggagcttatatggtaatgggaaagaaaaacacaatataaattattcagcatgttatgtaatgagcgctctggaaaacagcaaaacaaaaacagtcttgcttgagtgtctttggggaggtaagagagggtggcttgcagtatgaatggatcaaggattgaaggagtgtgagggtgagccttgtggaggttggaaagagccttccaggcagaagggcagctgtgcaaaggccctgaggtgggagtgtgctcagggtgtttgagaaaaggcagccagtgaggtggcgatgagtgacggagcatggccagtatgtgggggtggagcgtggcagaggtgggcctggaggaggtgtggggcagggcctctcaactctgtctggttgggagcattccttgaattc

SEQ ID NO: 200265 - DNA, 1000 bp, Homo Sapiens
tgaggcaccgcaaagaataacactgctttaatgaaacaccagtgaaatgtcacaaataaattacctaattgtgcaagaaacaagtaaattaatgctacaagaaggctttaggaggacccttaattaccagtccacaatctatacttcattttattaaatttatgtattaattttattaatacataaaattatttattattttattttattttattttttttagagatggagtctcactctgtcaccaagagtgatcttggctcactggcatgatctcggctcactgcaacttctgtctcaagtgattttcctgcctcagcctcctaagtagctgggattataggcatgtgctaccatacctggctaatttttgtatttttaatagagatggggtttcgccatgttggccatgctggtctcgaatccctaacctcaggtgatgcacccacctcagcctcccaaagtgctgggattacaggcatgagccaccgtgcccagcccacgatctgtactttaaaacttgatatggtgtgagtataatgattacacaaaagtaatgcaattgttaagaaacaaatggaggaggtgttggcccacttaaagttatgcttttttcctgggcaaaagcctacaatctgggaatagttaattcaggcctaaaatacatcagctgagctcactggtcatataaactttgtttgtgtgtttgtttgtttatttgagacagaatctctcggtgtcacccaggctggagtgcagtggcatgatctcggctcactgcagccttcacttcccaggttcaagtgattttcctgcctcagccttctgagtagctgggattacaggcacccatcaccacacctgcctaatttttgtatttttagtaaagacagggtttcaccatgttgaccctgctggtctcgaactcctggcctcaaatgatctgcccacctcggcctcctttgtgagccagtgcacccggccaggtcataaaaagctt

SEQ ID NO: 200266 - DNA, 1000 bp, Homo Sapiens
gggtgggtggatagacagggtgggtgggtggatgaataggataggtgggtgggtggatgggtaggtgggtggataggatgggtgtgggagtggtggatggtggatagacaggtgggtggataggatagtggatgatgggtgggtggataggatgggggatggtgggtgggtggataggatgggtatgggggtgtgtggataggatgggtgtgggggtggtgcatggatggatacatggatgattcagagatcaaattaaattgtcctcagcaacaacattaaaaaacaaaaaatagaagaacaagaaactgttcccttctctgaggaggcagccgtagcagaactaactgattaaaaaccacctcctgaattttatgagcatcagaaaagtccaactccaaattgggccattctgagacaattaagtcaaaatatgtgaattcatttacacaaatatgggaagaaaaggagctcctggtgaaatgagaggagaggtttgcagggccctgaggaagaggcaggggatgccacccaagggtcagggacctggagacgctgcaggccctgtggagggaggggcagctggagtcaaccagagaggacaccaagggggcagtgggcacaaggagtgagagaagagggaggtgaggcaagagtccccccactcttaggggttgggggaaaaaaggtaaatatgtgagtatatataaaagacaatattttcctcgtaatttttttaaaggtacattcatactgaagcaaacaacaatactatatatattgtgatgtctatagcatagatgtaatatgtacacttgccacagcaaggaccgggaaggcacctggttgcaagacagtgaccagcttcttacactgcacaaggcggggtacagtattaactctaagcagactgtggaaagttcagtatctacagtgtcatctccagaccagccactaaaatcatgcaacaaaggaagccaacagataaaaaatggaattc

SEQ ID NO: 200267 - DNA, 1000 bp, Homo Sapiens
aaggaaaaaaaaacaaggtgatacgtgctttgggaggaaacaaatcacagagggagatagaagatccagttaggttggggaacttggtgcaattttaaataggctattgaagaaaaacttcactgtgaagttaacatttgcgaggagatgtaaatgatgagagggagtgagttttaagaatacctgcaagagactgttacaggtgaatgaggatagagtacaaaattcctacagttgaaaagtgcctggactattaaagaaatgtcaaggaggccagtataacttcagtagagtaaagcaaagaggaaaatcagcaggagaaaaaaaaaagtcagaagggtactgagggctgacagctgtctaaatatctgaaaagttaatcatgtgaaagagatttatgatctaaaggactaaaactaggaccaatgggcagcaattctacagatataaacctagtataaagaaaactttccaattacagtatttaaggatggaatgtgttacctaagaagggagtgatttcatttgtcactggacatgtttaagcacagaaaagacgatcactcagaaattaggaaggtaattttaaacacatgttgaatagatcgttagatcagtggtccctaaacctggctatttctcaaaaccacctaagcagatttaaaagggagggagggagaaagagaggaaaaagatttgtaagtctacccatgatcaactgaattagaatctgcagggacggggcccgggaatctgctcagaagcttctcttcacagattgatccttaaagctttagaacggggtgtccaatcttttggcttccctggaagaactgtcttgggcccacatacactaacactaatgatagctgatgagcttaaaaaataaaagtcaaacaaatttcataatgttttaagaaagtttacaaatttgtgttgggctgcattcaaagctgtcctgggccacatgcagcccgcaggtcgtgggttagacaagctt

SEQ ID NO: 200268 - DNA, 1000 bp, Homo Sapiens
tttcatattactgctgcctaacagaatagacaacagtatttacagtgacatgtaaacatgcccaacctgtcttgtatttgaaacattgattcttgcacaatagtaaattcttgttgaattaatgttggatcagtgattaaccacagctgacccacgaacagtgtagtagttatgggtgctggcttctcatgcagccaaaaatccaattataacttttttttttttttttttttttaagagacagggtctcaccgtgttgcccaggcttgtcttgaactcctggtctcaagggatcctcctgcctcagcctccaaaagtgctgggattataggcgtgagccaccctgcccagcccaagtacaacttttgattcccccaaaacttaactgctaatagcctactgttgactggtaaccttattgataacataaataattgattaatcccatacttaaactagtatctacatatattctatgcattcatgacatacctaaccttttcttgatttttttttttttatgtttctaggctacatggttcatctgctagttttttcatattgtcacaattcccaaaaaaattttccaatatgtttattgaaaaaagccctacatataagtggacccacacagttcaaacttttgttgttcgagggtcaactgaaatgaaaattaaattaatgaatttttggaattccagctattcacatttggaaatgcacatgggaacttttgctacactaccatatatggcaaccagacttttcttagaaggaaccctcagtagatgctaatttcctcattttagtttatcggaacaaaatcttagtaacccataataggttaaaaattaaaatctagggaattgtgaatcacttgtctttaggaattaggagttgtaggatgctgtgtcaggattaggaggacttaataacataaatgagtgttattggactctatttttagttttttgttttgttttgttttttaagagaattc

SEQ ID NO: 200269 - DNA, 1000 bp, Homo Sapiens
agggaattttcctgctcttttggtggtccattgtacacatatctttagaattttaaaatctcatttttctacactgcctgtaattctaaaggttggacagtaatttacattaataagtatcttctttgaaagaccagaaaacctatagggagggtaaaagtattattagtcaaaaacattcatacatttgagttccatctgattacacttttcctgacaccagctaattcacttgcactgaatttattggaggtttttactgctaaagtggagaagatggaaggaggaataaaaaatttggagcatggtatacgtcatggatcagggatcaagcctggaagtgattctcagacaggcttagaacctggagagagaggaagtaagagataagaaagaggtataaaaggagagagggatattaaaataatatgctttcttggttccaggatttatttttctagagccatcgttaaacataagaaatagaaggaaagttaatttttctgacttattttctctcataactatgtggacactgcttccgtcatagagtttataataaataataagaatagcagaaaaaattacatatatatatgtatatatatatatgcagacatacaggcaagaatgagtcatttatttaaaaacacagctggacataatgagggagaaattattgttaactgatctattgtaatcaaaggcgatagaggtaaggcaagttcaaaataaccaataagccgaatatttctagaccttaagcttcttggatatggaaactaagtcttagttattactgggttaccagcatctggcccagggcctagcacagggcctctgtagaatgaatgagtggatgaattttggcttcacaatcaaggcagtgacatgtttattctccctttctcatttttctcctctcttccccctttcacctttctcttggcttgcatctggtcccttcttgacttacttctattttctgaggtaagaattc

SEQ ID NO: 200270 - DNA, 1000 bp, Homo Sapiens
tgtgggttgcggtcctgatgggaacagctggtcaggaggataggagaatgaccctgtggactccagagccagcctctgcgagccccggggtgaccgcgcctgaccaggccacgtgaagtcgtttctgtcctaaagttgcataggacgccgttttctctagcgtggaattggaagctttgcttgggaaggttttataggcaccggtgcgttttgcccctactggaggtccctgggcatcaccttggttatttcacgcactgaggctagatgaggagggtagtcgtggtggtgtcttggggacaaaatgctcactgtcttgtccccagtattgtaggatgttggcacctagttgctgtcttgcctagcttttatagcggtgggttgcctgttggaaactggtggttgctttgtctggaccgggctagtccttacagcagtcttagaacacttcctgttgcccagtttatctggccagtaccaacccatatctcagtttgggtatggcttcccccctccgaccaaccctcttactgcttctttgctgtgtgtttgaccccttgagattgtgggctccgcaatcctaatgagatccccagtcctaatgagagcctggcatgaacttggtgctcagggtcattgggcgaaaacaccttttgggaaacatcaagggtgtcagctggtactaagggagacagagtaactggctgggagccacccacatggggagagtcagagatgggattcaaactgaggcaggctactgggccaggctctgctcacctcggtatcctccgctgttccagcactttgcaccgagctgggcctgattcctgtttgtgcaactgagttttcaccgtctgcccccagcctaccctctcacattcagcttgggctttgcctctcctggcttctgctgttcccctgtgttcctttagcccctgcagttcctctgcattgggtccgctgtctccaccccactccccgtttagtgggtgaattc

SEQ ID NO: 200271 - DNA, 1000 bp, Homo Sapiens
ggggaattttcagtttctgcattgtggacttctgaaatcttttatgtgatcttatagttttggaacaatagaaaaaaaagataccatataaaataacgagacaagaaaaataaaaaatattgaggtagaaaaagcataaacaatttaaaaactattagtttcacataattagagtaatgggtacatatatgagcaaagtatcaagagataaggcctaaaagattctcagagataagattaataagtggtattaagccataaaatggagtttgctttttattgttagacaatgggaaatggtttaaaaagtaatatagaacaggttagtttttagcaaagatgatttcaatgccttttttttttttttttaagagacaggttcttgccttgttgcccaggttggagtgcagtggtgcaatcatagctcactgcagcctcaaactcctgggctcaagcaattctcctgcctcagcctatctctctctatatttcaaagtaagattaatagaaggtatacttcagttttgtaaagtatactttagctctaaacaccataatcaaatgtctttgaattaaaagtagtagcttaaaaaaggcagaagaacatagaaatatgatgcagtaattgagaagattattatttattatgttttgaaacatcgctgtcaccaagtatttggtaaaaatgaatgcagtgatattgaggcagtatattatgctgttgaatataaccaaatggcttgcgttggaatttcagctcgatattcattattttttcaaccttgggcaaattacttagcctctttgggccttggtttctcatctattgaatgaagataaataatgctttccttataggactgtcgtaaaggtaaatgactttctctgtatggacagatatacagtggtcccttggtgtctgtgggggattagtttcaggactccctcttcccctgcggataccaaaattcatggatactcaaatcccttatataaaaat

SEQ ID NO: 200272 - DNA, 1000 bp, Homo Sapiens
tttgtagcccaggctggagtgcagtggcatgatctggctcactgcaacctctgcctcccaagttcaagtggttctcatgcctcagcctcctgagaagctgggattacaggcacccaccaccacacctggccaattttttgtattttttttttagtagagacagggtttcaccatgttggccaggctggtctcaaactcttgacctcaagtgatccacctgccttggcctcccaatactctgtaattttttatcaaaacttcagttcattttcatttagaccctaagcaatttaaattataccaatatgatttagacagaccagtaatacctgttcaaggtgttcattagacaaaggttgacattttgggatcagttatagatgacatatagagacaaaagctagatggctacaaatgcaatttcatcctattctgcacttggataattttttctctgatgtcattcagtgaaaaagatcagttttctgtgaaattcattagtgaagcctcttaagtatcagcctatattcatcttcacatgtgactttcaatgtgcatatttattatgttttcctgttttttgtttagttaaagcagtccttaagaaaagggagtatggctcaaagtacactcagaataatttcatcactggagtcagagcgataaatgagttctgcctcaaatccaggtaatttttttaaaaaatgtagccgtgtgtcatatctaaataatctaaataactattcctttcttagagtgtgttacctgctaccatccatatatggaaaatttgctactggctccttaaaatgaagagatatttttattcagtcaaaaatgttaaaaattgttagcaaactaaactgaatcctgccccagcattagcaattctagtctttcttagtttcttaaacccacaatggtaaattcttcaaaagctttccatcacacaagaatcttaggagttaaattgttaagtcattggtatgtgacagaattc

SEQ ID NO: 200273 - DNA, 1000 bp, Homo Sapiens
atggctgggtgcgatggctcacgcctgtaatcttagcactttgggaagccaaagcaggtggatcacctgaggtcaggagttcaagaagagcttggccaacatggcaaaagcccgtctctactaaaaatacaaaaattagccaggcatggttgtgcatgcctgtaatcgcagcttctcgggaggctgaggcaggagaatcatttgaacccagggggcagaggttgcaatgatctgagatcacgccacttcactccagcctgggcgaaagcgaaattccatctcaaaaactaaaaaaaaaatctacaattactcactaatgagatgtgtactcagtgaaccctgtgaaaccacaaaatttggagtcagcttgaatgctgacactcttgtttcctgtttcacattaatttatatgcagtgtgtgctttttatccacaaccaccaaaacaatttttggttatttgcaaaaatatagcatcactgaaagggatgtgatacaatctaatgttaaaactgtgccctaccttgagtcagtagttcacatgatgcaatacagatgccagtgtccctggctgtgttcccctggaaattgattttttcagttaagaaaatttaaaagcctgtggcttccctataaatatgctgtggcatcctagggaacctgggcacaaagattggaaacctgatgtattagtccattttcatgttgccaataaagacatacctgagactgggcaatttagaaaggaaagaggtttaactggactgacagttccacgtggctggggaatcctcccaatcatggcagaaggcaaggaggagcaagtcatgttttacatggatggcagcaggcagaaagagagcttgtgcagggagacatccacttttcaaaaccatcagatcacgtgatacttattcgcgatcatgagaacagcatgggaaatacctgcccccatgattcaattacctcccactgggtccctctcacaacatgagggaattc

SEQ ID NO: 200274 - DNA, 1000 bp, Homo Sapiens
agtacactagcaattagtaaataattaaagagtaagtggtcattttaaaacttgtattttttttttaaaaaaagcattttctagcactttaaaaaatgggtctgaaaagtgccctattaatgtccaatgctgttccccacccagtcccacccattcaaaacctgctacaaatgctggattgagttcatatcaaataatttagcagtaccaagatttttcaaatggaaacagtgttactgacttcttcatattggataacaaaataagggtaactctggtcatcattaaaaatgacaaaaatctgaggctcaaagaaattatccacacaagagtcataaaggtcactggtgacactgccaggattgactggcgggggccttctcatgccatgactgcccattgtgtatctgcccgtcagcactttggccagaaacatgaagtggactcctttggaggacttcttagaaaagttatgagagtagcttgccttctttgcaaaataactgccttgtccaaacattgtagcatgctttccacagactcgagggtcaaagttgtgtttgcagattccatctaccacatcctgggatgttccatgaaataaatgtctctcatttattatcctgtcacggccaaacattttcctgttcatatattcctttttcctaatggaaagaacagacagagaattcagaaggatgaaatacaggtcaatttaacaggcatgatgtagtcataaacttctctttatggttttaatgaggagttatcaagggcaaaatgccatcaaagatcctattaaaagttgaaacttatctttccactgtagaaaaggccttttccttctttctccaccaatcattcacttgctttctctttcatcttaaatctattaagagttctcctatgtttttcctcaggatgccctccttgcctaattcctccaatctgagggtctcttagattctgagattcctgaaatctaaatgtattccctcca

SEQ ID NO: 200275 - DNA, 1000 bp, Homo Sapiens
gcagtaaatgctctatgttatgcttaaaaatgtgttttgaatactattctttttagacaagtttataatgaaatgaaactttgtcaaccatatagatgtgtgctgtcttaaccagaagaaacgactggtcagggttaaactgctatttttcatcttaaagaacttttttaatcggacttaatttggctactcaaaggccttcttggatgatatccaagttcttacttatgatttaagtttgtgaaataagtggcttatgtaagggtaagatatgactacaaaccgtccaagatttgtgttagttcgacttaacaatggtgtgaaagcaacatgcgttcagtagaaaccatacttcaatgattgcatacctatgcaatcattctgtttttcactttcagtgcagtagtcaataaagtacatgtaatattcaatactttattataaaataggctttgtgttagattattttgcccaactgtaggctaatgtaagtgttcagagcatgagtaaggtaggccaggctaatcgataatgttcagtcagttaggtgtattaaatgcattttgaactcatggtatttcaagtttgctatgggtttatcgggacttaactccttcataagttgaggcacatctgtattattaaatcctagtcaagccaagccaacaccatcagtcccagcaacactgagtgacctgccccaggcattttctgaggtgcttaccttactcttatatcccaccttgaaagaatcagactctgagaagtcttgtcacaaacctgtggtccatcaattaacaagcttttattgagcaccattctgtactcagcacttacattcacgaaaccttaaactcctctgtgtacttagtctgttttatctctgcttctgtcagaatgagtgccgttacatgagggatcccaggatcccaccagcttgcctgacatatcgggtttcagggcgccgctgtgatgacttacagcccagtcttttcagtac

SEQ ID NO: 200276 - DNA, 1000 bp, Homo Sapiens
aaatgtccatgttggggagtgtgggatgaggaataaggttgagagtccccttctctttttggccatatctttttgagcaaagacatgtctaagtggaagaactgaaaatagtgataggctgcaaaagtttgaatgattgtcccccaaggctaatgttggactttgatcccattgttggaggtagggcgggggtgcttccctcatgagtaaattgatgaactttctcaggggtaagtgagttctcgctcagctgggtcctttgagaactggttgttaaaaagaacctggcacgtccccaatctctctcttgcttcccctcctaccatgtgatctcttgcacatgacactccactttgcttttcaccatgagtgggagcagcctgaggccgtcaccagatgcccagtcttcaacttttccagacatgagtattgtgagccaaataaacccttttttcctttgtaagttattacccagtcttagatattcctttatagcaacacaaaacaaagacaggctttgaaagtcattcaatcaaataatccacaggaggagagccagacaagattgttggtcatgtattcatcctgaagtacacgtagattgtgatcagtgccaacctggcctttaattatgatggacagcttttttcatttctgcagtttcttttataatgaccatttatggaatcactgaaaaagaggcatagaaaggttaacttgtaagttcttatcaatctgaattaaactttaaaaaacaggaactaaacccaagatgttagtgtattagctgtatttatgatcagcttccttatgtgtgtaaatattcagtactattactaatatggaagtcacctgaaattgtgatgtagtttttaaagataaaagtgaaatgctgaaaatgttcaggcatatttacaaatgttggcatttaattggatattaacattaagttagtaggttgacgatatttgccatatttataatcagaattaagcattat

SEQ ID NO: 200277 - DNA, 1000 bp, Homo Sapiens
ctgtgtattgcttaaatccatagtccagccttttctgagttcttgagccatgagatggaggtggcctgtgtaatctactatttttagaaagttaggaaagcaaaccaaatactctctgagaggaccctatgaaatggctgtacccttcagctgtgctgcttcagactttggccaggctcccaggtgacttacgttaatagcagacttctagttagaagaggagaatttatttcattaaaaaaaaaaaaaataagtcaaacagttcaagaaagtattcatttatgtaaaagaagtcaattggtatgttactaaagataataggaagaaaattagctcactattttagttgcatactgatgattttaaggtttaaataattagatttaaatataccgtatgtaaatgtagaagtctgtatcgtaataaatctgttgctaagtaaaatgggaatacatgacaacgaggaatgtaggtattaagaatgtcagaattagaacgagaacagtaaaagagcaaaagctgtaataatgtgtgctagtatataaacaatactctaaatacttagtttctctaattttccttttacaattgcagttttaatttataatagtctaagagcgtattcaagctgagacttaaattgcttacgtgctatagatttaggtgtattagctatttcagaaatccagaacatttgcaaaggtgcattattttatgccaaagaggattatgttcccctatggcttgtgaaagagataggaaaaaagaaaagaaaaatattaacactgcaagccaccattagaaaattatatttcaaaaatgatgtttcaaatcaatgacaaattgcctattcagtcatgagctctcaactaaaatttggggagtcaatgtaaagaaagcctacagaatgtattttaatatttgccaagttatttataccctcaaaaaaaaagcttttacgatatgatcaacagaaatagacttattgtttactgaattc

SEQ ID NO: 200278 - DNA, 1000 bp, Homo Sapiens
ttgtagacaacccagatattcaaaagagaggccgtaaagtgctacctttaagtgaaaaggggaaagttgtcaacttaataaggaaagaaaaaaaatgtatgctgaggttgctaagatctatggtaagcatgagtcttctatacacgaaattgtaaagaagaaaaaagaagtttgtgcatagtgtacacagggttcagtactatctgcagttttaggagtccactgggggtcttggagcatattcctcaaggataaacagtaactactgtacattaaccacatcatgagtgagttctaatttcatttagagtccaattattaaagtctagttgctcaataaggatagaaacaagcctctgtagatcgaaaatctaatcaaagtttgaggtgtacctttctatgaaaggttcttggaagagacagtttgataaacacagtgtggatccgcaatgaccagcaaggtcctagacactagtgagcagagccagggttggtgggcaaggcttcagagagtagcttaaagctggcagagagtagtcctgccacagcctgggctcttggtcttcagagaggcagctgacagagtgtagtcctgccatggcctaagctctcaatatgtttgtccaaaaccttgggtttacaagcattttggagtctggtagttgaggccaataactcacatatgtagatctgatataggtgaggtgacattcttgtgggaaggggaattacactccatgttcttatcactgaaaaacatatggcactaggtagcaaactacgtgtttggaaacacttcaaagtgtgtggttttctgtctccaacgtttacatcatcaatattttctctttcattagactatctgtttcattacacatacctgacttcatctctccccttcctacccacagctctcacccattccccaacacacacgcagctaaagagtggtgtatactcattgtctccatttcctctctttttattcactcttgaattc

SEQ ID NO: 200279 - DNA, 1000 bp, Homo Sapiens
ccaccacaaaatctttagccaaagttttctgaaacactcaaactttgaaaaaaaaatattaaactgtaaagtcactactgtgatatcaaaggtccatggacttaaaagaagatctaacgaggccgggcgcggtggctcatgcctttaatttcagcactttgggaggccgaggcaggtggatcacctgaggtcaggagttcaagaccagcctggccaacgtgatgaaatcccgtctctactaaaaatacaaaaaattagccgggcctggtggtggacgcctgtaatctcagctactcaggaggctgaagcaggagaattgcttgaacccaggaggtggtggttgtagtgaggcaagatggtgccattgcactccagcctggacaacaagagtgaaactctgtctaaaaaaaaaaaaaatgatgtaacgcttctcatgtgtagaagcagtagcacttttagcacttttagaaaaagtctcagaaggagtcctggattttttttttttttttttgagatggagtgtcacacttgttgcccaggctggagtacaatggtgcagtcttggctcactgcaacctccgcctcccaggttcaaaggattctcctgcctcagccccctaagtagctgggattataggaaactgccaccacgcccggctaatttttgtatttttagtagagacggggtttcactatgttggccaggctggtcacaaactcctgacctcaggtgacccacccacctcgacctcccaaattgctggggttacaggtgtgagccactgtgcctggcctggatttttttactctgtgaacttcagtggtctgttccccaaataaccctcataattcatattttgaatgtcataaaattgaaattatttccttaacttacaaaaaccatttcttccatttggggagcatgatcaaagcatctcgaagataggaaggaactcattgctgggaggggcatctatttctgtttataagatcctgaatt

SEQ ID NO: 200280 - DNA, 1000 bp, Homo Sapiens
atccttaattattgtggtgctcaaattgtccgatttttggccagtgggcccccacttcccatgtccttaggggatgtcctcatcattttttttttggagaacctctttcctttttggcattaaaaaatgttccaggcccatcttgtatctgccctgccttcactctggagtcagctgtttctctgaggagccctgctatttccttcttttcataggaaatattatcatacaccaggatctgcatgctagcacactcattgctactgggtctcattgcttttacctactatattctatttaatgacttcctggcatttcatagaatagctgtgcaactgtttatttatccattgctctattaatggatgcttaagttgtttccaatttgtccctatttcaagcaactctcagtgaacatttggttatacactctttgtgtatttatgctaggagtatctatctctccaaagatagctgatgagaagtggaatttcttgatcataagatgtatatgtttaaaattttacttgatagtgtcaatttcttctccacagtggccccaccaatttagatcacagcaagtaggacatgagagtcctcatctttccagacactttctgatgctgagtattacaaacattttgtttttacacaaccccaggggtgaaaaatgtgggctgattggcctcatgttcattttccacattgtaagagagggtgaggatctcttcctgtgtttattgcccctttgtcttcttgctggtgggaggagaggaagctttgtgagggtcggaacggtagagccagacctcactagatgggtaggcttttaggaagtaggcaaggagggaggctatttcagatgtaggaaatgacagagccaaccaccaggcagtgaaggccaagtagctgtaggttttggatcccccactttcccggggtgaggcctgctattttgtcctggtgccattgctttcacagtcttctctatgacaagctt

SEQ ID NO: 200281 - DNA, 1000 bp, Homo Sapiens
tttgaatcactctcttctgccccatctctcagaccacagctggataaatttctctgcttctttttaaaggctgatacaattacattgtgtccaccaagatagtccaggataatctccccgttttaagggatatttagggtctataaccttaattatatgtgctgggtcccttttttcatgtaacataatatacacaatggtttcagggatcaccaagtgaacatcgttttaccagtgtcatgcgctgaaacggtcaggcctgggcaactgcaatgtttgaaagttctagtagatgctgtttgtggaatgcccttatttatggtgatacaaacagcagctactaggtaagtacgttccacaaacagccttcttctagaacttttaaacattgttcgagtatcggtatgtgcttaagctttgaggcacaagggaatactatcaaatgatatttcaatagggaaaagggtaacaaaatgtggtctttcaagtctctctgattaagaaaaaaaataatttgcaaaaaggaatatagcaaatgactcttacatgggaaacctgggaagacaagggtctagaattcatagaaacgtacactttattcctagttttgttgctgggaagcagtcattgaaaatgtcaaaatggaagtggagagaatccattccaagatgatttcatcatagaacttggggtaggctacattgaggaccacctctgtgaattctgataggtatttctagaatagatttataccacatgttctaacaagctgaaaataagggctgacccacttgtacccatctaatttgtctccgtgaatgtttgctctctatttgtgatcacttgaagatgtcttatccaaacctatcggtgactaggataatgtacaacaaaactctcccccacctttctgtaggagaggagaaccaaatagaaattgtttgatctttgagcatttttaaatgttttacatgcaaaggtaaagagtgggttaaagctt

SEQ ID NO: 200282 - DNA, 1000 bp, Homo Sapiens
gtgagccaccatgcctggctgctattaaaaatttaaatacacatactctagacttagctgtccaacttttggaacaggctaaaacccactgaattatactcccctgcccattaaaaaggacctgacatgaatccctcatgtctgctggctaagcagcctgccttcctcgctgcggtcgtccctccgaccacagacttacagcctggctcctccaaaacctcccattacaacacatggggggttatttgcctaaatgtactatgctctctgccttgcaagtactaggggaaagcagtccccatgatgtacctcattcacgatgtatttgctgatgaactcgttgaccgtcatgagggtctgggaccattcctcatctgtgtacctcgaaccaacttccactgggacagttcggcagccagcgatctcctggatatactccaaactagcagaaagacacacattggcatcgtcactgctaatatctgttgggcatagtactaagtgtgctttgcatgtggtcccctttcatcctcggaaaacctcacgtgcagagacaaggactgtcatccccagcttcactgatgaggaaccggcatggagaggtggggctccctgctcaaggctgtgtggctcatacacagtgctgtgcagctttgcagacagggccggtaagtctggttggctgggctgctctagttccctgcttgccaacagcctcctcacttctttctttgctcattttgtcactaagctgagaaacctttgaacaaatagcggacagcgtggcaggtggcagtctcctggactctgccctctagcctgggactgattccaggcctcatcagttacaggccaggggatctgaggcaggttactgaacccgagtccttgatccccatttacagaatgggggtgatgacaacacctgtcctagtgccaggtacgtagtaaaatgcttaatgaagccttgctgtgaggagagctcctgcaatgagaattc

SEQ ID NO: 200283 - DNA, 1000 bp, Homo Sapiens
tatgatacatttggataagagaaaatgaaattttaaaatctaaatacatatgaatcaaatggttaaaaaattaaatagaagtttcttgcttagagtaataaatgcaagcttctcagtggatatccttaatcctgattttagaatgagtccaaaaagaaattgccagagtgaataccaggtaacagaagaaatgatgggcatgtttctctgtagaacaacctcccttccctagccgctaactatggtggtacttactcatcacattctagctcagaactgccattctggtcctttcattcttgttagtcataccagcatttgtaaactgctttccacattaaaagaaaagtaaatggttcacttgtccctaaactttttgtcttacacaagacaacattaagcatatttcaaataaaaatgttcaattttcgctagctatgttaaaggttaatacccaagctaaaaccactgggttttaaaagatggttaaactgaacagaaagctttgattttcaagttatgatcagaaaataaccatgggagactgtcgagaaattaaaaatatagtcagaaagcctttaagtattacttagcaaaacagctatgacccaaaatagcattgttatatgtttgttattcacttcagtaatgactgaaagtgaataaataaaacttgctcggaaaaataaggttttgaaggaagataaaaactgtacatttaagtgtatgaaatcagaaagacataaggtaatagaagtatccatcacataactggcctttaaaccatgtaaaactcattgatacccacatgggaggccaaagaaacgcaatttccaactcaagaaactatcacacaaaatcccaacatgttctagacaccactggataagaaatttgagggagtaccccgaataaacaaacattcacaatcattcacaatcattcagcattacctcccattctacagggggataatccattttaaattaattctgaattc

SEQ ID NO: 200284 - DNA, 1000 bp, Homo Sapiens
agattggtgtctggtttcattcttctgcatatggatatccacttttcccagcaccatttattgaagagactgttctttcccccattgtatgttcttggtacctctgtcaaaaatgagatgactgtagatgagtagatttatttctggattctctattatgtttcattgctctatgtgtctgcttttgtgccagtactatgctgttttggttgccacagctttgtagcataatttgaactcaagtagtgtgatccctccagctttgttctttttgctcaggattggctttggctatttgggctttttttttttttttttttttttgtagttctataaacattgtaggattttttttttcttctatttctgtgaagcatgacattggtattttgatagggattacattgactctatagatcactttgggtagtattaacattttaacccatttgtgctggagcctgaaatttttttgtgtgtgaaaaatcagacgttggtgatgaccttgagcagtaggatataaataactcccacaagcttagcgttccagtaatggaacactaggcataaatagattaacaatattaattcttccaatccataagcatggggatctttccacttgtttgcatcctctccagtttctttagagagaattttgtaattttccttgtagagaacttttacttcttttttttttttttttaaacagagtctcgctctgtctcccagcctggagtgcagtggcccgatctcagctcactacaacctccgcctcccgggttcaagcaattctcctgcctcagcctcctgagtagctgactacaggcgtctgccaccacacctggctaatttttgtatttttagtggagacggggtttcaccatattgcccaggctggtcttgaactcctgaccttatgatccgcccacctcggcctcccaagttgctgggattacaggcgtgagccactgtgcccagtcggtcttttacttctttg

SEQ ID NO: 200285 - DNA, 1000 bp, Homo Sapiens
gtaggtaatcactctaataaaaagatactgaaatattagagaaggaaaaccagcaaaatattttcaaatgagtttttaagttatcccaaagaagaaactatctatagaattgcttaatataaactaatactagtcattaaagactctgagcaatgcaagtatgctttttctccatgctagaaaaatgcaatagaaatatctagaataaatgtgtttactactacatgtaacagtggtgtttttcctgatggacaaatacagttactagaatactatcagaaagtaaaactgcaaccaaaagaaaagtcattacactgtgatattctatcacactcctaatcaacaagtacagagtgcctattttaaagtataatacaggttgggtatggtcggtggctcacacctataatcccagcacttttgagaggctgagggggttggaacccttgaacccaggagttccagaccagcctgggcaacgtggtgaaaccttgtctctacaaaaaaatacaaaaattagccaggcatggtggcatgtgcttgtagtcccagctacttgagagactgaggtaggagaatcacttgggcccaggaggtcggggctgcagagagacgcgattgtgacactgcactccaacttgggtgacagagtaagatttggtttcgaaattaaataaagtataatacagtagttaaaagctaggcctcagaggcagaaatacctatattcacacatccctacttgtccctaactttctctggcaacttacttaacttgtccaagtcttaagtataaaatggagatgctatactaactacctcacagagctggttgaaaggattaatatatgtaacctcttcagcaatgtctatacataataagcaataatgcctatcattataactgaaattgttgtcatttctttaatagcatagatcctagcttctacatgtaacatcactttttatataaatgaagagagtatccaccatccaaact

SEQ ID NO: 200286 - DNA, 1000 bp, Homo Sapiens
tggggccactgtcaccagggacccaggctccttctgttcagtcatccttggaaggggctggtattccctcattgcctcatgatctgaagtagctgctggaggacaagccatcacacctgttttccaggcaggaggaagaagtgagggggaaaaacaggcaaatcttctggatgagtcagctccctttaagataccatccttttatatagcctattaaccagaactcagtcatgagtcacacttactgctaggttggaaaatggagcagtagaactgggccaattgctggcgtggatataacgcggctccagtccaaagacagaggggagaatggacactgggaagcaacttggcagcaaagccaagaaaatcagtttctttattgtgttttctttcctgaaacgtctcctggggggcaagagggaagaggccccatccttttctctgtctgatttttggagctcttcatcattctagacctgcttgccccataggactttctcttacagttccctgttccagggaccctgaagaccagccctgcaatgtgtgcatagggggtcctatttggtgctgagagagacagggtctagagcatagagttggatttctgcacagtgaaagcaggactgaagtctggtctttaaagatttcctccttttcatgatatggcccactgtcattgtcattgttatcactgacaatgatgacatctcttcaagattaataggtttcagacttatagtgttaccatcctgggaacaggacctagacacctgtgaggttccaattattgacctaaacggttgacaattggaggacctagctgttcctctaactcttggggtcctactttcacctgaatgatggattgatttgttccatcaatcaaatgtgtgaaaatgacagtggagcttcctgctctttaaaagttggtggtagaaatcatagctgtcatattgatcttagctttgccacctactagctatatgatttaagt

SEQ ID NO: 200287 - DNA, 1000 bp, Homo Sapiens
tatttcaagcgattctcctgtctcagcctcccgagtagctgggattacatacgcatgccaccatgcccagctaattttttgtatttgagtagagacggggtttcaccgtgttgcccaggctagtctcgaactcctgagctcaggcagtccacctgccttggcctcccaaagtgctaggattacaggcgtgagccactgtgcccggccttttttatttttatttatttatttattttttgagacagggtctcactctgctgcccaggctggagtgcaatggtgcaatcacagctcactgcaacctcgacccacctcctaggctcaagagatcctcatgcctcagcctcccatgtagctaggacagcaggcgtatgccaccatgcctggctaatttttagaagtttttgtagagacagagatcttgctgtgttgcccaggctggtcttgagctcctggcctcaagtgatcctcccatttgggcctcccaaagtgctgagtttataggcgtgagccactgcgcccagccaagagtctgcattttaattattattgttattattattattattttttgagactgagactgtctctgtcgtccaggctggagtgcagtggcacgatctcagctcactacaacctccacctcccagattcaagtgattcccctgcctcagcctcccgagtagctgggattacaggcacccgccaccacgcctggcaatttttttatttttattttttagtagaggcggggttttgccatgttggccaggcttatcttgaactcctgacctcaggtgatctgcatcccttggactcccaaagtgctgggattacaggcgtgagccactgtgccctgccaagtctgcatatttaacaagcttcaagatgatgctcatgctgctggtccacagatcacacttgaaatagaacaggtttagagattagaaaaattgggtcacaatacctgccctgtaaccttagggttcctggagaattc

SEQ ID NO: 200288 - DNA, 1000 bp, Homo Sapiens
tcttcaaaatgtgtttttggccttttagtgtgcctgcaatttttttcttaatagccacacctggatgaagggaactctggtaaatgggcatttagatgtgtggtggtgaggtgttggctgggggaggtgctctatagccctataattggattgtggtcttttagtgagcctgtgcccctggactgtgacctttataatgttccccagtgttccctgtcccccaccttatgtaggacaggatggttagaggcggtccgagttgtgtattctccttcccccacatggaaggccagagtgggatgcagttgggtatttccttcccccagttaagttggactctgatataaccccaacagggtaagctctgttaaaatatttttcttgcgcgcaagccttgttaagaagtacagaattccctggtgtatttcaaaatggctgctttccccctctttctgctgtaagcaggaggggatttttcttctgccttcactgtgagaacctggtaggcttctagagataagactcacagaagtgtgagggccttcctataactgaggccccctgtaatttttaactctcaggcttgtccaccctgagcctctggcaattcatcaattacagttcaggtcatcttactgcagtactggttcccacacaggtttctgctcatgggcttctgctctggtgagttgtgattttctgtctctgcctgtctatatgtccaacttttggggcagtggttttccccatgaaccttccttctctgacggatctgaaaagaattattgatttttcagtttgtttagctttttactaggacaaggtgatgacttccaaactccttacatgtcagatcagaaactggaagtcagataagggccttgccatactaaaacaggtgcagttctggggaaaccaggatggttgatcactgtaattgggagtaaagatatcctggatcccgtctgggctcaggtgaaccccctgggacatggaattc

SEQ ID NO: 200289 - DNA, 1000 bp, Homo Sapiens
ctaatagactttacactaatgacaccattatttattgctttaattactgtagtagcctcccaacaagtcttgtgtctctccatttcaatctttcttttaaattaatctaagtcatatgtacatcatttacaaagctaatgcttactataagaaagaaaatatcctgccccttctccccatctttgacttctgccctacaggagcaataccatttcttgtggtactaagtattctagctatatttattctttatttttcattttgaaaaatgaaagctttataaaagcaatcctgtttcttctggtactaagtattatagctatattacttattctttatttgttactttttgaaatatgttttgctgtgacatatacacatgggacacaaacatgttgttataaatgataattagaagtgtacacctttgtgaacataaagtacatttgttgagtttctcccacatatcttccagaattacagccttggtttatggcatcgctcacctgggacaccatcttttcccaatttaagttcgttttcatatggcaggctccttctttcactttagttattgcttcaaatgccatctccttagttattgagctaccctttctggcttctctagcattcactctatttttttttttttttgatctttctttgtttctttaatactgctttttacaatttagaatttcttaagtgtatttttctgaatacctgatttttgtctgtccttccctcatcatccccactaaatatacaaagtccatgaagacaggggtcattctgttttcatctttgaatcctcaattacttgcctactgctgcatggcaggtatttaataggtatatttataatgaacattaaataatcatcaggaagttacaatggaacataatagatttgggctagactggtaaacaactaagaagtagattttaaaataaattcgctccctatatttaacatgttatttctctatttaaagaattc

SEQ ID NO: 200290 - DNA, 1000 bp, Homo Sapiens
cagtcaataggaagagctgaagaattctttaggtctcccaaaatggtcagtaaggaatgacagctgggaggaggcggggcaagctagagattaattcgccccgtcagccaatgatcgtgttctcccactttggccacaggacaggaaaatagatagctgtctcagccaatgggagcatccaaagggcaaagatgctgccagcaggcggtgccagcccagggatagtcggtgacaaccggagacaagccttatgggagggtgacagctggggacagcacggagaaggggcgggggcattagtgcagccctcaaccaatgagtgccgcgctgccccctctcgagtcctttccggtcccctattcttcgttcagctcctgagccccacactctggtggtctgtgggaccctgagccccaccacagatccagtgccctgacccagtactctcatcctttactctataattctccgatctcggcccccaactaaccccaacactccaggcccaggtggcaatagccagagcccccagatcctataagcaacccatatctctgcttcacccatttcctgcgggaatcccaacctccaagtccctctcctcagttcccatctatctgagctcctccccagaacccaggctccagttcctcagaccttatccctctgagtaccccctccatttcttctagtggggatctcaaaccccaaatccatgaatccctaataccatgaactccccatatgtgtgttactattcttttggggatccaaggccccagtcccgtcaacccctctcccctcactgccacatccctctgtgctcctcatgttccactgagaatcccgacctcaatctcatgagcgctccaggttgtccttagatcacaagcataaagacctgacgttatgagctccaaccttccaacttctaaacgccctcttctttctctgacccccatattctgatttccatatagcatccaccatcctggaattc

SEQ ID NO: 200291 - DNA, 1000 bp, Homo Sapiens
gtccgggaaaaggtcatcggggaaataaacaaagtcaagcacagtggatgaacgcgctgctgccgctccccacacctcttgtggtggacatcacttacgcttcctcatggtgcatgtcacttatgcttcctggtgccctcccagatgacccccccttgggccactacacacagctgcacccggcaagagcagacaaggatggtctactcactgagcctgcaaggctggtgtgcaggacaggccagctacactccccaggtgtgtgcaagaccggggacgagtcagtcattgggaggtgaggtgctcgggcagtgtgggatggaggaggagggagggaaactgagtgtgggctcttcgtattggagaggaggggacggccatggcacaaagactcagatgggaaagtgtgagaaagcagagatttcaaaggagctacggtggagacccacagaagaggaatgctgaggcttttctgtctgaaatgctgaatagactctagcacacgcaaaacagcccaccacagcgagctgcaggattcttccgggcttttaacagtggtcttgtaaaaaaaattagccgggcatggttgtcccagctactcaggaggcagagaggggaggatggcttgcgcccaggaggttgaggctgcagtgagccatgatcgcaccactgcactccagcctgggtgacagaatgagacccctgactcaaaaaaaaaaaaaaaaaaaaaaaaaaaaaagactggaacattcaaaacctgttgatgggctcaagaaattctcaagaaattctcttgcctcagcctcctgagtagctggaactacaggtgtgcaccaccacatgtggctaatttgtgtattttttgtagagacagggtcttaccatgttgcccagtctggccttgaactcctggactcaagggatccaatgacaggcgagagccaccatgcccagccacatttttgctaaattctttacactggtgaatctcaaagaattc

SEQ ID NO: 200292 - DNA, 1000 bp, Homo Sapiens
gataataagattggattctacaagctttctcagaaaataagtggtgtctttgagcccttagtttttctttcacatcatttttttcttgcttgtttaagttttaagtacttaatatagaaaattagaaatttgagggtcatgtaaaggagcaaggagaagtctcctaaagacctactgtctagaaaactgtgtcttaaccttttctgaatcatagacgcctgtaagaatctgataaaaatgacctgtcatccccctagaaaaagtgaacttttgcacatatataaaaatattttcttacaattccaggcgtttccatttatttaccccaaagttacaaaaccctaacctgactttcaaccacaaattccacaggcagaaaacagtcagcccaggctctgatttacactgctgtgagggcttctgaatctcttggttcttacagtccggctgctctattttttaagtcttattttttgagggctaactccttaaacaaagaattggctatctttgattatcttttgcagtgtaattaccaactggaccctcatcaatgaactttttaatagcttaacttctgatttccttgtgtatgcatgtttttgtttgtgtgtctcaataaactcaagagagagattgtggatcctgtcttatgggtggaggagtaatatactgtttttcccttgtttctttacctgttcattctgccccagggcactgtgctgaggcctttcacaggctttcactggcagtcagagaagagagaacagggtggagggtctcaggtccacctgatctggcagttaagggagcaggcggggtttggaatgtctcccccgctacttttctctccgttccagtcattcagctctagaactgtgtcaggatgggactctggattggtggaggaatcatgtgcagtccgtgcagcttggaggtgggtgtctgcagcccacatgctgtactgtactttattttcttggctctggtgtatgaattc

SEQ ID NO: 200293 - DNA, 1000 bp, Homo Sapiens
atccgtggtgtcccgctcggagactgggttcctggctctcccactcgcattgctgtagcaagagatccatagaacatattttaaaatgttacttgctatttgcttaaatgtagacttttctaggctatttcttttccttactccattactgaacaactcccttacttcctcctcccccccagtatcactcccaagtaagggattggttttagtcccagaactgaagtaccctgagctccattcgaagcagtactctacagagacccacattttctttatattttgcatttaacaagtttagtgagtagttatttttgctgaatttatggaccctttgttttagatttgcaagacaagaaaaacttttacagacttcgtacttaatgttttattataatgcagacctgtacagtgttgtatgctgaagatactggaatgcctgtgtgctcttctaccggagagtgtctgatcagaactcttcagtatgaccaaagaaactcaagttagcattgtcctgcaggaagctgaggatctctctctctctaagtttttcttctgtataatttcttctgtgtgctttgagtagatatagtgtgatctttaaaaagatcaggcaaggctaggtgccgtggctcatgcctgtaatcccagaactttaggaggccaaggtgggcagatcatcaggtcaggaggtcgagattgtcctggccaacatggtgaaaccccgtctctactaaaaaatacaaaaaaattagccaggcatggtggggcacgcctgtagtcccagctactcgagaggctgaggcagtggaactggaggttgcagtgagccaaaattgtgccactgcactccagcctggcaacaaagcgagactctgtctcaaaaaacaaaacaaaacaaaaaacaaggcagttcctcagagagtggatccagggtcagaacgaagaactttgtacatggacacaacaaaatctttataatatctgacctacagaattc

SEQ ID NO: 200294 - DNA, 1000 bp, Homo Sapiens
tgtatatttttaaatataaatggaatcagatgatacttttttttttttttttttgcagcttgattagctctttttaaccctggatacacatgaaaatcctctggggagcttttaggagaatactgacactcaatctcactccagaccaattaattcagaattgctcaggatggggtctggatacctacacgtttcaaaagctccccagatgattcttttgttttatttcaacttctatttgggaaattttgaatatgtacaaaaatagagagatggtacaaggtacccccaaggtacccatcactcaacttcacttattgtcatgaccaatgttattttatttatattcttgactccctgccttggattattttgaatccattctgggaatcatgtcatttcacccataaatattttattataaatatttaaaaggtaaggatttttcaaaacaacacaataaccacaatactatgatcatacttaatgaaatgcacaataatgtcatcatatcatcaaatatctagacagtgtgcgaattaccctgatggcctcataaattttaagtctgtttaaatcaggactcaaatgaaatccatgaattgtcattgcttgttttgtctcctgagcctctcccaggtaaatctatcattcagtttgtagcttgagaagcacatggtcaaatgaaaccaacaaagggcaagtggagaaaaggaagaagggcaagtggataacctggttttctggacagctaaatgatacagaccatttaaatctgtgtctcagccaaagggctcattactgtcagcccagccttgagtccttgatgatctcaaggtcccagaattcaccaggtgtcatgccacttatcagcccggactaagtctggtacagcatgatgactattaggtagaacccttgttcttagaaataatttacttccttgtttatttgttctttgattcacttacttgtgagagaaacggctgcctaagaattc

SEQ ID NO: 200295 - DNA, 1000 bp, Homo Sapiens
ttttaatttggcaagtctaaattttcctcagttggatttaaagcagattatgcttgtgagtaaatagagagtgttaagctcaggagagtgataaaattcctggtgaactgtccatggcttgcttttggtccccacagtagcaatgctgtaggaatttctcatcagcattaagtttagaagttaagactcctggatatgacattactcatcttaagaatacctatttattgcacatttatttgtctgaggctactttcagagggttattattgtggtacttaagcaagatttacagaaactttttaaaatttaatctttaattaacaaatgacagctgtatatatttatgggaaacaatgtgatattatgatacatgtatacattgtgtaatgattaaattaggctaaatagcatcaccattacctcacatacttattactttgtggtgagaacatttaaaatctactcttttagcaattttgaactatacattattattaactaaggtcagcatactgtgcaatagatcactagaatttattctttctaactgaactttgtaccctttgacaatcatatctcctttcctgtccatcctctaacccccatcttccagtaatcacaattctactccccacttctatgagttcgactttttttttttttttttttttttttttgaggctgagtctcgcactgttgcccaggctggagtgcagtggtgtgatcttggctcactgcaacctccgcctcccgggttcaagtgattctcctgcctcagccttccgagtagctgggattataggtgcctgccaccacgcccagctgatttttgcatttttagtagagatggggtttcaccatgctggccaggctggtctcaaactcctgacctcaagtgatccacccacctcggcctcccaaagtgctgggattacaggcgtgagccaccacacctggctgagtttgacttttatagattcctaatacaagtgaattc

SEQ ID NO: 200296 - DNA, 1000 bp, Homo Sapiens
gaaatcagtctcttgtccaatcaaagctgcatttatagcttgtggaacaagggcctcagttagtcactgtctggcgatggatgaactgtaatggttttaatagtgattatcttgaggccagcgcttgattagctgctagaaaaaaaaaaaaaaaccttgtggtagttagaacataatttgttttttaagtgtagagatgtgtgattcaacccttgcctggcacagccttaggtctcatttatagtttggtgtcttaatgctataaggagtctgttctgtcagtctcatgatccctattgtaataataatgctagtcagtcatgtttaaactgcaaaagggagtaggtataacaagctatgtctgacctcctgtcttgtcatagctaggaactcaggtttctctggggtccccttggccaatagagggtccattcaattggttggaggccttaggattttatttttagttctcataccccttgatgtttttgcaaacagaatgtttgactcagatgaaaacgtattacaatacaatttcattatggctatgatatgagaaggaaacataatctactttcagacagaatactccaagaaaggtaccgttttacatttgttctcattactttatctttgaatccatgataaaatcaataataatgatattagtattaatagcaattgaccaaattattttctgctatgctatgttgaatattcacttttatatggaatgccttcatgaaagctaccttgtaaaatgagagcaaatttcacttccatttcagagatgataaaataaccgagtcagccagccagagaacttggcttcttgctattacacatatacacacacattctgaaatccttctaacttagcaattcatcagtaaaagccaaaactgggcttgtgaaagtccaagttaggaatgtacaactatctctgccccacctctaatccaaaacccaaaccattccttaggcatctccccaagaattc

SEQ ID NO: 200297 - DNA, 1000 bp, Homo Sapiens
tcctctttcaggccaggcacggtggctcgcacctgtagtcccagccctttggtgaggccgaggcgggtggatcatgaggtcgggagttgaagaccagcctggccaatatggtgaaaccccgtctactaaaaatacaaaaattagctgagcgtggtggcgcgcacctgtagtcccagcagcttgggaggctgaggaaggagaatcgcttgaacccgggaggcagaggttgcagtgagctgagattgcaccactgcactccagcctgggcaacacagtgaggccctgtctaaaaaaaaaaaaaaaattcctctttccccaatatctgacctttcccctttaaatattgaagccctcaaaatcatctttggagaaaggtacagacctgtctcccaggtgcacacattcttaactttggcaaaataaacttgtaaattgattgagaccagtatctggtgctttttggtttacaactggaaaactaaactaggcacatccatgcaagacagatgctctatatgttcagtagggagtgatgttcaggacatcatgttaagggaaaagcagcaagttgtagagcaatatgtatgggaagcccctcaaataaaaaataatgtttatggacagatagtgtgtggatacacaggaacagggctggaagcgaacgcatgctagggagagactgctaagcatggggacaagcggggagaacttgagctttatctgtattgtttgaatttttcttacaagaatgtactttccaaatctgttgttaataaggagcctaaagctgggcacaggtgctcacgcctgtaatcccaacactttgggaggccaaggtgggaggatggcttgagcttgggagtttgagaccagcctgggcaacatagcaagaccccgtctctaaaatatatataaattagggccggacgaagtggctcatgcctgtaatcccagcactctgggaggccaaggcaggcagaaaactcggggtcaggaattc

SEQ ID NO: 200298 - DNA, 1000 bp, Homo Sapiens
aaatgctaaccagaaaaaaaatggtcttaggtacaagaacaaataaatagataaatttatttaaaataagttaatctttatgatattcatataagagaatatggtcacttacactgataaatataacaatatctaataaaattaaataattaatttattataaaataattttttcaaatttctaactttttaaatttatgagagttctaatatcgtgatccatctaaatttgctgtcttaaaaacattcagcagttgaagtctgagtctgaatctagaattcaggcatatgtaggtcattctgaaggatgctgggttatgttctctaaaatctatttcatgattaattaaggacatttctgagtaatcatttgtcataaaagtagggctgaaattggacttagggacaatacaccattatctaaaattttatatcatttacagattaaagccatatctgttgctgatttctctctgactcaactctaacaaaattgtctaatcaggagcatataataaatttgcaggggaaaactaagagttaatcagtacatgagcaatgcagttgcagcagagatgtcagcagctgcaacagtgtttgaacaaaatgacactaaaaacaaaatttgtgggagatagtgcttaattagggattaatactgttaaggttaataaaatcaacaaatctacagctgtactgatcaaggtggggaaagaagcaaagaatgccacacattaccactgccactatttaaaaaggggcaccaccacagatcctaaagatattaaaataaattaagaaactgttacaatttactttacatcaacgtgtttaacaatctaggtgaaatggactaattcctgagaaatacaagttatcaaaactgactctagaatattgaaaatctgaacagtcctacatctgctaagtaaattaactttgtaattgaaagctttcaacaaagaaaaggacaagcccacacagtgtcactggtgaattc

SEQ ID NO: 200299 - DNA, 1000 bp, Homo Sapiens
ctgtattacaggtaaggacagtggcaatctgtggcgagcagctcggtagcacagcagtgcttccagagcatgattggctgtgaaaacctgcagcttcgctgctagaaggggctgacttgatttacagtagaaggacagaaacccatgcccaatcatgttatcctcaagtaaagcaaattcagtgggaaaccaaccacaaaagccccggccctgctagtctgaggttgtggtcttgcttggggcgagcggtagaccagtagactagctagaaattcaacagggagattctggaaatgagtgagaggctgagagactagatgaactcccgcacattcctagctgactgagaggatgagtgctgggacggaagtcccaggatagcctggtagagaaggaaagctagggcagacttggaaactttgaataggctctgtaactcaaacacggatccatccacagagtcttactagcttggggtgattgaacaaaaactctgaccattaggctatgtaggcaaagaggttattatctaggagctgacctaaaataaaattaaaattgaaaacaaaacaaaacaaaacaaaaaacccaccaagctatcaacatctacattttgaagaggggagtctgcagattaagtccaggtaagtttctaaaaacagaagaaaacaaaagaccagaagcagcaacaaagatcctcaaggcaaatgaatcagaatctacagttgctctcattattcctgttcaacattgtacatgaggttgcagccagtacagtaaggcaagaaaagaacttaatggcatatatattaagaaggaagatgtacacggttttagtcatagatgttatggtcctgtatgtagaaaatcctaaagattctattaaaaaaatctaaaacaagttttagctaggtcacaaatacagaatcaatatgcaaaaatcaattttaattctcaaactagcaataaacaattcaaaattgaaataagaaaagaattc

SEQ ID NO: 200300 - DNA, 1000 bp, Homo Sapiens
aaagcatgtcaaggccagtgcggagggccagagacaagagggaagttgattggtaaatcccggagaattcagtggtaagaacatggaaagaatattgggtactagccacatccaggagacccctagaccgagaccacagcacccaaaatttacctaaattccttctggaggtggaattagttcagaggagacagtgacagagcattcaaaaagtcactctattggagcttatctgggaagagagaggacaaagtaggtggcattggctagcaagagagatgctgcgatggcataggcagcaggaccaactgtgaggaaagacagggtggtgagtccccgaaagtcagttttgagaatgtggaagggatcagaagccttagggtctctgtcaagaagaaagcattctgtgcctggaggggctctgttgggcattaggtggacatgctccagcttagcacacaaagcagagatgccagggagcttgatcggcatgctcagcattctcatagtctatgctggataggagcagacatgtgagaggagacagcagggagcatagcccttacctcacaacaggatgcgagtcacaacaccgagagatgttgtcaagcctggagttccagaaagtgtcctccattcttgtcttcctgcaagaaagaattcagccaaaagatcagttagtaaatctagcaaaaaatgtattgcagaagtgacagtacgctttaagagaagagtgggccaacttggctggaagcagctccaatacattctgcatttgatctttttcctcactttcttctttgggttcctgcctgtgttcttgcccagttcacacccaggcttgggggaccctcccttactcttggttaatgcacatgtgcagaacccagtgatcaagacaaattctacccaatggtggtgttgctcattactgccacccaggaaagttgtatagccatcacatttgtactcactgtttccatgcagctcttaagaattc

SEQ ID NO: 200301 - DNA, 1000 bp, Homo Sapiens
cttaactctgggttcagtgtctgtgttcctttttcttactttatttgtatagagatagggtcttgctatgttgcccaggctggtctcgaactcctgggcttaagggatcctcctgcctcggcctcccaaagtgctgggtttacaagcatgagccaccacacccagcctctgtttctgatatttgaaatttagtaagacagattttagctaaattgagggaatacctttacagatctaagctctcatttctgctatcacctgtatttgatcatcttttggcagatttttttccccattatatgtgccagatttaaatatcatgttcctatataatataggatagattattttttggatgaattttcgttggacagatggtaaagatgaaaatggcagctgggcacagtggctcacgcctataatcccagcactttgggaggctgaggcgggcggatcatttgaggtcaggagttcaagaccagcctggccaacatggtgaaaccccatctctactaaaaatataaaaatgagtcaggcgtggtggcaggcgcctgtaatcccagttactcaggaggctggggtaggggaatcgcttgaaaccaggaggcggaggttccattgagccaagatcacgccactgtactccagcctgggtgacagagcaagactctgtttccaaaaaaaacagaaaaaagaaaaagaaaatggctagtctttttgctgcgaggctctgatgccagtacctgtaataacaacaggaaaagccggtctttagggccaaggagagggtgtgactgatggccccaccagcatgtctgcctacccgggcctgctccggggcagcaaggccaatgggggccagaattccaagtccctcctttccccttccctgcacagctctctccaagccttagaaatcacccaggacactatgttcagttttcttttatgggttcagtgttggttaagaataaagctggtcagtcagtaagtggaattc

SEQ ID NO: 200302 - DNA, 1000 bp, Homo Sapiens
aaatggattaaactttaatccattttgaatgaattttgcttatagtttatcagagaaaaaaaatcttatcaatatttccaacttctctcttcttaattccctgcttctctcctatttttatgacaaagcagaaataaagtgactcatggaatgaatgatattgctaatctatgtaacattctatccctaaatacaaagaaataaatgtccccttttctgagtatgactaactttttcccaaagcttgaagggtgtttgtttcctgggaactaaaagggggccaggcacggtggctcatgcctgtaatcctagcactttgggaggccaaggtgggaggactgcttgaggccaggagttcaagacaagcctgggcaaatagtgagactccatctctacaaaaaatttaaaaatcagccaggcatagtggcacatgccatagtcccagctactcacgaggctgaggtaggaggatcacttaagcccaagagtctgaggttacagtgagctatgatcatgccacagcactccagcctgggcgacagagcaagattcagtctaaattaattaattaaacaatatcacttatataggaagagagtacatcataattgaaataaaaagctaaaaatccagtcaaacatattttaacatgacattaggctctacttaagacattagaaagctttttgtgaaggacctaggctctcacaactttgagagacagtatgggagcaacaacaaaagcttgctacaatgttagaatatagcttctgctcggaagagcttagaaagagagaactggccaggggagcgcatatcaagagtgtgaagaatcccagtgtattggacacctcttgagcaccattccaaaacctttcaattctaccttttactctagccacagctcccactaccattccatggaggctttaaccagcttcacacatgtgcaactggtcaaccctcacactgtgaccctgccattctggctgtggaattc

SEQ ID NO: 200303 - DNA, 1000 bp, Homo Sapiens
ttcacacagaatatcttgagcttacatttttagctaaaatgtcgcagaaacaaattcacattgcttaagaaagccagggcctttcttccctatggcagtattttcccacggagttgaagagacatacctaggcaacagctacatgaatttttcctttgctgggcatcctattttcccgatttttctcttataaataatgacacatgtataatatatcaatattgagataacactttgtgtcttcaaaagttttctctttttaattttaaaagaaaaataaatttatagggttaataaatgtggctcatagattcaaataggcagaagccaggacatttccttggatgtaggtatccgaaacaacagtctcatctgctgtccttacactggaatgaacaattactggggatttttttccatctttgcctaaactcaagattcaaagtcccaaattaacccatagcttttggacacgtgtcagccattcgaacatggaatctcattgtctctgttacctattgccattataatgccatataattaacaatcacgaaacctcagtggcatatagcaatatgcatttatcacatatgtacctagagttcacttagggtcagctagagtgctctgctaatcctaactgaaataaaacaggtttcatatacactgtggaggaacttaactgtgcatttgcactgtgacatggctaaactctttaacaaagacgaaagcacagaaatttaacctgggatcgcccagcctgaaacaccatgaaatataagctttttgtgccacattatccttgagcattttatagtagcagaaagaagtcaaacttcacgccaagctaggggacttctgggtgctccaaaagcagtgaccacaatgaaggaagtggatcggggcatacagtagtctaaacttgaaaactctcctaagttgcatctcacatcagaagttctggattacatatagaatatcctatctaaaatttgaattc

SEQ ID NO: 200304 - DNA, 1000 bp, Homo Sapiens
tggaacctttctccccagctgtcttttgcttcctctcaagccatgtgattgctgcacacaccagctccccttcccttctgccaccagtggaagagcctgaggcccttaccagatgcagatgccagcaccatgcttcttgtacagcccgcagaaccatgagccaaataaaccaattttctgtataaattactcgccctcaggtattctttatagcgacacaaatggactaagccgatcccaattacttaaaatacaaaatctactaccaggaaagaacttttaaaaaaatacttacgtctattcacctatgtgctaaacagggaagtagtctatagaaaaactggagagtattaagtgattcaaaaatgaaatactggcccggcgcaatggctcatgcctgtaatctcagcactttgcaaggctgtagtgggcaggtcacaaggtcaggagatggagaccatcctggtcaacatggtgaaaccccatctctactaaaaatgcaaaaattagccatgtgtggtggtgcgtgcctgtagtctcagctacttgggaggctgaggcaggagaatcgcttgaacccaggaggcagaagttgcagtgagctgagatcgcaccactgcactccagcctagcgacagagagagactcagtctcaaaaaagaaaaaaaaaaaaaaaaaaaaaaagaaacctaaacagtttagagcattttagtggtaaagagaatgtccccaatgtaatgaagccttgtcctctttccagttagcagcattcttttctgcaggaagtcaccatcatacataccttgaatcaggaggataattcatccagttctaaggaaaactggttttctcaattttctatcattttgtaaaatgagatccaaatatacttgtaaaattggctgttatttgcaggctgtcttgataataattcacaccaaattgacataggccagatgagagagctgacctattttctacgtgtctgttattggaattc

SEQ ID NO: 200305 - DNA, 1000 bp, Homo Sapiens
gtgattttccttataatggccaagaaatggaaactcaaacttctgtcaacaggtaaggagataaacaaattgaagtctatctatttgatggaatactactcaacaatgaaaaagaatgaagtgttgatacaggcccctgtataaaggaatctccaaataagaacccagaccccctgggaaaaaaaaaagcatactatgtgatctcattgatatataattctagaaaatgcaaatgaatcccaagtgagagcagaatcagtggttgcctagagatagaggtggaaggagcaggagggagggatgataaatggccaccagaaaattctgggaggtgatgagtgttttcattgtcttggttgtagggatggctcagaatgtatattcatgagtgtaatgttattggcagggcatggtagctcatgcctttaatcccaacactctggggggctaaggcaggaggaccacttgaggccagcctgggcaacacagcaaaaccccacctctacaaaaaaataaaaaattatccaggtatggtggtgtgtacttctactcccagctactcaggagggtgaaataggaggatcacttgagtcaaagagttaaaagttggagtgtgccatgatcacgccatcgctcttcagcatgggcgacacagcaaaaccctgtctccaaaacaaaacaaaacttatcaaagtgtacactttaaacacatgcagtttgctgtacatcagttatacctcatgaaagccgttagtatttttttaatttttaaaaaagacaaaccactgatactcgtaacagatggatgattgtcaaaatcattctgttgaatgaaagaagccagacatgaaagataatgttctgtgtggttccatttattcaaaatgcctagaaatgaaaactaatgggggccaggcatggtggctcatgcctataatcccagcactgtgggaggccgaggcaggcagatctcctgaggtcaggtgttcaagacaagctt

SEQ ID NO: 200306 - DNA, 1000 bp, Homo Sapiens
aggaatacatgtctgttcctatcagccaaaaaggaaaaaaaaaaacaaactgttttcaagaagttaaatgcatccccaaagttcaagaatattaattagaatacaaatatgccaagcacctaacaaggtaaagttcataatgcctggtgtccagcaaaagattactggccacgcaaagaagcaggaaaacatggtccatgatgaggaaaaataataaatcaaaaatgaccctgatctgacacagatgttagaattagcagacaaggaatttaaaatagtcacaaaactgtatttcataggttacaaaagttaggtaaagacatggaaaatattaaaagactgaaatagaacttctgcaaatgaaaattactatctcagagacagaaataaacacattaatggcaaattagatattatagaagaaaagagtaatgatcttgaacacaagacaatagaaattatcaaaaacagcaaggaaaaaacattaaaaatttaaaaagcatcagtaagttgaggcctaatatatgcataattggaagcctaatatatacataatcggaatccagaaaggaaaggagagtgggacaataatgttaatcgaatacttttacaaaattctaaaaagtctaaatttggtgaaaactataaatcagagatccataaatcttaatctcaagcgcaagaaatatgaggaaactacactatggcactttataatcaagttgcacaaaactactaaaaataagacaatcttaaaatcaattaaaaaattgtgtatatgaaggaaccaagataagtatagcagtttttcatcctaagtaatacaaatacaaagagagtggaacaacttatttaaagtgtgaaaaggattatcaatctagaattatatgcccaatgaatttatccttcaaaaacaaaggtgatactgttgcatcacgaggtccaaaaaaaaggaagtggaataagaactttgacagacatgcaacagctcaaagaattc

SEQ ID NO: 200307 - DNA, 1000 bp, Homo Sapiens
aatgctgttttaataaatcaagttggaagatcttccttttctatttttaaaaagagtttatgtaggatttgtattatttgttccttgaatgtttgataaaattcatcaatgaagctgtctgggcctggaattttctttgcgttgttgattttaaatacaatttctattttaaaatgtaagaaaatcgaaaacttgcaatatagtaaaacatccattatacatttgtcaaaactaagaagtcaacagtgatcaaacactactaactaaactccagattttatataaatatcatcactcttcacaccaatgtcttttaggatccaatccaggataccacattgcatttagtgttggaatgtttaaaattacaattcaatttatttagcatatatttcatgtttctttttgtatccattttggtaatttttggctgtcaggaaatttatctatctcatctaaattgtcaaatttattggcataaagttgtaatattcccttactatccttttaatgtctgtaggatctgtactaatattccttcttctattcctgaaatccataatttgtgttatctctcctattttcatagcttatctagaggttaatcacttttaatgattttttttcaactaatcagcttttggttttactgtttacttttttttttaaagttgtttcacagatttctgctctattatttcctcgtttcttctacagattttgggtttaattcaatttccttttttagattcttaatatggaaacatagttcactgagtttcaaattttcttccttcctaataaaagtatttaaaggcatatctttcttagcactgttttaatagaattgcacaatttttgacatgttatgctttcatttttattcagttctaaatatattctaatttcctttgtaatttctgctttgacttaaggagtatttagaaacatttttaaatttacaaatatttaggaatttttcagatatgttattgaattc

SEQ ID NO: 200308 - DNA, 1000 bp, Homo Sapiens
cctcccgcctcagcctcccaaagtgctgggattacaggcgtaagccactgcacctggccaaagacattgtcctaagttaaaaaagccaaccacgattccaaatatataaggtacctagagtagtcaaatttacagaggcagaaagtagaatagtggtagccaagggctggaggctgggggaatgggaagttgttgtttaatgggtacagagtttcagttttgcaagatgaaaagagttctcgaagattggtagcacaacagtgtaaatgtgaaaatggcaaattttatgttacatgattttatccaatttaaaaatataaataaataataaaaatttaaaatatcaggtagtaagaaggattatgaagaagataaaacaagtaggtgcacagagcacttggggtggggtgggtagatttatatttggtggtcagagaacacttccctgataagtgacagtcaagcagagatctgaagtctgtgaaggaggaagcacacatctggggaaagagcatttcagcagatgttaaagcaaatgccagtggtaaaaagtggaaccagtttggtgtgttctaggaataggaagagagccagttgtagctcaaacatgataggagaggagagtggtggaataaggtctcagagaggtggtgatggacagatcatgtttcgagttatgcctgagtatgtataaaggcatcctggtatgaataaaatgtaggtattatatttctctgtaattgtagacatagtgtctgtttgtttgaaggcagatgattctgttgacttacctcagacatattttcactctctgtacctctctaagttagatgaacattcgtattggagatagagtctccaagctgtattcagtattattcttcttcccacccccaccttgccatttttctaagggaatagatttccaaaattttcaagttgcagaatgaatgctgtatttatagttcagagctaaaatttaagcttattttaagaattc

SEQ ID NO: 200309 - DNA, 1000 bp, Homo Sapiens
tatagatttggtcgctggaataaacagacaggatgacaaaatgttaagaactggtcgggttggatcaggtgagaagtttcccaaaagctggtgcttaaagacttggttgtcttgccaggtaaagtctcttcttcttggtccacttgagaacagccacatataattctaatcttccttttctgtccataaacacaagaggttttgggaattttccaaggggtataacttctgttttttcttggagaaactgggaataaaaatactccttcctgtgctcacattaaaccttataagaaaggcagttgtattgtaccagcatttcaccacagaatttgggctgcaggctttaggaaaagagtaagatagagcctatggtggaggggatggacaattgctgtggggaggaagtcaaggtcatagccacttaggtcctgctccagaaatggagggagcagtccagaagttcacccttttcttgctacttacactgtttttttctttttttaaaaaaattaaatttaatttaaaattccaggatacacatgcaggtttgttgcataggtaaacatgtaccatggtggtttgctgcacctgtcaacccatcagctaggtactaagacccacatgcattagctatttttcctgatgctctccctcccactcccgataggccccagtgtgtgttgttcccctctctgtgtccatgtgttctcattgttcagctcccatgtacaagtgagaataggcagtcttcggttttctgttcctgtgttagtttgctgaggataatggcttccagctccatccaagtccctgcaaaggacattatctcattctttattatggctgcatagtattccatggtgtatacgtaccacactttctttttccagtctatcattgatgggttgtttccatgtctttgctttacactgatttttctacttcacatctggctgtgtaccaggagacacatgtagaggacagagatgtggaattc

SEQ ID NO: 200310 - DNA, 1000 bp, Homo Sapiens
ttgcataaggcaaaaatgtacaagaagataatgttcctttccacccatctgtagattaaaaacaaacaacaacaacaaaaaagaaagaaaaagagaaggttttagggaaggaatgctagctttcaggaaccaacccatttctaggtttgcagagaggacctgtaagaaattataactatattatttgtattactttattgcagctctaaccttggaattattttatctgacaaattaaaaatccttgccttggctactttaaagaaagcaaagggacataaaaattcttcaaaaatacaaagtattataacattgttgctgtgaccataccattgttggctgaggagggaaggaaagtaaaggagagaaaaatatcatttatgtaagcttactcatgtagcagcctctgtgccagccaactggcattatcaatccacactagatcataataagataggtgctatatctccactttacagatgggaaactaaagtgaggctcagataggtaaagaaattgcctaaagtctcatagctggaatataatagaactgagatcaatactcacattcacacatctgacacggtggcctatgctttttctttaaaagtttgttttctcccctactgtgcaaccccactctactacacacacaagaaaaagatttttcaactcaaaccgtgcaacacaatatcaaagaaatatcaaatatcctaagtcataaaggtgtggcctgggccactttttcagactcctccagactgatagagctgttgctctgacactagggaaattaagaagcttgtcggcttgggtccttgctgttccgcttctgggcatgcagtttggcaaacagtgttatattatttattgacttgtagatgtcatcacagattttttacaggaaggattggtggctgtttcatttaaagagttagaaatttacaaaattcctctctctgggccatgcagatcaaatccaattccgtcaaaggaattc

SEQ ID NO: 200311 - DNA, 1000 bp, Homo Sapiens
tctcctgcctgtgccttccaagtagctggaattacaggcactctccaccagtcaggataatttgtgtatttttttttttttttttttttgagacagagtcttgctctgttgcccaggctggagtgcagtggctatcttgactcattgcaacctccgcctcccaggttcaagtgattctcctgcctcagcctccccagtagctgggactacaggcatgtgccaccatgcccagctaattttttgtattttcagtagaaacagggtttcaccatgttggccagtatggtctcgatcttctgacctcgtgatccacccgccgtggcctcccaaagtgctgggattataggtgtgagccaccgtgcctggcccatttttagtatttttgtatttttagtctcaccgtgttggccaggttggtctcgaacccctgatctcaagtgttccgcctgcctcggcctcccaaagtgctgggattgcaggcatgaactaccgcgcctgcggcataaggttattttaaaacgcacgccatttatttattatggttcctgatttatttactagttttgtcctaagtcaccgaaatgcttactaaaaaaagttaagctgagagcccaccctgtcctaaggagtcagaaaatgaggtgactgatatctgtctgggaacattcccagaaatgctggtctgatggcgagtgtggaattaccttccaggatgtagcagtgagggatggtttgtgtatagagttgggggtggggtggagggttagagccctgatccgaggccctgaggtccccatcaggctgtttatggacttgatctccctttatttaaccactattgcttgcttacaaaggacagactaaggccaggaggggttaagtagctcccccaaggccacacagttaataagggaacaccaggaatcaaactcaaccattaaaaaaaaatttttttttgtagaaatggggtctcactctgcccagatctggtcttgaattc

SEQ ID NO: 200312 - DNA, 1000 bp, Homo Sapiens
acattggtattttatactggtgattaggataatttagcatttgggaggaaggtcctgtgaccttgtatttcatatgaaaatatgcagtattacatttttatgttatgcccttaatgcacagccctaccacaaaagcttcccaaggagaggcaatttcaggctgatgaggaaaggattttatgatgccatttaaagaaagaaggcagtcaaatgcaatcaattagaatgaggtacaaaacagatgagctaatggcaaaagactgatccaaaaaggttggccatggcatctaacatcaccttgtaacctgagttacaaatagaccttttctttcagaattgagatacgggagtgctgtgatcttttcacattgtcctattggggctggtgagaatatgttttattcagttttcatgaaactattaaaatgatccattatatgttcagcacattgtgttgcacataaagacttttttttctattgttctcgtgttccccaaggtcttttactgctagcctatgcttctgaatgtgtgagggatcaaatgagacttccgattatatggcaaatagcatcatcttgaattttgtgaaattatttctggataggattaaatccagtatctgacattatggtttagctcatcgcttcccaacctgtaagctctcttctcaatggccagtggatgctttgggaaataatttaaatctgcggtgaaataattggtccagataattgtgctcagtgtgtggagatgttgatgattgatatcttgatataagctgtgttctttaaaggggactgcttaggagaaggggctggactttttattgctatagccttaactgaaaaaaaatctgatggtagatgtttgacaataaaaagatagatccaatgtgataacttcttaaagaataattttctgtaattttcctggagtcatcttcattactaaaggtcattcccaagctaatggcaaaaactcccagtacactaaataa

SEQ ID NO: 200313 - DNA, 1000 bp, Homo Sapiens
caaaaaatacaaagattagccgggcgttagtggtgcccgcctgtgatcccagctactggggaggctgaggcagaaggatcccttgaaccccagagaaggagattgcagtgaactgagatagcgccactgcactccagccatggcaaaaagaatgaaactccgtctcaaaagaaaaaaaagaagccagggcaggcaactcaggtaccttttggacgtccattaacaaaaattcgagagaactttctggaaacctagagtatatttctgtgggaaaaacacaaaattgagacttgaaatgataagctctgatttgttcatttttttaatcttaaacatttaaagtttcacagcaacagcttatattcagggtatgcaatttataggtagctaatgcatgaaaaatatgattacagttttgtattacccattatttttctcttgtcaaccacaaagaatttcattattatctaatctgtggcccagatgctgcctgtctttgtttcatctataacagcatttcctatcatgtggctacaggataataattgtgattacaaaaagaaaaaagtacaggaactcacaggtgaaacagagctgaacacaacttttacagaactcatcagctcctcactgtaaatctcctagattggcctctcatgtaccttttttttttttccttttttccttgaaacatttgctgctctttttagaaatcacaaacagggtttcaaaagttatttaaaaaaaaaaagcctgaagaaagaatccaaaatttgagaccatacctattctaagaagtggtgaaaaccacatggaaaaatatcaagtagtttgtgtctaatgctttcagaattccctcttgtactttactcacaggagaagttataggaacccctacaggaattacaatgacagggccagacccaggaacagcctgcacactcgagttttgaagttttaactcattctctctccagctgtctcacacttgttgtttgtt

SEQ ID NO: 200314 - DNA, 1000 bp, Homo Sapiens
gacaagctgggccgaccatagtggcccatgccagtaacaccagcactttgagacgccaaggcaggaagatcacttgggcccaggagctcaacaccagcctgggcaacataaggggaccccgtctctacaacaaatttttaaaaagtagccactcaggtggcagacacctgtagtcccagctactcaggaagctgaggcgggaggatcacttgagcccaaaggtcaagactgcagtgagccataattgtgccagttcactccagtctggatgacacactaaaatcctgtcttaaaaaaaaagaaagagagagagagagagagagagaaagattaacaagctaacttaagtagcaaaaatcaaaaataaaaaatgaattattttactggaaagcacaaactgtttatctaatttcctctaattaacatactttttaaaagcgttattaagaaaatttcaatgtcaccttatccattatagttcaatgattctgttatgttaaacaaaatgagtgctcccacaaattgacaaatcactatattttcttctagtaattgttccagatcatttataattatgaagtatatgaaagtactttaaaaaggaaaaggacttagatacatttaagatattagaactgatcatgcagataaaacagttcatagtagcaaataaagaaggaaagaagatgcatataattatcttttttgcatatatagacataaattagattatatagtccctgccaagactagttaaagctgaagcactctgcctggtgcaatggctcatgcctgtaatcccagatacttgggaggctgaggcaagagaattgcttgaggctagtagttcaagaccagcctgggtaacatagcaagaccctatctctaaaaaaaaaaataaattagcttggcatggtgatacatgcctgtagtcccagcaggaactgcagcaggaggatggcttcagaccaagagtttgagactgcactgagctaagatc

SEQ ID NO: 200315 - DNA, 1000 bp, Homo Sapiens
gataaaggggaagattgaattcttcaataatatcaacaccatgcagacaaagaaaggctaaccattcccgattaagggatactagagagaaacaacaaccgaatgcaatacagcattcttagacttgatcctgtgctagaggagaaatggcatctaaagggtgttactgagacaagtgacaaagtaactttgataccacattggatcagtgtgaaatttaatgcagtggataactgtactgtgggaggaaacacactatttaggggtagaggaacatgaggtctgcaacttattctcaactagattggaatcaaagtcatctgtatataccttaaatagagagatggccagtgacagagaaatggggtaaaatgtgaacaccaggtgaatttgggacaaaggctatgcagatgtccattgtactattcttgagacttttctgtaactttgaaattatttccaaataaaaagttaaaccaggaagggcatggtggctcatgcctgtaatccctttggggatttgtaagcactttgggaagcagaggagggtggatcacttgaggtcaagagttcgagaccagtctggccaatatggtgacactctctctctactaaaaatacaaaaattagccaggtgtagtggcaggcacctgtaatccagctacttgagagcctaaggtgggagaatcgcttgaacctcggaggtagaggttgcaatgagccaagatcacaccactgcactccagcctggggacagagtgagtctgtgtctcaaatttaagaaaaaaaaaaaaaaaagttaacctaaagcctccaggctccttactgtggcccaccaggctctgccatcacccccgcccaggccacctggctttatctcagcccaagcccctgcatgctcagctcccactataaggattgcctttcagtttccccaccataccaagctctttcccacccttgggtcttttgtgcctactcttgcttgtctatggaattc

SEQ ID NO: 200316 - DNA, 1000 bp, Homo Sapiens
agacaagtctataaaaatgccttgagcctcagtgtccttggaaagaaaaatagcaactcataacaattaaataacatcatgttcacatagtggctagcaaataaaaaataatccacaaacgttagctgattattgtaaataaacctcttggtaatttcctaaattactacccttaaatctttatttcctaccgaattctaagttttatgtaccagtaacacccctttctcccaattcctcatggaagaatcctattctcatacaacttttaattcatataggaggcttatgaccctgttatagtaactcctgtttgtcctcctgacttccaacaacactttttcctttcaaggtgcttccaaaaagcatctaatggtgatactggcagtacacgttttcattcccaaaacaagtcaaaacaatacctctttagagttcaccttcagaggaatatcatgaaagggggaaatgtagtgaccagttacattctctgcaaagacacaaacaaacaaaacaaaacagaattaaagcaatagacacattgttctatacagcaataataaacatccttatccacttttaaacttacgcattttttacaaagctaactttaactcccaacttaaagttaattcaacttttaaaacttgccaccatctaaggaccgaaaagaaatatataccggctaaaccatatttgggttgctgaaataatttacttatccctgtggcttaaaatatccaaagcagaaaatatctacaatagactaaaacccaaaatacatattaaaaaaaaaaacatcacttttgaaaaagaaactcattactaagtgaattctattaaaactgatgtcaatttcccttggggaaacctaacaatagtattcccaatttctacctactatccatgggaagaaaagtccaaagttcctattcaattaaaagaaaagaaatattgtttccattcaatgtggtaaggatgctaatactaaggtaagctt

SEQ ID NO: 200317 - DNA, 1000 bp, Homo Sapiens
gagtccatgacctcctctctccagtcagctgtgaggttgtttccatagtcccatacctttggttgagagacggagagtagaaggggagtttatggctctgctgcctttgttcatgagaatcaaaagtgtcaggtcagattcgctgattcttggggctcttaatggagtggatgctggttctgaaacatcagctaaacaattttatgattctttgaccctaattcttagtctcaatgtcaataaagtggttcagatgagagggaagagttcaaacataagcaaacaagaagcctacgcatgccattttgcagaagcagatatttcagaaggaaaaggtttagccatttggttatttcttctggtccccccggggtggaggaaaaggatagggtagtttaatgacatggaccaatgaatggctgagaccatcccatctgtatttgttgactaagtgatgtggtgagcaagtggatgctacagatgaggatacatagcattatcctgccctcagagcgctttcaggcaagttagagatgcattcatgaaaataagcataaagaaggaaaagaaaacactttctgcagagtctgttttaggccaagacaggatggagatcgaaatttgtaaactcaaccctttcagccaattgctctttcagggagagtaatgtggcaaagaagagagactgttctcgtttcatttgtaccatttctttggatataaattctgtaggtctgaaagcaaaggtctgcccagaaaggctgtagcccttttggaggactccagccccatgcacacttgcagagtgcccctgcatgcaggcacagtgcagtgagaaccccgggccctcagcattggacagtgggctgatgctcccagctggagcctgtcgtgctaattttgctgtgatttcctttcataggctttggattgggttttacttacatcatcataagctcccacacggggggaaaaaatggcagtaaaacatctctgaggc

SEQ ID NO: 200318 - DNA, 1000 bp, Homo Sapiens
taggcacctagcacagcactctcctggctctgtttttcagtcacagcatgagcagaaaaaagagaagaaggtaatgaaagtgagagaaaatactctcatttagcattatttctaatctctacttctatttttctatttaaagcaagtcatggctgcccaactgatatttctaaaagtccactttgtgtttgactccaatcaggcctcattatcctaggggaagaggagatggaggtgagaggaagaggatggatgaatgtggaaggccttctgcagcttagcatgcaatggtcatttcctgtatgcaaggtcttctgctatgttctgtgcaggaaatcaagaatgagaaacaattttggccctagaggccttacaaatatatcttcctaattacaaggttatagtcctttgggaattgcaagttcccttgaaaattcacacaatcctaacatgtgttgtgcctagtttgatgtgttcttaaactattactagctaacacttcttactgcagaatttctgtggaaatgagacataggtatttctacaggataaatgagacgagtgaaaagaggtgttgaaaaggaaaacgaaaggatgaaacagatacaattcctacttcgctgtttttcaaagtgcttatagtgagtgctctccgtttctcacccgaaggggagaaacttccttggcctttttcttcaagtaaatagattaaatctctcttattgctattgctatttgacctttttcatgaagcatagcaaagagtttttcataatcctaatatatacttatggtttgtgactaatgaaaagaattatttccatcctctaaattaataggcttgcctccctgcccagtaagttgttccttcctatacagcattcagtaaaatatttgctgagtaactaaaatgtccaagacacctatttcagcaatatatgaactagaaacaaaacaataactacaaacatgacttatctcttcaaggaaaggagtcaat

SEQ ID NO: 200319 - DNA, 1000 bp, Homo Sapiens
tctttttcagtcctccattacctccagaactttttgtgcctctgaatctgtgtgtttactctacttcccctccatccctttagggcccttgttctcctggagtaatcttcctcatccttcaaaaatcacttctctaacaccccaaagaagctctcagtcttctaggttagtatttctactttgtaaatagctctactttagcacttatatttgattatatttagtcatttaaatgtggatctttcaccccagattgttcattcttcaaggacaaggggctatgtcttatttatagtaaatgcagggattgggcttagtcttggctttgaatccctgctttactactaacttgttctgtggcttttagaaacatgattaatttctctttaccgcatgcccttcatttataaaatatggcaaatagtatccacttaataaggttacaaattaaaaactaatcaagataatgtatgtaaaacacctgtcatagtgactggttcatagaaactcaacattaatttttttcttcctttctcgcttttgatatagcaaggctcagcacagtgccttatgtatagcagaaactcaataaatttcagtggaacttacaaatgttaaaatttactgagtgcttaccacattccaggcactgttcaaagctctatagatgtatagtaactcatttaatactgtgcctaacagcatggagaaagcactattaatatgcccattttatttatgaggaaaccaagacataaaaaagctaaatacttcctcagggaacatccagcaaataaatggcagaggcaagatttgaatctaggtagataggactctgaagtccatgattctataggttgattctacgtagttacataggatgttgaatcctctgaaaatttcctgttggtgaagacctagcccattcagagagtaccaagagcagggttggcaaatggcttgagcaaatccattcctagtatactactccaaggaattc

SEQ ID NO: 200320 - DNA, 1000 bp, Homo Sapiens
acaatatttaggctagatttgaccctgaagctaccagagtcctgcagtgtagactaaggtaagtgacagcttggaaggtgtttaggaagataaatttatggatccggatcaaacaaaccaactataaaaagacatacttgagaaaaagaggcaaaggtgaatttggataggtattaaataacattaaggaatcactgttgaatgcaataacaatattaagatcatgttaaaaataatctttacccgtttcaaatatctaatagatatctaattatttatacaggcaggcaggcaggcaggcacgcacacacacacacacacacacacacacacacttttcactacagatgaaacaaacaaaaaaagacagagacaaaataatgagcaaagcactatacctaaatacgaagaataaatcagaggaatgagaaaaaaatgacttcaaagttttgaagttcaaagttagaggtctctagtctccttgtatagtgagcgccctctggctatatcaagaaagcaaacactcctctgtactgtttctgcatttaccctagtattttaaaaacatcatcctcaaattctttgtaatacacttaatcataataaaagaggaaataacacaactctccaataattcaaagcacaacagacttgtacctcaatttatcagaaataccaagtgatataaaacacatccatggttgcataatattacaacatctatatttctgaatctctgctgattactgaagtaaccagctgacttcctgaaaccaaataaaaaacaaattcagcactatacactgtctcagtgtatatgttgcaagagggtccatgcacactggaccataggctgaaagtcatagcatgcaaagaatggctgggatattccatttgttacggttaatatgaaatgctacaaccacaataagcataatccacagaaataaatcccaaggatgaaactacccaaaccaaatttctgttcagggaagaattc

SEQ ID NO: 200321 - DNA, 1000 bp, Homo Sapiens
ctggttgggctgctctataagaagctaatcacctaacagtgtctattgctgtggctgatgatttccagagtgttctaagatgttatcaggaaaggcatccaacaaatagtaagagaaggaccatttcatttgtacattatttcttcctgtgattctgttttccaacaccttgcctcttgtttcaccatgaaagatgtacacacttcacaccaaaagggtaaaagctgctgctaggcagatgtggacttcaaatctctccaaggtcagacagtctcttaaaaatgtttaccacaaatgtaagattcagcaccaagattcaactggatatcccactgtgacatctgatgattgtaatcaagatgatgatagttatgacggaaaaatgaatcttccagtagtgctccaagatgttaaaactgctcaagttgaacttttcagccaaatgactgacattgtccatatgataccaaaagtccaggaaaagactgacttgtatcaaaaacagatggaggtcctggaaaccagaatgaatgttaatgaagacaaacaatgcacaacgactaaagatatcctctctatgaaagaagacatcaaggcattaaagaagaaggtgacagaactggaaattcagaattcctgctccacgatacattgtctagagattctggagggagaaaggggtaaagaaatcacagaactgctttacaaactcatacaaccagcaactctgaagaacactttggcctctacagacatggaaatctcttcagcagaaccagagaaagtgcccagttatccaaagtccactgaccatcttgagaaaaaaacaatttctccccaaatgaaaactctgaagaaacgtaaccatcaaaatgcatcaaggagctttgaaaaagcaaagccaaatatttacatttacccagacttcagtacatggatcaagctaacttttgttcatggaggaaaatggacatttttcctcagtgctaccaagttagaa

SEQ ID NO: 200322 - DNA, 1000 bp, Homo Sapiens
aagtattagagttaggtgattattcctcatatgtaattgaaatgtcatatctttagtcttttcacaagttgcttccttaaagtatatcatgttacaattatatgtgatcatgacctcgatagttgttggcacctatgcattttttttttttttttagccagatgtttgttttttctttacatttatcagggacaactggagtgttaccaggtataaccacaggagctgaacatggaaatttaagtgacttcagaacagatgagacaaataaatgagtcaaatactatctcttccatagccgatttctactaggaatcctctgtttcaacttggcaacaactttaccctgagtacaacattatataacagggccaaatgtcagagctattgaagtcagctaaatgaccatggagaaaaattcaatgattaatatttaataaaatactaatgatatgtttctgtggcacaggaagatttctgaattgtcttcaaatatgtagtatgtaatttaatcaacaattacaccacggtagttatctgttgttattcgcagtaggtgagaaaataataaaaggtctccaagctggaagaggcaggtttagaacacagaatcctgtctggtgtggaatagctagctccacagctctgtgtgtgtataaaaacctagatccaacaaaagccaatgaggatatgcttgccgtacacatcattgactgaattttaactactgttggtttcatgaataaaatattattggtttccttaagcagaggtaatttggatagaaaacaaaaaagccacaattcacccctgtccaccatgcaatcagctactaattttaagtatctcttaagtttcttctctgcatcaatttgcctctgcttttgttcagatgttaaacattttcaacctagcctccaccttgctcaccttcctccaaacacaatggtgtttaaagtgtggtttctggaccagcagcatcagcatcttctgggaattc

SEQ ID NO: 200323 - DNA, 1000 bp, Homo Sapiens
tgggggaaactgattgttggtaacacacattttggtggtcagagatgaagtgttgtagtaaatgtgtaagtagaaagtagtaaacagtttgtttttttctgtcttcaggaagataaaaaacaaaaagggaggataattttatcagatctatatctatgaaaattctgaaagagcattatatgataacaagtgaagaaactaggtatataaaatattggaaaaatataatatattggaaaaatataataatatgtatcgttcaattagatagacaaatcactcccctagtatccttaataaaagccaaattattaatagttctcaacatgcttcatttatcctaaatcttttaactgctatttgaatttaccaattcttattttataacaggctagattgtcttgtgctatgtacatcgttaacatctcttgaagcagcaaaaaatgataaaataaaactatgatttgtagcaatgtagaaatcttgccctttccacaaagtcacataagacccatattaaaatagaagttatactggtgatactttggggtttagagaattcatctttataatactactcaaaggaagtaatttagtatcttaggaggcaaccttttcttgatgtttgaacttttaaacatacagagaaaattgtatgcatgtatttatacacttccgtatactcaaaattaccccccaaaatctaaactgtcatgattttttcctagttctgtttataagcttttttgtctcatcttaaagcaaatggctctgtaaatatgtagttaaattcagatatgtctttttaaattgtttacatagaaatgtaaagatctagataaagtattcaagttgccaatctgtattttaaaacaaaatttttcaaaaaaaaaaaaaaacttcctcaaaggaaataacaacagcatctacaaaattggttaacaggaggatatagttgtgtaagtctttgctgacactgatctaaatccttcaagaattc

SEQ ID NO: 200324 - DNA, 1000 bp, Homo Sapiens
agcatttaggccatttacattcaccttagtattgagatgtgaggtactattctgttcattgtgcaatttgttgcctgaatatcttctgctttttttcatcatgtcattattatataggtcctgtcagaattgtgccttaaggaaattatattttggtgtattttgaggatttgttagagctccttttagcagttctggtagtgctggcttggtagtggtgaattctctcagcacttgcttgtctgaaaaagactgtatctttccctcatttatgaagcttagtttcaccggagacagaattattggctgataattattttgtttaaagaggctaaagataagaccccaatccctcctagcttgtagggtttctgctaagagatctgctgttaatctgatagattttcctttgtaggttacctgatgcttttgcctcacagctcttaaggttcttttctttgtcttaactttagataatctgatgactatgttctgaggcggtaattttttttgtgatgaattccccaggtgttctttgagtgtcttggatttggatctctaaatctctagcaaggccggggatgttttcctcaattattccctcagatatgttttccaaacttttagatttctcttcttccttgggaacaccaattattgttagatttggtaatttaatgtaatcccttcttgtcagggattacaaactcttggaggctttgtacattttaaaaaattattttttctttgtctttgttggattgggttaatttgaaagccttctacttgtttgattctattgctgagactttccagtgcattttgcatttctctaagtgtgtccttcatcttcagaagttgtgattgttttttatttatgctgtctatttcactggagacttttccattcatatcctgcattttttttttatttctttaagtcagacttcacctttctctggtgcctcctttattagcttaataatcgaccttgtgaatt

SEQ ID NO: 200325 - DNA, 1000 bp, Homo Sapiens
tttcaggaacatgaagataatgggtgaggcagctgctgaggaccaaaattactttaaacaatgacccctgaacatggggagaatgtgactgaagtacctactcttgtctctctggacctgatacattttgaatacctcacatagctcagaacactctgagctattttccttttctcacttctgttgaaaggaaaagggacaataagctaaataaaaacagaaacaaaaattccagttaaatacagcttataaaaataattgaacaaagtaataaattatgccagtaaaaaagacatatctggccgggcgcagtggctcacgcctataatcccagcactttgggaggccgaggagggcagatcacgaggtcaagagatcgagaccatcctggccaacatggtaaaatcccgtctctattaaaaatacaaaaattagctgggtgtggtggtgtgcacctgtagtcccagctacttgggaggctgaggcaagagaatcacttgaactagggaggcggaggttgcagtgagctgagaccgtgccactgcactccagcctgacaaaagatggagactccatcttaaaaagaaaaaaaaaaaaaagaaaacatatctcactgtgagttatggtccaaaaaattaatagccactattttaggtagttggatgatttcaacctgagtgttatgtacttagttggttgattcacttattctttcatttattcaacaaatatttattaaaatccttaatgtttttcaagtactggggaaaatgtgtgcattacaaagaaaataagaaaaacaattcctgatttcatggtgtctacattctaatggagtagataagtaataaactatttagtaagccaaaaataacttcctgctataataagagttctgcgggaaagagacggggtgcttgctatagaataacaggaggtgacataatgtagaaggtgtgatcagggaaggttactgagaaagtgacatttagttgaattc

SEQ ID NO: 200326 - DNA, 1000 bp, Homo Sapiens
gtgagaacatgcagtgtttggttttctgttcatgtgttagtttggagggattttctaattccacaaattagatttgagaatatttatatagtcccaaaaaaactaaattatagtccaatttagttttcagctctgagactttccttgccttgattctataggcccaatttccctacctcagagtcaatctgaagattacctaggttgatagacatgacgtgatcagaaagtcatgttcaaatactgtgtggatgttcaagtgcagtataataatgtcggtgtttccccccagaccattacctctttgataagatacgtccccactcttgccctcaagccactggtcagtaaaaaaggaagcttttttggttcacgttaaaatacatcaaatccctgaggagatgattgtgagattacagaagatttaaaaggcattatttctataagagaggggtgcgtttgtgtgtgtgtgtgtgtgtgtttgtgtgtgtgtgtgtatgtgtgcccatccccatggaggaggaagagccagatgggtgagatgggaagtctaacttacatgtaatcatttcatttcagaaccaaatgatttttatcattgtcagcttctgcttttgcttctactcctaagtcacccacaggcagcagaaactaatgcaatgtgtctgcagctattttgtgactttgtttcattcttggagatttaaaagtgtatatagttttgagtgtgctatgataccaaatttaatttctggcctttcttgtccttttgtcttcagtttattccaatgccagtactctacggagttttcctttacatgggagtttcttcactacagggaattcaggtattgtatggttcagccagggcagtttcttctcactgcaagtttgcatgtcctgtccagggagggacagctccccaagagaagcacaaccagttcttgagaaaattgtttcctagtcttgccacttaggctattttagacatgtatttgga

SEQ ID NO: 200327 - DNA, 1000 bp, Homo Sapiens
cggagtctcgctctgtcacccaggctggagtgcagtggcacaatctcagctcactgcaacctctgcctcccaggttcaagagattctcctgcctcagcctcccaagtagctgggactacaggcacctggcattttttttgtattttttagtagagacggggtttcactgtgttagccaggatggtctcgatctcctaacctcgtgatctgcccgcctcagcctcccaaagtgctgggattacaggcgtgagccactacacctggactctcttaacaaatttttaagaaaataatacattattgaaattgtacaatgttgcacagcagatctctagagcttatttaccttgcttcactgaaactttatgcccattaattagtaacttccgatttcctccttcccccagcccttggaaactaccatttcactcattgattctatgaatttgattattttagatatctcataaaagtggaaccatgcagtatttatcttcctgtgactagcttatttcacttagcatgatgtcctcaaggttcatccatgttgtctcatattgcagaaattcttctttttaaaggctgaatagtattctattgtatgtatttgcccacttcatccattcatctgtcaatgaacattgagtttatttccacattttggttattatgaatagtgctgcaatgaaaataggagtactaatatctctttaagatcttggttccaattcttttggacaaagacctagaagggagattgctggataaatggtagttctactttaagttttttgaggaacatccagactattgtttattttgcttttgttgcctgtgcatttggtgtcatatccataatatcactgccaagaccaaagtcatgaagcttttaaccgttttcttctaggagttttactattttgagtctgatgtttctaatctatttttatttttatttttttaagagactgggtctttctatgttgcccaggctggtctt

SEQ ID NO: 200328 - DNA, 1000 bp, Homo Sapiens
ttgttctccacatgggaccccttccttgttgcttacttatctatcaagactccatagtttttctctctattgagataatcacatgatttttatccttcattctttttatgtggtgtatcatatttattgagtttcatatgtcagactgttcttacatatcaggaataaatcccactttatcacggtgtgtgattcttttaataggctgttgaatttgatttgccagtattttaatgaagatttttgcagatatcttcatcaggaatcttgatttgtaattttttttttccttcctgcctgatttgggtatcaaggtaaagttggcctcatagaatgagtctggaagtctttcttcctcctcatatttttgaaagagttggtgaaaatttggcattaattattctttaagtgtttggtagcattcactcttgaagccatcttattctgggcttttgtttttgtggaaatttttgattgctgattcaatgtccccattcatattttttctgttcagattttctatttcttcatggtagacaaacagtagtacacatgctcatttcaatgtataatgtgattagtctgtgggagtaaagcaataaaggaaactctccatgtgaattggagaagtctacaatgagaactgggcaatttcataatctgtaaggtggacatattgaactacatattcttcatggtttctttcagatctgaagtttggtgagtttttttctttttaaaatttgtttctgagtggccactacatgttatagaaaccatcatcttgtcacacagcacagtctatgaataaaaggctgagttatcactaagcaggagaaaaagcattaaaaagtgtcccattaaaagggacttttaatcaacctaataaactctaattctgctgactttttaaagatctaaggtcattttaatacatgctgaaaagggtcacaattaattctttgatcttttttactcactgttaacttatataaattca

SEQ ID NO: 200329 - DNA, 1000 bp, Homo Sapiens
tagtattgagttctttgacccataaaacagcacatctctccttttatttctttaatttctttcagtagtattttgtagtttgcagtacacaggtatttatcccaaagtagttcatagttttgaggttattgttagtagtattgtttgttaaatttcagtttctaattattcatcatgagtatatagaaatacagttgattatcatatattaatcttgtatcatgcaaccttactatcatcatttattagttccagtagcttttttgtagattccattgaatttccatgtagacagttttgtcatctgtgaataaagacagttttacttctttctttcctgtctggaattgaaaaaaaaattttagttttttggttttttgtttttgtttttgttttttcattattgcactggctagaacctgtaggacaaggttaaacagaaatggtgagagcagatgactttggtatagttttctccatgtttcttaaacttggtttttgttgagcttctcaaatctgcttataactcaatcaaatttggaaatattttggccattagttcttcattttttttttttgttttgtttccctttctctctcctctccttcaaggactcaaggaaacatatatcaggccttttgatatggtgccacagtcctttaatgctttttcacttacttattattattattttgattttattttcaggaatttatgcttctctgtcttcaagttcatgaatattttcttctgcaatgcctagtctttttaaaattctatttagtgaatttttaaaaaatccttcccttattggggcaacacccttctgagagtaagctacccaatgcctcgggtttataatgttttctgatatggctcatagaaacaggaagtatttctgcttctgtgacagggcttggcactgtttcctctagccttctaatgtttattcctctggtcttgggtagtttgatcattgagtattattctgctgaattc

SEQ ID NO: 200330 - DNA, 1000 bp, Homo Sapiens
cccaatgaatgacaatctccatttacatttttaatgtccactcctttaggcaggtctagggctggagcaacttatttgcatatagataggagacaggaccctggctcctacagactacattgggaccctcagagaccttcctgagccagagtccctttacctcactcgcttacaaaaggggaggggtctcctaccccagagcctgaagtaggaaggactcaggggctgaaaaaagctggggccaaactcattctgttttaaagacagccttgaagatgcattcaccaacagccatccctgcctagtgcctgcgactcctgccagtgagaggtggcctctaggcagctcctctaggttaattctgtcatccttgaccttgaggagccctttctttcacaccactcactgggtcctctatatctattcccaaggagctcaggtaatgccctatatttcctgttcttatctgcaaaaaaacccctccactttggatttaaatatttatattcctccccaaatgttttgggcaatttgtagttgccctttttaaggaattaacccatcaagacaccaccatcctgtcaccctccccatggtgactttccacatccatctcccttatgcaggccatgttgattgaacaatgatagcacctgtcttgcagtggttattaagccacagggtagataatactttgtcccctttttacagatgaggtcctgaggttcagagagaatagtggccaggaactggcagagatcagattagaacccaggttgatccagctacaaatcctttgtgtgcctccccaacaagactggaggtcagaagctgtcttttattctacaccaattccaactcggagcctgcatgtagaacatgctcatcccttgttgatgtaggtacgcagatcatgttttctcacttgggatttgccatgtaggccctccccctgctttttacctttggttcatcaactgtcaaaggtaaagggaccccc

SEQ ID NO: 200331 - DNA, 1000 bp, Homo Sapiens
ggcacaggttgaactttttgagaagctacttattatttccctaataactaatgctgttgagcatcttctcatgtgcttatttgtcctctgtatatctactttgttgaaatgtctgttcagatcttttgccttttttttttctttgagacagggtctctgtctgtcacccaggttggagtgtggtggcacgatcttggctcactgcaacctccccttcctgggctcaagcagtcctcccaccttagcctcctgagtagctggggccacaggtgcatgccaccatacccggctaattttttctattttttgtacagacagggttttgccatgttgcccaggctggtctcaaactcctggactcaagcaatctgcccacctcatcctcccaaagtgttgggattacaggtgtgagccacagcacactgttctatttttttaattgagttattttgtgatttttagatataagttctttataacatatgtgatttgcaagtattatttgttccaatgtgtggcttatcttttgattttcttatacacatctttcaaagagcagaagtaaaatagctccccctcatccaggaggaatacatttcaagactcccagtggatatctggaatggtggatagtactgaaccttacatactatgtttttttcctatatataatacctacgatcaagtttaatttataaattaggcatagtaagagattaacaataataaatcagaacaattataataaaatgcttctataagttatgtgaatgtggtctctctctatctcaaacatcttactgtacgtaacaattttggaccatggtattcactgcgggtaatgaaaccacagatagtgaactacagataagaggagactaccatacttaatttttatgaagtttaattttttttcttcttttatggctcaaattttggttatacagctaacaaatctttgcctaacccaaagtcacaaagattttcttccgtgttatct

SEQ ID NO: 200332 - DNA, 1000 bp, Homo Sapiens
tatcagtatgtatccttcgtttattgatatatgttgcaaatatcttctccctttctatgcttgtccttttttaaaatatatatatatttctaaaatactttattaacacgtatgtaaggaaaacatgttaccaatgctagaagacatcctccttaattaagttggcgagaggtaccacattctccacaggctggatggcgccagtggattttggcagatttcactggagaaagaaaatgccaggctgacaacctttatattccttatggaagacgttgttttgtaaaattcccatttgggacaatatccatctctgagatctttcaaaggaagctcacaaagtatcccagaggataactgacacggagctaaacatgacatgggagtgaaaacagttatctgttttcctagtgagcatgatacaggaaaattagcgtttgggacaaagatgacatttctaaatgattggatcaatcagtgcaacattaaaccaaatttagaacagataaaaactaaacaggcaagatgaaatgcacagaaggcaccaagtacacattcttcatagataaaaacctcgaacacttatgaaaatctttatcagttcttaaacatattgctaggagcataaacatattgctctgtgtatcagagaaggtcactatttcatcataattgtttcataaacgtaggaccagttcttgttttccagtaacaacaacaacaataataggaataatagcagccaatattcattgaatgattactacacaccaggcatttctctgagaactctgtaaattgtctctacctatctgtgtataggcttgtcctttcactctcctaatagtatcttttgataaacagaagttcttaactttaatattatccaattatgcaatctttctttatggctagtgttttttttttttctatttctttctttagttacatacaaagttgcaaagatattcttctagattgccttccaaaacatatggtt

SEQ ID NO: 200333 - DNA, 1000 bp, Homo Sapiens
catggcgaaaccctgtctctactaaaaatataaaaattagacgggcgtgatggcagaggcctgtaatcccagctactcaggaggctgaggcaggagaattgcttgaacctgggaggtggaggttgcagtgagcagagattgtgccagtgcactccagcctgggagacaagaacaaaactccatctcagaaaaaaaaaaaaagaaagaaagaaactagacccatatacaaaaatcaaatcaaagttaattaaagacaatataagatgtgaaactactagaagaaaacattggggaaatgctttgggacattgctctgggcaaaaaattttgtggaagatctcaaaaacacaggaaacaaaagcaaaaatagaccagtgagattacattaagcgaaaaagcttctccacagcaaaggaaactcaacaaagtgaagagacaacccacagaatgggagaaaaatatttgtaaactatctgtctgacaagggattaataaccatattattataagaagctcagataactgaacagcaaaaaaaaaaatctgattttaaaagggcaaatgatctgaatggacatttctcaaaagcagacatacaaatggccaacaagtataagaaaaaatgctcaacatcactaatcttcatagaaatgcaaatcaaaaccatgagatatcatctcaccacagctagaatggcttttaccaaaagatagggaataaggaatgcaggtgaggatgtaaagaaacgtacactgttgatgtacatttcatacattgttggtgggaatgtaaattagtacagccactatggagaacagtatggaggttcctcaaaaaactaaaaatagaaataccatatgattcagcaatttcactactctgtgtatatacaaaagaaaggaaatcaatatatcaaagagacatctgcactcccacatttactgcagtactattcacaatagcccaaatttggaatcaggctaagtgcccatcaatagat

SEQ ID NO: 200334 - DNA, 1000 bp, Homo Sapiens
tcaagaaataaaataggataaagctgagcttgcctgaaagaaaaattcatgctttagatgtataaaaatcatcacaatatttcagttagtgtctcagtgttactctaataacctaaaagtaaatttccctaagaactcttttatgcaatatatgacaggctacatactcacaaaacttttgcttatggctgaaaatcagaatgacatgaaataaatactgtttccatttagcaaaactgcctttatttccatctattagctccaaaaatacatcatgcattctccagtatttgcaatatttttcttgctgaacaatgaacaaccgagtaacacttattgcctcagttgaatggtttcagctccagtagcgtaggaggctctcaagagaggaggcacctcaagacgcctagcagagaaaattagaggagtactgtgtaccttaggaagattgacttctgagttccagaattgtaaaaattaaattcatatttctaatataaaacatgcttcataaaaagatattacagaaagaaagaaaagaaaatggaaacatagtcttactattttggcataaccaatattaacattttccttatacctaccattatattcttaaattaaaattattctgattttatgtaatattatattatgataatatttatatcgctaaatatctatctaatgtgttctttttaagattacataatcttctattgtatttcattataccataattcattgattcattttcctattattggatattttttcctctggtctaaaacatttcaaaatgaacattcttttttttaagatggagtctcgctctttcgcccaggctggagtgccgtggtgccatcgcggctcactgcagcctccatctcccaggttcaaacaattctcctgcctcagcctcccaagtagctgggattacagatgtgtgctaccaagcccagaaatttttgtatttttagtagagatggggtttcgccatgtt

SEQ ID NO: 200335 - DNA, 1000 bp, Homo Sapiens
aggattttcctggagaaggaaaaatttaaataacaaaatgtaaaatggctactgatgtgaaggaaattaacaattaaaataaggtgataatgtaaagtgactttaagagaatgcacaatgaaaaggaattcctcaaagaggactgaaagcattgatggtcagaaaaagatcacgtgctttaaaaagaagaaagagaaaatcagtatagtcaccacatgtacagaagaaggaagaagtcatatcatcctttaaatagatacacacatcctttgataaaatttatcattcacagtctgaccaacatggtgaaaccctgtctctaccaaaaatacaaaaattagactggtgtggtggcatgtgcctgtaatctcagctactcaggaggatgaggcaggaaaatcgcttgaacccgggaggaggagattgcagtgagccaagatgacgccattgcactccagcctgggcaacaagagtgacactctgtctcaaaataaataaaataaaataaaatcactttctaaataccaagaacagtcagaaaatggaatttttaaaaggataccatttgcaatggtaccataatctgtcaagtacctctaaataaaactaaccaaatgtagacccatcaaggcatagattctttctttcagaaaattggagagcatcctggattttccttgcctctacttcagcttgacgtcctatcttggatattgagaatattttttttcttgctctccctgaaaaaatatccctccaccctcttcacaaagtgccctgtttaaagcctgcttaagtgcttgcctgtactgccccaaagagagccttatattcttagtcaagtgaatgcgtgccttgttggaggacgtgagcaggaaaattcactgctcctcaaggcttcactaatcaagaccacctatgtcatttccgcagcccctgaatgcatgattgggatggacacacagacactccctaacataccattgttcgcttggaattc

SEQ ID NO: 200336 - DNA, 1000 bp, Homo Sapiens
atctcctggtgcaatgtgtcaggcattttttcttacttgtgggataaatccatgcacaaaaaaagacaaaaattctgttcttgtgaagcttactttctagtgagtaatgtaagcttatgtattgaaattcagatgctctagccccatgctttagacaagattcctgcagtcttccctgtccctttattgtccagatccagtttgattgtagacttcccagccccgagagctatgagaaataagtttctgttgctcataagccacctagtttatggtattttattatagcagctaaaacagtctaagacactttaattctcagcaattgttcgacaggcagagcttcatggattgtaaagatcaaagatccactcaagatagctcaagtaaaggtgaacacaaagacaaccgctaaaaacccagaatgtaacatgtatttgtagtataagttttcatcttatactccccttatttcacatcctgtcgtcttgttttattcatattagaattgccaatttttcttgcaataaattgaaaaccactcaagcctttacttaggaattaggttacatctttgctttttgttgttataattccagaactgccatttttttcccaggagaaaaatggtatggatggtcatattctataccatgtaaccctatcctaactggctacagcagattgaactgaaacaggatacttaatctaagggtagacagtccatgattgatctatggcatgttttctgtgagtctaacggtggcttcctattgttaaatataccgataggcagtcctccagagcagcaagctcagacttctctgatgattaaaaataaaacatacaaggggctgatcaaagaacggatacgcaggcttctgtcttggaatttattcaggtatttgaagaggcctgtgaatctgtttgtttaacaaggccccagatgtgtcttatcatcagggaagtttggtaaacaggtggcttttttataaaggca

SEQ ID NO: 200337 - DNA, 1000 bp, Homo Sapiens
aacacaaggggtgggggtatttccctttcctacccaagggaagccatgacagactacctggaaaaatgggacactccccgcccaaatactgcacttttcccaaggtcttagaaaccagcagacaaggtgattctctcccatgcctggctgggtgggttccacacccatggagccttgctcactgctagcgcagcagtgtgagatcgatgtgcaaggtgccagactggctgggggaggggcgttttccattggtgaggcttaagtaggtaaataaaggggccaagaagcttgaactgggcggagcccactgcagttcaacaaggcctactgcctctagactccacctctgtgggcagggcatacctgaacaaaaggcagcagacaggctgggcgcggtggctcatgcctgtaatcccagcgtgatgggaggctgagtcaggcagatcatgaggttaggagatcgagaccatcctgcctaacagggtgaaaccttgtctgtactaaaaatacaaaaaaatacaaaaaaaaaaaaaaaatacaggcaagtgcctgtagtcccagctactccagaggctgagaggcaggagaatggcgtgaacccgggaggcggagcttgcagtgagccgagatcctgccactgcactccagcctgggcaacagagcaagactccatctcaaaaaaaaaaaaaaaaaggcagcagacaacttctgcagacttaaacgtccctgtctgacagctctgaagagagcagtggttctcccagcatggcgtttgagctctgagaatggacagactgcctcctcaagtgggtccctgacccctgtgtagcctaattgggagacacctcccagtaggggccgacagacacctcatataggcagctgcccctctgggatgaagcttccagaggaaggatcaggcagcaatatttgctgttctgcagcctctgctggtgatacccaggtaaagagggtctggagtggaactccagcaaactcc

SEQ ID NO: 200338 - DNA, 1000 bp, Homo Sapiens
ttttgattgggaaaatctatttcctcttcatgtttgatggatattttctccagattactattctggtataaagtttttttttttttccttcagcactttaaatatgtcatgccaatctcacctggcatgagattataagggttccactgaaaagcctgctgccagatgaattggagctccattgcatgttatttgtttcttttctcttgctacttttaggatcctttctttattcttgactttcaggagtgtaattattaaatgccttgagacagtcttctttgcattaaatctgtttgatgttctgtaaccttcttgttcttgaataatgatgtctttctctaggttggggatgttctgtgctgttatccctttgaataaactttctacacctgtgtctctgtttaccttatctttaaggccaataactcttagagaagcccttttgaggctgttttctaaataatctcgtaggcatcattctttttttttttttttttttttggagtcagagtcttgctctgctgcccaggctggagtgcagtggcatgatctcagcttgctgcaacctctgcctcctgggttcaaggaattctcatgcttcagcctcccaaatagctgggactgcaggcaagcgccaccatgcctggctaatttttgtatttttattagagaccaggttttgccatgttgcccaggctggtcttgaactccagagctcaggcaatctgcctgccttggcctcccaaagtgctaggattacaggtatgagcccctgtgcccagcctctttttcttttttgtttcctttgactgtgtgttttcaaatagcctgtcttcaagctcactaattctttcttttgcttgatcaagtctgcttttaagatactctgatccattcttcattatgtcaattgcatttttcagctccagaatttccttttgcttcttcttaattatttccattttgttgttaaattcatctgaaagattctgaattc

SEQ ID NO: 200339 - DNA, 1000 bp, Homo Sapiens
tgggtaaacatgatgtggcatttagaatagtctctggcacatagtaaaaactcaataaatgctagttattaacattatcagggacatattgtcaattccagtccaaatcccaaattggcctcttgcctgaaattcttttaagttcagaaggatctgtatctgtggatgtgtttatttattttgttctttgttccagcagagtttaagaagacatctgtcaataatagagaactgaagcttacctgaagataataaatgataacatttgaattttgtttcatctttggagtttaagattcagcttcatagtggcaggataatcagcagacactcatacataatagtatggcctttaaaataccccatcaatatttatcaacttatacgcctatgtaataatactgatccctacaatagcactccattcctttagttctagtttacaagataaaagaaataaggcatgagcaattagaacatgtcaatagaaagcttagcattaaagacagaaccagaattaaatattcctaaggtgtttgtctcctatttatttatcagaccacactggccttataagtgtttgtgtatgtgtgtgtgttaaataacatactcattaacaaaaagagttctgcaattgaattaattttatctttcaaccttagaattttagactctttatgactcccaaatgctataaaaaacacctatattcaatattcttaatctttctcttgcttggcaagttattaatataatatcaatgacaggaaaaaaatacaaaatctctaagtttcctctcaaaagataaaaattaaagagcaaaatctgtgagttctaaattgtgtattctctctaacactttgccctgtatattttagaattatttttgttagtttgagacaatttttgatagtttatttagaatatttatatagtgtaagaaaaatccatttctgttaaggcatacacacacacaaaccctaatatattcaaaagaatt

SEQ ID NO: 200340 - DNA, 1000 bp, Homo Sapiens
cctatactgtcattatgggaaggtaatggctttaggtgggcatcatcaaagagatgaaggtagggagctattaatgaaatagagtgatcacaggtcattatgtatgaaagcaatagtacctaactgacatagatgctacaatattcaaagagagataaaccaaattctagacaacaaactgtaatggctaacaacttactgcttcagttgtttttagagtttaatgctgctctgacattaggtagaatgaattcttagatttttttatttcacaaaccattaccatttcaaaaatgtattttggaaacaaacacagagttgctatttgccacagacagacattaaacaaaacataaaccacaaaaaaactgccattccattacagaagaaaggacatttaaaaggccctcaccaggccggacgtggtggctcaagcctgtaatcccagcactttgggaggccgaggcttgcagatcacgaggtcaagagatcgagaccagcctgcccaatatggtgaaaccctgtctctacaaaaaataacaaaaattagccaggcgtagtgacatgcgccggtagtctcagctactcgggaggctgaggcaggagaattgcctgaacccaggaggcggaggttgcagtgagccgagatcgcgccactgcactccagcctgggcaacagagcgagactccgtctcaaaagaaaaagaaaaaagaaaaaaaaaaaaaggccctcaccaaaataaaagggtcggttcttctcaataaagagaaactttttaacctgacatagcagcacacgcatagatacatacataagtgtaaatgcgcaagtacacaaatgacgtcctcattttccctaactgtgaaaaagtttacagactgttatcaatttgcaagttttcaggttaaataaagaaaagcaatcaaatattattgttgatatgagctagagtttattatcttcttctaaagaactcttgtttagaacatatgagaattc

SEQ ID NO: 200341 - DNA, 1000 bp, Homo Sapiens
tcccaagcctgtctcattctgaagcactggtggcctttgtcctgcttctgtttcctttaccaaattatgcaactgttttttcctctactaatactaaaatgtcagtgtctcaccgcactttgggaggctgaggcgggcagattgcctgagctcaggagtttgagaccagcctgggcaacatggtaaaaccctctctctacaaaaaatacaaagaaattaaccaggcatggtggcacatgcctgtagtcccagctacttggggggctgagatgggagaatttcttgagcaggaggttgaggctatggtgaaccgagatggcgccactgcactccagcctgggcaacagagcaaaaacctgtctccaaaaaaaggaaatgtcaatgtcaaaattatatttatgtattaaaccaaagacagtattcatatgtaagaagaatagagttttcctctttttttttttttttttttttgagatagagtctccctgtgttgcccaggctgcaatgcagtgatgcgatctcagctcacagcagcctcgacttcccgagctcaggtgattctaccacctcagcctccgcactccagtagctgggactacaggtgtgtaccaccgtgcccagctaactttttgtatttttagtaaagatggagtttcaccctgttgcccacaaacgcctgggctcaagcgatcagccggcctcggtctcccaaagtcctgggattacagacatgagccattgtgcctgaccgttttgttttgttttgtttttgtttgtttgtttaacagacgggatctcactctgtcaccaagaccagagtcggagtgcagtggtatgatcatggcttactgcagccttgaactcctaggctcaagtgatcctcccacttcagcttcctaagtagctgggactacaggtgtataccatcacaaccagctaatttttaaaaaattttaaacagtctgggtcttgctatgtcatccagtcttgtctggaattc

SEQ ID NO: 200342 - DNA, 1000 bp, Homo Sapiens
ctcccaggttcaagcaattctcctgcctcagcctcctgagtagctgggattacagacatgcaccaccacgcccggctaattttgtatttttagtagagacggggtttctccatgttgaggctggtcttgaactcctgacctcaggtgatccgccagcctcggcctcccaaagtgctgggattacaggtgtgagccaccgtgcctggcttttttttttttttttttttggagatggagtctcgccctgtcgccaggctggagtgcagtggtgcgatcttggctcactgcaacccctgcctcccaggtccaagagattctcctgcctcagcctcccaagtagctgggaatacagacacacaccaccacacccggctaagttttgtacttttagtagagacggggtttcaccatgttggtcagactggtctcaaacgcctgacttcatgatccgcccacctcgtctttccaaaagtgctgggactacaggcatgagccactgcgcctggccagtgtagcactttttaaaaaattattggccaggcactttttaaaaaattattggctgggtgcagtggctcacacctgtaatcccagcactttgggaggccaagatgggcaaatcacgaggtcgggagttcgagaccagcctgaccaacatggtgaaaccctgtctctactaacaatacaaaatttagccaggctggtggcacgtgcctgtagtcccagctactcaggaggctgagacaggagaatcgcttggacctgggaggcagaggttgcagtgagccaagatcgcaccactgcactccagcctggcgacagagcaagactctgcctcaaaaaaaaaaaaaaaattatttgctgccattttgcagggaaaataatgtttaaaaggatcaagcaacccttttgatcagagaaggcaaagaaaaaggtattaacttgtgagataacacccactgattgacagtcactcttggaaatgcagaactgagaattc

SEQ ID NO: 200343 - DNA, 1000 bp, Homo Sapiens
ttgtaagatgaaagattatatagggaaaaaaattgattatgtttttccagaatattttgttattccctaaaatattctggagataagcttttcttttttatatgatttggaaaggaaatattctctaacatttatttcacctattgactgtctgagaatgcaataatttctgtattgaaccacagcatataacatagaagataaaatctggtctagattttcaccaaattaggatccatttattatttctttatttttgtcaacttctttcctataatttttcctgattccttagcatgctttctctgtattgtgtcagaaacaaatacaatatttgttgttggagatctcagaaataacaggaacagcagtcatagtatatactcctcacctccaagaggaagagaatccttcctcagttcagctcttcctggtgcttttcatacctcttttctttcttcctcctcctgctcttacatacacactcttaggtcaaggccatggacattttccctggaccatagtacaaagagcgtatggatggcttccctttctctcaattctgttttctaacaccgaagactagattgtactagatcctgcctctgcttgggagaagttccagcatgtgtgttcttattgtctttctttccctccttgtctctttccctaattctactctttgggttctattctaataggagaaaaagcgggagggcagcattcctagagatgtaagaaaggtcggggctgtgaaactaggcattgggtcaaacgctccctcttttgttctaggtctgtgttgtgcttgtttgcttctcaccatactggcttttctttttcatcagaatgttaagattcttctatatatgggcctgaacttagaaggaaagattgaataagccgtttgatcaactttaattgtttgcatctaggccatctttcacttcccttctatttcaaacatgcaatgactaaagatttattagatacaagaatt

SEQ ID NO: 200344 - DNA, 1000 bp, Homo Sapiens
gcctcctgcttaatttaacacctctattaaagttgtatagactgctcgttctccagttattttattattattattttttttttttttgagatggagtctcgctctgttacccaggctggagtgcactggcgtgatctcagctcactgcaacttccgcctcctgggttcaagcaattctccctgcctcagcctcccaagtagctgggattacagacacccaccaccgtgacccgctaattttttgtattttttagtagggaagggttttcaccatattggccaggctggtcttgaactcctgaactctggtgatctgcccacctgggcatcccaaagtgctggggttacaggcataagccactgcccccagcccttctcctgttatttgaacagcacacttcctctttgtattcacctttctatacaaagtctcccaatttgtccttccttgaagatcatacttaaaatatcatctacacatttgctacaatactattaccttaattttctttatttttctttatagcactatgttgttgagacaatgttggatgctcaccaaacctatttcttattccctctaggtatgaaaatcatatttccctgactttcttgcacttactgagtcactgaattctggccaataaaataggcaggttggatgcaggactggattctagaatctaatagtttctatacaatccttcagattcccattctttttcttgtctaacatgcaagtaagtagcctatgggaatagaggaacaacaaaataataataatttaaaaagggtaagatcttatgggagagacccagtgggaggcaattgaatcatgggggccaatcttccctgtactgttctcatgatagtgaataagtctcatgagatctgatatttttaaaaacaggagttcccctgcacaagctctctctgtttgcctgctgccatccatgttagattagacttgctcttccttgccttctgccatgattgtgag

SEQ ID NO: 200345 - DNA, 1000 bp, Homo Sapiens
ttattttggccactgtagtcatcctaaagggcttggagcccttgaaattgattttgattataatcattatggttttacaatgaaaagtgacttggtgtgagagcacaccatccatcataactttgatgtaattccaatataccaggacaaagcaatcctaattcaatcaaatagatatttaaaaatatattatacagcattcagaactgccaactaaatatatactaatggattttctgtttccactgtctaaatgacatttataaggctatggtgaagatgcaaaaatgataatttctgagcaattatttattttaagaaaccagtaaatcaattaagctacctgacactttatcatctgatgaaaaatttataagctcgtttgattgtcataaaaataaaaggatgttgtctttgaagattctaaaagtcttctcagagctaacattactgatagtacactgttcagacagtgaaaaggacatttgaagttcacaccaaggagaatcaaggaaaagttcagtgtatacttcttgtagttattggatatacattttttacattttttaatagaaagaaatgcaaatattaatggtatgactctgtaaaagggagttatattttgttatttgctttaacatttctgttgtaatatttagttattgtttagttgataatttgtttagttaacccaaaagaacgttcacaaacatattgttttttactaagccacttttaaaagatccattaacagaattgcttctggcagtttcatctgcagaccagcaattttaaagccttagttgtcaccaaacggaagagtccacagaagctgaataaaataaggagagagagatatgagaaaacagttagagttcaacactgggattcaatttataaagaccaagaaaagccaagtttttgtttatggtatttgcacctagttcctcctagacttaatctcttttaaataacttttctaaaaagcttatgttgaatt

SEQ ID NO: 200346 - DNA, 1000 bp, Homo Sapiens
ttatagtcagtgagtgaattgtttttactcataacagtattgatatttatagtttataggaagtgaatcgtactttccataaatgtaaaccatatattgtatcatgccattctattgtctaaagcattccatggatccctatagaaagtagaaaaaagtatgccttaccatgtatcacacagcaacaccttggttggctacccgtctctcctaactgcatcttctcctacactgtagccacatttactttctttctgttcttaagccactctcttactcacttcttagccttagaattagatcttacctcttctccaggatgctctgaaatttccctctccattctcacactcttcatatgattgattcttttccattattcagcttcagtccagatgctacctccatagagagaccttctggcaccaccctatctagtgctggtctcttgagttcctctatcacatttaccttcttttatttttcttgtaaaagctatcactatttaacatcatcttattagcttttttcctgctttctcttacccttggttggaaagaaatcaaggactagtctgtcctgttcattggggtatcttcagtaatggaacagggcctggcctattgtaagtgctcagtaagtgttttccaattagtagagtaggctagtagaactgtgtgttagtttggagtgcaacttgagggtggaggtgatgtcttattcccttttgaataccccaatcctgacacagtgcctggcagttttagagggtgataaataattttataattgaatttgattgagtattaattcacaagctctcagagttggaaggaatttaagacgttctactatccagttcctgaattttgtatttcacaggtcataagctgttttctaattctataagataacacaataacattcttagttacctagtttagtattctttccacttaaccatgctgctaaataaaatttgtatataaatttaagaatt

SEQ ID NO: 200347 - DNA, 1000 bp, Homo Sapiens
tatcctatcacatttcttagaatataattgtctcacaagaacttactgcttaaggggaagaatatatcaaaatatatgcctgtagtatcagtgaatcccatatgtgtaggaatagcagatacatttccattttcatgtatcagaaaaatagatcaggcaaatagtataaattagacattgtgaatataccactacctggccagcttctcaggaattgtatcacccatttcatctaatgccccgtggagagccagggcagaaattgggaatgcattgaccctcaactgtggtcccagtaggtcagtatcaggttcttgttttctaattaggcagacatgggtagggctggaaaagtggatccaaatgggatatcagagccaagggggctatcaggagtgaagaaagggtagaggcatggttcagatggatgttaggtgtcctgataagcagagaagatgcaaataaggaaaaggagattagaatgggtaaatgtctggttatctggatagattctaggaggagtggacctaccctctcagttgagtttttttgttgttttgagacagtcttactctgttgcccacgctggagtgcagtggtgccatcttggctcactgcaaactccacccactaggtgcaagcaattctcttgcctcagcctcccgagtagctgcgactacacgtgtacatcaccacacctggctaatttttgtaatttttgtagagacggtttcaccatgttggccagactggtctcgaactcctgacctcaagtgatccagtactggcatactggtcttgaactcctgacctcagcctcccaaagtgctgggattacaggcttgagccactgcgcctggcctcagttgagttttaatgctttgctaaaagcttatttgcttttgttgtaaagggccaggccagaccaggctagactgaactgattgtgatcactttaaatatcacttatttggagttcttcatggtggttcactgaatt

SEQ ID NO: 200348 - DNA, 1000 bp, Homo Sapiens
gttccagtttcaattttctgcatatggctagacagttcgttcagcaatatttattaaagagggaatcatttccccattgcttgtttttgtcaggtatgtcgaagatcagatggttgtaggtatgcagtcttatttatgagtgttttattctgttccattggtctatttgtctgtttttgtaccagtacaacgctgttttgtttactgtagccttgtagtatactttgaagtcaggtagggtgatgcccccagctttgttctttttgtttaggattgacctggctatacgggctcttttttggttccatatgaattttaaaatagtttttttctaactccatgaagaatgtcaatggtagttaaatgggaatagcattgaatctataaattactttgggcactatggccattttcatgatattaattcttcctatccatgagcatggaatgttttcccattttttttgtgggtcctctctgatttccttgagcaacggtttgtcattctccttgaagaggtccttcacttcctttgttaggtgtattcctaagtattatactctgtttgtagcaattataaatgggagtttattcatgatttggctctctgcatgtctgttgttgatgtataggaatgctagcgatttttgcacattgatttttgtatcctgagactttgctgaagttacttatcagcttaagaagcttttgggctgagacaatggggttttctagatataggatcatgtcatcggcagataaacataatttgacttcctctcttcctatctgaatacactttatttctttcttttgcttgataaccatggccagaacttccaatactatgtttaataggaggggagccaggattttaaaattgttcttaaatcacaataaaattatagttgcatgcaggcacatgacaaaatgcccctagcacaacttccactggttcccatgtggttaaaaaaatgtaaaattacagacttgaaagctt

SEQ ID NO: 200349 - DNA, 1000 bp, Homo Sapiens
aacatagactacagtgtttaaagagagaacgacattaaattaaaccacttaagcccctcaactgtcaatcattagtattagcaagtcaagtcatttcacttcttcacagaagtgtatttagaatatgccactgagcattacactcattatcaatttcaacactaatctggtatctctctaccaggtgaattatattaattttcctgcattaaaaaaaaaaaaggaccccaatctcactagttagcaaggaaaggcaaagtaaaaccacaatgagataactgttctcagactcctcaatggaaaaaaatttaacagtttaaccaaacaaactgttgggaaggatgcaaaacaatggaaacaccagtataccaccactgggactgtaaactggtatcacaacttcagagagaaattcaggattgtcaagtttaaggttctgcttataactgaacagcctgcacacctgtttgcccacaaccaaagtaagaaatatattttacatcttatccagtacacatacccctgaaaacaaaagctctataaaacactattctcactacatgccttatactaatatcttctctcctaccaacattttctattctattctctttctacttttaaaacatgctgcttgcagctcacaattagaaaaacacttctctagagaaactatccttatgcatacgcatgtggaggaaaagttaaatattaaatctgaactcaattgaacgtgcacacaaacaatggtcaccaagtcttggaaaaggttgtgtgagccccttgaggcgttcatccagcactgtttcagagaaatctctatttcagtctattcctatatggtggttattaaaaaaaaaaaaaaaaaagcagaaaatcgcaaaaacaagttgacctttttgtgttccttgagcccagtcacgaaggccccttgtgactggacctcatgccaaacaactcgttacaaaaagagctagggtcccagactctgccgaagctt

SEQ ID NO: 200350 - DNA, 1000 bp, Homo Sapiens
gccaatggcttaagaatgtgtcattatttcatagtcaaatttcatttaatggctccatttatttagatctatacctggtaaatcggagaagagaagaatacactcattaaagccattagccaaaagccggtcccgcagctgctgaagaattgctactccaatacagaatgggaaagaggaattcccaagtagtaaggtatcccagaggtggaaaattttgtgtagtggaaatacatctgtaaaacgataaaaatacaaataaattaaaaaaccaaaataacaattaaaacaataacaacttactttactagttctataattattaccttatggtcaaaactattacttcagagctaatactaccaaactctttttatgaaatgtttatttggctttgaaaatttatagcttcctaaggcatcttaaaaaattgataatcaaacagataatatttttaaccctattaaccattcataatatttcttcccagaactttccagttatattattctcacagatttatctagatgaactttagtgttgttttaggtacagtaaaataacgtatctattatattctctaaacaactgttttaataaattcccaccaaaaatcctatgagcaacttcctattttttgtaacttcctttttcttattaacaatactatgtatatcttccaggccactgcataaatatctacttcaaatattattacagttaccatgtaaaccatattttattagtaaggatgtccactttattaatatttgtagcaaattaaagtattacgcattcacataatctgcttaatttctagaggaatcctagtttaaaaaataaaagttactgaagaatctctgaaaattaagcctgatttgattgtaatagttgcccttataagctttatgtaaatattatagttaattttttttcaaaggggggcagagtttgtacaaatatcatgaaatgtccaataggtttttattttatagaattc

SEQ ID NO: 200351 - DNA, 1000 bp, Homo Sapiens
cttcagcagtatcctcttacttcccaatttgatgaccaacctttccatcctccactttgactgtggctgagtactgtgtgatagataaaagatatctatattatctcttacacaaaccaattaaagcctctatttgagtaaatattataaactgttgctttcatatttaaacggtaaatttaacatactttttatccaagtggataaagtagctgttttatggccatattagaactattaattaataaaatagaacccagtgactgagatggaggtatttcatatgaaaattaaatttactttgtataaaattgaaaatgctggtgattaatgttccctggatgcaggatacagtaggaaacactgggtttttctaaatacagacatgactccttatcaaggaactggaattctaaaacaacattgaaacgaacatgtaaataaaagacttgataaagaaatagagcatgtacacggaaattatttgccaaatgcaggaataagattgaagatatttaaacaggcacaaatttcttgatgatttatttgtctcttttaaattttcatacagatttaatctgtaaataaaaatagggtgactgtgatttgagtaactttacaagcactttcaaaactgtgcaaaagtatacaaagttgtcagttgggtggtgtttgttcctgctggactgctttgatgtatgctgtgttatatgggactggccacaagtttttggcctcttcaggtcccataaatcttgaaacttttgtgttcacactcagctcctggcatcatcagccacaggagcccaagatgcacagactcacctaatatgcaccccagttattagcaatgaacttctctgctcccagtggactagtcagtttccagtgtttgaattatttataatttaaaaactagagacataaaactacactgaaacagacatgtctcatcatcttttgctcagggccttttggtgataaatgcgcgcatatgaac

SEQ ID NO: 200352 - DNA, 1000 bp, Homo Sapiens
ccaacccaaaatttggttcagatgtcaaaactgatgatgtcacacatacatcttaagagggtatggaaaggtttcttgcataatgaggctttctagaaagagcagagtaggattccaaggaagtccataaatggcttgagaaagcagggaaaggagactagcttggggtttttatcgcagttagagtgtggggctgagtggagggctcctgcacacagactgaacactgcatggtttgaacttctcactggtgcactggggttttcttatcagcttgtccagatgtggaaccaaatggaaagggcagtcacggggcttgaaagttgtcagcagccaaacgtcaaaactggaattagactcttaattatatgtagttttgcatctttctcttaaatttagcattgtactttctgtgcttgagagacaaagcttaaaccaaaagctttactgtcaaactagattgcttttgacattggcatcttgtggctatgccagtgtttctagtgactaatcatttatttattcatattctagaagaaaaggatgtatggattaaaaacattgactttttttttaataaaacaaacaaaagagtgtggaataagaaaacagagcatactatatatcccaaaagcaatatatccaaaagttttccttgagaaaaaaaaaaaccagcttgctcaggaaagagaatacagattgttttctctttgtaagtatatttgaattttttatgatcaaacatgactctcaatttactgcaaaatacgactgcagaatgtgtgagtcatgtatctaatctgctttgaaatattgttcctaaagaacataggtacttataatcctgtacaatccacagttggagtccacaccttgtgacaacaaaagacaactcaaatcagcttcaagcatggatcataactaaccgcggggctattttttccatctgtaataaagaatgttccaacatctttaataatcgaagataatcctctgtcgt

SEQ ID NO: 200353 - DNA, 1000 bp, Homo Sapiens
aggtgcccgccaccacacctggctaatttttttgtgttttttagtagagatgtggtttcgccatcttggccaggctgctcttgaactcctgacctcgtgattcacccgcttcggcctcccagagtgttgggattacaggtgtgagccactgcgtcccgccggcataccagtttctgacattactgcaaaatataactatagtcattgctgtgttatttcaaataatgattaagaaatacaaaaagagatgagtaacatacttatcattgtcatataacttctcacacaacttggttttacaggaaattgttctcttttattaagttaattgataattcacatacagaaatttctggagaaaatttccctaaaagattcatgtttggataccattagactgaagaatactttctttttcctagtgtgaaggaaatgtgttctaattgacctgtattatttttagatgcgtgtgactaaccaccactgaaacgaattctatgatttaccagttcctcaaccaaaatccccattaaatatgaatattcttggaatgcttcttccataagataaagttgtcgtttttatttattatattttgctatggctgtccattattctaatattattttcagattatatcttaatctattgggtaatcaatgagcaatgttctctataataaatactgctcattctcctcctccccaaaacaaaaccataagcttgtccattagttttgactccttgatacttccatttgccagaatgtggcatattgcaaagttgtagtcagtaattatttgtaccaccatatttttctgcgtacaacaaaaaaaatctcatattacttatcacagtctgcagttactacttaatcgaaatagcaagggaatctaagactcaaaaataagttcttaatcaaaagtgttaagtaggaagtttgggagaaaagtaatttgtacctattaatatttgcattgaaaatttaagagttgataag

SEQ ID NO: 200354 - DNA, 1000 bp, Homo Sapiens
agcattgtctacacctacaaataatgtgcttcatgaaattctcaattaggtatatcctagcaccagataccgttttatctggctgtgccataggcttcccttaaatgtcctctacgtacctcttgagggagttatttataattttaaagcattaaagcaaacataaaatcacattctctgaggctttctaggttctagttttatattatttaaattaattccatttacattcacactgatatgttcaaagcaacagatcagatcaagctgtgacataccagacaggcagccactatctgctttctatcataaccagggagctgtcttagcaatgtatcattttgatttatggccatatagagtgcagaaattctattgtacagcatcctctgctctgtacaattcactggtagtttctctggaaaaaaataatctagaatggtaaacaaagcctagaaactgagtgataactgtagtcaactacacataagctgagttgtcagggggcactttgtcatttgttttattcaaattatacaggtagaacatccaaatcagtaggagtccaattttccttttctgcagtaagcaggccaagagattttcaccaagaaagcccatttatttggatgaaaatagcaaaagatagttaagtatgatatcctcactctgagctgtttgcatgaaaatattgtagtggcttccctccacggtaatgtaatctacttataaacacctttcccatctgctatgattttaccctatttccaaatgcttcctcccaatatcaggctgtataactcatcatgcataatgtttgcccacacaatcaataacaagaaccttactagcacacccaaacaaatgtttgggttttatttgtttgtttgcttaacttttattttaagttcaggggtacatgtgcagatttgttacacaagtaaacttgtgtcatggggtttgttgtcaaacaaatgttataagtgatagacagaggacc

SEQ ID NO: 200355 - DNA, 1000 bp, Homo Sapiens
cctgaagccacgaggactgtctcaaacagacccaggctgatagaatggcagcaaaagctgcacagataccacatgaaggcagccctttatttgacttccaattttgttatggttataactgttgaaacctgataacgctacttggcttctctcaatttcaaattccttggcaaaatggagatatgctgatgcaaaaatttgaagtttgtggggatgacacacaatacagactaaagtagggtcattgtcatttacagaaatttacatttccaattgggagggtatatttcaccttcaagtcttattttcctttggagaggtagtttgtgtcatctttcatatccgtagtacctcatacaaccccagggagtagggtctatcattatttccacttatagaagaggaaagtgagtcacagagattattaaatcgttgctcaaaatgacaaaccttgcatgtgtgggtgctgggctttggccctaagcagtctggctccagagttcgtattcctaatcagtagtctacgctgcttatgctgttagtctattataagactctgacagtcctagacggtatttccactttgtaagattcagcttcttgactggtcaaacaggagaaataaaaatttgtgaggtagtggagaacatcaaagcagacaatgaatggtgagcacattagtgcttagcacgtggtagtgagttgatgctaaacttatgttggttccctgatatttaaatgcctctttctaatcaacaatagataatgtgaaatacatgtacacattgtttcaaactaattcagattcttcaaaacacatgtggatagcataaagggagggacctttcacatttccagatttacttataatcatgatcccttgccccacttgccagacactgtaaccacttctaacaatggtgactcatgattttccagaatattccatgtaacatcatgccaatatcttcattctgtgtattatctctgttttgaattc

SEQ ID NO: 200356 - DNA, 1000 bp, Homo Sapiens
atacataacatcaacagactgaaggacaaaaaccctatgatcatctcaatagatgcagaaaaagcatttggtaaaatccaacaacgcttcatgataaaaattctcaataaactaggcaaaaaaggaatatacctcaaaataacaaagttcatacatgacaaactcacaggtaacatcatactgaatggggaaaagttcaaaccttttccttcaagaactgaaacaaaacaaacatgcccacttttacaagtcttattcaacatggtactggaagtcctagacagaccaatcaggtaagagaaaaaacaaaatacatccaaattggaaaagaggaagtcaaactgtccctctcagcagatgacatgatcttttatttagaagaacccaaagcctctaccaaaaaattcttagagctgatagcaaattcagtaaagcgctttacattttttcaacatataaaaattggtttctatataccattaataaaacagctgtaaaaaaatcaagatggcaatcccatttacaacagctagaaaaaataaaagatctagaaataaagctaactaaagtgaaggatctctataaggaaaactacaaaagactgatgaaagaaactgaagaggacacaaacgaatggaaagacaactcatgctcatgaatcccaagaatattggtaaaatgttggtaaccactgaattttttctttaaaaaaaggttggtaaaatgactgtgtcgccttttttttatttttattttttgcattactataaagaaatacccaagactgggtaatttataaagaaaagaggtttactggctcaggttctggaagctgtatatgaagcatagtactggagtctgctcgtcttatggtgaggtcctcaaggatgcttataatcacagcagaacgtgaaggtgagccagtgaatcacatggtgagagaaggagcaagggggcagggatgccatactttaaaaaataaccagatatcttgtgaatt

SEQ ID NO: 200357 - DNA, 1000 bp, Homo Sapiens
ttcaataccccatttgatagaaaattagtaacgatatagaagactatcaaccaacctgatacaactgacatttttagaacaccacacctaataacagcagaatacacattctttttagtgtacatggaacattctccagaatagactggatgctaggccatgatacaaggcccacatttaacagaattgaaatcatacaaagtatgttctctgaccacaacaggattaaattagaaatgagcaacagaaggaaatttggaaatctccagatatttggaaattaaataacatgcttttaaataacccatagtcaaaaaagaaatcatgagggaaattagaaaatattttgagttgagttaaaacaaaaacacacacaaaatcaaaatttgtggcatgcagttagtgcagggagggaaatttataacattaaacacattaaaaaaagagaaaaatcttaatctaagcttccacctcaagaatctagaaaaaggagtaaaataaactcaaaacaagcaaaaggaaagaaataataaaaagtagaaatcaatgaacttgagaaaataaaaaccaataaaaatcatgttcttggaaaaaagtcaacaaaattgagaaatcttgagctagactaaccaagaaggaagagagaaatagaatattttcaaaatcagaaatgaaacggttcatcactaccagtcctatggaaattaaagagttcacaggactgctatgaacaaatttacattaacaaattggaaaacttaaatgcaaagattcttagaaagatacaaattaccaaaactgaactaagaataattagaaaatctgaatctacctataacaagtacagaaattcatttaatagataaaatgcttcccataaagaaaagcttgggtccagacagctctgtattcatttcctattgctgtataacaaattgctgtaaatgtagaggctgaaaataacacccttttattagccctcagttttgtattccagaag

SEQ ID NO: 200358 - DNA, 1000 bp, Homo Sapiens
cccccagaggtcagcttggagaagtgtgagtgcttggctgggccgagccctggctgtggggcctgtgccagccggttggacatggatggtacccccggcccagccagccctctgctcctcagatgctccatccccagacagcagccccagtgaggccagggaccccaggagcacaaagcaggactgtgtgaggaccatgtggcactgggtttgagaccctgcggggtcactccagacagcagggaaaggaggcagctgccctgctgcaacctccagctctagcctctctggaagcccctgccaaggcctccactgccaccctgctcccatcttctgggtcccatctgcccatagccctcctgggtgccaggcatcctccttgccttgggccaggaaagggtctgggaagcactgtcagggtttcctggggttggctttcagtcctggcgtggggtgtggccagggggccatgtcccccatgggcccagcaggagggcagcgctctgccacaccgcatgtgtggatccggcccacagcacccacccagaaccttcaaacacaaacttaatagttacatgtgctgagtgattcagtctgagtgccgacaccatccacgctgtcattttcctgctggattttgatattccaaaagtaacaacacgtgaaaagcgtgagcaaagcaagatgtagacccttgccgtttgccagagctggggcaggacctgggctgagtggagggtgtcctcgcctgggaagcgccttgaacccgttcccctcctccactgggtgagagaggtccagcatctagccgggggaagccagcgcctgggaggtcagcctagtgggcccctgggagcagagcagaggtactgccacagctgagcgaatgcttgtgccccaggccctgccctggggtcctgggatccacggctgcccggtcacacggtgcccagatctcatggtgccccagggcacacatggggcccgctctgagctgatc

SEQ ID NO: 200359 - DNA, 1000 bp, Homo Sapiens
cccatggtgctcaccacttcacctcttttgccgtaaagtgggttcagtggattaaggtggtgttacaaaagatacatttattgttccataaagggaatgatgttcaccttacctccgtgattgaaatgcttctacctggctgcttctttcagaaattatattactgtcaatttgagagcccagttctgcaacagcatctcctactgttagtattagtctacagagaacatctgccactgagcttctttatgatatcagtacccacctcaaataggctgttattgctgctattgtaaatggagtgtcatacgtgtcttgtcgaggaacaaagatttctggtgtcttgtgtcttacatttggtatttcttatttctctgggacttttctcctttcatttattctcagcctttgctcttctgcaagcatcattttgtttaatgtgggttgttgctattttcttagtttccacgtgccaactcaactccacatgcatcagaattggcctgagcaacattccagagcattaagttccaactcacaggagagtgctcagatactgacaaaatccattatccacttttaaaatatgtgtgcatactcatatcttacttagttctcttaaaatattcactcctatgcatagtttcatggtcctgtgagtgtatattttccaggttctgcagctcctccagtttaaaattccttttttcttttagtagacaaaacacttttctggttttttttcatattaagactaggcctcatttattggtctgctgtcaaagaaataagttatgtcagattctgagaagagaattgtcctgccaatagcctcttcacactcgtcaagcaaagggctgccactatcctctacaaagggatgcaagcattcaggatcttggtgcatctacccttatatccccatgcctaatctcatttctcccttctttcctctacttgtattgactatggcatagagaatgctcttaggctaagaatt

SEQ ID NO: 200360 - DNA, 1000 bp, Homo Sapiens
cagtttactctctgggaacacataatcccaaacagaggatagagcgggctgaaattgccataaactctgactctccacagactcaaaggcaacctgaatcaaaatcatttccaatctgggtctgaacctgtcaaaatctgtgtctacagagatagctggtgtttggccagcgagttcaaatcaaggtggaactttcccaactttctgggagaggagagcatcagttatgaggcagagctgaggttttctccaaggaatttttcttaaactggaggcagctacaagcatctgcctataggctgccaccggaatataaaacaaaagtataagcaacaaaggaatcgagtaatagaagtatctacctcacaggacttcaatgagggtgaagtaagttatttgtaaaatgcttaaaatagtatctggcacacaggaagtataatatgtctgtcaaatattaataacataaatgaaggaaataccaattactctgaacaaaatcactgtcttgcctacatagaaagcttaatttttcaggggcatgagtttgtgatcacattctgcataaatacatatgagctgtgatttcctagtcctcaagtcacacgatgatatcaaacttgtcaatatgtcaaagagcacatggcattccacaaagagctctatgtcaaggaacctggtgatttttttttttttttttttttttagacggactcccgttctgtcacccaggctggagtgtagtggcacaatcttggctcactgcaacctccgtctcccgggttcaagtgattcgtatgcctcagcctcctgagtagctgagattacagacatgcgctaccacacccagctaatttttgtatttttagtagagacatggtttcgccatgttggccaggctgctctcgaactcctgacctcaagtgatccacctgcctcagcctcccaaagtgctgggattacaggagtgagccactgtgcccagccagaacctagtgaattc

SEQ ID NO: 200361 - DNA, 1000 bp, Homo Sapiens
gatagagacatgcattcaatgccatgggtggttttgaggagtgtttcatattcttttatgtgatggtcaatcaggtggggccactagaggagacaggagaggctcaggaaagcgagcttaacatattaagtggccctagagatcgaaggcatggcacgttgcatgaggccacatgggagagacactaggctggacaagaggcagaggcaggagcagaaagttgggagggggggatattttgcagccttttttggagttttcttgggagaggcaggggcgggtaaactattgaagatcaactattttggataatttggctggctctaaactataagagtggtccctagttgcctgatacctggccctggagtggttaaagcagaggaatgttgccttctgggtatatgggccaggttaaggaggtatggctcaggattacttagtttccataacaagggtatgctcctggctgagtccactaagaaccaattagctctaggacaggcagtctctccccagctagaaagtttttgtttctttttaagatgccaacacatcattatatatagaatatatatatatatatatacacacacacacacacacacatatatatatacacacacaagaggtattttaaagtccttgttctctctttccactaaatccatcagctccagcatctccaaatttccagcctgatttaagccatttaagtcttttcaaataagaaatctattgtataaacgtaggcttaccacttcagaaattatcacctttagcatctaataaacaatgttattagatgagctattttagctgtaggattttccccaagtgtattctgttagaatttcctatgcttaccctggcagacctctcaacctcagttataaattgggatcacccaggaagagttaaagaactactgaaatctgggttccacccatgagattctaatctagtcttaagatatttgtagattacttaaggggaattc

SEQ ID NO: 200362 - DNA, 1000 bp, Homo Sapiens
attgtgaaaccttcttacagaaaatattcacactagtccctttggtagttgtttaaaaaaaatccaaatgggccaggcacagtagctcatgcctgtaatcccagcactttgggaggccgaggggggcagatcatgaggtcaggagatcaagaccatcctggccaacatggtgaaaccttgtctctactaaaaaaaaaaaatacaaaaattagctgggcatggtagtgcatgcctgtaatcccagctactcgggaggctgagacaggagaatcatttgaaccagggagttggaggttgcagtgagctgagattgcgccgctgcactccagcctgggaacacagtgagactctgtctcaaaaaaaaaaaaaaaaaaaaaaaaaaatttcaaataaagagtctccatacttctcttattttcactttcatagaaaaatctttaacctaacaataaataacagagtatatctttgctagctatcacttgggcaaagagactagaactttttgtatgtcaatgaattatctggtgaaattcgtaataattgttccttctttttaatttgcttataaaaagaaaagtttatatatttagtattacctaaaaagatctaggccctagttcttattagcaaagaacaacatgaacataattagttgcttattagaatttcaaaagtaacaatgattaaaaagaaaccacaaacttttctctttctgctttataattgtatttacttaagtaatttgggcttgcctttgactaaactgttttatgttcattttttattgtctgctacccgataaatcctggtgaggcacatttcctccaggaaagacaacagtcaataataggaaggcttttggaagacaataattaattttttatatgtgacactgacttagttattccattagcaagtgttaaatattttctatacctgtatttactcacccacaagtcctaaaacaatgtagccaataatacacagtaggaagatc

SEQ ID NO: 200363 - DNA, 1000 bp, Homo Sapiens
cataaatgagtatcaaagctgggaggactgacccaaaaaatgggccacaaacctggtaaggtaaaagcacaaaatggacaatgaaagaacaaaaattaaattggcctgcaatacaatatatggtttaaactttggtcacaatataaataatatgtttattgcttataaaaacactttcacgtgatagaggtacagatggagtgtcttttattgttaagcttaaatccaagataaggaaatcaaggtacagattaagacaaatgtgacaacttttgttttattgtccctcccacaccatcctccacacccagctctgtaatgttgttattgagaaggaaagaaaagtctgaaatccactttggggagttgcataacttttaggagagcacttgctatattcctcaagaagttatagtcactggtagtatcattcactggcagcgcctgctatccagggtggggagtttgcttgagatatatgtattattcatagttacaggctagcctgttataacaagactttagagttgctacctcatgtttatagacacatagcaacaacaagggacagagaaatggacttggaatttattcagtgaatatttttatagcctatactctgtgtagtcaccatagagtgactcaaagagcttacagacaaattgggggaggtgagaactgcacatagaaaaggttaaataaaaacaaaacgaagaggagaagaaataagataaatgaaaatatattttggtaccatgattgactatcaaataagtggaaatgactggctgatagaacatctcataacctcaattcctacttgaaaatatgcaccctgaattcatgagcctgccaacccctcctgactcagcaaagcccttatgaataagcatgtggaagcaaaagagaaaatgaagagagaaccaggtagaaacaccagagcagaagttctatgtgatccaggacagagcctgaattatttgctgaatccctaaagctt

SEQ ID NO: 200364 - DNA, 1000 bp, Homo Sapiens
catgtgaataccatgttgatatagatgagtggacaagaagaaaagtcacatgagtgggaatgaaagaagatcccttagttgaataatgggaagctgtttgttaagaatgttataaaaagggaacagaacaagggggaggtgtcatatgaccatgaaacattgtgctggcctgagttctgagggtctgactgctctctgccagagtttgtggagaccacctgtccttgaaggggtttgctgatgtggatggggagaataggacctccgagaattttgaggctttttgttgagtgttgttcttttaaagtcagtgctagtactaatacttctgataaatgttgaggcggaggaaaggcatgaggggcatgccagtatttgacttcatttagaaagtcgttggcaatatatatttcaagggattacatttcatgtaatacatgatttttaaggactttggttaaaataaagtgtggatcatttatatttaatgaatttttatttccctttcaaatgcttgaaccaggcatttctatttcagattgaaccaggtaatagatgagctcagccttgtgatcagaaatgttatctcttattgtgaaaagtttccatcatctgatggatactatttgtttgaaaaggtgaatatcagattatagtttcttgatttgaagatgaatacataatagagaacttgcattgtaattttggactgggcctagaaagatcattgctttatagtgcttctcctttaggaacttagtaaatactgcattaattttattttatctttaatttctgttaaatgtatttggtattttgttttgaggcagtatagtcttacaattttagctagattttatagatggaggaatgtcataaatgttagtattgtaattctctttaatctgtttaatattttgatttagatgtagaaattctaaatttaccaaggctaatgtttctgaaggaccagtcttgtgaaacattctgcattgaattc

SEQ ID NO: 200365 - DNA, 1000 bp, Homo Sapiens
aaggaaggttttgtgtacgagacctgaatccatccatgacgttctccctaacatcagttctccctaacatcagtagtcagtgtctaaaagtgtttaatcaccaagtagcaacataagcatagtagttagaaacattaaggtataaataagggaaaaacctgaaagaattgaaagtggctgcctttatggagcgtaacttggaagtacaacagataactgcttcttatctttttaaatacaattccatttcttttactttgtaataatcactaaatttttaaaagtgagacatcagcttccttttgtatgtcattcttctttatgatggagtcaaatagccaaaatgaagaaaaaatatcttttacctgataaataaatacaaaccatatgtttgtttctggagtaatgcagcattagtggatgctcacggtggaggatgggagagtaatgcagcattagtggatgctcacggtggagggtgggagagtaatgcagcattagtggatgctcacggtggagggtgggagagtaatgcagcattagtggatgctcacggtggagggtgggagagtaatgcagcattagtggatgctcacggtggaggatgggagagtaatgcagcattagtggatgctcacggtggagggtgggagagtaatgcagcattagtggatgctcacggtggagggtgggagagtaatgcagcattagtggatgctcacggtggagggtgggagagtaatgcagcattagtggatgctcacggtggaggatgggagagtaatgcagcattagtggatgctcacggtggaggatgggagagtaatgcagcattagtggatgctcacggtggaggatgggagagtaatgcagcattagtggatgctcacggtggaggatgggagagtaatgcagcattagtggatgctcacggtggagggtggaagttattttaggtcagctctattgggaataggagaggagagtgagatggacttat

SEQ ID NO: 200366 - DNA, 1000 bp, Homo Sapiens
tcagatgtgcagatattaacataaggacacaggaaacatgaaaaagcaaggaaatatgacaccttcaaaggaacacaataattctacagcaacagataccaataaaaaatcaatgaaatcatgggtaaataattcaaattactgattttaaagaagctcagcaaacaagataattttgaaaaacaatacagaaaattggaaaagaattcatcaaagagatacacattttttttaaaagaaccaaacataaattccggaactgaagaattcattgaataaaatacaaaatacagtcaaaacctccaacaatagattagattaagcagaagaaagaatctcagaacttgaaatcttttgaaataatccagtcagacaaaaataaataaaaagaataaaaaagaatgagaaaggctttgtgacctatgggacaacatagtgactcaatattctaattatcagtgtccccaagggcaaagagagaatgaaaggattagaaaatctatttaatgaaataatagatgaaaacttccccaatctagaaaagactcatatagggggctcagagaaccccacacaaatacagagcaagaaggtcttctctgcagcgtattatagtcaaactacttaaagtcaaagataaagaggggattccaacaacagcaagacaaaagtgtctagtcacctataaaggaaaccccatcaggctaagaaagtatttctcagcagaaacaatacagggcaagagagacatattcaaagtggtgaagaaaaaaagccacttaagtatatactatgtagcaaaattatccttcacaaaaaaagtccttcccagagaagaaaatgctgagggaatttatcaccactagactggccctagaagaaatatccaaagaagtcctaaacccggaataaaaaagataacatttaccatcatgaaaacacatcaaagtataaaactcactggtacaccaaacacacaaatgaggaagagaaagaattc

SEQ ID NO: 200367 - DNA, 1000 bp, Homo Sapiens
tggctttgtgtccttttacctcaatttcaccaactcttttctaggtttcatgtttttctaggctacagttcacttcaaatattttcataagcagatcagattttgtagtgagtattaaaagcatcaaccgggagagatcactttcagaagcagttgttgaaaagctcccatggaactgtaggggaacaaagggcctggctgataagctgggcacgttattaatcccaaacgttaattctggaaacctggttgcctggcagcagcagcacttttcaggggacccctggcatttccttcaaaggcatctgagttgcaggaggatcatttatggctgtgcaggacccagtccatgaagcaacacacacagttgctgccatgagtgctaggcgtgctgacctttgagctgaggctggctgtgaccctgtgtcaatccttaaggcgtgcgttgggaggagaaggggccagccttgtgctgccaaacccatatcaggctccatggcagcgccaggcctacccgcggacacctccttaagcctccacatctgagccctgggctcctcggggactagtggttttaaaaagaaagccagggtttggagcacgtttcatagcacggattcatagcttagaaaatacatgatatggtttatattcttttttttttttttagacggggtcttgctctgttgcccaggcgcaatctcggctcactgcaagctctgcctcctgggttcacgccattctcctgcctcagcctcccgagtagctgggactacaggtgcccgctaccacgcccggctaattttttgtatttttagtagagacggggtttcaccgcgtcagccaagatggtctcaatctcctgacctcatgatccgcctgcctcggcctcccaaagtgctcggattacaggtgtgagccaccgctaccagcctatattcttacaattaaaataatctcatgatgtgagacagtgatatcaacccacccaattgaattc

SEQ ID NO: 200368 - DNA, 1000 bp, Homo Sapiens
ttgtcattttggttctagttcttacaagggcttatggtagcaacccaaatagaagtatttgctctaactaacagataaattattagcacttcagttgtttacatatgagtcagagcatctaaaatttgttcccataagtaggttgagcctccttctcagcctgttgtcatagggtctaaaaatggaaacgtgagtccaaactctttccagatcataaaaataattctgaattagtagagcataaatgaatgtgattttattcgagtgtcattttcaagttccccaggccaggttgagaccttttaagtcatccttaattccctgtagggaggattaagaaaatagtagcagctttgcttctggccttagacagttttctaatgaggtcagagcctctcaccctgggagaagcagattcactttgccccttcagcattggtttttgagaattgctgtctgaagctattgcatagacaaggtcactttttaaaagggtacatttctgaacctggagaaggagtgggttctgaatgactggctcttctgattaacagagctgtatatcaagctgtgctgaaaatactcctcagatatattaggccacatttatgcatgagtgagctcactgtcgtgacatgggagtgaacctttgctgattcgagatcctggggtgccttcactttggaacactgattctagatatttaatagcagttttaaaattaggctaaatgtagtctgactgcaggattcattccagtgggaatttttttgtttgttggttagttttttaagcctgaatatgaacccaaacatgtttcccaaaatgtgaaatgaagagtgaaaacctaacaatgggataagaaagataatagataagagattatagttcaaactcggcctgcactcaggaaatggaagcaattcctccccctcatcctgcccccctcctcttcctccacctcctcctcctcccttacctcctcctccactacttcctc

SEQ ID NO: 200369 - DNA, 1000 bp, Homo Sapiens
ccacgcttggctaatttttgtatttttggtagagatggggtttcaccactttggccaggctggtctcaaactcctggcctcaagtgatccacctgacttggcctcccaaagtgctggcattacaggcgtgagccactgtgtccggcttcagagtagaacctctgtcgaaattgaagtcagtccttttcaaacactactgctgctttatcgactaaatatacagaacattctaaattcatcgtcatttcaacaatgttcccagcatcttcaccaggagtagattccatcttcagaaatcactttctttctttatccataagaagccagtcctcttcaggttccacttctaaatctaattctttagtagttacttcctccacctaagtcttgaatacctcaaagtcatccaggagggttaaaatcaacttctttcaagctcttgttaatgtggatagtttgacctctttctatgaatcacaaatgttcttaatggaatctggaatagtaaaccctttcaggaaagtttttgatttactttgcctagatccatcagaggaatcactatctatggtggctatagccttacgaaatgtattccttaaataataagacttgaacatcaacattactcctaatccatgggctgcagaatggatgtcattttagcaggcatgaaaaacaatattcatctccttgtatgtctccatcagaggtgtagggtgaccagatgcattgtcagtgagcagtaatattttaagaggagtccttttttttgagaagtaggtttccataggcttaaagtatttagtaaaccatgccataaacagatgtactgtcattcagtcattttttttccattcatagagcacaagcaaagtagatttagcatgattcttaagggccctaggattttcagaatggtaaatgaacactatcttcaacttaaagttaccagatatgttagcccctaacaagagcatccgcctgtattttgaagctt

SEQ ID NO: 200370 - DNA, 1000 bp, Homo Sapiens
cacagctcacagcagcctcgacctcctgggctcaagcactcctcccaccttagcctcctgagtatctgggactacagacacatgccaccgtgccccactaattttttattttttgtaaagacagggtttctccatgttacccaggctggtctcaaactcctgaattcaaacaatctgcccaccttggcctcccaaagagctaagattacaggcatgagccactgtgcctggcttgttatttgcatttgtgattttaaaattccatgttttttatcataagattgtcaggtgctttctggacaggaaatgacttaatttatgactcaaaatacaaacaaatgtaggtgatcaaatgcatatctatgtcttcaatggaaatatatatacatataagtcattaatgaagacaaatgagaacatgaaattcatgatatattttcttttccatcatctagccccctaaaggagagatctgtttcattcagagccctgggttttgttttgtttcatgatttgctttttttttttaaataagagtttatttatttatttatttatttatttgagacagggtttcactcccatcagccagtctggagtgcaatggtgtgatctcagttcactgcaacttctgcctcctggactcaagtgatgctcttgcctcagcctcccgagtagctgggagtacaggcacgtgccactgcatccagctaattttttgtagagacagggtttcaccatgttggccaggctggtcttgaactcctgagttcaaacgatccgtctgcctctgcctcccaaagtgctagggttataggaatgagccaccgtgtggccaaaagagtttattttttaaagaaaattgacttctttgaaaaagtagaaatgaggccgggcgcggtggctcacacctgtaattccagcactttgtgagaccgaagcgggtagatcgcttgaactcaagagttcgaggcaaacttggccaacgtggtgaaacccc

SEQ ID NO: 200371 - DNA, 1000 bp, Homo Sapiens
ggttttagtacttcattctgatgatatgatatatcacattaattggtttgtatatgttgaatcatccttgcatcccagggataaattttacttggtcttgatgaacgacctttttaatgtattgttgaatttggtttgctagtatttttttttttttttggatttctgcatcaatattcattagagatattggtctgtagttttttttttttatgtgtctttgtctgcttttggtatcaaagtaataacggccttgtagaacgagtttggaagtattctctccttctttattttttgaaatagtttgagtagagttggtattggttcttctttaaatgtttgttagaatttagcattgaagccattgggttcaggcttttctttactgggagactgttcattatggctttgatcttgttatttgttattgatctgttaagctattgggtttctttgtggcccaatctagtaagtgtctaggagtttatgcatttcctctatattttccaatttattggcatatagttgctcacagcagccactaattatcctttgaatttctgtggtatcaattgtaatgtgtccttattcatccctgattttgtttatttgggtcttctctcttttttcctctgttagtctggctgaaagtttgtcaactttgcttatctttaaaaaaacaaacctgtttcattgatcttttgtattgttttctatctatcttaaagccaataactcttagatttgctcttttgagtctgttttttagatcttgtaggtgtgcttcactgttttttatttgtttttcttttgtttgctctttgcattttcaaatggcctcttgaaggtcactaattcttctgcttgatctattctgctctgaagggacattgatgcgttctttagtatttcaactgcatatttcaacactagaatatccacttgattatttttaattatttcaatctcgttgttaaatttatcaaaaaatttggaattc

SEQ ID NO: 200372 - DNA, 1000 bp, Homo Sapiens
tctttgctggatactgctacctgctgaggcctgccctcacccggcacctcccaaaactttctcctcaatgtaatcagaagcaaggagagaactgcaaaaggaatacccttctcttgatgtgattcactggtactgaaagtctcgtccagagaccacctaaacccatcttggcacagcatctcgggaaatgctatactagaccataggcactagatgacctgccctgttgagctcattagtcccagcagggactcctagctttctatgcaccccactcctctatccccagtcttgaggtttgttccatctccttcctctctcattcattctcatttattcgccaacttttgtggccactaagtcctgggaatcatccagccaccagcctgggtcagctgcccagcctcccagcccagctctcccttcgttctctctcttctttttttttttttttttttttttttaatttttaatttttggagatggagtctcgctctgtcacccaggctggagtgcagtggcacgatctcagctcactacaacctgcgcctcccaggttcaagcgattctcctgcctcagcctccagtgtagctgggactaaaggcctgcgccaccatgcctcgctaatttttgtatttttagtagagacggggtttcaccatgttcgccaggctggtctcgaactcctgacctctggtgatctgcctgcctcagcctcccaaagtgctgggatcacaggcgtgagccactgtgcccggcctcccttcattctctttctgttttcatgggttctgctcagcttaccaggctactagcctggtcttgcagagagaaaatgccagcaaagatgccgtccctcctgccctattctaaatctagagtctagggagagggaggcagaggcagaatggggacatcacaacctatgggacagaggttggggtggtggcgaaggaagagcatacagagagtagaagtcagaaatgtgctattaggttg

SEQ ID NO: 200373 - DNA, 1000 bp, Homo Sapiens
ggaagtctgctgcggccaggttgaggatgtagatggagacagcgttcctgcgcatgcggcagcccaggagccagagcacaaccgcgtttcctgtcagtccgacaagggaaatgatgcacgtcagcaccgtgaagctcagggtctgcttgtagcaaggagtctcctcacgtccgttgattggtgtcagttttgtacccaagactgggacggttggatccatgctcagaaaccctagtctggtgcccctgggaacacaaaccagatgtgatcaccagctgtatcatctctgattctccccaccaccctgccgtatgggatttactgtcctcatttaaagaagagagaaacagaggctcgcagataataagtcacttaccaaaggtgggggtcctcaaatccagtttgaaatccagttcttgttgactctgaagcctgacatctctctactgccacacaagttctgtgctgacatgggaataacattaggatcaaaacacccccactcatccggccagggctttggacccgatgattaatctatcctgggtctgaaattttctttcaggtggaggaattcagatacacaaagaggtggttgtgacacactcgtgactaggactggtcatccatggacaggaaggaagaccatgcattatgaactagaggaaaatgtgacctttgctaggataagtgtgaaaatggctgggcctggtgggtgagaaataactcagtgtgtcagtcattgcagacaggactacattttacattttatactcccagtgcctatttccatgagcagcacactgtgcttttcatatacattcattcaatgaatgcatgcatgcatgagactaatggtactggtagatttggatgaaatggaaaataaagatgaaagcacaatgtaaggtattagaacacacacgtataactggatgaataaaatttaattcattagaattctatttgtggaaagctgtatctgtgttgagaagaattc

SEQ ID NO: 200374 - DNA, 1000 bp, Homo Sapiens
atataaagggtctacataggagacagggtctccctctgttgcccaggctggagagcatggcacaatcatagctcactgtaacctcaaactccagggctcaagtgatccccctgcctcagcctcctgagtagctaggacctcggttgcatgccaccatgcctggcgaatttttacatttttgtagagatggggccttgtgttgcccaggctcgtctccaacttctggcctcaagagatccttgtgcccgggcctctcaatgtgctggcattacagggatgaactaccatgcctggccaacagtggcttttaaagacattaatagactttttttaaggacagttttagatttacagaaacattgcaaaaatagtatgagagttctcatatcactcacgccctgcataccatttcccctgttattaacatcttgtattcgtatggtaccttgatataattaatgaacccatattgacattttactataatgaaagtgtgtaatttattcatatttccttagtttttacctaatgtccttttcctgctccaggatcccgtcagaataccacattgcatttaattgttatatgttcttaggctcctttttgctgtgacaatttcttagaccttatttttgatgtccttgacagtttggtgagggtattggtcaggtatattgcaggatgtcactaagttaggatttgtctgctgttttcctcataattggacttggggttatgggtttttggaggaacattgcagaggtaaactgccattttcatcacatcaaatcacatgacttatgactgttgatgttgaccttgaccatctagttgaagtagtgtttgtctggtttctctactgaaaagttactcttcctcctattttcatactgtactctttgaaaggaagtcactctgtgcagcccacacttaaggttgggggttacttatgttcttcctccttggaggtggagtatctacataatttttttaagaattc

SEQ ID NO: 200375 - DNA, 1000 bp, Homo Sapiens
gtttagaagatttcccagcctggtggcatgcattacagaaaagattttggccaggcgcagtggctcacacctgtaatcacagcactctgggaggctgaggcaagcggatcacctgaggtcgggagttcgagaccagcctggccaacatggagaaaccctgtctctactaaaaacacaaaaaactggctgggcacggtggctcatgcctgtaagcccagtactttgggaggccgaggtgggtggatcacgaggtcaggagatcgagaccatcctggctaacacggtgaaaccccgtctctactaaaaatacaaaaaaaaattagccgggtgtggtggcgggcacctgtagtcatagctactcaggaggctgaggcaggagaatggcgtgaactcaggaggcggagcttgcagtgagccgagatcgcgccactgcactccagcctggacaacagaacgagactccgtctcccaaaaaaaaaaaaaaaaaaaaaaaattagctgggtgtggtggtgcatgcctgtgatcccagctacttaggaggctgaggtagaagaatcactaaacctgggaggcagaggttgcagtgagccaagatcatgccattgccctcaagcctcagcaacaagagtgaaactgtcttcaaaaaaataaataaataaaagaaaagaaaaaaaagatttctattttttttttttaatcaactagtcataatcatggaacagggcatgatgaagactaccaagttgggctagaacttggttccccgactcacatcggctacagctcccacctcatcactatgcactccacctctgggcaaggggtccacacattctgtacctgatttacaaactgtacatagcaggcaagaaggcaaattgttggaagcaatggtgtaatccacaccctctgtgcacgggttacaggctccagtatattctgatctatgagatcctgggaagggagagaaaagttaatgaatgagtcaccacagaattc

SEQ ID NO: 200376 - DNA, 1000 bp, Homo Sapiens
agacacggacaaaagtgaagtgtcacaattaaattacatctattaaagtttagcattcttttgaaaatcctaatattagtattctatttcatttaaggtagtactaacttataaaatcttactcatatttatgagacattaaaaactatccatacatcttgggaaagaagactggcaacaatgacatatttggtggatctcaaaacttgtcaaaacagaaatggagagagatataggattacattttctttcatgccaaaaaatacatttaacaacaaaatcactgtttttataaataattatttctaacaggaaaggatattttaaccttcaataaaaaggaagcacaaatgacagtccttttcgaagttgggtcaacacataagaatatacacattatgctgttattaccctttattttctgactgtaaacaagtatttctacagaaatttaccaaaaattacaaagatgtaagtatactttcccctacttaaaaatgaaccagtatctactgaagaacttctctcagcccttcctctccttccacagtcagataaaagtttagcatacttttaagttttttactcctctcatattttagtgctagaatctggaattttagacttagattatatttccatgtttcttctattttcatattttttaaaaattatttttgaaatatgcattacattttacaaccagtttaacaaatatttaggcttaagtatttgacaggcataattattcatcactagttctttcatttcacattttcaccagtcttgagttattattttgactcacatccaggtcagctgaaaattatctttgggagttatgtttttaagaatgttacataagagatgcagctttaattctccaaggctacatgagcaacaactttggcaaagcagaaaatcttgggtcataattttccctaaaaatgacatagccatttgttcactgtcttttgaatctacatattctaaagaattc

SEQ ID NO: 200377 - DNA, 1000 bp, Homo Sapiens
gagattttttttatctttggcttttgacagattataatgcatttttgtataggtctctgagtttatcttacttggagttagttgaactttttagatttgtggattcacatacaacatcaaagtttttggccattatttcttgaaataatctctctccgcctttctctgtttctctcttctatttctgtaatttccacaatgcatatgcttgtccacctgatgtatttcctcaagttccttgggctctgttcacttttcttccgtttttttcttacttttcctcagaggcaataattcaattctcctacattcaagtttgttgattctttcttctgcctgctctagtctgcctttaaattcatctagtgaattttctatttgagttataattttcagttgcagaatttcttttttgttctgctttgatttttgtctcttcactgatattccatacatatttctgactttgtccacatcttcctttagctctttgagcatctttaagacagctgttttattaaagtgtttttctggtaagtccaccatctgaacttcctcagggatggtttcagtctatttgttttacctttgaataggcaacactttctagtttctttttgtgtcttttaatgttttcattaaaaactgcatatttggattttataatttggtaactctggaaaacagatttttctcctttttgcttttcttctgtttgtttttgttggctgtttttaaattttttttttcagtggggtattaccctctgtgtgagatcagcctgagatgtaaactgaaggtcttctcacatcttttctgagcctatgtctcaggcatgtttagtgagtttctatattcccacaaatatgcagttgcttttgaatgtccaatcttaaatgcctggcctccaaaggtagaaaaagggggaaataaatgagaaaaaaaaggcattgtctttgtcaaagaaaatttatggaaggccattatttggactaagctt

SEQ ID NO: 200378 - DNA, 1000 bp, Homo Sapiens
acatgttgtagagtttgtgctgaaggttaagtttcctggggtggtggatcttttataatatggataacaaaaccttattttaagaaatttagaaaatttttaggcaaaactagaaaatattactgataattctaccactcagaaggtaccactatcagaattttgtatttttccagtcatctgctcatctcttttctcctatgcttgtatatgttccctctcccttgaaaaatcagattttttttgtaatctgctttttcactcaacaatattgtagatccgtgtcgtaacttactcctctgcagtggcttcagttattgtgcgctttctgttggatgattataccatctagcccgtcatgtttcctggtactgaatacataggctgtatgtgtgtgtgtgtgtgtgtgtgtttctaccttaactaatgctttagacatcaataggtagagctgaatccttgaaaccttccaagtggtggctttcagttctcattgctgaattggtttctagagatggaacaaattatattatatggaaactttttttttgagacaaagtctcactcttgtcacccaggctgccgtgcaatggtgtgatctcagctcactgcaacctctgcctcccaggttcaagcaattctcctgcctcagctgcccaagtagatgggattacaggtgcctgccaccacacccagctaatttttgtatttttagtggagacggggtttcaccatattggccaggctggtctcaaactcctgacctcaggtgatctgtctgcctcggcctctcaaagtgctgggattacagatgtaagcccccacacccggcctttttttcttctaggtaccagcttttatttatcagtttggtaaaaatgttagaaaatgggcattctcacagttgtggcagaaagtataattatctttgactttctagaaagcagtttggctttctagaaacttgcctaacctctccccatttaggcaagatgaattc

SEQ ID NO: 200379 - DNA, 1000 bp, Homo Sapiens
actgaacattgtagattgaaatatttgtttttaatcatgggtacttcaggatcacatatgtacataactgagggttttttttactgtgaaatgcggatacatcaaaacggaaatgtgagaattctagttgagcacaggctttactcattttaacagtttttcatactaaggaaagcaattatcacatttttgcaatacctcatttttttttttccaggcgagcaaaagaaagtctagataagaaattgggttgcccatgtacaaaaggcacaccacctgactttcttgctccctccaggtagaaagatacaacatgatttctcatgttgatataaagtttgtgaaaatagttttttggaggagtaataaattcacttgtccatattaactagcatcccacttatgtggatcggtagacttaattttaagatgtcagtactacccaaattgatctgcagactcaaaacgagccctgtgaaaatcccaactgaggccaggcgcggtggctcatgcctgtaatcccagcactttgggaggccaaggtgggcggatcacgaggtcaagagatcaagaccatcctggccaacatggtgaaaccccgtctctactaaaaatacaaaaattagctgagtgtggtggcgtgcgcatgtagtcccagctactcaggaggctgaggcaggagaatcacttgaacccgggaggtggaggttgcagtgaggcgagattgcaccactgcacaccagcctggtgacacagccaggctccatctcaaaaaaaaaaaaatcccaactaaattttagcaggaataaacaagctgattctcaaattcatatggagatggaagggacccagaatagccctaataatcctgaaaaataacagaactggagcacttatactttctaatttcaaaacttactaacactctgcagtaaccaggcagtgtggcggtggcacacgtcaacatacgtgatgggctgcagtgtctcccccagaattc

SEQ ID NO: 200380 - DNA, 1000 bp, Homo Sapiens
cttaaaatcttaaaatgcgtatacccccttgacataatttgatagttttgttttacagtaattttatatacagaactcaattataagaaaactatcggctgggtgcagtggctcacgcctgtaatcccagcactttgggaggccgaggcgggcagatcacgaggtcaggagatcgagaccatcctggctaacacggtgaaaccccatctctactataaatacaaaaaaaattagccaggcatggtggtgggcgcctgtagtcccagctactcgggaggctgaagcaggagaatggcgtgaacccgggaggcgaagcttgcagtgagccgagatcacgccactgcactccagcctgggcaacagaacgagactctgtctcaaaaaaaaaaaaaagaaaactatcagaaatacggagagttataaacaaagaatcacatctatttataccttacagtagaaaaatagcaaaatcgttctaaataacctaaatgtttgagaacagtgctacgagctgctaactgtccatgaaaatatacctcctcctctcctttctaggtatacaaacatttcccaacctcctctgtagttagacctggccatgagatcctaaccaatggaatgcaagcagaagtgatgtgcgccctttccaggcctgactcacgtatattcctccatgctgttttccccttctgactggctggtagggccatgagccccagagtgagtttggaagccatgtggtaaagaggctagagcttcaggtagctcaggtccctgaatggccatcctatcaatctatatacccagtcacatggctatgacagcaaacaatacacttctactgtattaaggccatatatattttgggtctattggttacaacagttattagtaagccaacccaaactaattcagaaatcagcaccttcaagtgggagatatcataataaaaagttcaaatacacaggtggcattggattgacagtcaggtggcaagctt

SEQ ID NO: 200381 - DNA, 1000 bp, Homo Sapiens
tatgtgttggtaccttcataacagccccagcttacctaatgaaagttgaaagcaaacagtactctctgagattttattatgactgaagcaactgcaatttgaggcaaattatccctacttttgttcccatatcaaaaacagagatgctaaggcaattgctacatgtttggtatggaattaggttccactctcattaatctacaaggaagagcatttttcatgtaaacagctcacgagggtcacagagaagagctgttgctgtgaaaaatgcttgtcaataactttgtgagtgaattttgaaataaagtgcctgtaacctgtcattattccttcctctcaaagtcgagagtgagtggatgaaaattgagcatgtgaattgaaaacagggtgagtgttatggccttatcgacttcaggtaaaatgactgttttaacttgttattatttttccattcagaggtcaggcaatgtacagtattaccagcataaactgcagtgtaagcaaattggtatacaaaaaggctattacctacactcacaaagcagaggaaagtataagtcactaatatcaagtggacttgtgatctctacaaaaacgaaacagccaacagtgctttgaaaaagaatagcatagatatgtaagtatgaagtatctaagaggatgaaaacataaatacagatgtttaaataaatatgtgtatgtttagaaggcaggtaagagatacacatattttttaaattacatataaatcatacttgttttgcaaaggaattgtggaatcatgatgatattagacaccccacctctacatgtcaccttaatttttcctgagatcatcttgaaagtaattagctcctaaattttcaagtccatctgatgtattcttttgaataccagaatattactgtggtctcccttctccctagagaaaaaggaactcaaggagctttgaaaatattaaaaaccctttccgtgtcttctagatttttactttgaattc

SEQ ID NO: 200382 - DNA, 1000 bp, Homo Sapiens
caatggctcacatctgtcatcctgcactttgggaggccaaggcgggcagatcacctgatgtcaggagttcaagaccagtctgggcaacatggcaaaaccccatctctacaaaaaaatgtaaaaattagctgggtgtggtggcgcatgcctgtagtcccagctactcgagaggctgaggtaagaggattgcctaagcccagggaggttaagactgcggtgagccaatattgcaccactgtactccaggctgggtagcagagtgagaccctgtctcaaaaaagaaaaagcaacagcaaaacaaaaccaaggttcaaaagtttgaccgtgatagttaatcctgcattgtctctgttgtctccagcttctggttgctgctgcttaaagtgataaagacagaattgagggggtattaagtagaaaaatctagtgaatactccattcagtgtaggagtggccctaggcccatttacccttaacatttttttctctctcctttttagctatttcaagaagcccctgaatatctactttggatttattcctgaaataatcttcatgacctctttgtttggctatttggttatccttattttttacaagtggacggcctatgatgctcatacctctgagaatgcaccaagccttctgatccatttcataaacatgttcctcttttcctacccagagtctggttattcaatgttgtattctggacaggtacgtcagcccagaggcagactgtctgagatgattatacttgatcaggaagccagatgtttctctgaccctaaaaaatttataactgcccttctatgggacaattctagggctttgccacaaaatgtgataattattttgagaaattggatagtgttattcatagattagtaagaaagtactgttgggggaaatttgtgccatatttggaaactgcgtatgtgatcggtagacttttatatgatgtaccttgtccttcttcttactctgcagaaaggaattc

SEQ ID NO: 200383 - DNA, 1000 bp, Homo Sapiens
ttgtagtattcccaacgtacttgcatcacagacactgtgaggatcaatcctctttattatgtgacatgcaaatctgaaggctacttaaagacaggaatacacagcagagaagctgtataccttatctatattcctaacacatgtggagcattagttttccacaaatgtttaccgagataggttatgtcgactatttatggaggctatcacagccacggtaccactggtgctcaataaatattttatgacaactagaatatatacaggcattctatctacccaatggggctacagatgagaacactaacgcaccaccactcagcaccatgcccagatacagggaacactggaaaatgtattaaagtaacaccggccaatgccaaccgggcctctttcatgcctacttgcctaggacaggagccaaagcttcccaagactaacaggcagaattttaagtggcaagaatgtgagtttggaaataagcacaccacagctttgtgaccttgagcaaattattgatactacagtctttttccttaagtgaaaagtcctacttaagtaaggtgaacttccttcttagactatggaaaccgctcaaataaaaaagaaatgtttcacctgagaagctctgtactggtcaaagaattagcatggtaaagccggaaggctccgtagggattatctagttcagggtggctgccaaatatgttactcgttagtagtaactcgttagtaacttcactgttacttccgatcttgtcctcataaaaacagaatattcttagaccccatccctgacttggaaggattcaggtgcagagttcagtatcattttgttttcagcgtctcaagtgacaagatttgggaaccacagattcaatgcactaccagtcaaaagcttgcagtacaaccggccttccagttcacggttccccctctctactaccgagggtcctccttctccacaagccctcaccccagaccagtggttccagaattc

SEQ ID NO: 200384 - DNA, 1000 bp, Homo Sapiens
gtgattatttttcagcaaggatttgtcagtgttaaattttctctgccttgcagacctgagaattctctcttttgccctcccatggaaagacaacactgtgtgcaggatttttgtgtcataaccccttgttctgtttgttctgcttctcaaatataacacacattctctctctctgtttctccttcagtttttcaagcattttgtatttcagagaggttcatgaccaaagcagcaaacaccataatttgttaaatattaccccagggtgtatctatatgtgggtttatatatttttatttggaaaatgtgtgattatgtctaactatgcttttatccctgtttatattggtttcttcttgactcttagcttgaatctctgatttctctcctttatttctaacatgttatgtctcattttaatatgattgcccctttcttctgagtctcattaaacactgtcttccatatatttctggcatttactgcagctcatgtgaattttgattttattgtttacatttttattttttgagacagtgtcttgctgtcgcccaggctgggtgcagtggcaccgtcatggctcactgcagccttcatctcccaggctcaagtagtcctctcacttcagcctcctgaatagctgggactacaggcatgtgccactgtgcttggctaatttttttattttttgtaggaacagggtctcactatgttgcccaggctggtcttgaactcttgggttcaagcaatcctcctaccttggcctcccaaagtactgggataacagacatgagtcactgtgacaggcctattatttacattttaaatttccctgcttttttccctcatctaatatactttcttaccccatcctgtatattctctagggtttttggttcctatttcctagatatcatgtctttttgcattttatgaaatatgacaagaagtattctaaaatgttcttttgatttctgtgggtgataattttcattgtttt

SEQ ID NO: 200385 - DNA, 1000 bp, Homo Sapiens
taactttatggccagaattttggaggatgttttatctactttcagctggactctcttttatcatcgcaggtttcttcttggcactttcctcgctagctgccagacaacatgctctgatttttactcagtcatgtattgtttttgtctccccaatactagtagaaataaacatcccatccatgtttatattgattctaggttttaatttttctgtttgaatgtatatttcatttgcttatgtgtggattatagtgtcatttatcaattataatttccattaattctggaatatttaattatattttgttaacatttgtgatatattttaactctgtatttagctccgtcaataatgtctatcctttcgacaatacaaaattctaatgatattataaattcatgcagttatacttcaaattaattggacatttaacccatgaaaaacctatatataagacagtcattgaattcaaaatacagaacattcaataaagcgttagttttaggatgctacaagtgtacgatgatacaagcgtactttgtggtattcaagcaatcttgtaaaacatgccaagcagcttaaatgagcctactaaaataaaaaatattaaatatggtaaaaaaattatttaaaaaattatttatatcaaatgttgcactaatggggtaagtaaaactttattcttttatgctatggctggattataaaataatagtagcataatataatttttcacaattataatttatataagaaaaatattttgttcaagttacagaagaattttaattgagataatattacaataaaagtgcctataccacagtcttaagtctagaaccagtcagggtttcaatccaggctttgtcatttaggagctgtgtgtccctgggcgaaccataaactctctgatcctcagtttctgcatttatataatagggctaataatggtaactacttcataggtatttgtgaattttaattacgttaatatatgta

SEQ ID NO: 200386 - DNA, 1000 bp, Homo Sapiens
acgagccaggactgaattcaccatcaccgtctgaagatgccaatccagtaaaaaatacttctggaagcaggtggccacttctgtccacttctcaccccagaaaaaagggtccaagttacctctcagagatatcagaacaaatgccactttttctggaccactccttaaaaacctgagactccaaaggaaacgtgtttgaatcccaaatgttccttataaatggctcttccatttctcaagcagattaagtacatgcgctgcagtaattcaagtcttagaacttattaaagtgagataatatgaagctcctttgtcatgaccctgacaaggaactgatctatttacccagcagcttgaacaaactgtgttaggacactcagaagagaaaggaagggcttggctgttgattttctggaaaggccccatttacagagatgcagcaggaaaaacaagctgacccgattgtgtaatcagctggaataacaaagaaccctgatgttgggtatgagaatccttcaggaaatgcaagttaaagcactctgctgtggctaaaaactagaacacttgataggcttaaggtttagacattgacttctaaaaaataagaacaattatcatttcaagcagttttttagggtaatggccagaggccctaaatatatacctgggcaaactttttaatgttgtctgcaatgatgaaaaatacgaaatcatcctagtctaattattcatctagtttgaaatctatcttaaagtcatgaagtctacttgaaataaatagaagatggacctccaaaatgattctatcacttctggcctctgaggattaagaacaaaggtttaaggctccactgatagatatttggcagatatttcttttgtgatgcatgattcataataaatttttttcttcctacctcctaggaataatacattttgtttctgggactgcagaacttgagaaaaacctgtattgcagaataactaaaatggtgaattc

SEQ ID NO: 200387 - DNA, 1000 bp, Homo Sapiens
ataaaatctagctacttctcaaacacacaaagcccattcctatttctggccctttgcatttgctgttcattctgcccaaagtgctcattttccagaccttcacatggctctctaccttacttatgcaggtatctgcacattttttatcctggagaaaatttccttgacaacattttctaaaagagcaaccccagtcactttttatcctcttgccctgatttagttttcatcatacaactaactctagaactcttactgcctgacattatattaaacattatttgcttatgtgtttattatttgtctcttgcactataatgtaagccccatgagaggagggacatttatagtgtcttttctactgaatccccagttgcctgaaactgcttgacacatagtatgctctttataacaacttgttgaatgaatgaatatgaatgaatgttgtgctaattattatttgaatgttgactcttccttttttttttgagataagatctcattctgtcactcaggttagaatgcagtggcatgatcacggttcactgcagccttaacctcccaggcttaagcaatcatccaacctcagcttcctgagtagctgggactacaggtgtacacaaccacactaggcttatttttttttttatgttttgtagagacaaggtcagtctcactttgttccccaggctgtcttcctatgtatttatgcttaactgttttatgtatccacaatctagtctccctttttattcttataacaagaaattagattttgcaccaatgggttttggttcattagaatatttctttgggatttaatgacgtttggaattgagtattcttttagtaatctctagtgattccctctttcattccccatgatcagtgcttcaaacttttacaaactcatggactctttaatccattcaatatgcttcttagtagaatattttctcacttagtcactgaaaatataggctgtcttaggtatgaattc

SEQ ID NO: 200388 - DNA, 1000 bp, Homo Sapiens
ctgccccggctgcatttaccaccagagattaaagcttcggtagcatctgacgcaccttcccctaatgatgtacatctctcatttgtttctgtactttatcttaaagttcataccacaccactggaagaagaaatcaatacttcaaataatctcctctccccaccatacaatttcactgcactaagagtagcacagtacccaataccagcccgagagccaatcattctccagagagcagagccagctgctttatcagaaattctttcgattttcttagcaacatgagtatccccttctagaagaaagatgttgcctcttggggaaacgcttttccacctcaagttaaactaactttacctgaagaagccggtagttttcctctttttaaaacgcccccctccgcaaatggttctctctttcctttactccaaacctgcccccatccagtccctctctcccacctcctctggtttcctaggagtttgcacgtgattgcctgtcttgtgaaatccagccgcagcccttcgcttttaaacgctctcaaatgacttgtttctatctcgttaaagatgctgcgaaacctcccatctctgcaaagctgtatcactgcttccttagacccaagtctccttcctctcttcctttggaggaatacaaagtgcctgagtttcacggccccggggtgcaggtcggaggcacgcgcctggaaacttgtcctaacgcctctgactccaggactggggggcgcggcgctgccgaggatgcccgaatgccggccgggcttgtaccgggtgcgtggttcaagcctttcgtacccgcctcagtcctcaaagacgagcagggcttggtttctgactcatcgacagacacagacacacacacacacacacacacacacacacacacacacacacacacactctctcacacaggcaggcacgcggacgcccgctcctggagagctggagtttgcggagccggagtggtcgttggctctcgg

SEQ ID NO: 200389 - DNA, 1000 bp, Homo Sapiens
aaaataaaataaaacttaaaaaagaagatatatatatatatgaatatatattatatatattttgctggttcatgaaatcatcatcatcaatcatctaagattctttactgctctgatgttctataattgtcatgaaaattcaagaagaggttaaaaaaaaaagtgaggccagataggtccccatagggcttgacgggtggtggcacattatgtcccttccgcccttccccactgcctctctcctagtcaagttaagaggaagatcagagagaggctaaaaattatctgagtttttggcactgtgagcaggtcataatagtggtgggagggttttccctttctgaagccagaatggatgggctgcctgggtcagcgggagtggggaagaggaggtattgggaagctccaaaatgattactgtaaagatcaggggaactggcaagaggggagactagcagtttatttcctggtagcttgtcttctccatccgtggacttgctagcctgcctagtgccttcataagtgggagtgggtggacgtgttgggggaacgtcgggggaacgtcgggggaacatcaggggaacaaaactggagaaagatgcagggggaaggagagtaggagaaaagggaggaagaagagagagagagataatatgatttgctttaaaaacaattgcctttgtttaatactcagtaaaagttcagagttcttattctaagttgagaattctatattctgacagtaatattcaagaaacacttctctaggctaactgaaactatacatctacctaatagcaaaaagcatcccaggttactaaagtctgattcacattttaaaaaaaaaaaaagaagaaaaagaaagaggaagaatatacacttcttgttatgcccagtcaaattttcattcattttgcctagaaatattagtttcaacatgatcatcaatggaagtcacatgagttggtgataagttttcatgactaacatacataaagaa

SEQ ID NO: 200390 - DNA, 1000 bp, Homo Sapiens
tgtagacctcagtttccttatttatgaaaatagtcaggtctaccttacatggtattattataaagagtaaataaagcaacataaattaagggtctgatacatccacttaattctttcatttgagggttctaaaagcagaatttatcttcaatataaatatttccattttttaataattacagaaagtattcataccattgattccatattaaacattcggataaaattaatggtaaatatttaccaagatactgaaacgggttattcttatgaatttgcagcaacaggacctggcgaaaactacattttaaaactacacagtgaaagaggaaaatacaaaactgactcctaaaaagaaaaatagggaagggtttgttaaccccaaatctgctgaaatctcaaacctatttttggaattactggatgccaggtttccatgccaggaatttaagaactcggtgcttaaacatttgttgaaaacagatgtggcattgtatgacattggcaccagctttcctgggaaacaccagatgcagagttgggccagatacaaaacccagagaatttgaggccaccacctccatcctgctgctcctttctgtgccacacaacccatcgccctatgaggtctatttaaattctattagagtttcactcccatgccagaacaccagggaacattatgttgggggggaatgagggaggatgagtctcttgttataccctgatttgagaatgtttaatcaagtgagtttatgtagtttaaacctcaatgccacaattatcatcaaatggatacccaaacccaccaagcaagacatctggttgtaatgaattcattaatattaacatgatattaaaaaaaagtatcaagagaagaagggagacgggctgtcaggacaacagaacaaatggaaaccaacgccaattgtcttaactcttcctcttgtacgcttgcagaaattcctttcaactagcaataccacttatttaagaattc

SEQ ID NO: 200391 - DNA, 1000 bp, Homo Sapiens
tgagccgctgcacccggcctgaagttaatgattttgtattgcctaggtccaaatgttgaaatctttgctattctcaagtgactagaattaacttgagaaatactgtctaagagaaaaataccagatatccttaaaggcatgcttatttgttttattatgtagactaactcaacagagtaaaagaataattgcggtggctcatgcctgtaatcccagcactttgggaggccgaggcagatggatgacgaggtcaggagttcaagaccagcctggccaagatggtgaaatcccatctctactaaaactataaaaattagccaggcgtggtggcaggcacctgtaatcccagctactcgggaggtggaggcaggagaatcacttgaacctgggtggcaggggttgcagtgagccaagatcgcaccactgcactccagactgggcgacagagtgagattccatctcaaaaaaaaaaaatgctaaattttccatcatatatatatatatattgagtcagggtctcactttgttacctaggttggagtggtgtgatcagggctcactgcagcctcaaccacctgggctgaaccaatcctcccaccttagcttcccgagtatctgggactacttggtgcatgacaccccgcctggctaacttttgtattttttgtagagacagggtttcaccatgttgcccaggctgatcttgaactcctgacctcaagtgagccgccttcctctgcctccgaaagtgctgagattacaggcatgagccaccacatccagacttccatcatatttatagatacatatatacgtgtgtgtttgtgtatgtgtaaaataacttaatcctccaataagtccccaggccattttctctgcggaaataagtatgaagtaatagggtacccagtaatattatgaaagaaaaaaagagcataacctttttcttgatgttaggttactcttgtataaaggaaaatcccataagtaaaaagaattc

SEQ ID NO: 200392 - DNA, 1000 bp, Homo Sapiens
tagtgatgtgatcgattactaaggagtcttggtctgttctgcagaccctgggactacagtgtggccatttgtataagatacgggtgttacaagccaatgcgtggtatcacacatctgtctctattttaaaaccacttggtctccggcaaggattgcagagtggaggctcacatttattcaagggaagtcatgtgcaaaataatatgtttgcttgctgaacaggtctgtcacttgctggtcatctccatctgagtttgctgcaaaggaagcagttgatcggccactactagggcatcaataccaaataggaataacacatatgaaatggtctgaaattagtaggctttagaaatgaaaagcagctaggcacagtggctcacgcctatagccccaatactgtgggaggctgagacgagaggatcgctggagcccagcagttcgaggctgcagtaagctatgatcgtaccactgaattccagcctggggaacagagggaaaccctatttctaaaattaaaaaaaaaaggctcacagatttttaaagatctttgtgtattgcatccaaatgttgcctttttttccatgccagagctaaaatggaaataagtcatgagataaagtaaaagagaacatctactgattttcatgaactcatactttttattcatttaatcacctctctatccttatgttcatccagtcagtccacaaacatttattacaattgttgtacactttcccaagtaaaataaggttcaatttgaaatttactttgtgcttctttcatccaaaattatatatgagcttgagcaaagcaatccactggatatatctatggcttcggcaaccacccactatgcactggtgacattcaaatttctacatggagctcagacatcactcttgaattccagctttatcatcaacttcccaccagacccccgttcatcagtatttaagtgtcccactaaacttaatcgaaacacatccaaattgaattc

SEQ ID NO: 200393 - DNA, 1000 bp, Homo Sapiens
tacattttcctatttattttcactgctagtaatttttaaagttttatactgttcattatacatatgctgtagagattatagatgtcatcttcctctgaaggatgttgagttttttgttttattgggcgttgtaggctacacttggaattgtgtagacttattttactctttcgttaggttagatctgtggaaagcctctttaacttgacagaacttaacctccaaattctgtgtctcctctagatcttatgaggttttatattaggctttgctagtgagtctagagtaggtcttattctctagactcgagtgtggaccttattctgtagcatggcttcatttctaagctgtatcacagatgaatgcccaaagggttaatgagtagcttacaaagggtatccattcttaactgggcttgtatgctcaccatcccccagcactactggacctttagtatatctgttcagcttaaccacatagcagtcactttggggtatgtcttaggtagtcttatcctgaacatatgtgctctgcctccagccaaggacacacagcagcctgaccctcacatggacttattgcccccctcttccctgcatagattgtctccagcgctctattccacaggttccactgcttcaactgtactaaactctaaagcactaccttctcagctcagcaggacagttatactttgcttgggctgaagcttactgtgccatggttaggaaattgtacccagaaatagagctggagtgatcgtggagcccatcttgtgagctcttctctcagagatcacagtcttacattgcttttgttcaatccctaaaaatagttgtttcatagtcatatcagttttatggttatttacattaggaggcacaggctggtattggttgctccgtcatagccagaagcagaagaccatacccattacatcataaaattaaaaagtctgacaatattaagtcttggtaaagaagtggtgcaacatgaattc

SEQ ID NO: 200394 - DNA, 1000 bp, Homo Sapiens
ctgttctgcccagattgccatcattgctgcctgggtccatcaccataatggacaaggaaacacatccatggtcacagactgggcacaaagtaaaggtctctatgctcctgatgcagatgctatgactgcatgccagacttggaacttctgccaaaagttgcaacaaagggaggacacatcacattgggcattgacccacctgcaatggcagattgacatttgacttttgattccctctcacgacagtccatgggacctcactgctgtggactcttttccagattatggtgtttttgttccagttgatcatccaattctggccacaccattatggcatttgaaactaatccatgccatgttttgggctgtctaaatgatctgaagtctgacactagtgtgccttttatcacaaaagtcattcaacagtgtgctgatgttgaagttatttgatgaaccttccatgctcgtcaactgagccatctgtgggcatctggtattgtggaacattggaatggtctcctcattaacatctcctattcttcttccctcaccttctcctgatcaacacaccttagtaagacaattgatcattcaatgccagtcttactgggaagggatcatttactctcagttgcttcctgagtaatgattaggagcaaagaggtgagagttatatagacttattttaaaaattcaggactctgcccaaatattcctgggcatgatgtttttatttttctcctaatggcaactccaagccagtctggttggttcatctgctaactgttgtgagtaataaagccttttgtcttaaccagattcttattcttatttccttatttcttctaccagaattcataaaactatggcaggctaacttgttagcttgcaagtagggtaaaatatcagatcttcatagttcttggctatattcccacagtgaagaacagcctggattataaaacatgtacagcacacagctgtacagaatgaggcttgc

SEQ ID NO: 200395 - DNA, 1000 bp, Homo Sapiens
cttcctcccccactttttaaaattatataataaatcaggagtcttaaaaacctcctctttgggggtttctgtaagtcgagagtttccttggatgaatcgctatccaaatgtgtgagggaagaacacctttataggcctgtctcagttctcatcctccctggaggccacccagttttgagttcccaagccctcttttggggatttggttctgtgggctggtctgtcttccaggaaacacatataggacatgtgtaaaaccggattgccctgggaacctccattccctctgtacagcaggagcaaagtgaggctctccgtagcaggaagaagtgttcatagcattcttctttataccttgcccttgaaatccaaaggaaatgatggatggcctatgacctatagaagggtttctttggttccagactcggggtgacaccatagaagagagaaggctataaacaccagaaataaagagttgaggtttcagaggatggtggggatctggggtggggaggagggggtaggaaattaataagaaatacgtcctcgaggccttgaatcctgagaggcccatcattcagtcttgtggtgacagagtcacacagccttgtttgaccttcataggccctagccagagttcacattccattatctcaatctgattatatcatccttactaaccagcctttggaatgagagcagccacattcttctcttaatctttcagtcccaaggactttcactgtcttctttcgtaacccatgttcctctcctctcttgccaccaatgctacttgatcgtctgcagaacaatgaattgtggccgaggtgactattgcagaagggcctcgtggctggctcctgtgccggagtctcaggaagagtgggtctgcagtttgggcgagtgcccgagggggacagaggaaggtgaggagcagtgtttcctgccttcccgggaggtgaaggaggacaggtggggtcagagcctctggtgtgaattc

SEQ ID NO: 200396 - DNA, 1000 bp, Homo Sapiens
ttcccagaacagcccactgcagacaggtggacatggtaattacggaggctccatctgttagtggtgctggatatactgggatctctgtttgaacttagatcctttgagtatttgggcagatgcatgttggaggctagagaaatattaatgcagacagcgctacatacatttttgttgcattgaacaaatcaatttaactcaattaacatttattgagtacttgctaagactcaggcactgtgttggattccaagcatgcgattcagctcatggatatatggagagagcagaatgaaaacatttttactgtcacacaaaaggtttgagactcaaactcatagtagattaaatctaagagatctgagaagtcatctactccacttcctcctataacaatgagcaaacgatatcctttacagatagcatatttaaaacaatatagatggttttggaacagagatttaagctgatgtcttaatatcaacttagtttaaaaatatttaggataaaaattttgtttgatattaatttatgatcctcataaggatctgagttacaaacattctataataatatatctcacaattaaacaaagtgaattaaccaccatggcatagctattctgttctggtctgtattttcagatatacagcatttaaaatgttatatacttgctgcttataagctacccagacagcaacaaaacaaatggaatgtacaaagtgtggaactaagccaaaagcccttctttttctctttgttacatgatttttcaaagctattaatactgttaacattgcactggatagtagaattctagttctggtagaactggttttcttttctttctttcttttttttttttttgagacggagtcttgctctgtcacccaggctggagtgcagtggtgcaatctcggctcactgcaagctccgcctcccgggttcacgccattctcctgcctcagcctcccaagtaactgggactataggcgcccac

SEQ ID NO: 200397 - DNA, 1000 bp, Homo Sapiens
gtggatggttaggagtgggtcgaaggtcaagctccaggggagcctaaggtttagggggcagcatccgcagaggtggctgagaaggcagcgtcaaggaaggatgaggagaaagagccagaggcgggggcagtgaagccagtgactgacacagccgaggagcagtggccagggggtgctgagagtgtgttgcacgtggcagcacagtggctgttggtgacgtctgaatgtgatcagtggcatgatggggacagaagcacattgcagtgggctgagggtcagtgacaatggagggtgtggagacggtgatgtaagaggtctgatgggaaaaaaaggaagaaattccacgtagctcagtaaggaaactgaggcccagagagggcaaataatgtactcaaagtcagagttaatggtgtagaaggacaggatgcaaatgaggacagcgtgtgactggtgtgactgctcacgtttcctggttccatcccttccaccaggctgcctcctgaagcaaggcagcgatcagtttctgagctctcatgacccatcttcatagcgtctccttctcaaccagcacaagaaatacaatagtcaaaacagaaaggcaaagcctctctgcaaccctcttccctatttcttcactctcctgacaaaaagggactgaaaaatttccaaaatcaagaagcataaagcctgatttctttttctagtcagactaacgaaacgatttattttctttccactctcttttaaagaaaagaggaacagcaccgctccctggagctattctagcagttaacaacaaagctaagcactacttaccacagaactttgtaagatatcagaaaaaaaaaacagtttacaaaaatttttttagaggcagggttacccgggctggagtacagtggcatgttcacagctcactataacctcaagttcctgggctcaggtgatcctcccacctcagcctcccgacaagctgggaccacaggtgctccaccacacc

SEQ ID NO: 200398 - DNA, 1000 bp, Homo Sapiens
ttccctttctgcacattcttgccagcatttgttatttcctgtcttttggataaaaagcatttaactggggtgaaatgatatatcattgcagttttgatttgcatttgtcttatgataagtgatgttgagtaccttttcatatacttgtttgctatttgtatgtcttcttttgagaaatgtctattcaaatattttgcccatttttgataggattattagattttttttctatagagttgtttcagatccttatatattctgattattaaccccttgtctgatgggcagtatgcaaatattttctcccattctgtgaattgtctcttcatattatagactgtttccatcactaaacagaaactttttaacttgatgtgatccaatttgtccatttttgcttggttgtctatgcttgtggggtactcctcaagaaatattgcccagaacaatgtcctggagagttttcctaatgttttcttgtagtagttttatagtttgaggtcttagatgtaaatctttaattcattttgatttgtatatggtgagagatagggatctagcttcatttatctgcttatgaatatacagtttttccagcctcatttccacagtgtatgttcttgacaattttgtcaaaactgagttcactgtacgtctgtggctttgttcttgggctctctattctgtttcattggtctatgtgtctgtttttatgccagtaccatgctgtttttgttactatagttctgtaatataatttgaagtcaggtaatgtgattcctccagttttgctctttatgttcttcatatagaatataaaatataaagaacataaaatttcattcagttttgttctttatatagaatctatgtgctataatctataaacattgatgaaagaaataaaataagatctatttaaatagagatactgcgctcatggattagaagactcattattggtaaaaggtcaactttgtccaaactgatctatagatga

SEQ ID NO: 200399 - DNA, 1000 bp, Homo Sapiens
aggcatgtagcatccttctcactggcctctcttcctcccccatagccaatcttcggaccacagctagaaatatttttttcaatgagtgaagatcaacctactcccctgcttcagctctttttatgtttcccttttctcacttaaaatagaatgtaagcttcttacccagggctacaaggatacacaactcaaccttcctcccattccccactcagcctctatctctacctacactcgctgtcccttgaccttccaaatgtaccgtgtgtcaaggcttttgctcttgctgcttgaaatgttctttgagaaaatccctgccttttttctcagcattcaggtgccagctcaaatatcagaccctcagagaatccttctcagattatcctagcaagagcaataatattgtccctgctccactctgtttgttttttatttttattattttttttttttgagatggagtctctgtcacccaggctggactgcagtggggtgatctcggctcaccgcaacctccacctccaggattcaagcaattctcctgcctcagcctcctgagtagctaggattacaggctcacaccactgctcctggctaatttttgtatttttagtagagacagggtttcaccatgttggccaggctggtctcgaactcctgacctcaggtgatctgcccatgtcggcctcccaaagtgctgggattacaggtgtgagccgccgcacccggcatctatctgttttaatggttattttcttcttcacacttaaaattcttcaaaatacctgcatgtttattgcctgtcttccctactagaatggaaacttcttgcagacgtggatttttgtcttgttcattgtggtgtgcctcgcagctagacagtgcttagtacaacacaggtactcaataaatgtttgctgaattaatgaaaaaacactaataaggtaggatttaccttgatgatctggttttttaaaagcccgcaatgagtgttgaattc

SEQ ID NO: 200400 - DNA, 1000 bp, Homo Sapiens
agaattgcatgcaaaactaatagaaggtcaaggaaaaaacttaaatttgctttcatattattactgataatactataaaattttgaaagtgaataataaagatgactttcttttctaaattgtcttaataagtattgtattatcttcataatttccctattagctatagttgatataagtttgacaggatatgtgcaatccacatgaaacgaacaaaagtggaaatgtacctctatgcattcatttatttagaccatgaatcctttgcaacagggttgttttgttctttctgtatctctggcacttggcacagtgctcaggaaataggccctcaaaaaagtttgttaagtaaatggaataaattatggtaaatactgaaagaagagactaagaaatacacattctgaattaaaataatttgcattctaaaaaagaaagcacaaaatataattctggaagtgattttcttccctgagtcttcaggaaatgtggaatgtaaggcagtaggaaatatctgataattaagattcttcttcatatgtcattttgaagatatccataaactgcagaattatatttgtattacatacagaatagttaatttatatctaagagtggtaactgctttactccattaaaactggaacaagattttaccctcacaggtatcttccaacttggttctttaactttccaagcattaacccaatttctttcaagtgtcactgttacagagatagaaaaaaaaaaaagtgactcattcttgtgaatgagtcctgacttcacatggaacttaagagcaggaatgtgtgtataaatatgtaggggtacacacaaacatgtacactgcttatacagtaaagcacttactctccaatagaaaagcttaaagccagggaagaatacacaaacacataaaaccaccaaaactcctcccaaccaatttcacattacacttttagataaattccatgcattttaagcccataaaaaagaattc

SEQ ID NO: 200401 - DNA, 1000 bp, Homo Sapiens
tccaactgctacctcgtttttcttcccccttgtagggcaaaacctgttcaaagaccttccatactggtagtatccaactcatttcctcttaggttttcttgaacccacttaatcaggctcttcctgcctcttcccaccaatagagctcccatcaaggtagctgtgggttagctagatatatgtgaagttatcactcactccctattgcaatttctttattctaattttctctggacctaaatctaatgaggctcttgcctccatgttgcactggagatcggcagcagctccttcttagtcccttgtggtgctcccttctcatctgcttaccccctaaatgctggtaggtctcagggcttagtccttggaccctttctttttaccctttgtactcagtcctttggtgtcagcttatccactctcaaggctttaaaaaccaactgtgcaccaaagacttccaaaattatttatttcatctctcccttgacctccagattaatatatctaactgcctacttgaattctttactagattctgtcaattattttactttagtccttatccatttctcatcaccccatgcactatacttaacacagctgccagagtgatcctttcataaggtatatcacaaaatggcttccttcccctctcaatcctctgtggctccttatcctacttaaggtaactgctaaagtcctaaaaatggctatgaagctttaggtgatcaggacctctgctacatctttgacctcatctcctacaatgctcctctcaactctgttctaaccatggccacctcttgcctgtcctcaaaggctcagcatgctgctccctctgcctggattttctgtctccagatatcctgatggctcattccctcacctccttcaggcctctgtgcaagcatcattttcagtgaggcctgacttgaatgtcctctacgatatcgatcctttacctcttaccactttccatcctctttaccctgccttattt

SEQ ID NO: 200402 - DNA, 1000 bp, Homo Sapiens
tcttggtcattaccgactacataacaaagccatgttactatcattcaatagtactcttctaagttttcctgttttacttttcttctcaaggagttggtgacacttaccagaatgggtcctgaggtgtcctgtgagggcgtcccttcttctacaggcgtagctacagaaaggacatttgaacggcttctctccagagtgtaactttatgtgtctcagaaggttgcccttctgagtaaaagaagctccacactggttacagtggaaggggcgttcacctgcagtaaggagaagaaatgggaagtatcaactagggtatgtgcaagtgactaatttgccatccactgttaaccaaagccagttctctatgctaaaaatgttcatctccctcataagtcttttaaacatttatctgcccagaatttgctttgtcaatacagttaccaaagtcttaagttttacatcaaatgatctttccccttttatgtataaatgtgacaaaagtcctatcattgactcagaagaataacaataatagcatttatcattggttgaacaatgaggtgctgtcactttagggccttacacacaattggatgctttccatagaatatttcaatcctttcttacaatgacaataattaggttgttttaattttaattaacaaatgaagaaattaaagtccatagatcaaactattttgttacacagagctagaaagtagtcaaggtgagaaatgaacctggtcagtttggctacaaaatcttgttctctttcttttaccatgctatctctttaaaattggcagaaaatttgagctgaaagagaccttcagtctaattccctcatttagctgatatggaaaggggcaactaaaaggtacagcaaatgaaccagcttacaaagctcattagtacaagattttcaaatacgggccaggtttcttgattctcctggtcactaatagtaaaacctttagcaaaatttccaaataaaattatt

SEQ ID NO: 200403 - DNA, 1000 bp, Homo Sapiens
atatgaaaattttctaaaggcaaaatcaatagtataaaaaaacctaagtcgaacattaagagaagataagcctttgaaagataaaattttaaataaattattagcatgtcataaagttttatttattttaagacgaaacaaaaatgttagttgatacatgagaatagaggtgttaattagtaagtttatgaaccagacttctgtttatattctcttatgaaggataatttttggttagtatgagattttatttcttgattatgagcattaataaaggcaagtgttggctgagcctggatgaaatatgagatgtttataacacacacacaattgtgacaattcaaatgcagaactttttgtttaaacaaatgattacggttgaagtagaagtataagcagggccataattcatgacacatccaattctttttcctgctgcagtcattagttcttcaccttcgcagtaacaaccatatgagtgcaacgaaatagaccatgactaaaggatttggtaagatcttgctctacaagaaaacaaaaagaaaaacaaataaaaccttaagaaaaagtactatgaattgctgcttaatgaattccctatgcttacagaactacatagctaggctatggggaatttaactgtctgagtcttctttcatttccaaaccaataatacattgacatagcctcggtctacattatctaaattaattagagccagaacctaaataatttcctggctgttagttttaaacaaatgaaaatgttggtatcaaggctttcctgttgctactgtatcaagatctatatgacatatatggtatcaaaacgtatatgatatatatggaatatggttatatacaatctagcttggtcatggttacatagaaagactattctttttaagtaaggctgctcgtttttaaatcacagtaaaacataggaatcttcaactcagaagtctatttttccatgggtatgctgaaataatgctttcaaa

SEQ ID NO: 200404 - DNA, 1000 bp, Homo Sapiens
ggaactggcttatgctattaggaggctgataagtcccaggatgcgacacaccctggtgtgtcagctggagggtgtgtctccagccggagaccagccacgtgtgaaggccttagagccagggaggccgatggtggggctcgtggccagggctgaagccctgcaaaccccggctgctgctggtgtaagtcctggggcccaaaggcctgggaaccccgagttctggtgaacaaggacaggagaggaagagggcctgcatcccaccacagaagatggacacacagattcagtgcccacccgattgagggtagatcttccccatcccctccagtgtgactctcaccctcatcttttccagaaacactttcacagacacaccccaaataatgctttcccaggtttctaggcattccttaattcagccaagttgacacctaaaatcagtcgtcacaatgcgggggaaaaaagcatagcccccaccacagcaatgtatagacatgtcattatgttctcgccaacaggttctaccacaaagtttttgtgccactttgtagagtcctttttttcttttttcttttttttaagacagcgtccaggctggagtgcagtggcatgatcttggctgactgcaacctccacctcccaggttcaagcggttctcctgcctcagcctcccaagtagttgggctaaaggcgcctgccaccatgcccggctaattttttgtatttttagtagagacagggtttcaccatgttgggcaggctggtctcaaactcctgacctcagggatccacttgccttagcctcccagagtgctgggtttactacaggcgtgagccaccacgcctggtcactctgtagagtctcaaagagagagggtgtacccttctcctcttgagcctggcttcaatgtaaacataatgatagaaactgggtcatcagatatcctgtaggacggaggctgtatgtgtcgaagaaacgagagtcgaggtccctgaattc

SEQ ID NO: 200405 - DNA, 1000 bp, Homo Sapiens
aatgaagaaacacttccaatagttcaaatgtattgcaaggactcagaccaagcttgaattttattaccaggcagggggttgaccacagaagtaggcaagcagggcatagaggttgacttccatctctaagggtggtttttggtgtgtgtgtgtctgtgtgtgttttaatttattcgttgctcttaaaaaaatgaagagaaaaaaaggagctgaataacttctggttggctggatgccgatattattttttttggcaagagccgctgagtggctgaaaggtggccattaacactctgacagaaagtgctgacagggtgattataagattaacaccctatgttatattaagagtgtcaaaacctcactcttacctgtcaatggaaaataacagcaggcgtggaagcactacagatgccaaacgatttctaatgtggaagcaccgtgcattggtgtgtctaaacttttgtcaatgcccgtattagctacagaattcagcggatggttgaaggcattcatttcttactcaatagcatgatttcagaagtgaatgattttataaaatctgcatattatagtcattctcaattggaataagaatcttacatatgatttggtaaggtaaggagaaactaatagtgaatatcacttcttttataaacccaaattgtattttttaaagcaattatttacctcaattatgaggaaacatttaacagacaagctattttctaaattgcgcctatactgctttgtagctcccaaactgaaaattcctccaaattctggctccaaaaccacataactagaaagttttccttcaacaaggtgtttggttatttgttggcttattcactcttaatcagacagggtcagatccttcctttgcaacacatacaagactccactaaatgtatgtaaatgtaaaatattagcatcaattaaactacaaaaacctctagtactttctcgtctaggaatggctattgaacatgttgaattc

SEQ ID NO: 200406 - DNA, 1000 bp, Homo Sapiens
tccttgcaaactaaactttgagtcttgagaactgtcctgaacactttacctgcttttctttttgtgtttttttctcttcttcattcttttacctattcctgcatatagttcagctctcatctaaattattaatatcagtgactccaggatactctctattatctacactggatgcttccttagcattggtttttctctggagataacagtttttacacagtttttattacttgcatatattctatctttcaaaatagaatgtaaggtgtgttgggatagaaactgtgtcccatacacgtacctgtggtgtgtgctaatctctttataaatattctttgaatgaatggccagtaccttcttatatgttgcataatcaaagctttaatttaccaaccctattttcaaagtctctttagtatccctctttattggtaataatgatgaaattcataaacttgtgatagtatcaacatgtacgtcagtttctaattggtatctgctttactcttcccacttccacctttcttccagtgtaagtcaaacactttgaatgaatatagaaccattcgtactgaaacttcaaagcagacaaaacaaacagtaatagtttaccttcggtaggggtttggcaggtttgcagtggagtcctccaacgaactcaacatttggtaagagtgggtgaggaaattgaaaatcccagtagtttcgaataagccatatgtcagcttttgccattgtctcagataacgtagtgggtcttcctgatgggggaaaaaaaaagaaaagatagatgacacaagataattaaactaggtaattttctgaaagaagttagaataatgtgggcaaaaatgtaggcaaagtgtttgtgccttgaaaaaaaatacatatattcgtatataggcataatttaatttttatgtattatatattttacccatgtgtatttacaagaaaggcaaagtggtgagagaatcatgagggaaaactgcatccctca

SEQ ID NO: 200407 - DNA, 1000 bp, Homo Sapiens
catatttgtgaatttctcaaatttccctttgtttttgatttcagagaacatacactgtatgatttcaatctttttaaatttattgaggcttgttttatgacctaagatatggtctatcctggagaatattctatgtatccttaagaagaaaatcgttctgttgttgttgaaagaatgtcctgtagatgtgtgttgtgtctagtcggtttctgctgcctctcttaaagtagaagcagggtagtcagttcatgttataccctaatattccacttctattcagtcttccctctgaggtcaagaagctagtatgcctcaattatcatcatcatcatcattatcatcagtcaatacttacatagcacatccaggcactcttctaagcactttccataaaatcactcatttaatctcaccacatgctcacctttgtaccccaagcagctgttcctcactgtacgtggagttcccctcaccctgccgggtctgagtccactcattctcagacttcttttccttttgtgccttcatgcagttacagcagccacaggggtcatgactctcaggaggtgtgtcttctgggtatttgtttcttctaactgcgtcaatgtaagctgcaaacaacagcccctccattaggtctccatctgaccctgaaaatcaactttgcaacctgcctttcctctctgggaggctgctcgtaagcatgagaaggtaagcatgatggccagggctagaggcgtcatgctgacttttaagcactcatacaaagctgaataaacatgtttctctgtggtccgtggtcagaagagacactgctcgtaaaatagtattttttgttgcagtgcctcccacccctaaaatttaaagtagagaggagttcaattcttttacactaacaattatagaactaatatataccaaggaacttggctagaagatcaagagggcggatgggtaagatctactcctgaccacaaagaggttagtttaatgcaagctt

SEQ ID NO: 200408 - DNA, 1000 bp, Homo Sapiens
ttatgttgaaatttgatctccagtgaggtggtgttaggaggtggggcctagtgtgatgtgttttgtcatggaggtggatccctcatgaatacattaatgcccttttgcaggaatagatttgttctgagagagataggattgttataagtgagcccagtctctcctgctttctctttgcatgcacttctcttcttgctttctaccatgagtcaaagcgacaggagacccttgccagatgtgctgcttgatcttggactttccagccaccagaatcatgagccaaataaacctcttttctaaattacccagtctcagatactctgttttagcaacataaaatggactaagacaccctctcttttatagatgaggcactgagagattaagtaatgtcacctaaaatcacacagctattgagtaagtggtagaagtgtaattcaaaaccatgcagtcagtttccccagagtgattgatcccaaactctacactaacatagccccttctgcagtctgaagattaccaaatgaagggatgcatgcatgtatgtttgcatgcattcattctacagatctggaagcatcttttataaatgaagccttctgtgcagggatccaaatgcaaaaaaaaaaatcttttttccttgcagcatagtttagaaatggattccttgatgctttaatgaccatattcacagatgtggacacctgaagggtaaataatttacatgccttcttcaagctcccacaattagaaaaaaaatgaattcaaatctgaacctagatgttctgtccccaggcctagtcttacttccatcctgatgtacttgcttaaagtaaaaaaggagatcagacacctagacatgtgataggaatataacaatatagcaatgctttgtgattttataaaatgtataaaataccatgggtagacatagattatgattatgtaacaaactaaatgccaccattttaataaaagttcttgtctctattataagctt

SEQ ID NO: 200409 - DNA, 1000 bp, Homo Sapiens
gctgcataagatcggaccagctggggatggggctcagccagggatggagcttgggttgagagcattggattcaggtgttgactttgagccagagcagaatcccagaggtaagaggagattttcttttgggaaatactatcaggcttatcatcctttgttgttgttgttgttgttattttttctttttctctttgtgaagggcaatcctttttccgtttttaagaacctagaaccatgtcttcaaagtaggtgactgggacattacaacacttcatttggtttctttggtagcagattcacatgacagaatggtttttactttacttgaaaactcttcctaccttagaatgcaccatagagtggtcaacagtgattcccaagggaacaggaaagccacagtttggcccacccccaaaggatgtggtagtggaattaatgttgcctctgagttcatcctgcatatatttaaaggtgaactgtctagaaaaataaaattttttaaatgaaatatttattttgccagccccataatgcttcttgctttgggtggggattccctttttcttcgtgcttcagggctcaatctgtcactgcctttcctctgatttcattaacttgagcttgtgttcatcttgtggcagcttaataacctttatttgtggagttcctcaaagaaagccttggttataaatcccatgtcacagaaatggagttataaatgccaatctgtgtcactgtataatatttattattttaattaaagaaaatggatagtgacatttatttggtcacaagttacttgttaatggcaatgaatgacaaaaaaattactaattttatgagcaaatctcagaatgtttttcagtgatgattctgttgtgctttcagtatgagttggacatgtttttggaagccagtgcttgtatttggtgagacattcttatcatacagaaaagcatcagcttactgagagggacagtcagatctacctggtgaattc

SEQ ID NO: 200410 - DNA, 1000 bp, Homo Sapiens
ggtttggaataggctctgttaattttgaagttatgctttctagatgtattggaattaacctgaaatattggtggaatgcttttttaattgatagacctgcagttatttaacccttccacatagaactattatcaattgatctagaaagggctgggacttaaaaatttacaggtaacctgtcttttaatataagagattgttaaattaatatatctttaagaaattaatacattaattaaataattatgattattaatgattgcataataaattaaataataatttttatgtttaaatcattatggagtcaggcacctactaaattttcaagatttcctctcacacttcagaaatgatagtttcattaaaatatttttagatttttgactctctaattcaatttgtaaatgtagttcgccgagttttccttatttaaataaaccttagtcaacattttcattcattcattcattattttttccacaatatttattgaggcaaataatattattcattattatatatgccaggcaatgtgctaagcactatagataaaaacatcatattttttccttgtgagtgtctctatcctggtcttatactaaaagagaaaattaggagaactcatctttttcagcttttattttcagttatcagatgctagagtgtatcctactatcagagctattaggacattcattaacttgtatttgtttcataggaactagcactgtgctcttggctgaaagagaacgggatacatctcctaatggctttaagaactgggacttcatgtctgttcacacatggggagagaaccctataggtacttggactttgagaattacagacatggtaagtgtgaatgagaggatgaaaaaacacaagcttacttttaaacattttgaggcacttttaaggttgatttcatcattaattagggccctaaagaattgtaccccttcttagtagaagtaagggaaaagtagagtgtttcaag

SEQ ID NO: 200411 - DNA, 1000 bp, Homo Sapiens
aaaagaaagactggagctatcaaataaaggctgaactaggtatattccaagagtacaaggttggcctaaattcaagaaaattatcaaaataattcatcatattaacagaataaaaaagaagctatgtggtgatcttaatgtttggaagggcgcttgatgcaattcacacctgcattaatcgtttgtttgttttagaggcagaatcttgctctgtcacccaggctggagtgcagtggtgcaatctccactcactgcaacctccacctgccgggttcaagcaattctctctgcctcagcctctcgagtagctggagtagctaggattacaggtgcccaccacaccaggctaatttttgtatttttagtggagttggggtttcactatgttggccaggcttctctcgaactcctgacctcaggtgagcctcggcctcccaaaatgctgggattacaggcatgggccaccgtgaccagccagaatcttactttgttacccaggctgcagcatggtggtgagaacacagctcactgcagcctcaaccttctcagctcaagcaatactcccacctcatgcaccagctaatttttttgtgtgttttctgtagagatggggcctcactatgttgcttaggctggtctcaaactcctgagctcaagggatcgtcttgtgagacattgcgtccagccaattattttccttctttgcttcaactcccatcagttaccagttcctggactggaatgctgttcttcctcctctttcttgactggccccgtattttctctcctgtctcagcttaaatgtcactcctagactcattgttcccatgtcaggaactcatctatatatgacaacacccttatgacagcctgtaatttttgaaagtctattcattttattttatttttccaagacagggtcttgctttgttgcccaggctggagtgcagtggtgtgatcgtagctaactgcagtctcagcctcctggactcaggaattc

SEQ ID NO: 200412 - DNA, 1000 bp, Homo Sapiens
tgaccaacacagtctctatcacacacacacacacacacacacacacacacacacacttatatattcagaggacttctttataatagttctattcaagcaagccatgtaggagaaatgttgtcacttttgtgagggcatataacatgagcaacctataatggatccctttttttggtgtttgccatctcttagagagatttgatttgcaaaggaagcccccaaaacgtgcctgttatccacacgaccctgtatgtctagggcaggccttgatggctgatcaacctgtcttgaagtgaatgagggagaatattttaacgtggaatgccaccttaaagcatgactttaaaaaatatcttgaggctgggcctgtaatccgagcactttgggaggccaaagtgggaggatctcttgagctcaggagttcaagcccagcctaggcaacatagcaagagctcgcctctacaaaaaatagaaaaaattagctgagcatggtggtgcacgcctgtggtcccagctgctctggagcctgaggtgggacgatcctttgagctggggaggtcaaggctgcagtgggctgtggtcacaccactgcactccagtgtgggtgacagagcaagactctgtctcttaaaaaatataaaaaaaccttgaaataatagtataaatacaacttcgctacactcagtattaattactagtcataaccctaaattaatttgtcaatatgccatgtaaagacatttaaaaagaaattcaaatgccaaaaaataaaagatttgtactcgttataaacattaactcacttaacttcaaacactaattattactatttatgaaggaaatcatggcctccattatattctcagaaaaaaaaattctctaaccttgaaaatctatccgaggctctggctagacctcaactcctgcaagcagcttgtaggtttgaaatcaataacccttctggcaacttcttttcagggccaagattaactgccctaga

SEQ ID NO: 200413 - DNA, 1000 bp, Homo Sapiens
aatttgccagtcagtgtcttttaattgggcatttagcccctctacatttaaggttaatattgttatgtgtgaatttgatcctgtcattatgatgctagctggttatttcgcccattagttgattcagtttcttcatagcaacgatggtctttactgtttggcatgtttttgcagtggctggtaccagttgttcctttccatgtttattgctttcttcaggagctcttgtaaggcaggcctggtagtgacaaaatctctcagcatttgcttgtctgtaaaaatcctttacaggcaagcaaaatcctttctccttcgcttatgaagcttaatttggctggatatgaaattctgggttgaaaattattttctttaagaatgttgaatattggctcccactctcttctggcttgtaaggtttctgccaagagatccactattagtctgatgggcttcccttggtgagtaacccaacctatctctctggctgcccttaacattttttccttcatttcaactttggtgaatctgaggattatgtgtcttggcattgctcttctcgaggagtatctttgtggtgctctctgtatttcctgaatttgaatgttggcctgccttgctaggttggggaagttttcctggataatattctgaagagtattttccaacttggttccattctccctgtcactttcaggtacaccaatcaaatgtcaatttggtcttttcacatagtcccatatttcttggaggctttgctcgtttcttttcactcttttttctctaatcttatcttcttgctttatttcattgaattgatcttcagtctctaatatcctttcttccgcttgatctgttcagctattgatacttgtgtatgcttcatgaagttctcgtgctgtgtttttcagctccatcaggtcatttatgttcttctctaaattggttattctagttagcaatttgtctaaccttttttcaaggttcttagcttccttgcatt

SEQ ID NO: 200414 - DNA, 1000 bp, Homo Sapiens
caggaagataattaccttccctcaaacaggcctcctctgcctgtcataaccaggaaagcaaggggccccttctatgcatacctgaagggttcttgtttcaccaaatccaactcaatcacacactaatgggtgaaaatgtatccaatatttttacagtctagtgacaaaagggctgtgcaattctcaaagtaataaacgcatttgacgaaaactataccttaaatacacacagttttatttgtcaattatacttcaataaagctgggggaaaagagacaaaaaactaaattaaaaaaagttcttagtggcacatttttataatttaagacagatatcacttctgctatcattactaccaccagaatggcagctgtcatttactggaggttatgtttaaggcgttgttctaactatgctatgatcttactactgggatactcattttgcagatgagaaacttaagccacagcaatgagatataacttgctcagggccacatgatgaacaaatagtagaacaaagattcaaaccctgtcaatctatgaagccctagtcctaaatcactgtgatagaagcattaataacttgtatttttccttgtaggacaggacctaaatgttattaacagtataagcgttcatggttaacatcaaatgtctctggggcacagagacacagaggtccctgtttcacagtccacactgggagaaatagacagtatcaggttagagagactgtcaggcgtcatacccaactgaacccaagaggacattttgcttggatgagaaaaagaaaatttattgaaattttataaggtcaccaaagtttaatgtcccccagaagggtgttggtataacatggccaaggtatcccatcacaaaataaaaataaaatcctgtattttatggaaatgaaaaaaaattgctagctgtcatccaaactctttgtgtacttaaagagtgtcattaatattcccaaactgccctgtaaggtctcttct

SEQ ID NO: 200415 - DNA, 1000 bp, Homo Sapiens
gaagggctggagacacacagttggttagaagtcattcagattatgaagagtaataattaggtagaatcctgagtacactgaaattatcaataacatttaatatgctgccttttagggtaggggaggaaacggattccccatggatctgaggcctgtggtcactagaaaatggataagcagaggcattaacttagaggaactgggatcttctcttcagtattgagccattacaaatgggccaggtcagcgaggggcatgtagagccttggatgtccctctttgatcatgccttccaaaggtaacaagaatcttatcaatgtaacccaaagaaaattcctaagttctgttttcagaaacttcgattgtgtaaattttagttcagaggacctcccaccacccttcttggttttgactcagttccacaacttcatgcatacacagagtatacaacacatgggactgagttacgcattcagccctaaggcagaggcacatctcatacatacccacaaatctcaccgttctgtcaattagctgtgttgaggactgggggaatgccaggagaggaacaggtgataaccaggagggctttccattttactgtttttcttttttttttttttttttttgagatggggttttactctctcacacaggctggagtgcagtggctcaatcacagttcactgcagcctcaactacccaggcttaaccgagcctcctgcctcagccttccaagtagctgggaccataggcgcatgccaccatgcctggctaatttttcaattatttgtagagacaaggcctcactatattgcccaggctagtctcacactcctgggctcaagcaatcctcccgcctcggcctctcaaaatgctgagattataggtgtgagccaccactcccggactagggctttccattttaattaattctcactgtattccatctgctataagatacatatattttccccacatttgaacacatctgaaattg

SEQ ID NO: 200416 - DNA, 1000 bp, Homo Sapiens
tatttcctcaatttcatgaataccctgtttagcacgggtgaaggcagtaaccaaatgaataattcatatattataatcatgtttgcccatctaagcaaataatacttttaaagtaaggtctattatcttaatttgggaaatgcaaaaatagctgttgaattaaaacatgcctctaatattttaaataatacgaagcatagtttatgttttctttactggatattacccagctttcttttaattttagttctgactgacacacaacctcatccctatgccttttggtattttggtttatcttctccacacacccattctgaataaccagaaggtgactatgctatatcttcaaattggatatttgcttggagcactctagtttaacggtcaagtggttggacttgggaacctagttgtctgggtttgaagtccagttctgcaatttaatagttttatgaccttcagtgattaactctgtagcctctgtacctgttttcctcatctgtgaaaaaggacaataatagctccaacctaatagggttattgtgatgattacaatatatgtaactgtacatactgtacaatacatacagtaatgagctaatacatatgaatattgtctgacacatagcaagtgaatattagtttactattataatttactattgctgttactatcatttcaaggtatatacaaagccaaagaataaacaaagcacatttccttggcatattaaaattttaacttggggaaataaaaattttataattggaaatattatggaatcaagtgtaaaattcactgcaacactcaaaagctaaaacacaatgcctggactgtcctttccttccttctccttgggacttttcaggcagaagctctgggtcacctgttcagtcaccgcatgggctgcttcgttgggatcatggcactgattgacaaagtcacaaatctcttgactattcaccatgaagttaattccatctgtggtgaggacca

SEQ ID NO: 200417 - DNA, 1000 bp, Homo Sapiens
tttgcaccctgtaaaaaataggattttgagggaaactatagagccaaatagtgagaaaagtcttttttgccaattccaatttattatcttctgaaagcacagggatgctcaactgtattctcctcgggttgtagttggtgtgtgtgtgtgtgcatgtgtacttgttatacctttcattttctagaatgtcagaatgttaataccgtaaagctatccagcattattagggatgcagcacataatagcaaccattaaatatgccagcacatcttaccattttagatgaaaatattttaaagctcgtatttctttgatgtctgaaagaataatctgaccagatttagcaattgcttagatctttaaggtagtgggtgcttagtctaactaaacatttatggggtgcttagtctgccatatacacacaatacctgctttaatcctcacaagattctatgggtaggtacttggtatcaccatttactaatgaggaaacagaaggttagagaagcccaggatcacacaagctggttagtgatggagctaggattctgttaatgtgaaagcctgaggttttaactagactggcagtacaggttgagcatcttaatccaaaaatctgaaatcttaaaatgctccaaaatctaaaactttttgagcaccgacatgacaccactagtggaaaattccatacctgacctcatatgatgggtcccagtcaaaatgcagtcaagactttgtttcaagcacaaaattattaaatatattgtataagatgtacatgaagcataaatgaatttcgtgtttagacttgagttccatccccaagatatctcattatgtatatgcacatattccaaattccaaaaaaatcccaaacacttacagacccaagcattttgggtaagtgaaactcaacctatagcaatttctgccacttgtatttggttgctgcttctgtgaatgaatgaatgaatgaatgaatgaatgagggagagaattc

SEQ ID NO: 200418 - DNA, 1000 bp, Homo Sapiens
gaatacctgaaactgagtaatttagaaagaaaagcaggttatttattacagttctgttctgaaggctgggaagtccaaaactgggcagctgcatctggttggcttctaaagagagccttaggctgtatcataacatgatggaagacattaaaaggcgaatgaggaggcaagagaaagctacagaaactgaacttgcatcagcctactcatgggaggcaattccattcccacaagagctattccagtcttttcataactaactcagtcttgtgaaagacgttaatccaacttaatggcctaatgaccttttaaaggccctaccccataacattattacattggtaattaaatttcaacacgagttttggtggagatcaaccatatccaaaccttagcagcatctatccaaaattatatttaaaaaatagatccaaagtgttatagcagtgaaaaggaagtaatgattaattcagtctgtgtgaacttaaaacgtattaaaagaatgagcggttagtagagactgtaagattaaatagaaaaatacagatgaacataggattttagagaaatacatccccagttaagggaaaagctgagcaaaaacagggccactggattaagcaaattgtgattagtgaaaggctgagggttagtatgactactaatttcatgaagagaagaattagattagattgagtagactgggaccaggtgatgcagattcttgcatgcactgttctggagtttgtgaattattcctttagcaatggattccaattgtagattttattaatgagaaaatctatttatttaccaacattttccagagttccacagggtaaaatatgctttactaggagttggaaatataggggtaaataaaatgaaaacagtaataattatcccttttgaatttcatagtttctacactctggttagaataaagtagcttcctatagtgagtaaaatcaccttttctacagtctggtaaaatggaatt

SEQ ID NO: 200419 - DNA, 1000 bp, Homo Sapiens
agaacaaaaaactacagaccaatattgtcatgaacataggctcaaaacacttcatataatataaggaagaattgtaagccatttgagtttatcttagaatgatgaaggatttataaggtgtaactggggttttgctttttttaaatgtgagggaatttatatcagttgaattgtttggactttttcctgctttttcttccagaacctttgtatagatgaagactatgtctctgcatttttgtgcgtaaggatggcaagatagagtggtttaaaagatgccagtttatgagcttcttttttggtcagtcttggaaaacataattttttttagagcagggtggggggcatacagtgagagaagagaattttttgtcctgcaaacttttgatttttttcgtcttgcaaaatactagccccctcccttttcctctactgtattgtttccaaagaagacttctgtcttcctcttgagccttttcaaaagcttcctagagttctccctcatcatttagccattgcgctgatctgccaattattgagaaaaagagtcaaactctaaaatatttgaagagattcattctgaatcaattatgaataaacaatggcctgtgacagccccaggggatcctgagaacatgtgcccaggtgtttggggtgcagcttagttttacagattttagagggacagaagacatcaatcaatacatgtaagatgtacattggttcaatctggaaaggcgggacaactccaacaggggcttccagatcataggtggattcaaagattttctgactggttaaaagagttattatctaaaagacctggaatcaatagcaagggatacatggcttaagataaggggtaaaatactttgatttctatcagggcctgctatctgacattacagcggtatcttatggcttatggctacgaagggtctgttttgtcagccttaagttctcgttttaatgtgaatgctggtcagctgtgcctgaattc

SEQ ID NO: 200420 - DNA, 1000 bp, Homo Sapiens
tgtgatcccagcactttgggaggctgaggtgggtggatcactcaaagtcaggagttcaagcccagcctggccaacatggtgaaaccttgtctctactaagaatacaaaaaaattagccaggtgtggtggcacatgcctataatcatagctactcgggaggctgaggcaggagagtggcttgaacctgggaggtggaggttgcagtgagctgagatcgtgccactgcactccagcctgggcgaaagagcaagactccgtctcaataaataaataaataaatataaaaatgaggcaggaagattacttgagcccaggagattgaggctgcaataagccataatcgtaccactgcactctcacctgggtgacagaacaagaccctgcctcaaaaaaaaaaaaaaaaaaagtaagaataaaaccttctagtggcttctctttgaacttccaataaagcccaaattcttacccgggcttacaaagcattctacaacctgtccctgcctgtctctgaccctcacactcaccatcttcccctcacagagcatgtgccagctacatcggcctcccatctgttctttgagcacactgagcctatttccatcctactgccttttactagctgtttcctccgtctgaaatgttcttcccctgatcctgacatgggtcatttcttaccgtttctatctcagcttttaaagtcacatcctcagagaggtgcttcctgagctcacaattggaaaaagccactgtcatcctgccctattttaactccttccatgacactgactgactgtgggtttactgtccatcttgtattccaagcacttaacaaaggcctggcatatgtaggcattaaaaaaatataaaaataaatgcacaatcatttccttttgtgtgcccaggtaatcaaaataagataaagttaagcagggatagcatctcagtctctttattgatagatgggtataatgattctgaagtatgctactataaagaattc

SEQ ID NO: 200421 - DNA, 1000 bp, Homo Sapiens
gcatctcattgtgacaaaaattggcaggcttcaaggggacaggctggcaggagtagtcagagagaggtggcatctcatctaacctgaatccttgggttctaaaaggattcctaatgaatgacagatgggaagaattgaaaagcaatgagtaaagtacggattcctgtcacccgagtggaccctgcatgatgcctggggtcatctgatgggaacatggcatgtctcaggcagatggcctgtagataaagaaaaaatggaagagaggcaggtgatcaggcttcgtggccggggccaagatggaaatgcaggttctcactgcgtcttgtgcccaaggattctgtagatgccacagatccaggatccaagggacctgggcctccttggacattaatgaggaggttagggacacagggaaggttgagagagcatagccttgctgagcaggccacagaggtccccgggactctactcgtctgctggagagacatatggtgctgccagcaggccatgggaccctctgcctattttcatccacacctgccctctgctttcatgctcaggcacaaggatccatatcccttttttgaaagactgtccttaagctgttggatcctactttgccaaagcatgcagagccaggggttcctaggattttacatcccacagagaatagcttattaccaatgactcctgggtgcaggggcatcaatatgccagcttccttgctcctagatgggggcatctctaagttgtaacatattttctctacagcatcccagtgggattgagatacatttaccctctgcagaaactttatttgccttgcttagtcttctttcttttcaatctcaattcctggagtgagatgtctccctgagccttccctggggtttggtgacagctgagcctccttgtgtattgcatgttctgtgcaattttgtgggatggaggtggtggcagatggaatttccacatccctcccagtttttcctgggaattc

SEQ ID NO: 200422 - DNA, 1000 bp, Homo Sapiens
aaaaccactaatttttaaatatttatattcccaaacactccaaatgttttaaaaagttatttatcttgtcacgattcttgtagacttcactccttgtattttttaagtgtgtacatatcagatacatgggaggattttcaaagcctgcatcctagtcacgcctgactcttttgtcatgtgccttgcaaagcctcccaataccagttgtccatgatgcagcttcagactctgcagactcagccctggttgtgttgcatgactctgcagctgccacacacagaacctcagtgctggttgttcccacacgggcgtgactgacagataccaatggaacccggatatcatgacaatgttagacccaaaacaatctgtatttatttttaacaaaaggaacctacttttttccacaaaaaatttctatttttttctctttgaattgacttttatattctaattctctcatatttccttccaaatgcagaataatttatgccttataaattgagccattttcttccaaatgtagaatattttatacttgagaaatcctttatttttaataagttttacatatttctttacctatcctctacagatatgtatgctcatgttatatatttgatacattcatttatatattcttcacattcatatagtcttaccatgcatttatatatttgaatatgtattttattttgcatgttactttttatgtattttataaatttaaatttcatatttagaaaatgttcagtgagcacaagggcctcagtgttcattgttttcttcaagatttagttattttttacacattattagaacacaattgatttaataagcacggatctatgacagatgttggtaattattatgcatagagataaatatttattggaattagtttattgatgagatgggtggagttccagttagttccttcatcagttggctgaacatcacctgtgggccaaggggccatgcaccctggttacccgagatc

SEQ ID NO: 200423 - DNA, 1000 bp, Homo Sapiens
gtatagacccaagagaactgaaaacatatggtcaaatacaacttgctcatgaatgtttataatgacgttatttatgatagccaaaaagtggaaacaacccaaatgtccatcagtgcatacatgcaacaatgtggatgaaccttgaaaacattaagttaaatgaaagaagctggtcgcaaaagatcacacagtaaatgagtccatctgtatgaaatgtccagaataggcaaatctatagaggcagaaggtaaattagtggttgtcaggggctaggaaggaagtggatgggaaatggctgcaaacagcatgaggtgttttgggtggtgatggaaacattctgcagtgacattgtggtgatggatacacaactctatactaaaagccaatgagttgtttacttaaagtgggtgaactttatgctatacaaattatatctcaatacagatttctttaagtcttcaggaagccctctggtaaagaagtcagcctaacccagccctgcactcatctgaccaccaaagcttttcctcacattggcactctgagaaactggtattctgaagaatatgttttaggaaaaactgctttagacaacaggaatttggcaagaggaactttgtttctgtgaacacatatttggcatgtcagggtacatccttttgtattttatttatatttgatgtgtctatgtcctgtcttcttggtggctttataaacattttggggagggaaagtatgatttattctccttgagttcctccttctcacccatacgatccataatgtagtgcacacataaatatctctaaatatgcagttgggactttgcatcactaatgagttaaactattcaacaaagccaaaaatatgtattatgggcccttaagtgccaggcacagttttgggcatggggatacaagaatgagggagcttatgatccaatctgagaccaggccaggggccatacagtagaggcatctctccctggagggttaagttc

SEQ ID NO: 200424 - DNA, 1000 bp, Homo Sapiens
ttatttttttaaataagttatttattaatagtaaatatactagtaattaattatcctggttgaataaagcttacttttgaacagtaatttctgtaaatacaaacttatgtccaaaggttaaactgatacaaaactcaaactatgtggaatattctatgtcctaaaattctttcccaaaattattacaaaatataaattctttaattttatactttaacctaactgtattcaagactgctttacctttgaaaaaccagtaccgtataaagaaacagacattccagtggaggcaaaatgaccaaccaggaaattctatttgttattctaatctaactcctcttaaagtaaaaggaaaaatgcctccaacctctctcctctattcctcttcctcttttttcattttccttaactagatctactatagatgttaaatattctgttttcattatagtaaactctatgtactcatcttcaaaataggtgtgctgactatgtcgctctcctctaaacagacctattattatttttttttacttattaaaaatgtatttcatattacacttttcaaagcagagaaggaaaaactctggacataagttaggttgtatgctctttataaggcttcttaatttcatgatgaattgctgaaatcacactttttcaattgtttctttaataggaggacagatttagaatataaaggaacagttaaatttgcagataatgaaataatatagctttaaacagcaactttaccttcaaaaaggaccacacatttttctcaaattcagtctgagaagcatcaatttttttttggcaataattgataaatccttgtgactgcacagcctgctgaagttggtctgatcggctgaggaactccttttctgttacaacctgactaatgaacacatggtgctgctgctgctgctgctcagctccctgatgagaaggcattctgacattctcaaacgtaaccagtttgcctccaaactataaa

SEQ ID NO: 200425 - DNA, 1000 bp, Homo Sapiens
tctcactgcttttaattttaaaatcttccgttttaatttttatatattgaaatataaaaatcatctgatatcaaaagaattatgtaatctagtctagttttgcatgtctcatacttagactttaagtagaagcaagcatcaaaggctctggtagggattgagatcaaccaactcatttttagggttagacatttgaggataagataaatggatgccccaagcagatactcaaaagtagttcatctctcctgactcctagcaaataataggcatcctcctttaaggaatcttaaaacgtcatttgaaatcaagatcttggccaggcgcagtggctcacgcctgtaatcccagcactttgggaggccgaggcaggagggtcacttgaggtcaggagttcgagaccagcctggccaacatgacgaaacccctgcctctactaaaattcaaaaattagccgggcatggtggcacatgcctgtagtcccagctacgtgggaggctgaggcaggagaatggcttgaagctgggaggtggaggttgcagtgagtcgaaggttgcagtgagccgagatcgcaccattgcactccagcctgggtgacagagcaagactccatctcaaaaaaatgaaacaaaacaaaacaaaacacaaaacagaaaaacaacataggaaatcaagctctttccctttaaaatattacagtaccctgcttaattaagtactgaatcatatgaggcaggggttagggaaaagaacaaaatatgagaagacggtgtggtagaaggcaaaactgtttgataaataaaataagaactgttaacatagaaccatatgtttcttcctctaagactaataggaaaacagtggttgattatgacaaggattccttttgcccaatcacagcacaagtccaaatggaaagtgttaatcaggtctactaaacccaaagcatattagacctccttggtctaagcctagaccaatagccattgatttttttttt

SEQ ID NO: 200426 - DNA, 1000 bp, Homo Sapiens
tagaatagcaaataatttatacgcacattgaagcttgaaagccagtgcttagctaagtgactctcagctgagtcttctaatagtatcacatggactgtttgaagagaaacagtcacttgttccctccccacagatcctgtctattgttctgggtggaaacatccctgttttttaaactaaaacatgattctacagtgagggcagggtcaagcatgagggcttccagatactttaatgagtggtgagtttaccctttgttccaggaagtcacagggtctactctgcttggttttggtagcagcaggtcagtgtagcccatatttccattgcagcaacagtaattgctcgcgtgccatcatttttcctaagagttatagaatactttagagaacatgactgtgttgaaagttattttatcagataattacagtcagaactagctcccttaactcatttctcctgtagtcaatttaagaactctgtcactggccgggtgtggtggctcatgcctgtaatcccagcactttgggaggctgaggaggatggatcacgaggtcaggagatcgagaccattctggctaacacagtgaaaccccatctctactaaaaatacaaaaaaaaaaaaaaattagccaggcatggtggcaggcaactgtagtcccagctacttgggaggcagaggcaggagaatggcatgaacctgagaggcagagcttgcagtgagctgagatggcaccactgcactccagcctgggtgacagagcaagactctgtctcaaaaaaaagaactctgtcacttgataaatatgtgttttcaggaactcttaacattcagggatgtggccatagaattctccccagaagagtggaaatgtctggatcctgcccagcagaatgtatatagagatgtgatgttggagaactatagaaacctggtctccctgggtgaggataactttcatgtgtaattcctaatattccctcagagttttattttttt

SEQ ID NO: 200427 - DNA, 1000 bp, Homo Sapiens
caggcatgtgccactgtacctgacaacagtaaggtttttttgtgcagacactgttgtttctgacatgtaaccaatcgctgcctggaattatgtactcatgagtctaacagaatacttgagactgagtcatttataaagaggagaggcttatttagctcatggttctgcggtctgggaagtccaagggcataacctggcttctgacgagggctttcacactgcatcatgacacagcagagaaggtaatctatctacaatactgtgctatcaaaataatatagaaggacattcttttttctttataaaagctgactctccatagatgcataatcagcatgtcattaaaatattattttctgcctggattcttataaattgtagttctacatgtagcatgcatatattataagaacaatggtgttacaattatctatttctatgtaatcaatcaccccaaaacatggtgatgtaaaaaggccaccattttattacgctcacaattctgtggatcaggaattcaggcagggcaaagtgggatggctcacctttgctacaaagttggaagtttcagctggggtggcttggatggccagatatgtctgggacagctcaactggggccatcagtctggggcctcagctcttccatagttggtgtcttctgtggctggaacgtctccttcactcatgtgtctggctcctgggttgggatggcaagagcagctggggattggccatcagcactctgtctgcacaccttctccatgtgactagcttgagcttcttcacaatatgatgaatacagggtagtagcacttgttacatggtggctggcttccatgaggcaggactgggaacgatgagaccttaggtctacagacagaactcatgcagtatcccttcagttctattctattggctaaagaaatcacggtgcctgcccagagtgaagcgagtggagagacggtttctacttcttgacggaagtgtggcaatatcat

SEQ ID NO: 200428 - DNA, 1000 bp, Homo Sapiens
tggactgtgagcaagtttctctggagcatttacccaggagtaggctaaataagtcatggggcatatgtgacgtccataagtattggcatactgctctccagacactcaaacttggtattgtctgcctctttaatgttttgggttttttttgttgttgctttttctctgagatggagtttcactctgttgccaggctggagtgcagtgtcgctgtctcggctcactgcaacctctgcctcccaggttcaagcaattctcctgcctcagcctcctgagtagctgggactaaaggcacctgccgccatgcccagctaattttttgtatttttagtagagatggggtttcaccgtgttagccgcatggtctcagtctcctgacctcgtgatccgcccacctcaggactcccaaagtgctgggattacagggtgagccaccgtgcccagcccaatgtttttggcttttaagtggtgtcttgttttactttatttatttattttattttttattttattttgtttttttgagacagagtcttgctctgtcacccagactggagtgcagtggtaccatcttggctcactgcagcctccgcctcccaggttctagcaattctcccacctcagcctcccaagtagctgcgattacagatgagcaccaccatgcccagctaatttttgtatttttaatagagacgggggtttcaccatgttggccaggctggtctcaaactcctgacctcaggtgatccctctgcctcggcctctcaaagtgctgggattacaggcgtgagccaccgcacccctccatcttgttttattttggtatccaatgaagttgagcaatcttagccattttgatttccccttgaatacactttgtgtatttttctgttggatttactttagatattatttctgtcactttttgatgatgtaaaaatctccctttctgtaagccagttgtcatctttgtctactatatcacattaaaaatgaattc

SEQ ID NO: 200429 - DNA, 1000 bp, Homo Sapiens
caaactattgaattgaaacattaaaacattctccatagcaacactaaatcaaactgatatttcattttggttcccctgatgccaatacatatagtacattaaacccacagctttcagagcataaaaatgtctttgaaaacatacgtaatctagagatgatgttcaaatatagtataatatacaccttggtttatagttattatttctttcccaagattacatttctatgagaaagaagaggagcctaaatatgatatagggtcattaattttaatgatgaaaacagaaattttgactttgccagttctgaccattggggaatctgtgcccatagtaatagattactcatgtcttacttgcacttttcccaaaaatctcaagtcaaagaccacagaatttatacgctagaaaatataagaaaaaaggacacagaagctaaacaagaaaagaagaggaaaaatattccagttatggcttcaaagtcactaatttccatggaaggagattaagcgtatactttatcgaccttctctgccagcaaacaacgttttattcatgtcacttaatggggaaggaggtcaggtacagatctgaaggtcacctaactatatgctttcttccacagtattatagggcatagggaaagagcctaaaatatgcctgctggttggaattgaaaatgaaacggtcccttgtttaatgccataaaaagtatcctgagaaagtgtagctcttaggcttttcctctccgaggatttagggaaaatcaacagtgcccactggacaaaaccactttagataaagaggaatggcaaatttaagggctcacaaaatgtacttaaaagtttagaaattgggctttcaaattataccagtcaagttttacatgaattaagtcctattttgagctaggatgcatcattatgggaggtaaaccaaaatcttaaaaaatatattagtttagaatgagaactgtgcctcaggaggtgccatggaattc

SEQ ID NO: 200430 - DNA, 1000 bp, Homo Sapiens
aggcgggcggatcacgaggtcaggagatcgagaccatcctggctaacacggtgaaaccccgtctctactaaaaatacaaaaaattagctgggcgtggtggcgggcgcctgtagtcccagctgcttgggaggctgaggcaggagaatgacgtgaacccaggaggtggagcttgcagtgagccgagatcgcgccactgcactccagcctgggcgacagagccagactctgtctcaaaaaaaaaaaaaaaaaaagcacaatgagtgaagaccgctgtctggttcctctgtcacagcctcctgctgagtggtgccgatgcggcccaggcatctttgcatcctgctgagggtttccccaccttggcactgttagcttttagggctggagagctctgtgctgtggggccatcccatgcattgtagaatgtttagcagcctccctgtcctctcccactagaagccagtaccatgtccccagttgtgacaactaaaaatgtctcctgcacattgtcaaatgtccctgagcccgaggggtggggagaacaaactgacgttgagttggggttatattattttggatttcagctggatatgctgggtggttcatggtgcaggaggaggtcatgagctacaaattggtcagtggtgtggtcatttcaaagactaggattactctgaacaaaacaaaccaaaacccaatcgttgagatgcctgaaatcaaacacctagtatatgaaagaaaactgatagaggtttccccagacttgacagctatccaaaaactgttcatggcgtcactgataaaggcttgtggagctgaagtaaactgttttgaagctaccaataagaagatatttaaataaccatgcaagaaagagcaaatactgagtcatcttctgttctctttgtagaaatttgtgttcacgggagcaggcaatgaaagaatatacagccaaataatataaaaacgtaagggctgggctgggtgcgatggttcacatctg

SEQ ID NO: 200431 - DNA, 1000 bp, Homo Sapiens
atttttaacttttaaacctaacttcttatttctttttaatgtagtttcacatgccctttaaaatatataatatacataatgcaatataagaataacttaactaatatatgtgaaaacacagataataataacacataaacttttctctttgagaagttacatttacaaagagccacgtgtttctatttttggctctttttctacagccataaatatggagatagggctaaaataatgttctatgaataaattctgcatgtcactgttatgattctttatttacaacttcctaactgatgaaatagtatatgaggactcataacagtacacgtagtcctagccagagggtctcaggaattgttgaagaataccacataactttgtactggctaagacaaacagccagtcgttctattttttgaagatcatctttaaaaaaaaaaatcagattttgccaaacacaataggaaactcactctgttaattgttttgtttaatatttcagcacttaacattctagatagtttctgacttattatgagatatgtaatcattctctagtgacgtgataagaccattgctttccatacacttcagggaagaacttgatatatcacctccaaatctttttatgtcatcacttcacaatacttctgactcattgcttaaatatcttcactcttcatccctaataatgacatattgccttttgggatatggcatcagaatatgaagccaattgcttcatagttatattgtacgtgggaagctattaagaaactttaatgtccctagattttgcatagaataattcagattaaaaactttgagtggaagttcagatggtcatactttttaactaatcaagttaagaattctggtgagtttaaataactgctgcattggaagttggaaactatttttcttgatggtttgctgtggatatttgaatcgctatccttgtactgcatcaaaagataaccttgtctttgctcattcc

SEQ ID NO: 200432 - DNA, 1000 bp, Homo Sapiens
atgaagtttcaataagaggaagaccccgggggaaagtttatttttcccaccacacttgtatctgtcagtgtttgctgcataacaaacagcctcaaatctcaatacttaatgacagcaaacattgactttccactcctgggtctgcaggtctgctgtggttggctaatctagttgggctgtcttggactcagctgaaccaggctggactccaggtttctaatcatgtccaggtctgtgcctaacatcctcattcctgggccaggctgaagggctggagttttcctggccatcctttcttatggcagattgcaggggcccaggagggcgagtagaaactcaatgtgcccttaaagccctcagctcagaactggtgcttttgcccacattgcactggcttggccagagtcatgtggccaagcccaacatcagtggggcagagacacagattcatcacgctctagtgcaaggtgctacaaggacgtggctgcaaagccctgcagcagggaagggcccttctgccacagcacccctcctcctcctctgggcttctccagtgcacctaagctcttggagaaagtgcagaaacctttcccatagtgaactgaaaagctcactgtgatgccaggtatgaggcacagtttctagctgtcagctgtgactctagtgatcaaggacgcatcctgtcctggattcttaattgtggacctgagtttcccagatgagggttccaccatccaaatacccagagcacctgctgatggagagcattgtcatccttgtccccttgctctgatcctggtgacattaacagagacttcagagctgtcatttcagtatcagccaaagctgtcaattttccagccctccatcctgagctcctttgatgtgaggggttcaaagcactttctaagctgcttgaatcttcaaggaaagcatgggcctgactcccatggcacagatactagggagtgaatggcagagatttggggacctgatgatc

SEQ ID NO: 200433 - DNA, 1000 bp, Homo Sapiens
attattgctttggcttcaataagtgatgcctcaagtttacatatcacctgctagatgtaatttagtaaaaggctgtttgtcccttactttgtgattctctgacaatagccccttgccactcactattctttttttttttttttgagacagtctcgctctgtcgcccaggctggagtgcagtggtatgatcttggctcactgcaacctccacctcctgagttcaagcaattctcctgactcagcctcccaagtagctgggaccacaggcgcatgccaccacggccggctaatttttgtatttttagtagagacagggtttcaccatgtgggccaggctggtctcaaactcctgacctcaggcaatccacccgccttggcctcccaaagtgctgggattacaggtgtgagccattgcacccagccttgccattcactcttaagacccaagacctagcacagaggatgggtcctgagagaccacacgtacctctgtccgaacatcagtgtggacttggtctcagcctcattgaagacagaaggagaacagcaaatgacgatggtggttctgcagttcccacccaaagagtcctgaagaatccgagtcatcttgctgtcccggtatggcacatgtgttttctatttaggaaaagaaaaagtattggttttgacagcccattctgagaaaaacacagaggcaagcaagtcagggatgaagacactgagcttagaaaccgagtaaaacaagaatttgtggctgggtctttggatcttgccaaagtttagaatgcccattctttgacctatgtcataggaaattagcatcaccattcatactttttagtagatgggaactcccagcaagcaggcatccatagccaggattccctctgtcctcttccaaacagaaaaacaaaccagcctttggggtgtgtggcaaagggactatgaggccccaaaaggtggtttctcataatattacttaatagatgggggcaggatc

SEQ ID NO: 200434 - DNA, 1000 bp, Homo Sapiens
ctatccacttttgttttgttatccttgctttcctcttcaaggctactgtggatattcattctagcttgatttacttcatgtaaaaatattcccttttgtggagataaaggagtaaataaaagggtatgcagatttatttgtccttgacttataaccccgaagaattagggtgaatgtgcttaacccagttcctttttcctactattgagtttccttcatcatgagttgaaaccactcaacactcctccttttttgccacctttattgtttgcagccttacaagtcacatttagcctcttgatttccctggagttttataatgctcccagaacactttgtcctatgatcactcccatgtgaattataggtctatttactgtgcgttaaccatctacctaccagtgataacctctgagttcactgctctttcataaacaggaagataagtcctccgagaactgccaagtttattgttatcgtgcaatggtaaaatagttacatattggagaccaatgtgcagagaagagactagataaggccaaaaattgcttgtttgacttggcttttactcagttgtctttatcactcattcctgtggctatattcatgactttgatatcctcagttctgcacagcatcccaatctcagcttggaacctccccctctctcacaccccacccctcccccactagccttccagcccactcacttgagtgcacccactagagcaactacttgactggtgtcctccaatcaactaacttctactttccactacagattacctgactcagttcctcccttctccccttactcagcttagaacccatcgcccttcattagaatcattctcctgatgcttgatcccactattggactctcctagcaatgctccaacccctagttaaaccccactctcttctactttgtgtttgcaccacgaagctgagcattcctgaaacaaaacaaaaaacagcctcaaccatgctgattgaattc

SEQ ID NO: 200435 - DNA, 1000 bp, Homo Sapiens
ccacacacacacacaaacacactcacacacacacacgcacacggtttcctaggtaaagatttcttccctgccattgctttacctaaaataaggcaactgtgaggccactgtcccaacccggttacactcctattatatgtgcctatcatcctgaggagtaatttgattcaggtgttctggaagtcatgctgtgggctgtgtctgttgaattcccagcgatgccaggggacacaccctgtgactccttcctgaattgagtgctgatatttgattggcttatcgcgcacctgatgagtgggtggggtgttcgcggttggtgggggtgacttacagaagggctgatgcggccagagagctcgtcatttgaagactctctcggaagggatagcgtctttctgcaacctgcggtcccagcagacaaaccttgtgatcctcgttccagtcgacatggaggacgactcactctacttgggaggtgagtggcagttcaaccacttttcaaaactcacatcttctcggcccgatgcagcttttgctgaaatccagcggacttctctccctgagaagtcaccactctcatgtgagacccgtgtcgacctctgtgatgatttggctcctgtggcaagacagcttgctcccagggagaagcttcctctgagtagcaggagacctgctgcggtgggggctgggctccagaatatgggaaatacctgctacgtgaacgcttccttgcagtgcctgacatacacaccgccccttgccaactacatgctgtcccgggagcactctcaaacgtgtcatcgtcacaagggctgcatgctctgtacgatgcaagctcacatcacacgggccctccacaatcctggccacgtcatccagccctcacaggcattggctgctggcttccatagaggcaagcaggaagatgcccatgaatttctcatgttcactgtggatgccatggaaaaggcatgccttcccgggcacaagcaggtagatc

SEQ ID NO: 200436 - DNA, 1000 bp, Homo Sapiens
tacattccattacatttttgtctgatttatctgttagactacattgtcaactcctaatacagaacctgacaaatagtaggtgatcaataactgttgacattgtttcactatctattgcaaagctgtatacagggaaagtgaaccaagtttatcactaaaatgaagaataaccaccttcaatgtatgcttaaatatcattggggttttagtccctccagaaggtgttaatctaacatcttcctgtaagatgcgccttaggaagaatacagattataatcattgtatggaggagtgttggtcaaagagatgaaaaaggcgtcggctctgagagaccagaagggtcgaagagctgtcgcattcctacaggtggtaataacccttcactgatcacctgccttcaacaagtgtgaaaactgacaacccatgtagccatctcttagagagagtgtcttagccttccacacaagttgcccccacaagctgtagccgggaagcagacacatgagccatatgaaattgggccaagggccagtagaattttagtgcagtttgaaactgtgacatacggcactaatattatatttccccaaggttggagtctcgctgccaagaggtgtggcattgctatcaccctggaaagtgcagcaaagacttgggaaaatatcgtaggctgagagattacttttcacttccaactaaagctggcagactgaattctcttgtaaaagaatagattcagcttgatttgtttggctttggggattttggcattcatagaattgccaaatgtatgataactttattttaaaaagaataattgtgtaattatttatttaattagaaaaaataataaatgcttgtaattatttctggtttaagtgtttctaacttgaaatacaaaacactactttttcttcagctgtcagctttagacgtcacttattagctgaagttctgagaagctgaaaagtgtttagtctatttaagctatgtctcccct

SEQ ID NO: 200437 - DNA, 1000 bp, Homo Sapiens
agcttttcaaaaccactcatgcccagtccccaacccttacaatctgacaattcccctacaatctgacaattcccctgggctcagacaatgtgacacttccctacaactagcctacatatcaacttttaaactttttttttaagttcccaggtaattctgatgtgcaaaaggatataagccactgttaatacacacagttttaaaattctgagatgttagacatgtccttttccttgggcatatgattcaagaactatgtcactcaacaggtgagcgcttgactcacagaataagaactgtcgtgactattaactaagaataaattaaccaatttaatcctagatcttgatttctaactcatgggatgatagtgccatgcttttttttatatattttattaatgtttttaaaaaactatttccgccaggcacggtggctcacgcctgtaatcccagcactctgggaggccgaggcgggcaaatcacctgaggatgggagctcaagatcagcctgaccaacatggagaaacctcctctctgctaaaagtacaaaactaacggggcgtggtggcgcatgcctgtaatcccagctactcaggaggctgaggcaggagaatcgcttaaacccgggtggcggaggttgcagtgagccgagatcacaccattgcactccagcctgggcaacaagagtgaaactccatctcaaaaaaaaaaaaaaaaaaagaaagaaacctatttcaagtttacactcaaagacaatttatactatctgcaaagattactcttcctcaacagaacacaagctcagttctagcattgcctaagtacagatgctctttaacctgtgaccgagttacgtcccaatgaaacaatcgtaaagttgaaaaatcttaaaccattataaatctggaccatttatacttgctttattcacaaggtaccacagtgcagcaggcaaaaactgacattgctggatctagcataagacattctgaaatgat

SEQ ID NO: 200438 - DNA, 1000 bp, Homo Sapiens
accccgtctctactaaaaatacaaaaaaattagctgggtgtggtgacgggtgctggtaatcccagctacttgggaggttaaggcaggggaatctcttgaacctggaaggtggaggttgcagtgagccgagaccatgccattgcactccagcctgggcaacaagaatgaaactccatctcaaaaaaaaagaaagaaagaaagaaaaaaagaaatgacgtatcatcagaagactgtcctgatggtgggatatagacagccacagaacagggtcgaattacacttgcaccgcacatttcagagctgtagagttctcttttctgaggatgaaaagtcaataagaagaaaatatcttctgagaagaaagttagtgctgctggctgtgcttacctgcctcccggtgtttacctggcgtgtactgactctgtgtggggcgtgatgattcgtgtctgagtcttggtgaaaggtttatcaccctcgtggtttaactcaggaaataggaagtctttgccatgggttcttgccagcctgtccagcctgctctcttgcctttccttggaagcattctctgctcctctcaaatcagaggacttgagattcctcaaattcctgttctggctgccatgcctttgtgtgcctcattcccttagaatatctttcccgacccctctatgctctcacttttcccattggcgtattctgccttccattcctcagagcgttgctaaggtgttgcctccccctggttccttgccaggtttcccctcctgtctgtcttgcccctcaggcaccctccatcatggtgcaggcttgtcccttggcagtgcggcatgtgaggtgcactccctgcccactagcctcctggttgggagcaggtggttcatgctgtctttctggtatctaacatagtaaatgcttggtaagggtctgtggaataagtgaaatgaaattaagaaagccaatagtcacctgcctgaatactgagaaaaagcaaggaagaatt

SEQ ID NO: 200439 - DNA, 1000 bp, Homo Sapiens
accatcctggccaacatggtgaaaccccaaatctactaaaataaaaaaattacccaggcgtggtggtaacgcgcctgtagtcctagctactcgagaggctgaggcaggagaatcgcttgaacccgggaggtggaggttgcagtgagctgagactgggccaccacactccaacctgggtgacagagcaagactccgtcttcaaagaaagaaagaaagaaaaaaaactattctgtaaaacagatatgcatctcagtggcaaaggcagaactttacacactagaatataacagaagttttagatgttttgcttttttttttttttttttgagacagtctcgctctgtcaccaggctggagtgcggtggcgccatcttggctcactgcaaccttcacctcctgggttcaagcgattcccctgcctcagcctcccacatagctgggactacaggcgtgcaccaccacgcccaggtaattttttgtattttagtagagacggggtttcaccatgttggccaggatggtctcgatctcctgacctagtgatccacccgccttggcctcccaaagtgttaggattacaggcgtgagccactgcgcccagcctgttttgccatttttagtcacacataattttgtttactagagtaaattaatgctaataaagaaaacactaagtcttaaaagggaagaaaaacattaatagcctccaaatgtcatcaacatgacacgtgattttaaaagaggtctttgagtggccttaggtactatgtatgcaatctgccctctcctccctttggctaaccctatcgcagtgaatcaggtggtctacagtttcactggtaactggtcccttgtgatagacttgtctctttaataacattattaaactaaccactttccacaatgttttagactcacactacttatattaggcagcaggtccccatcctagcactcatctcatatgaacattatttagtttaaaggtctttacagaatt

SEQ ID NO: 200440 - DNA, 1000 bp, Homo Sapiens
cagttatgggttttccaatcttttgctatataaatgacactgtagtgagtatccatatagatatatgtgtgtgtgtgcgtgtgtgtgtatgtgtatgatttcatatgactctagaaaaagctcatagaaggatgtataaatttctatttgtgttggatatggtgacactgccctccataaaagattatgcctgtttattcttccaccactaacgtaaggcaaactctgttttccctcatgtttctcaggacaatgtattggtatcagtcttttcatcttgtcttgaaaccttattttacatttctcttatgagtgggctgaacgtatttttatatgtttagaagcaatttgtgggattttttgtttgtttctttgagatagagcttcactttgtcacccaggctggaatgcagttacatgataatagctcactgcagccttgaactactgggctcaaatgatcctcctgcctcagcctcccaaatagttgggacagcaggcacatgccaccacgattggctaatttaaaaaaaatttttttttttcggtaaagatggaatcaccttatgttgtccacactggtctcaaactcctggcctcgagcaatactcccaccttggcgtcccagagcactggagttacaggtgtaatctacaatgcccagctcatttgtgttttctgttatatattctttgcctactttttctttaggctgtcactcttctacttatttttaggagctcatagttcacaaggtagaagttaactttctatagtataagttgcagatacaatttttccagtttattttcttatgatttacatagtgatgttttctttaaatgtaaaaaaaaatgtgcattttttgtagtcatatcagtctttactttgaagacttttctgggcttggtttcatatttagaaagatcttccacactcagaaaattaaaaaatttaacttccgtgttttcttctcttaccaaaaaaattacgttgaatt

SEQ ID NO: 200441 - DNA, 1000 bp, Homo Sapiens
cttcattcataaacctggtgataataatgcttgcccaaggttgttgagaggtctaatgagataatatatggaaaagtgctttgtttgacataaatttcacggcttctaatcattgactaataagtcagtgatcacttagaggcctggacatactgagggccaatgatgaaccacaccaccagtccatcctttgaatctgtccttatttgtagaatacaagacagaaataattccgaaatcaaatttctccaaaagccatcttttcaataatgttttaatgctgtgtctttgggctttgtcaaatatctgcatatgaaaaagtaaagtgaaggacactgtgtacctttctaaacccattactggaaacatgatctattatgttgttcagtattccttgtagaaaaaaacatattatagttctttcagtaccaggaaaaaggtttatcccttatgaagaaagtgtaggtttctgttgacctgattatatattctagtgtgttttgctttttgctttaactgcctgaaaattcagaacaaaatctaatgctctgtcatggtatccagcgtcttcctactctaaacctctctcttactttatctgaatgtctctctctttctcagactctctccacacacataaacacagacgattacaatatctatttctagcaccctcataacaaatggatcacttattttccatcttcccccattattcctttatttttaaaggttgaattaatttacatattaaattaatttgacctattacatcatttttatagaaagataactctgaccccttttctctctatatatacatatttttatcaagatacagttgttgagctatttaatttttccatcaacttacttgttcagaagtatattcattgagacacaatggaatgtgtaaatgtgcatataaatgtgtgtatatgtatatgtatatgtgtatgtatatatgtgtgtgtaaaacagagatgtgtaaggcctcaat

SEQ ID NO: 200442 - DNA, 1000 bp, Homo Sapiens
tcattgctgtgttccaagcatagagaataggaatagtgcttagaacataatagctgctcagtaagtattcgttgaatgactgactgaatgaatcattcaatgaaggctgctgttggcttgacttaggtagttaaaatagaaattaagagaactagatggattcaagatatatttaagaggtaaaataaatggggtttagtgagaaaagtaggatttgggggctaagagataaaaataagaggaatagtttctctacaacctactctaaagatagtaaccagagtgatcatgtgatttctccattgcaaaccctccacagcttcctattgtactcggagtaaagcccaggcttcttacaatggccaggaatgctgtccatgacctgggcttgggtgcctcactaacctcatcactaaaaatctccctctgtctcgctctgttccagccacactggccaccttgctgttccccaaacccccagttaaggcactggtcaaggcatttgcactcactgtcccctcttgaaatgctcttctcccaaatattcacatagcatagacctctctttcttcaagtgtctccttcttggagaggtctattctcaccacctaatgttacaactcatgtactgtgacatacattcttctgcctgctcagtttttccccacagcacttactgtgagacgtgtgtatgggtgtgtgtgtgtgtgtgtgtgtgcagcactctaacatactattatagtcgattatcctcattgtctgtctcccacaggaatgtcactatccatgagcctaaagcagtttggcacattgtaggtgctccatcaatatttgttgaaaaaacaaagacaactctcaggtttctggtttgagcaaccgggtgattgtggcttactgaggcaagaaacacagaaggatacagagtccgatgggaagtgacaagttccttttttgacatgctgagtccgtgtcttgtgagagcaatgtccaggtgggaatt

SEQ ID NO: 200443 - DNA, 1000 bp, Homo Sapiens
tctttcagcagacatttattactcagttactgagtgctaattgttgaggatacaaacatgaaattttttttcatgtttgtattctcagtaatatgaataatatgaattttttacatatttgtattctcaataattagcactcagtaatggagtaataagtttctaccatttattatagtctggtggtgaaaactagtaagtatatagattgtatttcatgttaagacattgtggagtattaggatgtttgggagtatgaagaagggtatttagtctaacctctaaggcaggggtccccaagtggcctgttaggaatcaggccgcacagcaggagatgagctaccctcctgtcagatcagcggcagcattagattatcataggagtgcgagccctattctgaaccacacatgcaagggatctaggttgcatgttccttatgatcatctaatgcctgagatagatggaacagtttcatcctgaaaccatctgctccactccctgtccatggaaaaattgtcttccacgaaaccagtccctggtgccaaaaaggttgggaccactgctctaggggtcagagaaatctttaaagaggataatgaagagttctcaggaattccttaaacagcagaaaccaaagagaaggagataaggagaagaaattgtagtgtcaccgctgtctacctctgtgtcatttgagggaccagtttctctttggttataaacaatagagattgaatttggctaagcagcaaatggatactggataaactcacagaaagaaagggagatagaataatgaaggcttgggaaggccaggaaaacagaagctcccaggatcataaggatccatggggctaactcagcctcagcaagatattctccttgtgcagggagtcttattagttagccccatgcccaccccagaggtgagcctgtgtttgatggtcctatcagatttcaggaatgggacagagaagatctccgaaggaaaggcaggat

SEQ ID NO: 200444 - DNA, 1000 bp, Homo Sapiens
taatgtttaattatatttaaaaatctaggttacagatttgatatttttaaaaacagatgctgaaacctattaagatccactaaacatggtagccgtgatgggaatttttgaaaaacataattagtagtcagcctctggattttttagattcaggccttttgagggatgatgagatgatttaggtaattttattatttatttatttttgttttgttttgttttgtttttgtttttagagggattctcgctctgtcaccaggctggagtgcaatggtgcaatctctgctcactgcaacctccgactccctggttcaagaaattctcctgtctcagcctcccaagtagctgggattagaggcactcaccaccacgcccagctaatttttgtatttttagtagatacggggtttcaccatgttggccaagatagtcttatctcttgacctcatgatctgctctcctcggcctcccaaagtgctgggattacaggcgtgagccaccgtgcctggcctatttattctatttctttacttcagtagtaccaagtgaggactgaggctatgcttgtagctcatacatgtaagctgtagtaaaaaaagaaaaaggcaatggaccttcttttaataactaaaatgttttcctatgcatcactactaaaattattttttccatatactgtgtatatttatttatatattttcctgggtaatatcttaagaatcttgtgcaattcctacccaagtgtcacatctattcaacaaataaaatatcttagttttagtattgttatttcagagtaattgaaattaatataatcttaagaaaggggaatataaactttatcttacttcaaatcctacatcatttttataagttgaaattgaagtctgaaggcatctgtgtttacatcaatatgaaataaaattcagtcttactaagaatgactaagtaaaatttaactttgttccgatgtgattagactgatggagaaaatggaatt

SEQ ID NO: 200445 - DNA, 1000 bp, Homo Sapiens
ttgaagtgagccttcaagcactgtgtgaaatggcacattcagatttcatcttaagcaggcagctgcttcccagcttcagtcagccacaggatggtggcttcatttaatcagatctctcattttttaacagatatcagaaattccaacttctatatgaaagctcccaattaaaaaatggtggcttggccaggtatagtggctcacgcctgtaattccagtactctgggaggctgaggtgagttgactgcttgagcccaggagctcaagaccagcctggacaacatagtgagaccccacttctacaaaaaatacaaaaaattagcccagcatggtggtgcacatctatggttccagctacttttttggaaggctgagatgggaggatcacttgagcccaggaggtggaagctggagtgatccataatcacaccacggcacccccagcctggatgacagagtgacactgtctcaaaacaaacaaaaaataatagctcagcttttatgaaaaacacggtgtagcctaaatacatctaaggatgatattgagcccacaaggctgccagttcaactctccttagggaggttcctttctgggctcatgctgaagtcgcctttgtaaaatcagaaatgtatctgttcacatttagcttttaatatcccatgggcaaggtgaaataggggaagatcatgggcaagtgcccccctctacttctgtataccacaccagacactgcgttttattgcctcttcttggtgtgtagcaaatatatcaggagtccactcaaaacttatttatttatttaacactgagtcttgctttactgcctaggctggagcgcagtggcatgatcgcggctcactgcaacctccgcctcctgggttcaaatgattctcatgcctcagcctcccaagtacctaggactacaggcttgtaccaccatgcccatctatttttctatttttggtagagacggggttttgccatgttggccagactggt

SEQ ID NO: 200446 - DNA, 1000 bp, Homo Sapiens
caaaaatcctcaataaaatactggcaaaccaaatccagcagcacatcaaaaagcttatccaccatgatcaagggggcttcatccctgggatgcaaggctggttcaacatacgaaaatcaataaatgtagtccagcatgtaaacagaaccaaacacaaaaaccacatgattatctcaatagatgcagaaaaggctttcgacaaaattcaacggcccttcatgctaaaaactctcaataaattaagtattgatgggacgtatctcaaaataataagagctacttatgacaaacccacagccaatatcatactgaataggcaaaaactggaagcattccctttgaaaactggcacaagacagggatgccctctctcaccactcctattcaacatagtgttggaagttctggccaggacaatcaggcaggagaaagaaataaagggtattcaattatgaaaagaggaagtcaaattgtccttgcttgcagatgacatgattgtatatctagaaaaccccattgtctcagcccaaaatctccttaagctcataagcaacttcagaaaagtctcagtatacaaaatcaatgtgcaaaaatcacaagcattcttatacaccaataacagacaaacagagagccaaatcgtgagtaaactcccattcacaattgcttcaaagagaataaaatacctaggaatccaacttacaagggatgtgaaggacctcttcaagaagaactacaaaccactgctcaatgaaataaaagaggacacaaacaaatggaagaacattgcatgctcatgaataggaagaatcaatatcgtgaaactggccatactgcccaaggtaatttatagattcaatgccatccccatcaagctaccagtgactttcttcacagaattggaaaaaactattttaaagttcatatggaaccaaaaaagggcctgcattgccaagtcaatcctaagccaaaagaacaaagctggaggcatcacgctacc

SEQ ID NO: 200447 - DNA, 1000 bp, Homo Sapiens
cagctcaggctggagtgggccctcttgtgtatgagcctgctgtatgcattgagtgggggcgggacaaggtgctttcctctaaaacagaggttctgaaagcatggtcactgggccagcagccgtagctacacctgaggacttgttagaaaggaatgcagaggccaggtgcagtggctcatgcctgtaatcccagcactttgggaggcagaggtgggtggatcgcttgaggcaggagttcgagaccagcctggccaacatgggccaacaagatgggccaaccccatctctactaaaacaacaacaacaaaaaatacaaaaattagccactgttgtgatgcacgcctgtagtcccagctactcaggagcctgaagcacaagaatcgctagaacccaggaggcagaggttgcagtgagccaagatcacgccactgcactccagcctgggcaacagagtcagaccctgaagaatgaaagaatgaaaagaaaagaaaagaaaggaaaggaaaggaaaggaaaggaaaggaaagggagagagagagaaggaagaaagaaagaaaaagaaggaagaaagaaagaaagaaagaaagaaagaaagaaagaaagaaagaaagaaagaaagaaaagaaagaaagaaagaaagagaaagaaagaaaagaaatggagaatctcaggccctactccagtcctactgaatcagaaaccccagggcagggccccatgccatgtgtttgaacaagctccggggtttctgatgcacacccaagtatgagcaccaacgctctccatgggcaccctgctttcatctcttcacagccacctatgccaggcctcacaaatgtttccacacggactttccagggcagaatacccagatccccaggttcagcgagtggcctgagtctctgaactcaccagggccctgctgctgcccacgggcttctctcttcaccaacgtttactgaaattccatggaaatgaagaacacagagcagcggagaca

SEQ ID NO: 200448 - DNA, 1000 bp, Homo Sapiens
atctttggaagttttacataaatcaaaggaagaaagcacatttaaaatgagaaactaagaccaatttctgtttttaagaggaaaaagaatgattgatgtatcctaagtattgttatttgttgtctttttttgctgccttgcttgagttgcttgtgactgatcttttgaggctgtcatcatggctagggttcttttatgtatgttaaattaaaacctgaattcagaggtaacgtaacaaagattgtgtgtgttttaggaggggggacaaaacgttgaatgaataacaactcatcttttctacaaatgcttcctttgatcaaacaaaaaaaagtttttaaaaaattgatttaagtaataattttgtcagcctattgcccagggttaaggtaataagtattagtattctatgtgtcttattaagactaactggctttatgagtcaggcactaacagggcatcagatccattctgttgatttgtgttcaaaccccaacttcaccacaaaccagcttaggggtcccgggacagttattttcaaagtctcagtttccccatctgtaaaaggacacctgagagacaaccagtcatactggaaattttgaagttgccaagggtgaagcaaaggcctgtgtgctgccaacgtgactgtgtgcaataagaagggtctcagggaagtccaagccagaaagtctcccttctgcccttgccaagctaataggctgcaccacgtaggtcaggcacactgaaaactgggtttgtcaaagccatcaataaagtaattaatgatcacctactgtgtgctggcccccgcggggctaggcactgaagatacaaagagttacacgctgtagttttgccctcactacaatgagaactctatgagatcagggattgtgtctgacatctgaaacttaataggcagaggcaagaaaggcagatacactgaagatctcgttgcgggaactatacacacacacacacacacacactcacacacaca

SEQ ID NO: 200449 - DNA, 1000 bp, Homo Sapiens
agtccctaggctgtacacagcatgggaccctgggcctggcccacaaaaccagtttttcctcataggcctccacgcttgtgatgggaggggcttccatgaagacctttgacatgccctggagatttttccccattgttctaagaattaatatttggcttctcattacttatgcaaatttctgcatctggcttgaatttttcctcagaaaatgggtttttcttttctatcactttgtcaggctgcaagtttgtcaaacttttatgctctatttctcttttaaaattgaatgcttttagcagcatccaagtcacctcttgaatgctttgctgcttaaaaatgtgttctgccagataccctaaatcatctctctcacatttaaatttccacaaatctctagggcaggggcaaaatgctgccagtctctttgtcaaaacataccaagtgtcaattttgctctagttcccaacaagttcctcatctccatctgataccacctcagcctggaccttattgtccatatcactatcagcattttgggcaaagccattcaacaagtctccaggaagttccaaactttcccacattttcctgtcttcttctgagccctctaaactcttccaacatcgcttccacattttcaggtatcttttcaccaaagccccactctactggtaccaatttactgtgttagtccattttcaccctgctgataaagacatatccaagactggaaaatttacaaaagaatgaggtttaatggagaattcacagttctacatggctgggaaagcctcacaatcatggcagaaggcaaggaggagcaagttacatcttatgtagatggtggcaagcaaaaagagtgcttatgcagggaaacttcaccttataaatccaccagatctcatgagacttattcactatcaccagaacagcacaggaaagatctgcccccatgattgaattacctcccactggattcctcccacaacatataggaatt

SEQ ID NO: 200450 - DNA, 1000 bp, Homo Sapiens
attatggagaaaacattttgacttgtgtattttattttttccattgttttccaagtgaagaaagttcaaagaaagtttcaggttttagtactcagctgaattaatttctttttcatttgtttgactaacaaacttttacattcacactgaatagaattaggttgccttacatataaattagtaatgagattaagcaaaattgctctttattattaagagtgttggccaggcatggtggctcacgcctgtaatcccagcactttgggagactgaggtgggtggatcacttgaagtcaggagttcaagaccagcctgaccaacatgaaaccccgtctgtactaaaaatacaaaaactagccaggcgtggtggcattcgcctgtagtcgcagctactcaggaggctgaggcaggagaatcgcttcaacccaggaggctgaggttacagtgagccaagatcactgcactgcactccagcctgggtgacagaacgagactctgtttcagaaaaaaagtgtcatgcctggcattgtgggtatttattttaccacaaccatgcaatcgggattatttctatgtttatgactaaaagattcacattcttcaaaatttagataacataacttcagtctgtagcagtttttctttgtagtaacttcttagaaccattcaaggttggaatagagttgtctagtataaccagaaacataacgattgtgcaatattatttcatctcaaggcatttggccttcatttctgaagtgcttggaatttatgaactggagcagtgagttaggattacataggaacttcggttatctaattcaacgtatcaaattattctgatatcttcttcagtaatttgagctttgaggcagtcataatgcatgcactcaaaaatctttatacctaacccaagtttgtatcattcttacataaaacgtgtattttctaccgtcttgaagagtacatgccttcttgtttcgtgttctcagttgaattc

SEQ ID NO: 200451 - DNA, 1000 bp, Homo Sapiens
attcctatattatttatgtatgtatttttgatgtcattctaaatggaattttttttctggatttctttttcagatagcttgttgtagtgtatagaaatactagtgattttcatatgttgattttgtattatgcaactttagtgaattcattagttctaacagttttttggttgactctttagggttttctatataaaagaccatgtcatctgcaaacaaggacagttttacttcttcctttccaatttggatgtcttttatttctttttcttgcctaactgctctggttagaacttctagtactatattgagtagaagtggtaggagtggacatccttgtcttattcctgatcttagaggaaaagctttcagtttttcattgttcagtatgaagttagctgtgggcgtgtgatgtacagcctttattgttctgaggttcattatttctttctttctttttctttgtttttgagatagagtctcgctctgtcacccaggctgcagtgcagtggcacgatctcggcttactgcaacctctttctcacaggttcaagtgattctcctgcctcagcctcctgagtagctgggattacaggcatgtgccaccctgcccagctaatttttatatttttagtagagagacagggttttgccatattggccaggctggtcttgaactccggacctcaggtgatccacctgcctcggcctcccaaagtgctgggattacaggcgtgagccaccatgcctggcccagtttgttctttctatacaaatttgttgagagtttttatcatgaaagaatgttgaaatttgtcaaatgcttttccctcatttcttaaaatgatcacatggtttttgttagtctatgttcttcatttctgttttttgtttgttaatgttgttatttattgatttgaatatgttaaaccatcctcgcatccccagaataaatcccacttggtcattgggaaatatccttttatgtgctgctgaattc

SEQ ID NO: 200452 - DNA, 1000 bp, Homo Sapiens
ctccactgacagcaccagacaggtcatcaagacagaaagtcaacaaagaaacaatggatttaagctacaccttggaacaaatggacttaacagatatatacagaacatttcatccaacaaccacaggatacacattctattcaacagagcctggaactttctccaagacagaccatacgataggccataaaacgagcctcaataaatttaagaaaattgaaattatatcaagcactctctcagaccacagtggaataaaactggaaatcaactccaaaaggaaccttcaaaaccatgcaaatacatggaaattaaataacctgttcctgaatgagcattgggtcaaaaacaaaatcaagatggaaattttaaaattcttcaaactgaatgacaataatgacacaacttatcaaaacctctgggatacagcaaaggcagtgctaagaggaaaagttcatagccctaaatgcctacatcaaaaagtctgaaagagtacaaacaggcaatctatggtcacacctcaaggaatcagagaaacacgaacaaaccaaacaaaacacagcagaagaaaggaaataaccaaggtcagaacagaactagatgatattgaaagaaacaaaaaaaaatgcaaaagataaatgaaacaaagtctggttctttgaaaagataaataaaattgatagaccattagcaagactaatgaagaaaagaagtgagaaaatccaaataacctcactaagaaatgaaacaggagatattacaactgacaccactgaaatacaaaacatcattcaaggctactatgaacacttttacacacataaactagaaaacctagaagagatggataaattcctggaaaaatacaaccttcctagcttaaatcaggaagagttagataccctgaacagaccaataacaagcagagagatcaaaatggtaattaaaaaattaccaacaaccaaaaaagtccaggaccagacaaattcacagaagaatt

SEQ ID NO: 200453 - DNA, 1000 bp, Homo Sapiens
ctagatttctccaatagcctgagttcctccaaaaagcagagcttaagacaagagtttgcatgcaggtagtttgttttgggaaatgaccgctaaaataaaaaatgggagttagaaagagtaaaaggggaggagaaagagctggtccaaggttgcctcattgaactcattgctctgtgagcaactggggctcaatctcatcagagggctcgctaaggagctttgtaggatgctctgcaagactgaccttctgagacaaagaaagaggaagcatttgtcctccaattgccaccctgatggtcaaattgctctatgggtttacaatgctctcatgcatgcatcagaaaggctgagtgggttcctttgggatgctgcagggtggaagcaaagaggccctagagcagaaagcaaagaatacactatgtttccaagcgaatcccattacagctgttcgctgaagcaagagatggagtgaaaaagtggatgcgaggggctcccgtggcactacaatctccatgccaaagtcagccaaggaataaatttcttgctcctctactcactccttccctgagctccatccctggggagatgggggagggaaaaactagcaaagatagaagaaaccatctctagcccttccccagttgaggcttccctcttgagcaaggagaaggcaaaagcctcaactgtaatcaatttggaattacatgagaaaggggaatttaattcctccatttgagacatttctttatgataaagtgaaaagagcctaggaaagtcctggggcctgcctgagttttcttctagggccatggggattaacaagcccccagagtggacttaaaaggggttggatggtgtaagctggagaaagctgctttgtgattacctcctccaagcttgttcctcctaatcgaagacattagaaatatccagaatgcacttgatagaacaagaagacaatgttaagggggtgagggggaatgtgctgttagttgaattc

SEQ ID NO: 200454 - DNA, 1000 bp, Homo Sapiens
aatttcaagacagagacaacagagcatgaagccttgtgcaaggtccttctaagcacagagccagtgtgaccgcacagaacacacacccgtgaagccagctctgcccccaccatctgaccactcttgagtggccaattagcataggtcactccccaccctgctaggcccaccctcttaggaatgttgtgaggcttaaataagaaatagccactctacaagcggtgtcaattagcatgggctctggtttctgtgtgaggtagtttgctaacatgagagggtatctgattagctaaaacgataacactgacagattaaattcagaataactaaaccttccctgtgttcctttatgccacatgactcctgcatattctgctaccagcacctgtttgataccagacggaggggtccatttgggatgggacaggagcatcagcagaaatgcagaagtggggaagtgctccatcttcttggaagctgagctggcaagggtaatggaatgaaagagattgtgaatatttttgagactatgaggaaaccagtacactggtgttgcccagtacagaagccacatgtggctgttaagcacttgagatgtggctactccaaattgaggcgtgctgtcagtataaagaacacactggatttcaaagacttggcatgaaaaaagaatgcctaatgtctcagtatttttatattgattatgttgaagtgatagtattttgtgtatgttgggtgtaacaaaatatctaattaaaattaacttcacctgttattttctaatgtgggtgctagaaactgttacatcctgcatgggggtcacattccagttcagttgcatgtgctgctacccattgttctacacacacacacacacacacacctgcacacaacctagaggggtcagagaccccaggagcccctgcttctggtgcccaggctaagcgctggagtggaagataaagctgggagggtgggtaaggaggtgagtgcacggagc

SEQ ID NO: 200455 - DNA, 1000 bp, Homo Sapiens
ctaggtgctaatgagtctttgctataaagactcttgattaaagagtctaactctttaatattgaatatattttcttgcacttatttgccatctatatccttttcagtgaaatgcctgttaattcttttgcccatttctaattgaattgcttgtatttttactgtagagttttgagagtgctttatatattttagatactagtcctttgttggatatgttgcttgcaaatactttctttcagtctctattttgtcattcatgttcttcacatgagttttaacaaagcaaaagttttaaatttctgaacataattttaacaatgccatgagcgcagtcagaggaaaaacattgctgtgtatggtctaaagaccatcatcaagctagcagttaaactacaaagtctgtagaaaccatagtccccatatctaattcggtgtacagataatgacacagatactaatagctgatgacaaaacaagatgtttgagggcatgttgtaataaagtcatttatttattcaacaaataatcatcaagtgactcctatgtgttaggccctattcctgtgatgcagtgctgatttatatcacaagaatgtataactgaaactgagataaggactcagaagtcatgcaatattgtacaatgacaatagttaacaaaggaaccaaaactcttcttaggaaagaatgcttgagttgagagctgaagggtgagtaagggttaactctgtaagggggtgaggatagggataggaagtgagggtgggagatagggagacatgtacacagagtggggccgtaagtgcaaagaccctgtcacaggagggagcatggagggttgaggaatggaaagaagggcaactgtagggggtgtagagtaaggagagagtgacacaagagggggctggagtttggttttcactccgagaaccattcaaaggttttgataagttttataagggggaaataagcaatgcgatcaaacttgcattctgaaaa

SEQ ID NO: 200456 - DNA, 1000 bp, Homo Sapiens
ggcgcgatctcggctcactgcaacctccgccccccaagttcaagcaattatcctgcctcagccttccgagtagctgggattacaggcacgcgccaccacacctggctaatttttttgtatttttagtagagacggggtttcattacggtggtcaggctggtctcgaactcctgaccttgtgatccacccaccttggcctccaaaagtgctgggattacaggtatgagccactgcacccagccaaatttcctcttctaagaacaccactaaatattggattaggaccactctaatgaccttaccttaacttgattacaggtgcaatgactctcttcctacataatgtcagacttataggtaccagaggttagctcttcaatgtatctttctgggcggacacaattcaacttattaatatagtgaatgtactcagagataccagaactgtttgagggtagggagaaatcttcaccacactatactctcaggttttagcccagggccaaggacacagaaggagcaatacatgtgtgctcaaacagaccaacaaatcagtaaaccagttaataaatggcatatacagctacttttttaaaaggagaaagatttatagttttattatagtaaacagagactaaaagaacagaagttgcctaaccacttctctgttatagaattataagaagggatgctgaacttacagcttgcctatacatccaatttcaggcatatctaattccaatatctccatgaagatctgtctggagaagtaaacctctttaatctaacatgatcagagaatatctactgaacgactcactactttgggctggattctaacataaattctgagaatacacagtaagaatggcatacagtcgctgcctttaaggaactcacatttctagtggagccaaagcaaccttacattacaaatgccgaggggcatgtgcattgatgctcattgatcatttctctgctttattaaaaaaagtgctca

SEQ ID NO: 200457 - DNA, 1000 bp, Homo Sapiens
actttataataattttaaacatatacttatcattaacaaattacctctccttgctgctggtcctcatgtttaaccttctcaactttctgctaaagatatatcatatataaagatatgttaccatctgtaaagattaaaaggaggaaattttgaaaatgtgtacattttaaatgtgaaaatttaccttgtattctgtaatagattcctacagaaaaatataaaataaaattaggtttagttttaacaattcttactttgcaatataaatcaggaaataaaggcattaattctttgataatatcattaataactttgtataatcattaaacttatgtattaaactgttctatatgagcttgttatgtaaaagaaagtcagatgaatgcagtcaagaaggacatggtacaaaaaaaagcaattaatagatgctaatttctctctaccaccatgctcattccctgacaacaaatgatatctaaaaccccatctgatttttaaaaaaagaaatactcattgaaaatatattctaataacaattgatacattatgatcacttcaaatgaatcataagagttaaacacttcccttaaggatcatataacctttctgaagagacagaatctattgatgtaccatttacttatcaagtgatcacacacccaagaagagtggtgtaagaataaatatctacctgactctctcaggtaaatttaggactacactaaatctcgcttatttactaaagtggctattgtaattataaaatgtgtcctttttgcacgtctgcctacctactacttagcaagctcttaactatcactggcatctctaacttttcagtttgtaccacagctcctagtcaatgtctgacccatagaaggccgtcagtatatgcttaaggtgaataagttcagagtaaagagagttcaaggcagaaaacaggacaatatggttcattaaaaaaaaaagaagcaaaataacacaatttcaagtagcaagc

SEQ ID NO: 200458 - DNA, 1000 bp, Homo Sapiens
ggggttccttttcagactccggaaagaaaaagcgatgataatgacgtatttccctcccttccacaaaacagggccaggtgtaacacactaagaacaaatggcttggcagcctactctcctctctcgaagctccatgcccaccttgctgttgcaccccccaccccaaggaaagccttcccacctttggaagctgcattaattattccaggccacaagggtgccgttgagttactggttcactgcactggctggcaggaaagagttttaatgcaggctccaaaggtgcttaatttcctgtggtccttatgaatatgcatacagtatgtgctcagcaatctagcagttcaaactagacagctggttctggtggtgagggttttttaaatttattttttatttatttattttttctctcccctttccttggacaagccctttctgaataagctgaatctgtagtataatttcattaactcatttccagtatttaatttggttttgatatttccatcatggccccttttctcctttgattttgtcattctgtagaagttgataatctgtattatgatcaacaaggcatattgccatgactgtaggaatcaccaatttagatatccaggcttcctaaaatataagtaagtcagatttagcattactgttttcctgaatgtaggagtatttggaaaaggaaaaaaaaataaacatacatcttggaaagcagagaaaggtgttttgttttctttctgtttggattaacatattctccatcactgtgtaacttcatccaatacgtattgaatacctactatgtgtctggcaccacttcagacagtaaggatatggatatgaatttgtatcagtcaagccttccaggatcttattatctagagagaaagattaaaacatatgcaaataattttgatagaagcaaagacctaactcagcctgagaggaggttgggtttagagaatgctttcattgtaatgttttaaagctt

SEQ ID NO: 200459 - DNA, 1000 bp, Homo Sapiens
gagaccatcctggctaacacggtgaaaccccgtctctactaaaaatacaaaaaaattagccaggtgtggtggcaggtgcctgtagtcccagctactcgggaggctgagggaggagaatggtgtgaatccgggaggtggaggttgcagtgagcagagattgcgccactgcactccagcctgggcgacacagcaagactccatctcaaaaaaaaaaaaaagacatactgacaagtaggcgaacaccaagggcagggcactccagtgcggacaggaggggctcctgtggttgagagagaggagtggcaccatcagagtgtggtgagaccctcatgcttcccaggtaatgcagaggctgaggttgagcttacatctatgccgtagggcccacagtgaggacaggtggcctcacagcagacgtgggggcaacagcccacaccagggcaacaacttagagtcagaatgcacactaagctgtgcgcagcccagggcactgatggggactcacatctgccccaacttcaaccacagtggcctgtggacacagctctacaatccagacagagagggagctggtgcttctgggacatcagaccaaccaggatccaccaaaggtgagaaactcaaaagaccctcctactttacagaagctcctgaggggtcacaacctaagggtccagcagcccttgcacagacttctgcctactagggtgatctgaagatcttaaagccttgagtttgggataaggcagttccagatgagcaacacccagaccttgtcacaagtggacaaaattctctggaagaggatgcatcatgtggtgacttcagcttattcctataaatacttctcaaaatggtctgcacacaagcgaagaaaccagagcacatcaggaatgaagactccatgagtgagaacccacagaaatgacagaacaaacccacaaagaccataaaatagccccggtcaactgtaaacagcaataactaaagttaagaattc

SEQ ID NO: 200460 - DNA, 1000 bp, Homo Sapiens
ccatgattgctgctttactatcctactgtgggagaaatccttgccatttcctcagaataaaacactaccagtgtctaggctgtggtacttttgtgcctattagtaagacgaacaagatgaaatgagtgacattcttacccacaggggtgttgtggggcactctctccaactcttgaacaatgtttatatccaacagctcaaaggacagcaggtcctataaaaaaagacaatgttaggctgtttggagtgcatgctggagccatgtcttgatgggacctgtagaccatttccacatcatttcgtattcaactctgttcaaattcatgcctgtccccagacaagtgaaaacaagaagagttaaatgggaattagatgttgaaataacccaatagcaggaaagagaaaatgcagcaggtatgaaggagaattagctaggccaaggtgaagaggcaactaaagggagtttgtggggaagtacaggattgagttcccaattcaaagaggaaacatctagtttacaaacttgcttccatgggtgatctccttcccattaaatatacctgactagatcaaagtgggcatatctctgatttcctgattactgcctatggctctaccaccttctctcctgtgctctctccctctgtcccttgcccttcaaagtgctgaatcttccacctgggcagtcagaagatccacagatgggatgtagagctccctctcactggcaacattttttgccttctgtgggatgcaggctgctgtcccttctgtctgctcagtcacttcaccaagctgtctttcttctttagccagaagaaaagtttcctatagagacaaaccattgagacaaattttaggccttcaacagaactgaagaggcaggctgacaatgcccccaaaaataaaaacgctgctgtacctccatattttaaaaaacaatgtttttgatatatttttacagttatagaaaaagttgtaaaaacagcagagagaattc

SEQ ID NO: 200461 - DNA, 1000 bp, Homo Sapiens
ggcctcccatctcccactccctttcgtctttgccgctcctgtgactctcctggccacagctctcgcctgtgccctcactgctcccaggttcagcggctccccacaacctcttgaaaacacacatggaaagttattctgtcttggagtcacaaggtcacattgcgggggccttgataaagatctgtccggttccatttgtttatcatgagcatgtattttttgctttaaaaaggatagtgttattcagtataaaagtaatcaaagaaaatgtgcctgtagccatttttaaaggaaggaaggaaggcggaggcgcaaggctaggtgggcagctgttggagacgtggcctggggccccactcaccctctgagccctcttggattcaagcctgaggggtccacctcatccagcctgatgccaggcctccagccatgcctcccacctcctccacccggcggaagctgaacccactggggaactttgccacctggcccacgttcagtttccacctttgagctaggatgagatcagactccctgccaggggtgggaagcaggagcctcatctgggttgggtaggagatggcgaggccttacaggcatatggggtgctcactgagttctgagctccacacacagacctctcccctgactgcctgcgaggtttgagttccgggcgtgacagagccgagggctatatgtctggcagcccccagggctggtgccagcggctctgagcccagcacccaggagtagataatcaccatctctcatctgcacactggagaccaagaccttgtgccacccgtccagggacacggccagcacacagcaacaggacttgaaccagggtcagcctggctccaaatttgaactgcaactgttaggggtgctccgcccggggcacattgccaggcacccccgtctgtttgcagcccagagagtaagaggcacctaacccagaaccggagaactccagaggctcccctcccgccctgctctt

SEQ ID NO: 200462 - DNA, 1000 bp, Homo Sapiens
gcccacctcagcctcccaaagtgctgggattacaggcatgaaccaccgtgcccggcccacacctcctttttaaatggagacagaagcaagcactgtcacctgtacctcacacaaggagaaacttggcctcagggtgattcactggaggtgcattgctgctcctatgaggcttgaggccaggttttctgcttctctgatagcctcttaggcattttgcctttcacagagtacttttccattattttataaagacctccttcagggccagattctacagttttatagttagaatttggtttcaacagaaaatcttcaaaaattacaatttacttttagttacacttcaagtcaactaggatgtcctgtttagaagcagggctccaagcctttttaaagaacagtttatctttcttttaaacaaatgaaggtattaaacggctcacagatggaaggcaggttgccgcattaaaataagttagtgcatggtttccttttcccaaataactttcctcttaaagtgagggtatgggagaatggattaaaattatagattgctacatatagacactttaaaatcaacgagcatagtaactagttggcattttaatattcttttaaaagtaagttgcttaaaaaccctggaggtagactatttaatcatttgcatgctagtttctaagaattcataattaagcaattcagcatgagatggatttatagatggactatcttagatttggtgttctctagcaggcagacttagtttcagtctggtggaaacactggatggtttcagcccagtatctgtttgcttttactccctaaacccacaactggactttgaggaggaggtgggaaggatgtcatgggaggtcacttcaggtagagtcagttcctgtgatactgactggcagctcccaggtcatgagcaaatggcaaccttggtagtatgcctccactgctgtccaggccttcagttccacttcttgtcttggaattc

SEQ ID NO: 200463 - DNA, 1000 bp, Homo Sapiens
gtatcataacttcttttttttttgtctccttcagcatagtatgagctcctggagggcagggaccctgttgatctactgttcagttatcctctggagccccagggcctgacagcttatgagctctcatccctctgtcctcactgaccatcagcgcatttcatcttttgttgttggaaacagtctcaacttcatcgcccaaaatggagtgcagtggcgcaatcacctctcactgcagcttcaacctcccagactcaagcgattctcccacctcagcctcccgagaattgggaccataggagcgcgccaccaagcccagctaatgtttatttatttatttatttatttatctatttatttatttatttatgagacggagtctcgctctgtcgccaggctggagtacagtggcgcaatctcggctcactgcaacctcctcctcctgggttcaactgattctcctgccccagcctcctgagtagctgggactacaggcacgcgccaccacgcccagctaattttcgtatttttagtagagacggggtttcaccatgttggccaggatggtctcgatctcttgatctcgtgatctgcccgccttggcctcccaaagttttgggattacaggcgtgagcccggccaatttttgtattttttgtagagatggggtttctccatgttgcccagactggtcttgaactcctgggctcaagcgatccgtccgccgcggcctcccaaagtggtggtattaaaggtgtgagctacaaggccgggccccactgactgttctttaactggttttcgagtcttctctgcatctagagaagtggcacaagattatggtcaagaacataggcttcgagcccagtcatacctgggtttgaaaccctgccacttaccaaactaaccatgtgacctcaggcgagtgactcatttaagcttcccagtctgtcaatgccgggtgatcccccacttagacagtcatcggagcattagagaattc

SEQ ID NO: 200464 - DNA, 1000 bp, Homo Sapiens
atccattttgcgtaatttctttacatattggtaaaatggtcacagttttcacttaacatggtatatatgattatgcttcgttacctactgcagtattcagtttttgcatcatcctcctcttctagatttgattgttttgaaaccttacactgatttttctgttccaaatgcatcatctcattacttgctaaacctaaattttcagttttggctccaccaccctgaaatatttggccacacgcgcgcacacacacacacacacacaaatgcaaagttaagacttaagacttagctttaagtatatcagtgttcaataaattatttaatatggtaaagcacaccctctgatattaactgaacttacaattctgtgataagttttaacaaaatttactttgcaaatataatcataatgatagacttaaatgatttcaatattaaatatgaagacatgaaatatcattataattacgatagactttatttcatttgtaagttttataatctcagcagaaaagtcattattaaggggttttgtattaccgtgttcattagattgctattcgaatataccattaatattaaatttcttttgacttgacatttgccatatactctaaggaagtttattttaatgtgaagtagattgtaatacaaagagcatctgttaaatactttatgggagatataattcagaatgagaagtcaggatgcttttcaacttattttcttggaatgctttttttgaatgaataatgttggaagcatcatttccatgtaataataagcatagcaagcgtctttttgcacttgattcatgtaccaaatgtttttgtaatcataactgtttttatttgtaaatattgattgtttttattttaaaagacaactctagagataatgatccaaagccaaggattatttttttaaatgaaattaatgttgcttgaacaagtgactaaaatcaagcatgttttaaaatcaaacatttattgaattc

SEQ ID NO: 200465 - DNA, 1000 bp, Homo Sapiens
taaatttttgtgtattttgtagagacaggatttcattatgttgcccaggctgatctcaaactcctggactcaagcgatccacccacttcagtctcccaaagtgctgggattacaggtgtgagccaccacgcctggccccatctttcctttgatattttatattttcttccttccttctttttaaaaatttgttttgttctttcttttcagcagacacatattaaactatatatgtcatatagcacggtatttaagatggtatttaagatggtggactctggaaccagttttgccaagattcagatcctagctcatttacttaccatctgtatgatttggggcaagttacttaacctctcttgggcctcagtttccctatctgtaaaatacctactgcatagcgttattgtgaagactaaatatgcaagtatatgtggagtacttaggacagtccctgaaacacaatagctcgtcagtgagtgataggtagcattattaactataatgaagtaccaagcatttggcagggctctggagtaataccgatgaataaaacatgaattttgctgtgcatatattcacattctagtcgatttgaagaaaatcaagctagtcacttaaatatagctttttgtttgtttctttcctattatctcattttctctaaatccccttcctagataatcccatccagtttcctagctgacaaagtcctaacattaactatagatcagacctcttttgggctccagagtccatgtgagtaactaactcacaggtagaacaaaaacaagatgttataacctcagtggactcatctggtttaacttttaagtgtcatagttgtgagctgtttttcaattgccacagccccctgggctaaaggtcacatagcctgaacatgcctagataaaccaagcatgcaaccacaggtggaacccaaatgctcagactgaggagtagggactgaattaagaaggaacctcacatggcagaattc

SEQ ID NO: 200466 - DNA, 1000 bp, Homo Sapiens
gctacttccagatgccttgagactgatattcaagttttcaccagcactggacaaaagatactacctccatctcctgccatgctcctagctcagttctggcagcttcaggcaaagctggtgccaaggaggcacatggaaaagtggggggtgatggggctgctcttcttgaagaattggatgcaggatgctatctgaggaaagaaacctgcacccacagtgggatagccctgatggagtttcccaaatgagaggcaggatgcaggtcaggttgctgaggccatgagtgcttcaagggcaaagcccagatgtgtttgttttggagtccccgtgaccagctgaatgcctgtacacaggctctcagtagctgccacttgttctatgagagcaaaggcctccccttcctgggtgcagagggctccccagcttgaggcgagctcaaggcttagccacccaagaaggcttctctgtcctggagacccaaaacgtaacagttccaggcatgtcacccctcaagagttgtgaatattctggaggcctcaaccatggacaaacctccatgtcctggatggcttctaaatttggtgcagatgtggagggacctcttcttcacccagttcgcctgccctgggggacagggttgctgtgacctctagctctccaccttctccctctgggcttctcccccaggggagggcactttccactcagcttgagatttgggtaagagggaagggaaacttatgtgtcggacaacatccttctaaggatgacaaggatttaggtaggaatgtgtctgcaggtgacacagtggccctccatgcaggagctggatcatggtcagcatgacctgtgactggtgatggtccgttccatgtgtgttcatggctgttatactgagtagcagtcacatgccaggcaacattacatacgttacagcagtatgcatgatgcattctgaaaacatgacatcctttattttatccccagagaggaaaagatc

SEQ ID NO: 200467 - DNA, 1000 bp, Homo Sapiens
ggtataatcaagtacagtgactgtggggaaagaagggtacatttacaagtgaggcagattcccgtaagggctgcaattttgttaatcatcaacatttattatttcttctctagaagtgacagtcagggtaccttctctcagctgatgaacatgagagcaggtggaagataagacgtgctatctgattatgtcagtgaactcatacagtagaacagtattatcagaattggagtttccaatctctaatttgaaaactgacaaaaggcccagaaaatttctaaaagcttgaataaggccagagcccccaaaaaagtgactatttatttctgtactttcaatttattaagttttctgaaaatcaccaggggacatttgcaaaagaagcaattttaagtcactcatatctaaattaggcaaagtaatttgtaatatgggctttattattgtttcagtttgtataaaaccattaaaaatgattatttttaatgaagagattattttagttattatttaaaacatgaacatcattctttgataacgaaaatgtctttactgttaaagaaacacaataggaattttaattatgcaatgaaaggtactagacatttcaggaaggggtttatacaaatatcctcatctcaggctattatttctcttaaaacaagcaaattactaaagtctgaaagtactttggccaaagttacatcagactgaggaaatgtaaggcttccactgtgtgccaccgttacaaatatgctaatgagaacatagcagctggaaatcacctttgaggccctcttattgtggtttttctttttgaaaagaaaaaccaaaaaacaaaaatatttttgtttcaatgtgatcgtgtcattttgataaattcattatctgatcctgacatagccttaaagtgtgaaactttctcttgcacatagaactgctcatgggctgccaacatcttttaaattagacagatgcagttaaactctcctgtgaattc

SEQ ID NO: 200468 - DNA, 1000 bp, Homo Sapiens
gcaaaatcacggtgattcatgactatttcacatgatcgatcctcaagcagcagcgagtgcagcactgcagttacccagaccaggggtggactccagctccaccacatggaagctgggcagccatgtgggcgagtcacagcttctgtgagccctggttttctcaactatgaaaatggaaataatcatatctgatgagcaatgctactggcatgtaattgaaactcaaagggaacttcagaatgtaagcttatgagagagaagatttggtctatttcgttgtgatacctgcaatgttaaaacagtacttagagcatactaggtgctcattaaaatgttcattgaatgaacagtacacaacagtgctcagcaaatacttgttgaatgaataattgaatagacataatcatataagtatgtctttctagcctcacagcatttcctggagatttttgtttgtttgtgggtttttgtttttgtttgttttttattttggtagctgagacatttcgactcagagaggtgaagtaatgcatcctggtccatgcacctaattaggggctgcctcttacctttgaacccagttgtgtttggtcccatatgccttatattttccattgcatctagaagtttcttggaagttgtatcaattaggaatgctttcaacagtatcttaagctataaagcgtaacagtagcttaagcgataaagatggactcctcttccacgaggagaagtggcagatggcagttcaggactggggcaacagctgagcattggcatcatggaaccaggctatttccagctttctcttctgtcatactccaccagatggctttttgtcctaatggttgttgctttatggtcacaaatggctgctacagctccaggcatcacaaccaagttcaaaggcgggaggcaggaaggaaggagggggtggcgagtttcctgaagtgctttcttcttatatcagcaaaggaaaaagggaaccagaggcagctgt

SEQ ID NO: 200469 - DNA, 1000 bp, Homo Sapiens
cttcatttccacagttaaggaagagaagtagatagaagagtttagagaggatgcagtgaaagttttactttctactcttaggctccatgctatcataatcagattctccatatctttctacctttgtctgcagccaaaactgctctgttcaaagaagccccgtgctttcttagttacttttttctcaatgagtttggcaatttttagtggatcactcaatagaagtgtgaaaaaaaaagataaatggatatcttcatgaacaattataaattttcctctcctattttactttcatatgtaattctaacaaaatctcataaggattaaaggaaagaaagataatttaaaatttttaaattataagttttaaatagaaatgtcaagacaaataaatatttttcctatggtgcataacatcttagcatgagtgtgagtcaatgcaacttcatagtttggtttgttgaaagttcaattatacacacacacacacacacacacacatatatataattttttttcttctaacatgtcaaaatggtcttttcctttcctttctcttctagttccctttgatcttattttctttgtaaatttcttctactaatcacttgcacttatgcaatttttttcttatttttaagctaatttataatggagacagtcaatttttatggtttcttgaaacaaatacaagttattaatatatcttttaagggtcttttcaacaatctctgaaacaaatacaagttattaatatatcttttaagggtcttttcaacaatctcttattgagactatcacctggaatttgtctttctttctagaataattcatttataagcttttaaaggtaattatggaaattatggaaaattataccataattatgataattatggaaaatgaagccctacacctttttttcatgttctgtagaatactgtttattacataagtgggaggattcaatacacatctagtagaagtcttctttgaattc

SEQ ID NO: 200470 - DNA, 1000 bp, Homo Sapiens
gtctggttaaaaaataaaaataaaaataaattcttccatgggctggtaacctatttgcaagtttgtcttaaacaccatattgtcgcatcatcctctaaagggtggcaatgaccttggcagtgcgtatgtgttagagtaaatcaaaccctagaaaggcaggagtgttgagttcttgagcttgagatcctcactggcgggctctaactccagccaagcatatccactctggcaagatgataaaacacttcaaaaaatgcccgctgtacaactgggatcccaaatcattttctttacccactgattctttgttcaaacttccagggaaactaatgtgaaaaaaggtcagtgttttaaagggaggagcttatatttcctgcacattctgtttaagctgtttgaagacaataaagagcatcaggagttttgaagccgtctcctttccaccaaaattactttcagtatgaaaaccacttgtgacctcagacccaaacctctttggaagtctctcctatatgtcattgggagaatagggctagcaggcgggttctgggggcactgctgtctaaacgaagatcacaatggtgatttctgggtgtatgcaaatcttgccatttgccaaccctgcagagttgactttatcccctacagacaccggtggcaaagtgtgagcagatctggaggctgcaaaacgtcttgtgtctaaagtctgtgtttgttttttgtttgtttgttttttcctccaactagaattcacagagaagttgctggaaagaatgagcaatataaagtgattttgtaatgccttcatcaagtccaagttgtaagccagtgcttgggttcaaagactactgcctgtctgtctcaatcagaagtggttctgccaaaggcttcttaattccctctgggagccatccaaacaggatgaccccaaatccaggaatgagcacacccgtgtccccagagtctctccccagatcagagcttacctccactggaattc

SEQ ID NO: 200471 - DNA, 1000 bp, Homo Sapiens
agcggcactcttttaccacaagtgggaagccacttcaagcccacccactgtagctgagaggtatgaggttcgcattcacaagtcacatcctcagtaatgcctttcctggccactctctaaaattttaacaacagtcacaacactttaaatctgtcttaatttttctcctttgatcttttcactatctgatacgttatgtatttcattcatcttttttaaattgtctgtcttcccagtaaaatgtaagcaccatgatgaatggacctggtcagctttggtcctcactggttctctagagtcaagcacaatgcatggcacacagagcagggtgtgctcaaatacatgctcttcatcgaacagtgcatgggcatgcatttttaaaagaaacgtaaaatgcaaacatctgataagaaagtgaagaagatacttcaagaagcagaagaaattttcttgagtattttctaaattgaaattaatgcttggtgcggtggctcacccctgtaatcccagccctttcagagcctgaggccggtggatggcttgagaccaggagtttgagaccagcctgggcaacatgacgaaaccctgtctctacaaacaatacaaaaattagccaggtgtggtggcttgcacctgtagtcccagttacttgggacactaagatgggaagatcactagagctcatgaggttgaggctacagtgaactgtgatctcaccactgtactccagcctgggtgacagagtgagaccctgtctcaaaaactaagacaaaagcaaacaaaaaaccccatgaaattaataaaaatatataaatcaatcaagagcttaaaattgtgatatattagtagaatgtgggcaaaataaagttatttcccaaggaaaaatagttaattgacattaaaaatctataaaataaattagaaacagcaaagaatagaatagaatagacaaatttgaaaggaacttgaactgacataatataaaaattcctttgaattc

SEQ ID NO: 200472 - DNA, 1000 bp, Homo Sapiens
agtgcccagagaggcaccaggaccctagcaggagtaactgcatgacgctataagggaggttgcacccccccagccactgccaggtgcctgtgcccaacctgggaaggagtagcgaggacacccaccttccaggaccagatggaattggaaaatactgcactgtgttgcctgctgcagataggagacagagagccctctctaagtgtctgtgctgtgtaggacaccccatcccctatcctctgtttccccctttggttctctgtaggcacagagagaatccagacaaccactgagagcaatttattgtactctggggcttgaggccttggcaccagacttaattgtatttgaaacaacaaattcctatggcgtgtcgtacatccagagagaaagccagtctgagcttggggctgcatgtgcagatcagtgggaatgcagaaagagataacactgtgtctatcataggagaaggaatccaagaaggctcctgtacactttcatgcccagatgaggggcagtgtcagcagggtactgaaggataaataggagttcgccaggtggacaaaaaaggaaaaagttctacacaaggcaaagaagtatgaaagacattctggagctgtgagcgttctgatattgagcacacaggcccatagataaggcaggtagagaagacccagaggctttctcttgtgctccaacactttgggtagggaagactagctcttaaaaagactgaaatgggtctgaatgagagttgtccaaactcgcacttttattttatttatttattttttagatggagtctctttctgtcacccaagttggaatgcagtggcatgatctcggctcactgcaacctctgccttccgggctcaagtgattctcctgcctcagcctcctgagtagctgggactacaggcgcacatcaccacgcctggctaattttgtatttttagtagaatcagggttttaccatgttggccaggctggtctcgaattc

SEQ ID NO: 200473 - DNA, 1000 bp, Homo Sapiens
cttagagaagcttaggagacaaataagtgtaaacaacagacccagtcctagaagcccagccaagggtgctcttaaaaattaagaagctccagaagatgaaagatcatcacaggaggcatagtgagggcagcctcattctatccctagacctgcaggtttaagtaaattccaggcagcctgatttactgatccaaatgcagaaacacagatgggcgcctccaccagctgtgtttttaaaagatcatatgattcctgatcaatgaaccaaagagactgaatgcagaagtatttagcgctgagctgaggatttgcccagagacctctcagagagcagagccaaatcttgagcagccagctgagtgctgactcaagctggggatgggggtaaggagggtggtattgggcggcagaggcctagctgagtagaagatgagccatcagtcagccagagaactctaaggtgagaaaagtccacaggaagaaaatctgccctggcagaaggaagacaaggctctggcttggtcaactggccagtgacggggtactgtgatcctagaggaatgcgaagtctggagcaagaagcctggggctagggcatccgaaaggacagcaggtactgccaagttccttctggcaggagtttgctttctcctttctgccacattctgcctggacagtggaaccttatcttgggctgtgtgtggactaaggactcagtggtacttgcggcatggagggtggctggggacctcccacctgcctggctggtcctactctctgcccatggttgggggtgttggcccaagttggatgaagtcctgtgtcctgcatccctacttggccatctccagatggggctgtcaggacaccctgggcagctagcgtgttcactcactcaggccacaagccatgctccttattgcacatggtcatcagtcatcactgcattcttgctgtacaagagtcaatttccagtgcagtaaggggatcaccagaattc

SEQ ID NO: 200474 - DNA, 1000 bp, Homo Sapiens
tctcagctctttcctcactttcttttatatatctacttgtagcaaatgtagattttctttcttccttactatgaagagaaattccccatgggaaaggcctccattttgtgaactctgttagtaacttttacaatgtgttgattaatgggagcattgagatagtagcaagcccacaaggctgaaacacctaaactacattaatcatcatcaacaacaacaacaaactgaatgaaaacattatccacattttaaaagttttatagctgtgaatttttttctaaatatatgatgagacttataaacaaaaaaatgtaatatctggccgggcatgatggcccatgcttgtaatcccagcactttgggaggctgaggtgggctgatcacttgaggtcaggagttcgaggccagcctggccaacaggtgaaaccgcatccctacaaaaaatacaaaaattagcttggagtggtggcacactcccaactactcgggaagctgggggaggagaattgcttgaacccaggaggtgaaggttgcagtgagcttaaatcacagcactgcactccagcctggttgatagagcgagactccatctcaaaaaaaatattgatatatttatggcaaaatcaacataagcaaattaaaagggaaaataaccagctgcaacttacatagaaataattttttacatcctagaatgcaatcaaaatttataatgacgaacacctttccttgaacctctgccaccagaaaaagggtgaaaaacataaaaaggcatttaccagaaaacacaaacacacacacacaagcgcacacacacacatacatacacagagccaaaaaccaaatgaaagatgttttattcattgtcactgaaaatttaatgcaaggatcctagtaattttaataaagtcatgtttaactagtacacatctatcccataataataataatgttattattcttactcatcccaaataatccagacccaaaattagaattc

SEQ ID NO: 200475 - DNA, 1000 bp, Homo Sapiens
ctaggatgctttgcttgcactttctcaggctggtgccctttgagccagagctggttgtgacatcaattattatccctttggttgccaagattgatttcatggtttggagagatgggaagagaatcctattctccctcgttgccccacgtacagttcttcccaaatttgggagcttagttataaaaggcaacctgcagacataaagaaggatctttctttggttaaacgtctattccttgccatggtacattcatctttgtatcatgagcacttttctcgggcagcacatgttactcttaaatgtttactgaatgactgaatatagtggatgacaaaaatgactaacagttgtaaatgtaagtagagtttcatggtttatttagcctatggtggagctgaaattatatctctaggtttttgaacaatgatgcttagtaaagattgtcaacaaataataatagagatattggaatatgtttacaatcatctataattatattgttatagagaatatatctgtagacatatttaataaatggtgcctaatgagttttgttttataaactcattcagtaagacttgaaatattatttacattttatctctgccttttatttctgtaactaagaagaaaacttcctctttaagtacctaccaaagtatttttacattcaacttggacaagagtttagtactatttcttttactgaaatattctatctcctgattttctagttgaaaagataattgcatcatttctaattctgatatccaatttaaggtttaaagctaagcaatgtaaatttggtttaattcttacctagtttatatctgtattatttagaggatatttctgcttgggtaatttgtgaagaggttaatgcatttctgtcttgaaaaatgtatatgtgttcctaattcctaactaatgggaaaacagagggtatttttagtgtcagctttcatcaagtcagacctttctgaagaccttactgaattc

SEQ ID NO: 200476 - DNA, 1000 bp, Homo Sapiens
attacccaacaacgaaatgcagcccttctctgttaggggtggtgagaagggccaaggaggaaacacatttatggaatatctgctctggggccttgggcttatttatttattttattatatttttttagggtggagtcttgctatgttgcccaggctggagtggaatggtgcaatctcagctcactgcaatctccaccccccaggttaaagtgattctcctgcctcagcctcctgagtatctgggattacaggtgcctgccatcctgcctggcttatttttatatttttagtagagacagggtttcaccatgttggtcaggctggtctcaaactcctgacctcaagtgatccacacacctcggcctcccaagggaggggattacggatgtgggccactgcacctggccctgggcttatttgaaccccacacaaacctattttactgctgagaaagccagctccctgcaggtgtccaagtcacccagggccactctgggggcaaagctgggcttcaaacccttgtccgtccctctccatcccccagagtccatctctctcctgcccacacagcttcaaatccagtcaataaaatggcaggagtttaaatgtgagcatgtttttattacaaagaagaataaaagagaaaagcagagaaaactaccaattgctcttcagggtctcacctcctcgcaggtaacatatggtgacaatgtctggcttactcctgagtgctgacaccagaagacagctgttaagaagaggtggtgggtgtcccctcccccttgcccttttagccaagctgaaccttggtgacactatgagtaagttataaacgtaccttaactcggctctggggtcttcattctgtgcctcctaacttacatgtatgttacatgccattttgtgtgcacaaaattgtttgtagaggcaccaacccctgacggtttcaaagatgagtccagcggatcatcagataaagtgaaacgaataatgggaattc

SEQ ID NO: 200477 - DNA, 1000 bp, Homo Sapiens
tgctgagtcacgtgccatttatcaagccaaagatagaggcagcacgactagagtcacgtggaattagggataaagggagaggtgtgttcatcacaatggtaataccaactttacatgattttcagaaggattaaatcagtttttacatgtatacaaagtcctcaagttctgcagtaaaatctgtatttcaagtcttttcctccattacttccccagacagattccatattctccccaatctattctgatgggtccttgactatactcccaccctttcttatgtgtgtcatgttgcttttgtgattccattggcctgagcaccttctactatttttgcttatgggatttttgtccttcatgtaccatctcaaacaccttcacctcatgaatctttcttaaactaccttagatcctatccaaaatcccacaaaagatatggttgctgattcttttgaaagatgattcaccaatcttcagttctagctcccagcatcagacatacattttaaaagacatttttctggctatcccagtgaactttctttgctacttaccacattctgccttgtattaatcttctgcatcaatctgtatcataaactctgaaggctcacaataagtatttcattgaattaaacctaatttcaactaaatacacattatttatgaaattttaaacccctatattttactcaagacaaaattttaaccttactttaataaggaattttataaattcttgactctcatatatcttagatatttaatactgatctagtaagccaaacatatagccaattttcagtaatccacaatacagatttcagtcatatcagtaagacctattttgcccaggcttgcttgctgtacattaggattttgtatttgactttctgttaattaatccatatttattgaatgcttactatattatattctacgcatttttcaaggcacgagaaagtatctattctccttccagcaggcttggaatgaattc

SEQ ID NO: 200478 - DNA, 1000 bp, Homo Sapiens
acccactacagtgcctacagtgagagacaccctctgcttgagaaaagtaaaggggattttgtcttgcaccttaggtactaacttggagacaggggtagagcacaagtgggctcttggggtctctgattccaggccttggctcttggctggcatttctggatctgacctgggacacagaggagcccactgccctaaaaggtgagtcccaggcctggcagcattcaccacaagctgactaaagagtccttgggccttaggccggacacagtggctcacacctgtaatcctagcaactttgagaggccgaggtgggtggatcacaaggttgggaatttgagaccagcctggccaacatggtgaaaccctgtctctactagaaatacaaaatttagccaggcgtggtggcaggtgcctgcaattcctgctacttgggaggctgaggcagagaactgcttgaacctgggaagtggaggttgcagtgagctaaaatcgcaccactgcactccagcctgggcaacagagcaggtgagactctgtctcaaaaaaaaaaaaaaaaaaaaaaaagatattatgtaaatagaaacaacaaaaagttaaaaagtagagagacaaagttaaagggtagagttttttgcctgtttgtttatgtaagcagtattatgttgttatcagcttaaaataatgagttataagatagtatttgcaagcctcatggcaacctcaaatttttaaaaaaatatgtataacgaatatgcaaaaaggaaaaagcagaaaattaaatcataccaccagagaaaaatcacctgcactaaaagaaagacttgaagaaaggaaagaagaaagataagaccataaaacaactagaaaacaaatttttaaatggccagagtaagcccttacttatcaataataacattgagtgtaaatggactaaactttccaatcaaaagacatagagtggctgaatggatttaaaaacaaaagacccaatgatctgttg

SEQ ID NO: 200479 - DNA, 1000 bp, Homo Sapiens
cagagccaatctctttctctgctatctgaagttattttggacctgccaagaggcttgctctgctttcccccagagacctgagctatgtaaataataaatttttcacacccttttgcatgggtagcctcatcagtctgaatatcagaacaaaattttgtgtggggatctatctgtctctcagatgaaaccaacgcagagaaagagcagaagaagaacactcaccagaaaattttcatcatagaacagaagtttgactaaatcatctccataaatttacaaaattaagaaataactgtttctataacaaagagtaaaaccagagatgtaattgctcagagttgcaatggagggaagtagaaggagatgaaatttaagttagcataactcagtaaaaaattagaaaaagagaaagagtggaaaaagagaaagaaatgtaatatataactgaaagggctcaagacacagtagataccactgaaaatagaatgaagaacataaaaaacagtacttaaaaaggtaaatgaagtaaaatgaaaatgaaaaaaacaataatgatgactacaaaataaatattaaggaagataagccaaaagagaccatcatatgcctatctggtttcccaaatagaagaactataatagtgtacaaaacaaaaatgagaaaatgaaatttaatgaaaacacttttaagagaattctttaatcaataggttaaaaaggcactccatgccacatgcacacaaaaaaaatgacacagagtggtcaacactgaaacataccctagtaaagtttttggatatccagatatataaatcaagctaccaaaaggaggaaaaaaagtcagcacacccttttatttgagtaatattcaatgctagtaggaataatacctacaaagtcataaaggaaggtgtggcttcaaaatttggtcattctcttctgtgggtaacagacaaataaaagaacatgcaaagactcacataatctattttcatgaattc

SEQ ID NO: 200480 - DNA, 1000 bp, Homo Sapiens
cttagaagttacattctagaggttccctaataaaaatagaaaaattaaatgtatccaacaaacataataaaacaatgataacgatgtcatctggaactcagctactaattccttgaaggggaaatctgtagttattacccataaaaatagagttttggaaacaatccatcatctgggtaattctgagctaaaccttttagatattaaaaaaatccaaaggaatagcccagagaggtcctttctccttcccagtataattataaaaatcattacaaatcccagagcaaaataaaattctatttaaaatacaatccactgatttgtttatttagagggtcaaattatcctcctttttacattgtcagtactgtatcctgtattttaaaacttaaatcacagttgtatcagttttatttatcctgaatccagctataaaattatttactatttttacactgcaactattccctaaaacctaaacacaacaatatatgtaaactacaaaaataattgaatctctgttccattctgcacttacatttggtttgtccactagatgtactgataagtgatgaaaccaaattatgttttctctgaaaagctccattaatttttttaaaagcctacgtgctactaaaaacaaatacaataaatctcattttgtgtttctaaacaacatgatctttaaagagaaatttaaaatcccagaaccaaatgttagaagaaactgatattttttcccctgaagattttttttcaatgctttggcttagagaatatatattattcacttccattttaggatggtgtttaccaaaatatcataaatacttaatagcaactgttcccagtgcttgtagcaaaaggcagtaaaatgaaacataaacctcagctatgaaagcccaggagttttgctttgcatttcatcactctccttccccaaaccctgtttaggatagcctagattctaatgatcactagagacagcacaactgaattc

SEQ ID NO: 200481 - DNA, 1000 bp, Homo Sapiens
cagctggggtggggtggggactggcaggccaggagccaggctctccagggccccactcctgtccttgcccaggaactagacacagtccggtggaaggttgatgctgtagaagtgtctaagccagctttcagtgaccccacaaaagatggatggccatctcagacccacagaaaacacatgggccctgagatccctggggttggttggggacagtcggaacctctccctgtccacaccctgaactcccagagcctaaaccctggagacctcacgtactggcttctctagggtaatgctctgggtgactgggccttgttggcctatgctggagggaattctaaagggacgccaggactccctaccctccatgttcctgtccccagctgtctccctcttttcgcaccacacctgagatttgctgaccacctgcctatctgtctgtctttccatttcagagagcgcaggctggattaccaggaggggcccccgggagtggagatttcctgctggtctgtggagctgtagttctgatggaaggagctgtgcccaccctgtacacttggcttccccctgcaactgcagggccgcttctggggcctggaccaccatggggaggaagagtcccactcattacaaataaagaaaggtggtgtgagcctgggaagtgggtgtctccagttccatgtggccaaatcctagggcctcaacctcgcatcctgaaccttagcatcgtggaacacagaagcttccactgtcagctctcaagagcccatggccaggaaggcccatgctgagctttcagtccagccccttcattttacaaacaaggaaactgagctcgaaccacccatttgagatgtcactgtggcccccagctagaggcccagggctgggagcattctccaggagcagaggttcagtctgcttcatggtctcttggaccagttttgactacaaaaaaaaaaaaaaaaaaaaaatagagtgaactgggttggaattc

SEQ ID NO: 200482 - DNA, 1000 bp, Homo Sapiens
cagcctgggcgagaacagcaagaccccatctcaaaaaaaaaaaaaaaaaaaaaaaaaagagatgggggtctccctatgttgctcaggctggacttgatctcctgggcttaagcaatcctcctgtctcagcctcctgaatagctgggactacaggcatgagccaccatgtccagctctgagtgatttttacttgcttctctgattttctgtagtttccggaatttctaatcagtattcttcctacacagaaacaaccaacgaagtactcaaaaacataaagaggaaacaggcagaggggccataaggcagcagaagactgtggcagggttctgagtcaggcagcaccagcacctcagctctgctggtggccagtctctgtggcttagggccaggctgtcccctagccaaagggaagcagagaccaagccatgcttttttggggctttctgcccccagagtctatgggaaggagggcagcccagaaagcccaatggcttctaagacactatcctttgcaccaaatgccctaggccacccaaagtccaccctataccggcagccagtgtctgggtggagctttgctgtctctccacaggagcagacacatcagccacctcagtgcctccactggccctccctctgactcagggaccccagtgtccccaaaacaagtctaagcttcttcacgtggtcctggccccacagcctgctcaccccctcagctacacacttccccgtccatcacgcttaaagagccagctccaggaggtggccctgtgggcccctcccagtgtccctactcaccctgaggcacagtaaccgcccttctcctgggccccctttgccccacttgcctctctaccctctccacagcaggccccactccatgcacgtggccctgtgtcggctgcatgtctgtctttcacagcctgccctaaatgcaccaggcagctccaggaggggctcagcatacattgcctcaagctggataaaggaattc

SEQ ID NO: 200483 - DNA, 1000 bp, Homo Sapiens
tgattgcatgaccaatcatcttctgtcaacactgattatcttgtagtttctctgacttgtttcaatttattgttgagagtgaagtggtagcattacggccactccattactcagagaaagttaaaaaaaaaaaaaagaaatgaaagaaaaaatatgtatctgtagtagcgaagtccatatctagattttttttttttttttttttttgagacggagtctcactctgtcactcaggctggagtgcagtggcacaaccttggctcaccacaacccccacctcccgggttcaagaaattctcctgcctcagcctcccaagtagctgggactacaggcacgtaccaccacacccagctaatttttgtatttttagtagagacagggttttaccatgttggccaggctcgtcatgaactcctgacctcaggtgatccacctgcctctgcctcccaaagtgctgggattacaggcgtgagccaccatgcccagccccatatctagtttttaaaaattaatgtgtagaaaataaatcagtgttgtttttccattcctgataagaaataactcacagtttgtctcaataactcagtcactattttaaaaactttcaaatacaaaatttatggagttttctttcacctcgacttatctattaaatgtttaagaagctgtttcctcctgatagagtttggatatgtgtctctgcccaaatctcatgttgaattgtaatctacagtgttggaagtggggcctggtaggaggtaagtgcatcacgggagcagatttctcacaaatgattgagtactatccccttggtactgtcctggtgatagtgagtgagttctcatgaaatctggtcatttaaaagtgtgtggcaactctcccctcttttgttcctgcttttgccatatgacatgcctgttccccctttaccttctgccatgattataagccttctgggaaggctcccaggagccaagcaccatgcttcctagaaagctt

SEQ ID NO: 200484 - DNA, 1000 bp, Homo Sapiens
actatgactaacttagcaactcaggaaaatgcaaaagatagcatacctaggcttcagtagaggatctggaaaggtttttcatgacatccttgtgaacaagataaagaaatacaaagtaccaagaaggtctgatgaacagaatgagataaacctaaaagggcctggccagaagtatgattcagatgtctgttctcagagagttcagtcttattaaaaattttcatcaattatttgaaaaagaaataaaggatataattatcaaaacaggtgaaatgaagctagaaacaccaggtaagttggcagaatacatataaagagagaaaaacaggttgaattttaagaatacatttgtaaggacctatacttggatattaagaaaaacaaaaaaaaaaagacactccccaaactgccaagtttataataggcagatgtggcttagcaattgcatatgtggacaaaacatccagctttcagtggctagtaacatcaaagaatccaaagtatagcatcaatgtaaacaaaaaaacaacaacataaatacctgctctcctttaagactgcatcagttatcagaagtctattatctaaagttaagaccagtcccataatgctgcatgttggcctgaacaattaggaaaagttgttttctctaactatattccagttaaccaatatggatagctggaatatggttacagaaaaacaacatgagaacctgaagctgtacaacatatcaaagggttggatatagtttggatatctgtcccctccaaatctcatactgaaatgtgatccccagtgttggaggtgaggcctagtgggaggtgtttggaccgttagggcagatcccacatgcatggcttggtgccctccctgtgatattaagttcacgcaagagctggttattaaaagaagcctggtattccctcctctctctcttgctccctctcgtcatatgacatgccttgccatcccccttagctttcacgagtaaaagctt

SEQ ID NO: 200485 - DNA, 1000 bp, Homo Sapiens
gcctgctgcttcctagacacacttgactctcttcactcgctcgtgatattcccctcacctgatgtgtctttacctctacttggcaggtgttttagtgctgactctggggacagactcctgggttcagatcctgcttcaacacttacaggctgagttaggcaaactactgaacatctctaaatcgtataataaaatcacaggtaataaccatgcctccttcatggaggaattgtgggaattaaatgagctaaaaacaagtgaagtgcctagaacaatgtctagacagataatgaacactccataaatattattatcatcattattattattaccaccataatatgatgccccctcaggcctcaggtcagacatgagcagagaactaggagaaattaaggatgtgtttaggtcagagccaccccctccaggaagccttcttacagggcctatggcacggtgatctttggcactttgcacctctcagatggtggacagagcctgtgcttctgaattggccttatccaagtatacatcttagctatgtgaatccaggcaagtcacttaacctgtcctcgcctcattccctcatctgcaaaaggggatgatatcttcctggtcagcgtcctcattaggcttgagtgagatgatgcaggtgcaaaatgcaggtcgtagatgtccagcgaataaaacgctgctgagtgatgtcgatttctgcattttgttatgagtagctctttctctgactgcctggctatagaccttgagttgttgattgctgggaatggttgatcccaccacactccttaatacctggcaccaagagggagctcaacagatgtttattgtctcaagctaactgaagaagcagcctcccaccttacccggatcccttccaccatgtcccctggcagtcctgggccacaggcattgggtcactggggaagatatataccagggaaattctgatgagagtgagcaaatatgctggaatctagaattc

SEQ ID NO: 200486 - DNA, 1000 bp, Homo Sapiens
catggagactcaattaactgcaaatgtggactgcagtgcttgcttttcatctcttttgctatcttgatttgctcaacgtcagcggagccgggtgtatactcagtttatagcaggaggcggtacagacttacaaaacagaggatctggatgtaaaatcctatgcaagtgaaaaattgggagaaataatccagtctcccgctgtagggaagcaagtcattaaaacagtaattaatttgctaatatagtcctgtggactctaaacatgacaatacatttctttctatggggagcttacatcttatttgacattattttgaaaattctccaatgctctaaatttctttcaagaatgcacctttaatccaaatttgttgtttagtagaaatgagtataagtagagaagattgtgatattaattgccttccatcccttgtttgagaaagagctagaattgctaattgattgggaaaacttaaaggatagattttaaaaggatagtgtagaaaactgtctaagaaaaagcattcttgtaaataaactattaagagatataagttaaacttcagattgaggtggtgggaacagagttaagctaggttgactcagcatggaggctgatttctgagactgagaaaggcaccttaaaaaggcattaaagtatctgctattagacaagtagggagaaagttcaaaagtactgtgttatataatagaatcttatgattacctagcaacctaattaaagtcaattttaatatatgttgtaagtataaaaatgagtttgtatgttgctaatgcctactgaattctgcagtggaattaataattccatagggaaacctttttcttcttgaaataatgctaggtgtggctacttgatgtgttctattttctttattgccttttctttatccttggatagaaaacatctgtttattttaaaactagcatgttttgctacctaaattgataatatttaagttataggcacacagaattc

SEQ ID NO: 200487 - DNA, 1000 bp, Homo Sapiens
acagcccatttttttccatgagcaaatgatttaaatagaaatttctccaaagaagacatatgaatggccaaccaataagcacgtgaaaaatgtcaatatcaatagctatcagggaaatgcaaatcaaaatcacaaagaaaccagggcagagtgccagatgctccgtaccttgaaaaggttcaaggaaacttgaaagatcagatgacatttttagtgtaatctacaagtcactcttcaaatgacttgaagatgactacctgaatatatacaataaaagttggaaatattcatagataatataaaattgagacaaaaaaggtctagaaagactgcaatgtcaagatatgtatcatcaattcctgtacgctacagttaaattttgttctgagttttctggtgccaagaaaataggaaaggggtgggcaatacagtaagatacaaagaaagcttttatttcatgacacttaattctaaaagaataatcaggtgatatgaagccaatttctacagatatggtctctgtcctccaagagctcataactcagagaaaaataaatatgcaaatgattaaaatcagtgaggtaactgctatgaaggacgtatgtacaagctatactggaggcataagagagagagttaccattcagatgaggtggactcatgctctgatgtggtaacatatgaggtagattgggtaggaaggtaaggccagtagagggtgggagaacattccaagcatctgcagagattaaaattacctaagacgtttgagaaattgtaagtggtctgatatggctgcagtactggatgtgaagataaaattaatgatagctgagggtggcaggaaagctgggatcttgccatgtatagccttatatgtcatgccaaggactttggactttaacctgtaggcaaggggaaccattgactggcaagccctgagtagagagtctaggccttataatgggaagttagtttccagagataacctaaagaattc

SEQ ID NO: 200488 - DNA, 1000 bp, Homo Sapiens
acttctagcaaaataatctattttcttattagtctatcaatattctataccctaggactagggtaagtgctcttgatttttaagctgtcatagggaataaaagtttctgttctttctgaatctcaggtttatttttactagctttatttatgttaaagccacactctgaacaatcacccaatccatcaatctgtgcagactcataattagttatgcagatttggtcccttattatcctaaactgtccatctctactatatccaatattctgtttcactgagttttttctatttcacatctagatcatcctttccttgttcttataatttttcgagcaagcatttttctctcttaatccacattttactttctactacctttgtattcttaggaaaaagtttatctagaaaaaaatgccttagattttcaccattttactcggtttctaaaatagacaatttctccaacaatattccccagttaccattagctcagaccagaagcattataccatcataggcgccttcttagatgtctccaggcttaaaaaagcattagtatatggcagatcccattttatccaaggccagaccacctttaaaaatttaaactttttaaagatgacatatttatcatatttcacttttgacttcaatcggggttctctacttaaacatattttggctgagacacattatacaatgtgtagcatgggtgaatcataaactcataaaacattagtgtaggaaggctttcgagatgatttaggataactctccctttaagtggggaagaaattggggcagtgaaagttaagcaactttctgaattactacaatgattcagatgtaaaaaaaatatgaagaaaccaagcccccaaactgaaagtaagtcatattcaaactgttcatgcatggaagaattatttggagctcaaaacataagaaataacaaagatgctaaataaacagatccacaaatatatatttaaagggaattc

SEQ ID NO: 200489 - DNA, 1000 bp, Homo Sapiens
tggtctcttgagccagtactgaccttgatattattttctataatatttacctagggtcaataaatcttgattgttgataccaacttcagtcaatatctgcttactacagttggaatacaaataagtaagcagttttttaagtgaatatcactagcagtatttgtgttttcttcttaaggtattgtaaatcttggtaaagatttacaaataaatcaaaaatgtcttaagtcaaaattacttaattttggagaatcaagtcctttctgttgcataatgggtatggaacattctatctgggagtgattataaaagtcaaaaagagaatagtatgctcatattaaattatttgccatgaaatgtgaaatttcctgagtgcattgaaaatccaaagagttggtcccagtcacccagcaagtaggaagcaggcctctggtatgcagctgagccaaagctggtggatgggcaggtatgagagcaaatacagcaatgccactgtggacacagacctggagtgtatggtgtcactctggaaaagccatgagttacaacccttcaggttacaagtaaccaaggttgctgggtgggcatgcaggggttgtcagggtacctctgcaggctcattttgcactatgtagtttctgcattaggaggaccacatgaaagtgtaaaacaagtctatgatgaggctgtgagatcactgagagggtgtgcactgtgggcatatagctgaggcatagcacactgtatgtactgacattcctgcacaactggctcatgatgcaacttcagcagcataaacaaaacatagcaccagacccagcagaacatcccttaccctactaatgtccctccagtctaatctactaacaaagcttgacattatgctcattttaaaagaggaaaagaaattccaacaaaaaattttatacccagccaaattaagttttctaagtgtaggagaagtaaaataacttccaaacaagtaaatgctaagggaatt

SEQ ID NO: 200490 - DNA, 1000 bp, Homo Sapiens
tggcacctccccactctctcttgctcctgctccaaggctctctctcccgactctctctcttgctcttgttccaggcatgtaagacgtgcctactttcccttcgtcttttgccatgattgtttcctgaggcctccccagaagcagaagcactatgcttcttgtatagcctgcagaaccatgaggcaattaaacctcttttctttataaattacccagtctcagttatttctatatagcagtgtgagaagaaatgggttttcagattgcatctgaatgggaacataataatttaaataataaatttaatttataattaataatatgtaattaattataaattaatttataattaataataacatgtaattaattataaattaatttataattattaataacatgtaattaattatgaattaataattaataataacatgtaattaattataaatttataattaataataacatgtaattaattataaattaattaataattaataaatttaattaataaaattgtttaataaattaaaccaaatgacaaaatagcacatgcagaatgaatgcaagcatctggaaaaataagcatcattttaagaccaatgaaatattttcaacatttcaatagcaagcatacttttgctaacataagaaaaaaaaacaaaaagtaaaaaataaaaatacacaaaacatagtctgtaaatgccatctagtagttttgactgagtacaaatatacatattcctccaagtttcctaactgttcagcaggatgttagggactacctgagtcagaattccaggggttcaggtagagaggtgttttcagtctatgggagggtgctgcaattttctttgtgaacacctgcaagactctgcatggtccagtcctgcttgcctcgcatcttcattgcttcgcccttcccttccctcttggggctccagccattctgcacatctgttttctctatgactgcaccatacccttttccgtgtcc

SEQ ID NO: 200491 - DNA, 1000 bp, Homo Sapiens
ctcttgctatgttgccaaggttggtctcaaacacctaggatcctcccacctcagcctttagagtagtgggactacaggtgcacaccacagtgtctggtttcttattgatgtatattaccatgctgcatgactgtggtctgtgttctagacttctaatgagttatacagtccaattccacatttctgaaacatgatgggaggacatctgcatcagaaccatcagagtgcttctaaaaatggaaattcatagacctcaccctagcaatttgcattataaccccatttccacaagatgaaaccatgcatccaatgcttgaagagacttcctctttaaattaggttaaattccttctgagcaaagtcaacaatctgtctaagtgaacctccagagggccggaaggacttaccaggggtagttagaaatgctctctcagtaactgcagacattacatgtgtatgtacatgtaggcttctatattatttaggccagtctgatcactagaaacatccttaacactgatccagaatgctgctttgacttaagtggaaaatctcatggatacaaaaggaataacgttcatgccaaagccaattttcctttggcttttagcactgattgtgctgatatggtaaaagggaccaagaattccacaagaagcaaataaatcagattctaattataactcttcttgatagaccaattacacatagattttcttggccattcatgtgtaacagtcaggaatgagtatatcttcactgccttgcttacccttaattcctattaaagactgacactggagattctctagcaaattaggagttaagcactgcagctttttcatctactttctcaatcagtaagtgaggtagactgcttagtaacgtaggggcagtggctgcaattttaggtttctcacaaatatttcagacctgtgttgcctaaaatggtagacactaagcacatatggctatttacatttaaagtaattaaactcaa

SEQ ID NO: 200492 - DNA, 1000 bp, Homo Sapiens
gatgttagggtgtcgattttagatctttcctgctttctcttgtgggcatttagtgctataaatttccctctaaacactgctttaaatgtgtcctaaagattcgggtacactgtgtcattgttctcattggtttcaaagaacttttatttctgccttcatttcgttatgtacccagtagtcattcaggagcaggttgtacagtttccatgtagttgtgtggttttgagtgagtttcttaatcctgagttctaatttgattgcactgtggtctgagagactgttatgatttccattcttttgcatttgccgaggagtgttttacttccaattttgtggtcaattttagaataagtgtgatgaggtgctgagaagaatgtacattctgttgatttggggtggagagttctgtagatgtctattaggtctgcttggtccagagctgagttcaagtcctgaataccctgttaattttctgtctcgttgatctaatattgacagtggggtgttaaagtctcccattattattgtgtgggagcctaagtctctttgtagctctttaagaacttgctttatgaatctgggtccttctgtattggttgcatgtagatttaggatagttagctcttctggttgcattgatccctttaccattatgtaatgcccttctttgtctctttgatctttgttggtttaaagtctgttttatcaggactaggactacaacccctactttttttcactttccatttgcttgtagatcttcctccatctctttattttgagtctgtgtatgtgtttgcacgtgagatgtgtctcctgaatacagcacaatcatgggtcttgactctttatccagtttgccagtctgtgtcttttaattggggcatttagcccgtatttgatttaaggttaatattgttatatgtgaatgtgatcctgtcattatgatgctagttggtttttttgcccgttagttgatgcagtttcttcatagtgttga

SEQ ID NO: 200493 - DNA, 1000 bp, Homo Sapiens
atttggggctgccatgggcagagtgttgtgtgtgtggaattttgggggtgcctcataggtgcatcctggagttgggacatgcataaagatcaagacaggtgcctgctgctctggagcattccgtaagcaggacaagaagaacaggtaacatgtaggcagcctttgatcctgttatttgggatggctaggattcatgggtttcccttgggtccggtggacacagtaaaacacagctggttccttcccccaggaggatggtctgccagcataaggagaactcagcacggaaggccgtggggtgtacttccaaataacatcaactcaggtgggggaatgacaggataatgtaaagcaatcacatcagccatatcaaggaattgtacaggggagagcgtctaaagggcttcccaaggaaacccaatcctggagcccctgaaaaagcaagactttgaacacctttcccaaaggaaaatcaagcatgcagcatagactctaacatctggacaagtaagcagaaaaggatctcctctttcttatcctttggaggagatagaagtagaagaactaaagaataaagacagagggagaaggaattcttcacaaaagtacatatacctgactgtgatgtaagtagcatatggacacctgaaccagatcactctttaacaccatcttccacgtgaaaagatatttttggtaacaatcttgaaaaaaattgttatagcaagaaaatgaatgcagactattaaaattttcttttattgaacttcatatataaaatcatgccaacaaaaacgaaaacaaaacaaactacttatagggttctatgctcaataccagggtgatgagattcatactccaaacctcagcattgtgcaatattcccatgtaacaaatctgcacttgtacccttgtatctaaaataaaagttgaaattttataaaattaaataaattttaaattaatattaagatacaaaaaagaaaaaagtaatgaattc

SEQ ID NO: 200494 - DNA, 1000 bp, Homo Sapiens
ctttatttcttgatctcatggtgaggggaagactgagactgtgcagcctcttgctgcttcccatgagacgcagggagaggaaaagggttttccaacacccatgggagcagagaggaccctgctccccatagtctgagctccacatcctgggctgtcgctggccagagcatcaggtctgggcacacctctgcaggggaggtcacggctagcggcgaatcacttaccttggctgttgtaggaagtgatgacctggggctgctgagggtgctgcttctccaccaagttttctatttaaggaagacagagaggcctgcagtgaccactggggaattttccccaggcagagcaaagagctgtatgtgtttgcgggaaaggtgggctggcgggggccaagcacatccccaggcctaaatgtgtgcacaccctcacagtgtgcacatgtgcaaaccagcacgacactgtgcatggagacaaatgcctggaagcccctgtgcacacaccccttgtgcctcttagcaggtgccagcacaggctgggtttcttctggaacaggctaccagtcttccatggtctttgtagccataactcccaactttggtgtcaccaggcacagtttcaaaagcactgcatacacagatgcctcattgatcttcacacatttctgtggagcaggctgggaggttctgacctgggacttgaacctcaggtcttctgactcccagttgagtctcctgcttctttttttttttttttgagacggagtctcgctctgtcacccagggtgaagtgcagtggcgcgatctctgctcactgcaagctccgcctcctgggttcgtgccattctcctgcctccacctccggagcagctgggactacaggtgcccgccaccacactggctaattttttgtatttttagtagagacggggtttcaccatgttagccaggatggtctcgatctcctgaccttgtgattcacccgcctcagcctcccaaagtgc

SEQ ID NO: 200495 - DNA, 1000 bp, Homo Sapiens
agtgcagtggtgcaattatagctcactgtggccttgaactcctggggctcaagtgatccttctgcctcagtgcccaaaatgttgggattacaggtgtgagccactgcacccagcccaattttggttaagtttaagaccttttgagattaactaataaatatctctgagttcaatattggtttgtgcatctctgttatttgctttttatgtgcaagtgtgcaaagagctgtcatcattttcgcttttttatttactttagttttgggagaatgaaatgactgttgagtaatgaatgtctaataatgagttttggactttgccttttaaaattagttactgtaattatattaacctggtaattgtggtatggatcattgtctaaatttagtagatgggctgggcatagtggctcattcctctaattccttgcactttaggaggccgaggcaggagggttgcttgagtttgagaccagcctgagcaacatagtgagaccctgcttctacaaaaaattaaaaaatttgctgagcatggtagtgtgcacctatagtcccagctactcaggaggctgaggcaggagaatcacttgggcccagggggtcaaggctgccctgagccatgatcgtgccactgcactcgagcctgggtgacagaccaagaccctgtcactaaaataaaataaaataaatacagaaaaaaatgtactagacagggaaatgaacaccaaaatgttaagattaaaaattattaactcttttttattccttggtgaatttattgacttgtgttgaggatgttggaactctgaaagtatctaaattagagaggaaatcacttttatttgcttctaaagcatatattattatgacagaatggttaacttagcccttttaaaaagttgagttgtgtgggagggtgagtgaggagagaggatgtgtttaaaaatggcttgtttatcagaaaaagtagcccctcaaaattagtttcaaaataagagact

SEQ ID NO: 200496 - DNA, 1000 bp, Homo Sapiens
gggtggatcatttgaggtcacgagttcgagaccagcctagccaatatggtaaaaccccacctctactaaaaatacaaaaattagctgggcatggtggcgggtgcctgtagtcccagctacacaggaggctgaggcaggagactcgcttgaacctgggaggcggaggttgtggtgagccaagatcgtgccactgcactctagcctgggcaacagagcaagactctgtctcaaaaaaaaaaaaaaaaaaaaaaaaaggaagctgtgtacggtggcttatgcctgtaatcccagcactttgggaggccgaggcaggcggatcacctaaggtcaggagttcgagaccagcctggccaacatggtgaaaccccatctctactaaaaatataaaaattagccgggcgtggtggtgcatgcctgtaatcccagctactccagaggctgaggcaggagaatcgcttgaacccgggagaaggaggttgcagtgagccaagattgcgccattgcactccagcctaggtgattataccattgcactccagcctgggtgacagagcaagactccacataaaaaaaaaaagttgcactaatttttatgatgaaataggaaacttgaaataaattttacaatgtgtcagttcctgtggactaacccagcttgagaagcccctcatggcctgcattgtctccagtgtattctctggcctcatgattttctgatcttattatcaattgcagagtttactgtatttggaaccgacagccgtctaagcctcaactgtatttacttctgacttagtattgattttagagccttctaattgatttaaaaaatcatattttaaacagaaatattctgatttcttttcttttttttttttttgagacggagtttcactcttgtggcccaagctggagtacaatagcacaatctcggctcactgcaacctccgcctcctgggttcaagcaattttcctgcctcggcctctcaagtagctggga

SEQ ID NO: 200497 - DNA, 1000 bp, Homo Sapiens
ttctgatatagagaaagttttagtggtctggataaaagatcaaactagccacaacattcccttaagccaaagcctaatccaaagaaaagccctagttctctccaattctatgaaatctgagagaggagaataagttgcagaaaaaaagtttgaagtgatacaactcaaggggcgcttcttaaaaaacaaaaaaaaacccaaaaagtttgaagcaaacagaggttgcttcatgaggtttaaggaaaagaagctgtctctataacataaaagtgtaaggtgaagaagcaactattgatagagaagctgcagcaagttatccagaagatctagctaaaatcattctattctgttggaagaagatgctatccaggactttcacagctagagaggagaagtcaatgcctggcttcaaagcttcaaaggacaggttaataactctcttgttaagggctaatgcaattggtgactttaaattgaagccaatgctcattgacgattccatacatcctagggctgttaggaattaggctaaatctaaatatatgcgtctactatatacccataaaaattgaaaattagaacaataaaagtaaaaaaaatttaaaaataaaaaattatgtgaaatctactctgcctgtgctctataaatgcagcaacaaagcctgaatgacaacacatctgtttacagcatggtttactgaatattttaagctcactgttgagacctactggtcacaataaaagattcctttccaaatattactgctcattgacaatgtacctgtcacctgggagctctgatggagctatacaaggatattaatgttgttttcgtgcctgctaacacaacatccattttgcagcccgtgtatcaaggggtaattttgactttcaagttttattacttaagaaatacattttataaggttatagcggccacagatagtaattcctctgatggatctgggcagagtaaactgaaaaccttctggaaagaatt

SEQ ID NO: 200498 - DNA, 1000 bp, Homo Sapiens
aactatcatgagaataacaagggaaagactggaccccatgattcaattacctccccataggtccctcccacaacaggtgggaattctgggagacacaattccagttgagatttgggtgggaacacagccaaaccatatcagctttataccagacttctatatctatagttatatatctatcctctcaagatacatttagaattataaacatatgtagagatagggatgagaatattttttacagaaagaatatgtaaagtgtgtgtaatttaaatataaatttctacttgatatatatgtaatatgtatctagcacttacataaaagtacacacacacacacacacacgcacacattcatcaccaaacgtttttgcatggttgtttcattgtatttttagaatgtgtccagaaataaaatgtctgcaccacaatgtatctatactttttattgttgtattactcctcagtgtatagtactatcagcatattatatcattatatacttcatattcttacaaacaattgctaaggttaagcaattaaaagcttgccagtattacatgaaaataatgtaaatgcttcaacttgtagatttcaaaattgagcatatttcacaacattattgatactttatgtttcttctttggcaatcttttcttatattatgtcatttttgtactatggaagtggacatttattgatgtcatttactaaaatctatattaagccaagccatattctgggtactggaaataaatcattaaataaaacagacaaaaataattgccttcttaggactcacattttatcaaaagaagagagacaataaaatacaaatatatcaattattaagacatgcatgttattaaaacataaaaccaggatggggaattaatatttgtaaatattcaaggaatattaatcatttgctagccatgtaaattaaatttttatccccatcttaaaatgtgttttaagttgctttcttatgcaagctt

SEQ ID NO: 200499 - DNA, 1000 bp, Homo Sapiens
aatgtttacttgtatatcttcaccagctttagtgtccttttttgttgttgttgtttgtttaaatggagttgtatttttagcaccagaagggtttgagacatatggtaaatgctgaagaaatccttggaaaatgaatgaatcttgtccaacatcttcattgcaaaagtgaggaggaagaggatgtgctacctacagtgcctggcaaacaggtgctcagtaagtacttgtctatgaatagggcaacagtagaagattcaatgccagggccaaggagaggagttggggagagccagccaaattgctggacctagtacttagaagggggtctaagtctgactctattgcatttcaatgaaaatctccccttgctggagctggggtgttgttttatttttatttttattttttattttaaactgggacctagttacgtagggggaagcaccaaattaactttttatgctgctttgggtgaattattctttgcctttctcatctgttaaacatgggagtaggaggagtagaggtttggattgaaggccccatctagctagaggattatcaatttcatattgtgtctgggagaaaaattccctaggaatgactggtaaaaggcttgctattcttactggaaccagcaggtggcaggaaatgcatgcccaactgcatctggagctgcttagagctggagcaggggaaatctggtagtgtactctggagctcagggaagttgctagtagtatgcctgctgagtctggtgctcacagatatggtttcctgataatttgcctaaggaggctggccagagaattcgagaaccagatgctttgtgcacaacaaatgaggcaacatgggaagatggtgggagttgggaaagctgtccaagatcacaggctctgagaaattcaggcatgtagctagttcctctccactcaccatctgggacttaaaatcccttctgcaaacttcctgttaaagagagtttctgcagaagaagctt

SEQ ID NO: 200500 - DNA, 1000 bp, Homo Sapiens
tcgcttgaactcacaagtcagaggttgcagtgagctgagattgcaccactacagtccagcctgggcaacaagagcgagactccgtctcaaaaacaaacaaacaaaaaaaaaaaactgagagaaggtttaaatcatagagtaaaacgaacttttaaaagccccaaaagataaaatatgtaacaccaattcattcacaaaatgttccaaggaaaaaaatatattattattaagataacaaaaattgagttattctaaaggcaactgcctttaacatgtataatcactgcaagtattacctttcatttttgaatgtgtgttaatcaacggatcagaacaaatcctgcagggccaccatgggcgtctcttgaattttgcccagatgagatctccaacttcatacttcagtggcgtagactttttcttaggttgacactttagacagacaaaacatggggcatcaataagaatcaaaatattttgaaacattattgtcattcctattagccttctgaaaaagcaatgtatgaaaaattgagaatgaaaacactctagcctaaaaagaattacaaaataagtacaactaaattattccatcttaattgttcataacatagccctttatacatagttctcaacttataattgttttatataatgaatctatccgtattttgaaaataaaattaagctggctttatttttaaagaactaaaaacacacacaataaagaaaatcatccgaaggaaaagacacccttgatctagtccttggatcaaaacacaaagggaaaaaaaaaatggagaaaaaattataggaagaatttttaataatatcaagagacttcagacccttctgcatgtgatattctacatgcttttcaaaccaatatttctattagcgtattaacaatagtaatagccaggagtggtggcacatgcctgtagtcccagctaacactttactttcagacataagccccagagaaaacagcaaagaattc

SEQ ID NO: 200501 - DNA, 1000 bp, Homo Sapiens
actaagtgcctctgggataaactcaggtgtggcgtattcagccctcattttgtatcctgggagctgactctctgccgtacacaatacctgttaggccccagccccaggccaggcactggaactccagagtatttgtctttctggatatcagtctagtgggagaaacggccacagataaccgataaaatgtgggacatgttcaagcagaggctgggaacacagacaaaagagtgaccagctccacctctgggagtaggggaagcttcccatcaaaagggacatgtgagtcgggcctgggaggatgagtaggagttcagcaagcagagaggataaccatggaggaggagggatgatgagtccaggcaaaggaacagaaatgaaaggcatatttagggaatagcatgcagctctctgtgggtgggtggttagacattgtggggagtgtcaggagatggggctggtgagtggagttgagggccggactctggggcacttgttatgtcctgcccccaaggagtgactccaaggtccacaaaccccagtgtctttaggtgccaggcagatgagagaaagacaacagacatggccgaccccagaactctgttctacactctgcattttaaacatattggaccggccgggtgtagtggctcacacctgtaatcccagcactttgggaggctgaggcgggcggttcacttgagatcaggagttcaagaccagcccggccaacatggtgaaaccccgtctctactaaaaataaaaaaattagctgggtgtcgtagcaggcacctgtaatcccagctacttgggaggctgaggcagaagaatcgtttgaacccaggaggtggaagttgcagtgagccgagattgcgccactgcactccagcctgggcaacagagtctcaaaagtaaagaaataataagcatattggaccattcttcacttccataaagaattatttcttctcttgaagcaccgctgtctatagccccttct

SEQ ID NO: 200502 - DNA, 1000 bp, Homo Sapiens
ggctttcatgaagtcttaactcaattttaccctttctctaggccatattcatgttactcatggttctgcatagataagcactgtgtcataagctccagtattaacagaattaagtacaaaggagtacatagaagtatgagaatacccaggggaagaagaacacgccaaaggtctatatctatgaagagaaaataaagaattaagactttggctgtataatttgagaaaaatacattacttggaaaacatcttcaaatattttttagaacagagcacttctgcctgagactttccctatgaagataaataatttttccatgttattattcttgttgccaataagtccagcaagaagcaaaacattattttttaatcttttaaaaagagttttctgctatttgctccatttagtgtcgatgcaaatattttagtttttattcacctagaacagaacagtgtatgttaatcaaaatttatatgagctgagatggagaaacagttcattctaattcaaacaaaattttcagtatctttgaatttatataaattatttttctattctaataattctggatatttgtgaaggactatgagaattttgtaactattacataaaatagttgagatttgttcatttagctctttaaagtacacatattgaggctattttccttagcaaactaatgcaggaacagaaaaccaaatactgcatgttctcacttagaagtaggagctgaatgatgagacctcatgaacacatagaagggaaaaacagacactggggcacacttgaggtcaaagggaaagaagagggagaggagcacaaaaagtaaatattgggtactaggcttaataactgagcgatgaaataatctgtacagcaaaccaccatggcatgagttgatctatgtaacattcacatgtaccccaaaacctaaaataaaagtttaaaggtcttaactattattattttttttaaatttagccaaacttcaagctt

SEQ ID NO: 200503 - DNA, 1000 bp, Homo Sapiens
agtcaagcaaaagggaaaaccccttataaaaccatcagatctcatgagatttattcactaccacgagaacagtataggggaaaccctcccatgattcaattatttcccactgagtcccttctacaacatgtgggaattacgggagctacaattcaagatgagatttgggtgggtacacagccaaaccatatcaggaactaatggagcaagaactcactcactctctcctccccagggagggtattaatctattcatgaaagatcctcccccatgtcccaaacatccaagcattctcccctggccccccaaatctcatgttcttctcacattacaaaatacaatcattccttcctaatagttcctaaaattcttaacttgttctagcatcaacctaaaagtccaaagtccaatgtctcatctaagactcgaggcaaatttcttatggctctgagcctgtaaaatcaaaaacaagttatttactttcaagatacaacggttgcagaagtattgagtaaacatttccatttcaactttaggtgagtttttttgctgctgtatctaattagctgttaaaagcagccacactgcttcttgatgactttgctgtttaaaaattttttctgccatatagcctacgtcacctctcttacttcagccttccatagagccctaggttatgaacacaatgcagccaagttttttgctatgatgtaacaatgttcacctctgctccagtttccaataagttccttatttccatctaaaacctcatcagcatggcctttactatctctgtttctatcagcattttggtcacaaccaaccacttaaccagtttctaaaaagttccaaactttccctcatctttctgtcttcttctgaaccctccaaactcttccaaactctgcttccacattttcaggtatctttatagcaacatcccaatcctccatataaattttctgtcctagtctgtttattgttgttataaaggaattc

SEQ ID NO: 200504 - DNA, 1000 bp, Homo Sapiens
ccgtatcacttcttttcggaccactgttgaaatcctctcgaagtccctttcatattgagtcacccgagactcccactgggaagaaagaggaaagaaaggatcacctcatattatggcaccattattaagccttcacatttggacagcgattttacatatgagggctcaattgatcattatgtctgtctgtccctgtgggtaagatgaggtgtcacagaggattccacacgtaagtcagagtccggcagaaggctactttaggggctgactggaaaagagatgcctgtgtttcaggcatctgggaccaagtgtggtccttcaagaaggctctgacatgccagcagcctccagtttaggtactcaccagcagggctgaaaggcctggaaaacttaatttagttctcacgagaaggcatatctgaatcagctaggtagcttttcaaagacccagccaggacccctcctgccaagattttttttttgagatggagtctcgctctgtcatccaggccggagtacagtggtgcgatcttggctcactgcaacctctgcctctcaggttcaagcggttctcgtgcctcagcctcctgagtagctaggactacaggcgtgtgccatcacgtctaatttttttttttttttttttttgagacagagtcttgctctgttgccaggctggagtgcagtggcgtgatctcagctcactgcaaccttcgcctcccaggttcaagcgattctcctgcctcagcctcctgagtatctgagactataagtgggtgctaccacgcccagctaatttttgtattttttttagtagagacggggtttcaccatgttggccaagatggtctcaatctcttgacctcgtgatccactcaccttggcctcccaaagtgctgggattacaggcgtgagccaccgtgcccagccctggctaattttttgtatttttagtagagatggggttttaccatgttggccaggctggtctaaaactcct

SEQ ID NO: 200505 - DNA, 1000 bp, Homo Sapiens
attcagatcacagagttgaacctttcttttgattgagcagttttgaaactctctttttgtagaatctgcaagtggacatttggagtactttgaggcctatggtggaaaaggaaatatgttcacataaaaactagacagaagaattctgagaaacttctttgtgatgtatgagttcatctcacagagttgaaactttcttttgattgagcagtttggaaacacgctttttgtagaatctgcaagtggacatatggagcgttttgcagactatggtagaaaaggaaatatcttcacataaaatcgagacagaggcaatcggggaaacttctttgtgatatgtgcatttaactcacagaattaaaatttccttttgattgagcagttttgaaactctctttgcataaaatctgcaagtggacattgggagccttttgaggcctagggtggaaaaggaaatatcctcatataaaaattagacagaagaattttgagaaacttctttgtgatatgtgcgttcattgcacagagttgaacctttcttttgattgagcaatttggaaacactcctttgtagaatctgcaagtggacatttggagtactttgcggcctatagtagaaaaggaaatatcttcacagaaaatctagacagaaataatctgagaaacttctttgagatgtgtgcattcatgacatagtgtttaatgtttcttttgattgtgcagttttgaaactctctttttgtaggatctgcaagtggacatttggagcactttggcgcctgtggtagaaaaggaaatatcttcacataaattctagacatattcaatctgagaaactggtttgtgatatgtgcattcaactcacaggattaaacctttcttttgatttaatagttttgaaactctctttatgtaaaatctgcaaggggacatttggagccttttgaggtctatggtggaaaaggaaatatcttcacataaaaactagaccaaagaattc

SEQ ID NO: 200506 - DNA, 1000 bp, Homo Sapiens
ttggtataagtcagatttgttatatagttaagattcatgtgcaaagtgaggcactttagtgcaaagcctacttggaacccacagccagagcactgagtagagttagatgaggacctgagataattaaaagttggacacaaggtgttcaatacacaaggtgcttctttgccaatattatttatttttattgtttctgagtcactttgtttcagatatgtcacatgcatattgcagaggtgggtattgctttgtaagcctttacaaatctttttcaatacatgattgatgccatttacatgtaataatatgactgatgtatttggtctcagctcttatatatacatagatacatatatatgtataatttactgtattatatttgtgtgtttttcactgttttatttttattttttgcattcttttgataggaagatttttatttttttctagtgattacttttgtactaatactcttgtgtattatttttaatcctccttttccttaagcttttcttatgtgatttcttagcttgaaaaaataatttttgactccaaaatacgtgataagttcatgggctttccatagttttcttttctctttctcccatctcctcttgttttctttctttcttctttcttttttttttttttttttttttttttttttgatggagtcttgctctgtcacccaggctggagtgcagtggtgtgatcttggctcactgcaacttctgcctcccaggttcaagcgattctcctgcctctcagcctcccaagtagctgggatcacaggcctgagccaccatgcccagctaatttttgtattttcggtagagacaggtttttaccatattagccaggctggtctcaaactcctgacctctagtgatccacccgcctcggcctcccaaggtgtctcattttcttctattttgtcaagcacatatagaaatcacatgaaccttttccatatttatactcacccaaatgttctgaattc

SEQ ID NO: 200507 - DNA, 1000 bp, Homo Sapiens
ctgcaatcacacttaggtacgtattatggataatttacagataaattccccccaattcatcatgtattttaagcataaccactaaaggccattttcttccaatttttttttcttctttttttttttgccaaatcttacccccaattttatggtggaaataatagctaactcagaaaactgttctttggccaagttaaaagacaataccagcaattcatgtatagttgagttatgaaggtcagattttgaaataaatgcagattttgaaagactatgtggggaaaaaatgctatgagtacaagatgctgtggacatggaagcatttacaacagaaaagagtgcactgaagcctttagctggatatttcaaggacttttcaaaaggacgcataagaactttccaaacagttgctgtttatcttcatgacaaattagcacaatttttggttagtttttgtctactgtttgcttcaagaagtttactactactgattatatatagattttacttggcatctagctgatagaaaataaagttataataaagttataattcaaataggggagtactgttctgaaatgttttcacttgaatacacgataagaaagctttcactttatgttctttccatttctactccctgtgcacaggggatgagactctcatctctggtcttccgggcagaatatcctgagttatctggctgaccagccacagtcctgggctttctaaagttactctttgcccttctcccacccccatttaaaaaaatataaccaacgaacattatgttttgtattacagagttacatctcttccagcacactctaagcagcctaggggcagggacagcagtggagcatcacgcagcctctgcatgaaactggcattggggagaacaatgtttactttgccagcagggacagcagtaactgccattgacattacgtccaacagtgtcactttgtaaagacagttccttatctatttataaagagtt

SEQ ID NO: 200508 - DNA, 1000 bp, Homo Sapiens
aatcaacttgttgacaatggcattaaacctaaccctgatgcaagtaatacacgagtgaagaaaataattcacggaataaggagattagtatgttccatttctttttggggggggggtggagtctcactttgtctcccaggctggaatgcagtggtgttatctcggctcactgttacctctgcctcctgggttcaaatgattcccctgcctcagcctcccgagtagctgaaattacaggcatgcaccaccatgcccagctaattttttttgtatttttagtagagatagggtttcattttattgtccaagctggtcttgaactcctgatccccctgcttcagcctcccaaagagctgggattacaggtgtgatccatggcgcctggcctgattttttttttttttttttttttgagacagagtctgctcagttgctgaggctggagtggaacacaaaaatggctcactggagcctcaacttcctgggctcagatgatcctcccaccttagcctcccagagagctgggaccacaggtgcacaccaccactcctggttaattttttgtatttttttatagagacggggttttgccatgttgctcaggctggtctcaaacttttggactcaggcgatcctcctgcctcggcctcccaaagtgtagggattgcatgcgtgagccaccgtgcctggctgatttatgttatttaaaaggaaaaagatataggtatatgttctcccatgatatgtacatgcataaaaagtgaaaagttaaatgacaggtattcacaaagaaaggtggggactaaaagtttgtgtgttattttatattcttatgcacataaatacatacgacaagaatattttagtgtattatacgataccacttatcactacatcagattcacgtggcctctgcctcatttactagccaccagttcttggtgggcaccagctggcttctcgcaggtgtcacctaacagagccttactgaatgctgctc

SEQ ID NO: 200509 - DNA, 1000 bp, Homo Sapiens
cccgcctcggcctcccaaagtgctgggattacaggcgtgagccaccttgcctggcctgaatattcttttttaaatagcatcgttcgtgtgtgtgtgtgtgtgtgtgtgtgtttaatttcatggatgtgagatcttctcatctcttttgttctctttcatataaatatttttctcaaatggttggtaattcttgactttctctttatgcgtataagagagacaggaaaaatcctgattggaagccctgtgtgtggcaggatttgtcagctgaagggcttcgctgtgaagttactgagtggggatgtggctgtgttgtagtgaaatctcactagtcagtatttaagtcttttctcttggacagtgtgtctctcaaagaggattaagtagtttattgcctaaggagtgtacatttaactgccacagttctagggtgttaggcaggggaagatggtaggagagtctcactgtttaggataccaactttttgctttttgcagatcttatcctgttgtaatttgaaatagaaacttttttttctaagtttgtatatcaacattttaaatgtccttatttccaccctttaactcaccctgccttccagtgtgccttgtaacccattctgcttcagatttttccagagaataaagccacttgtctcctgcccaagacaggatgtcacttctgtcatggtagtgggaacggtcttggccgccaaggactctttatatagactttccactgtttttagtcccagttttggaaatacgtcatacctctgatttctggaattttcttaaagtcttattctgtgttttagttaaatcttgtctatctgctcacacttcccataatgttgttgacctcttccagttgccgtggtatctttgccccgattctctttgttcttgtgggtttattcctttgttgtcattttagtggggttttattagggagtgagaataaacttgtttacttaatctaccctgtttaactggaattc

SEQ ID NO: 200510 - DNA, 1000 bp, Homo Sapiens
aagctcaagcgcaaagaggccctgagcttctccaaagccaaagagctctcccggaggcagcggccgccctccgtggaaaaccggccaaagatctcagccttcctgcccgcccggcagctctggaagtggtcggggaatcccacacaggtaggtccagcgggaggcgggaggagctcctggttcccaaggaaaccggggcgggctcatgcgcccctgctgcccttccctctcctttttcatcttcctacttgatttcaagttaaaaaatgtggaaaactcaagggaagaacaaagacccatccatgacccagtgaggcagccgcttccgctggcccctcgctggagcccgtggcctgcgtgacagtagaaatggcttcatgtcgggccgggcctgagctgcactccgcatggtgtggcctcacttttccacgttgataagtggcgtggccagctggagagctgtgtatccccgcactcagatgcctgcgtctgtcctcaccagggcactgctcgggggcgcatgtggggccactcgtgggtcttttgccttcgtaaataacactgtggtgaacgtcttgtccacatgtccctgtcccagatccagtgtccagacgtcatgattccatgtgcgggctccgtggaggcgtggcccctgctccagatccatggctgccatggccttaagccgcggtgctgcggcttcctgcccttgtgggcgccctgcacactcacactcagactcacactcacacccacaccacaccctccatgcctcctggccgccacctgtccccacagccccccggcctctcagagccaccctgcccatgtcccccacagcggcgtggcatgaaggggaaggcccggaagctgttctacaaggccatcgtgcggggcgaggagaccctgcgtgtcggggactgtgccgtcttcctgtcagctgggcggcccaacctcccctacatcggccgcatcgagagcatgtgggagtcgtggggca

SEQ ID NO: 200511 - DNA, 1000 bp, Homo Sapiens
aacacatgggtctcctgtatatataaggagacaggaatgatccaacagggttgaactgtgaagaatgcggcatttggggagaaaaggaagcctgcaagtaccaagacaagacaagattgatcagataaggaaaaaaaaaaaaaaggaagccatagtcttacaaaccaaatggacatttcaagtacaataagagaccaacacagcagaggtaagagtgtatgaattttacaaatagtactagtctagaaatgagaaaacgtgggttcaagttctgtctctattccctgctcacagtataaaattagggtaatcactttccattctaaacttaattctcctagtccatgaaaagaggatgtcagagattatatctggctttggtgtcaactccaagttatatgtaggagacaggtctctaacaccttttgagcttcacaacaattccaagattacagctttaaaaaaaaacaaaaacaaaaacaaaaagcctcaggagaaagggcagacacatgggagacagacagatggtgtcagggccagaacccaggagcacaaagccagaatgcagagagcacaggtgttaagtagtaagagattaagtgttctgtaaaaagacacaaaaaaaccaacctgcccttcacagtaactgttctcttccaacagaggagagctactcccacacttttatcaaaggggattgtaggaagtggggctaaatctgtcaggatggtacataaagcagcatattatgctggccaagaataaagaaacaagtaacactcttagtcaagttactcctaaaatcaatagctacttgcaaccaagacccgtttttagcatacaaaccaacctttagacctgccctctggggattctcctgttacctcaggggaactcatcacgaatgccttaaataaatcaaaacaaagagtgttaactcactataatttaaaaggactgttccaccattcaagaatacaaaaaaaaaaaaaaagaattc

SEQ ID NO: 200512 - DNA, 1000 bp, Homo Sapiens
ggcaaaaccaaatcaacaaaaaccaaacacttccacatcttcctccttatctctttactaaacttgtttccattcctcacctcccatttgctcctcacctcactcatgtctgtcttttgcccctggtatgccactacaacagctctgtgcaaaggccagcaatgacctccatgccgctaaatcgggtagatattttccagtcctcatcttgacctcgtggcagcattcagtgttacagatcaattcctctttgaaacattttcttcccatgcctcacccaacacggtgtcgcctggttttcttcctacttctctgattattccttctctttctttggtagatacccttctttacccagcctttaaatattgtcattcttcattgctgcatttaaactcttccaaatctatatttaggcatggagtgattctgtctacattaacagctcaattactatgtatacacagataaatcacaaacttttatcttcagccctatataccaacttcctacatgacatgtccattgaacgaaagcaaatatattaaccaagatgcgtttttaacaccaaattgtctatatggcattgtgatagatgcaaataattataagtcatcatcctatcttcatggagcttagtctaaaaatatagagataggacctataatgtaatggttaaggtcatagtcattggagtcctgtacagctgggttcaaatcatggctttatcgctagtaatggccttaccttgaataaattaacctctgttggcattagtttcctcttctgtaaaataacggtgataaatctttcctcatagggctgttgcaaagatgcagtggaaccatgtaagttaaagcattcagtggtgcagatccaaagcaaattctctcttatggtagtagtacttattaaagtagtggtggagaaatgttagaatacaaggtaatatatgcaagtgctaagacagttctggaaacaataagtgtagaaagaattc

SEQ ID NO: 200513 - DNA, 1000 bp, Homo Sapiens
aagtggggaaggtttcctgtatattacaggctaattcatttctccaagcttgcagttccacattttcaataccttcttctaacaaggctaacacagaacatgattcatacacatgcttcaatgaacatgtgtgtgcagagacaggaaacatctccatgtaatttttaaaacaattttttatgttgagagtattgagttcaaagcaaaaagtactagtgacagaaagtaactggcccaatggacatatagaccatgggatagaatcaagagtccagaaataaatccatatgtttacagtccatttatttttttgtttttgttttcactctgttgcctaggctggagtgcagtggtacgatcacggttcactctagccttgacctcctgggctcaagtgatccacttgcctcagcctcctgggtagctgggaccacaggtgtgtgccaccatgccaggaatttttttttttttttttttttttttggtagagacaaggtatcagtatgttgcccaggctagtctcaatctcctggcctcaagtgatccttctgccgtggcctcccaaagtgctgggactataggcttgagccactatgcccagcccccattgaacttctacaagggttacatggcagacagttcaatcaatgctgccgggaaaactggacctccacatgcaaaagaatgaagttggactcctaccttccactatacacaaaaactaactcaaaatggatcaaagatttaaatggaagaggtaaaacataaaactattagaagaaaagaaacagaagggtaaatcttcataccctgggttaggctttctttctttcttcctttcttttttttcataaatacacagttttgtttgctattttcaggggaaacttaggcattcaactataagctgataaaataccatacctaaaaaagtataaaagtataaatatccccttagaataaattttagtgaattgtcttaatatctttaaatttaaaa

SEQ ID NO: 200514 - DNA, 1000 bp, Homo Sapiens
cctaccacttcctctgtttaactgccagaatgccaataggcaggagagtagatatgtcttctctgggtagttgaccaggtacaggaaagacctacaaattcactggcttttccacaatgaaatagccagctgccttgtcatcttacggtgaaggcctccagtagctaagttttattagcaaatagagatcttagtttttagtttcttgtcattaaataaaaagccaaggattgttaaatgtatgttcataaatattagttttacaagacactagggtgtgattccaacagctttgactccgtttaggagccggtgcttttgacttctttggggctaagcttcttgctgtggcttctgcttgttgctctggtgaagcactgaagagagggaaaacaatcagcataaattttttttttttttttgagacagagtcttgttctgttgcccagggcagaatgcagtggcacaacctcggctcactgcaacctctgcctcccaggtttaagcaattctcttgcctcagcctctgagtagctgggattgcagacatgtgccactacgccccactaatttttgtgtttttagtagagatgtggttttgccattttggccaggctggtctcacactgctgacctcaagtgatccacccaacttggcctcccaaagtgctggtattacaggtgtgagccaccgtgccggccctaatcagcataatttgtgatgtcatggccctagatctaaatgccaggagattctcacagaaacaaaatttaatgagtgcctgtatctgaattctgttactcaggatttattgatagttctttttcttttcttattttttttttggggatggagtctctctctgtcacccaggctggagtgcagtggcacaatctctgctcactgcaagctccgcctcccgggttcacaccattctcctgcctcggcttcccaagtagctgggactacaggcacccgtcaccacacccagctaatttt

SEQ ID NO: 200515 - DNA, 1000 bp, Homo Sapiens
ttctaaagatagcaaaagttactactttgaaaaataaactaatatgaagaattatattatggcttctctaagtgaatgaagatgtgtttaaatgtaaatttaacaaaagcaatttctatctaaatgcatacagttcatcctacaaattactaaaggtaggaaagagatttttaattataaaagcagtggaagaggacattttacttacggtaaaaatcttaaaagtgtagtgtttgcctatctttacaaattagcattcttctccctatcatgattttgaaaaattaaatgatattgagtctttatagaacagagccaaattaagactgttctaaggatgagctacaaatgtggaaaaacttgtagagaaatgttcacatcaatttgcttctcatgtaagctcatattgaactcatgaaacaaagatatctatcctcagttactaatacctaaatatacaaattgaatggaatatatgaaaaatgattcttatatccttggaattttttctataataatgtattattttgggataaagatagttctcacttcagcgagggataatgagatggagaccctgttactaactaaataggaatcctgaattagagttgtcctccttttattattttgtagagcaccctatctatacttgtatctcagttgttctgatttgttgagattataacttattatctaaccagaaatgagtttattatgacaaattaaaaatggccagaggtcacaaataatgcagaaaatacaagtaagaacagttttacttaagggaagattttcactaattctgatacttttctagtttacaactcctgagaagattgtgttgttaatttataccttattttttaattaaatatagaagccacatctttatttaacatttaagagctacttttcctcctcatctgtcaagtgatttttctttaatacctttgttattctgaggaatgaattagttgtgtctaagggtaatggaatt

SEQ ID NO: 200516 - DNA, 1000 bp, Homo Sapiens
tcacttcacacactataagatgactactgtcacaaaaacagaaaataacaagtgttggtgagggtacagagaaactggaacacttgtgcactgctgttagaaatgtaaaatggtacagccactatggaaaacagtatggcagctcctcaaaaaattaaaaatagaattaccatatgatccagcaagtccacctctgggtacatacgccaaagaactgaaagcagggacttcgaaagatgtctgtacacccatggtcaaagcaacattattcacaataacccatatgtggaaacaactctagtgtccattggtggatgaatggataaacaaaatgtggtatatacatacaatggaatattattctgccttaaaaaggaaatacattctgacacatgctaccacatggatgaattctaatgacattgtgctaagtgaagtaagccagtcacaagaacgcagactgtgtggtatcatttacatatagtacccagaatagtcaaatccatagaaacaggaagtagaaaagtatttgccagggacacggaggagagagaaatagaaagttattgtttcatgggtacaaaatttccgttccgcaacatgaaaagagtcatggaaatggacagtggtgatgactgcacgacaatgtgaaagagctaaatgccactgcctctgcacttaaaaatgattaagacggtaaatggttaagatggtaaattttatggtatgtgtgtttaccacaattaacattttttaatattcttaaaatatcaattactggcatgcagtaagcagttggtactttctagatgaataaatggactctaaaatagattgtgggcaaaatcaagaaccactttgaatgaggtaatctaagccaaatgtaaacattaccacttccaggaagccaactcctctcccatgccagaatgaatcatgcccctcagtgcactctcattcacccagcagcctgtgctagaaattcccagttattctggac

SEQ ID NO: 200517 - DNA, 1000 bp, Homo Sapiens
tgtccagctgggcaaccctaaccctcagccccacgccctgcagggaatgagggctcaggtctatcccaggaggtgcaggcctcctgccagcttctcctcaccatcctgccccggcgccagctgcctcctggacttgagtccttgaacgtctctgtggctgcaggtgagtctactcccctttccctttcctctatccctctaatcacgcaggtgggatttgatgccctctaatcccatttgctggctgtttgtgtgcctcagttgctttatgtacaaaatggggaaattacatcccgttgatgagatgaggggctgcctgaatgtctaggtctctaaacatcatccttctcctccgtcctctcttcccttgtccttgtgtctgtgcaggaattcttcttcactccatttgcagccagaggaagggtttccccacagagggggagagaaggcagcttctccaagacccccaagaaccctcagccaggtctgaagggctcagcatggctcagcacccagggctgtcttcaggcccagagaaagagaggcaaaatgagggctgacgtggactgtccacagtgttcatgtgctggagtcagggacggccgcacctgcctccgccggctccagtgtgcggggagcctctgcctgagtgtgcaccaggcccatgtttattgaccacagtctgagggggggggaaggggactgcggtggacaccagaggaagctgtttcctgttgtgatgttggacctgtagtaggacatggtgatttgttaatttccatgggaagccatgatggcctagcatggagggaatctgttcccaggccctgcctggaagttgagggaaagtttagacatctgcagagaggcaggcagcccagcccaggggacccgttcctcttgaaccagtcattgcctgtggcaaatgtgtgtatgagaatgtggggggtggagggcggggccctgatgtggagtagacagtgcgcacctcaggcccaca

SEQ ID NO: 200518 - DNA, 1000 bp, Homo Sapiens
cgaccgccgcggcgagggcttttcttcagccgtcggttcgggctccacaacgatttgagtaacgtcctccatgtacttcctcccgccctggtcggagaagacgctcactcccagcgagtacagccccgccatggccggctggccgggatcccgccggtcccacgcagcccgccgaatccggcggcgggagacacactaggcgctcgccggccaactattgtttatcttcgacgacgccgagaagggggagggggcggacccggagaagggggggcgcgcgatgtctggacttgtccgcgagagctgggccggagcgccggagcgagcagagccaggcagttgcgcctgcgcactgcgcttccccccaccgcccgcgcccaccacacaaatcaggcgttctcccccgctgacgtcactcggctctctaagctcgaccaatccggagtcgagtggagcgagcccgccctccgtccccgccttcgctcccgcctgcgacggccgcgctccctcctcccgccgctggcgctgggcccgcgcatctcctagtttgcttcccctacgccgcgggcgttttcgccctccgggttgtcggcagttgttgatcctttcccgagcggcttggtctgtgtaggcttttggctcagtccagcgttcttaatgcggcctgctggccttggcgtcccgctgcttgctttgctaggaaggtggtgtgggctcgggcccccagcgagtggagaatgaagggagaagagttcaccctcctcctaagcgaaatggcgggaaacctcccttccaaagggcgattgtgagctggccggaacaagtgctgcacccttgagctggatctgggtgggacgtattcgactgggaatggaggagggagggagtccagttctgttgtttaaaaagcacttaggaaatttccaccgtcagctgcacagtctcggttcacataactaggtatgtcagagacgtaagagggctgtattctaacgaattc

SEQ ID NO: 200519 - DNA, 1000 bp, Homo Sapiens
aacctctgctgtctcagatctgtctcttctccctggcatctttagttcctcgctctgtgtttactcaatttaccatgcttttcttttctttttttcttttcttttcttttctctttttttttagacagagtctcctctgtcgccctggctggagtgcagtggcacaatctgggctcactgcaagctccgcctcccgggttcatgccattctcctgcctcagcctcccgagtagctgggactacaggcacctgccaccacgcccagctaattttttgtatttttagtagagacagggcttcaccgtgttagccaggatggtctagatctcctgaccttgtgatctgccctcctcagcctcccaaagtgctgggattacaggcgtgagccaccgcacccggcctactctgttttcaaacatgacacttttccttaaagtgaagtccccaaaactagcagcaacatcccctaggaactcgtgagaaatgcaaattcctgaggtttccctccccccaccagacctgtggattcagaaattcatgggtggagtccagcggttctgttcaacagaccctccaggcaattctcacgtgctgaagcttgaggactgctatcttttaagaaaagcctccttgcatctctctttggagctacttccaaattctcttccttctttaactgtgaaagttctctatcaagcaatcttcaccaattgctttctcacctccaatttttagactcatctaaaatcatgctttcacagatcaccaaattacttattgcctgagctgggtggtgaaacacaccctggaatcagagataaaaaacctggctttgaacagtggttcactgctgtccagctgtgtgacttaggaaaattacttacactctaagcctcagtgtcttcacctgcaaagtgggattaacattttctttgctggattattgtggagattgagataattatgtgaaagtattatacatagtatatagtagaagctt

SEQ ID NO: 200520 - DNA, 1000 bp, Homo Sapiens
acatcattggcagctaagtctcttctgggaacttgaaggccaggaaatttgccctggtactgccagtgctctcatctgctctcatcatagatttttaaaactgtgttccttaattacgttaaaggcacttgtgttctttttgtctggtagcatctttcagtcaatctcatcatcagtatccttgtgacaaccatgtggtgatgattatattttgttttttaattatgtttcagggtgattacaattcagaaattcatcagatcacaagagaaagagatgaacttcagcgtatgctagaaagatttgaaaaatatatggaagatatacagtccaatgttaaattattgacagcagaaagagataaactaagtgtcttatataatgaagtaagaaatgtattataattaagccaatagattgtatagaaccagttaactataatggagcctgtatatatctttcacattactataatatatggacctgtgatatttcttcataattaaaattatcagtagtagtttctactatcattctgtttctaaaacacaaatttctcttattttttcatatttattctttcccttttctagcctatctatgtgtcagatcagttagagatagtcttctttttctaaaactacctgaagcaggtctcagcctgactctgagccaaatttatgcttggaattcagacgtagggaaatgtctatcaaaacagtgggtagcacccactatttggatatattggctatttaggacttagtctctaaatactgtactctaggaagagggaattggtattcagcttggccccattaacaaatcctcagttgttagagggcaaggtaagtctgagcaaagcatggtgtctgtcacctaaatttgttcacatacccatctcccatgaaatcctactgctattttgagaaggggaagaggcatgcaagttaaaggtcacgttgaaagagtcacttaatgagttttttggggggaattc

SEQ ID NO: 200521 - DNA, 1000 bp, Homo Sapiens
tgttagatactgaataaatgttagtttccttcctactttggttcaggttcaaagacaagaacaatcatctcttctttcctgcttttgtgttgtttttcattgagaatgcatgcaaggtcaatgtgagcagtgagatcaaatcttaatatctattatgaagatgcaataaaacgtcaattttttaaaaaagaattttccatgagtatttacagtattacaagaagacttgctttgagaaaccaatttgttgttgttgttttcttttcttttctttttgagacagagttttgctctgtcacccaggctggagtgcaagggcacaatctcggctcacagcaaccttcgcctcctgggttcaagcgattctgtctcagcctcctgagtagctgggattacaggtgcccgacaccacatccggctaatttttgtatttttagtacagatgaagtttcaccatgttggccaggctggtcttgaactcctgacctcaggtaatccacccatcttggcctcccaaagtgctgggattacaggcctgagccactgtgcccggcagttgttgttgttttaaaaaaacaatagtttcttaaagttgagggtaacgacaaacccatagcaaactctagaaagaaaacaagggcttctcttcacatctctaatgtagagcacactgcactcctgtctttagtgattccagaacaaaagactttgcatgtttattctattaccaaggccaccaaagaaacatggcaagtggcagcttacctctttggtggggctgcagaaacctttgcaaaaagggatagaaattgaagaggaaaagctgtggagagaaaaccgactttaatactgatgcagctgacactatggagttccatttcttctcaatgcaaacatatcaccaagctcaactaattgcagaacacttttgtttttttctcagtaagcaatcatgccctaggatgattcaatatgctatattaaccaaggctaggaattc

SEQ ID NO: 200522 - DNA, 1000 bp, Homo Sapiens
ttcctttagtctgcctgtgagtgttgaaatccatcagtttttgtctgaaaggtcttttttcaatttcatttttgaaggatgtttttgctttgtggattctaggtgggcagtttttgttttgtctctttaatgcactgaaaaaagggtgtcactgtcttctggcttccactggttatcttgagaagccacctatcagccctattgttgttccttcgtgagtactctctgtatattttctggcagattttaagacttcatttggccttttgtttacagcagttttgctgtggtgtgtgcctaggtgtgctttcctttgtcttattcatgctctggctttggagggcgtcatgtttctgtcatttaaatcatttcctcattttggaaaattcttggccattcctctcaaacactgggttcatggctctctcccaactcccgtgggtgctgtgaattcacgtggatgagacccttcccatggcccccatgccctatatttctctcatacttttattttttatttatttatttatttattttttgagacagagtctcactctatcgccaggctggagtgcagtggtgcgatctcggctcactgcaacctccaactccagggttcaagcaatcctcctgccttggcctcctgagtggctgggactactggtgcccaccaccatgcctggctaattttttgtatttttttagtagagatagggtttcaccgtgttagccaggatggtctcgatctcctgaccttgtgatccccttgcctctgcctcctaaagtgctgggattacaggcgtgagccaccgcgcctggccccctctcatacttttaaaatgtactttccatctttgaaaaattttctcactttagacagattttttaaattgccctctcttccagttcaggaatcttctcttctgctatgtctaatcagctgttaaatccagccattgatttcttaatttcattactgggtatttcagttctagaattc

SEQ ID NO: 200523 - DNA, 1000 bp, Homo Sapiens
ccaacaagtatttattgagcacccactgtctgtctcctgtgtacctatcatgtatagcttatattctatcctgatcatgctttttacaattgcaactaacccctacctttacactcccatgccctttaccttgttttacctttttttttttttactgcatctatttttttctgtataattatgttgtttatcatgtctgttgcttaatgtctgtctccatctgctaagttacaaccttggggacaagaatcttggtgcataaatgaactgctaggtaaataaaaaagaaacaaaaatgttaaatctgatatgatattagaactagactttctgagattttcttggtcttatccttatggctgtcacctcatggtgacaagatggtggtttcaggcctatacatcaaaagaaacaaaaatgttaaatctgatatgatattagaactagactttctgagattttcttggtcttatccttatggctgtcacctcatggtgacaagatggtggtttcaggcctatacatcagaacttcattcaaggtagaaaaaaagggaaggggacagggtagattcagcaaatttcaactcatttatcattgaccagaattgtgtcaaattatttttctagctactaggaaggctgagaaatcaattatttcactctgacagtttctatcatggaggcaagaaaatgggattgtatttggatttggagcttgggtgagtcgacatttaataaaccatattcaataagccatattcaataagaagaagttggaagataagaggaagaagaggaccataagaaacaaaaaataacagtagaactatcatatctctaaaagaaaataaagtaagaacttttttgttttatataatatctgaaaggttattgtttatccctgtaactcattatctgaagaaagggatgatgaacaggaggagggagtgcagaggaagaacaagacagaaaagcagaatgctgtcgatgatatcatg

SEQ ID NO: 200524 - DNA, 1000 bp, Homo Sapiens
tgagggtcactccaaagtcaaagaaatgcttcccaggatatctatgaggtgattggcctcaggggtattcggcctcaaagggaccctgcccattgccaaagaaaactttactcagttttatccaaagttgatgggtctcaatgaacatgaaggtgggactttagttggcttcttccagagattaattatgctgagtgactaggacagtttgtgggtcaactgtgctggggtgaaatggacttggtttccaatattgttgtggccatgctataactaaatgacccagacacatttcttagcctggccagcatttcctctttgtcttttgtttcaaggtttgcttccaaaggatacaacagcctcagacccaggtgttcttcctcatagagccttagacacagcgatatagcagcatcattaaaatggcatggctgtagagtaacattccccaaattttcctggaataagtggttagatgtcccaaattgggtcagtaggcttggaatccaggaactgatgataattaagagttactgagcatttgttatgcaccagatactgttataagtgctttatcttctgcagcacattggctaccacaacttaccttgtcccatatgctcttcttacagagtgctattgacactcctcctgttgagtggtaggatctataatcttttcccttaaaccagaaaggatctttataatgactttaaccaatagcatatggcagagatggccccatgagacttctcaggctagttcataaaaagtgatacaccttccatagagttgcattgcaacactagcacttggaacccagtctccatgctaggaggaagtctaggccacctgaaaaggccaaatggagatgtaccaaccaccagccctagctgagatcaagatgattccagccccagccaccatcatctgacggccagagcataaaagaacttaaacaggaattaccctgctgagcccaatcagttgatagaaccag

SEQ ID NO: 200525 - DNA, 1000 bp, Homo Sapiens
ccgactagtccaccggcagggaggcgtcacgtcctccgcttctgcaaaacacagattgccttgctggccacgagcaaacacgcagcttctccttcactttatcactcagcacccagcccctcagagctctggactgtgagctcggagatctccgcagcaccgcaccgtctttactcaggtggtgtcctaagaccacacgtcactacagccggctgcgcgctctttcggcagctgtggccgtctcagcagctattgtttgtccctgaagtactggtgccggcaggattaggcgtggagccaaaaatggaattctattcatagactggcgaggctggaaagcagctcagaactcatttagttcaaactttcagagttccaaagaaaacactaataaaatggatcaaacgactagtctaaagtcacatggggagtcatacagggaccccataccctagtcttcagacgtctcttctgctttcaattctaccttactagctgtttcttgttgaaaattgatggcattaaaacataagatcgacagcaaaactcaatttacagggaattgccttcagtgatcctataaatgtcagatatagcagggtcagaagaagaggatagggtacacaacccattttataaggttaacatcatgttgacataaaaagactaatctcaggcacccaaatgcaaaatcttaactataattttagcaaataatattcagcagctatagaaaaaccaaatgctgacagaatttatcacaaagattcaagttaaccaatttgcggaggaaaaagtttgtcatcatcaacatcggcagaaatgtactgaataacatttgacttcttgcaaactttagggatgatatacttcacttattttataaaataataatgagcatgagaaagagataggaaaaaaatctacagattcctccttaaaatatctgcgtatcttggtaaaaagactgcaaataggtaatttttttttaaatgaattc

SEQ ID NO: 200526 - DNA, 1000 bp, Homo Sapiens
tctagcagaggttggagattaattaatatttagaaaggattataaaaatatgccaaaaacttaaagcaaggttttcagcattgcatatgagggccatgagaatttggtttcttggtggcacataattagcaacccaaactgccttccagttcactaaaataatatactgctcttctctaaatgcgctatgatgacagaccatcagaataaaagaacatttggggtccattcacttatttaataagcatataatgaatgggccaaacactggactaggtgctgaaaatatacctgtgagccgtttgcccaccacacaaacatacaccaaaaggatctccacctttgaaatagttaaatctgaaacaaagcataattgtggcctggttcaccatataaagacgatttgtctttatgtcttctttctgggaattcagctttggaaattatactggcttttttttaacctgagaacccttttacctgagctatagctcaactttgtagatatctaacaccaaatacagcattctttttcttctaaatttatacagataattgactaaattcaggaatttattagtgatatagcaaggtatacccatcaagagtaagactgttttaagagggtaggattgggtatagtgattgtggagagcttcttccagaatcttagctcctctggagatctaatagttcaagaaatgcaaagtctagatagatagatgggtttcttctgacttgtttaaagatcatctttctgtgtactatgttgaaatatgttgaaaataaactacaggggccaagcatggataagaaagtccagttaggattttgcattaatccaggtgagatatatgcagtttccaaaagttttgtagcagtggaagtggttgaaaaattacagaatttgctaatgtattgcatgtggaccacgagggaatgacaggagtaagggatgatccaaaacttttagcctgagaaactggaacttgtggagaga

SEQ ID NO: 200527 - DNA, 1000 bp, Homo Sapiens
attagtccatgctgatgtgagtagctatagttccctgattttcaatttatgttgtatgttattggaaaacattgtgataatttacttatcaattcttctattgatggacattagaatcctttctggttctttgctatatttatcaatgctcttacctacactttcttgcagcattctatgatctttgtatttaaaagttccagtccacataaatctgctgttaaacctgagataagttactttaagtcgaagactccttgtgtgtatcataggaatgacagcagtaacttaccagatagtgttttcaaagagtaaattagcatataccaagtgcttaatataacacctccccataagtgcaaagcaaatattagctattattaatagtattactcaaaagcaatgaaataatttctgtaagaattatcaattctaaatatcaaaaaaaaaagctcacatttctgctcagtgtggtttaaagctccaaaatcaaagattcaatttggcattctcctttagcattttaaagttcactgcacttttgtgacagtgttaggatatttgaatgtccatctcaactccttctaccatcagaggcaaatattagagctgctctaaaggctgaaagccaattgaagggtcttcctcattaagaagaaggaacatgtcttgaagtaaaatagtctgttgggtacagtttatagtgttgttgttttgttttgctttgttttagagatggggtcttgctatgttgcccaggctggagtgcagtggctgttcacaggcatgactgtggtgctctacggccttgaattcctgagctcacacgatcctccttcctcagcctcccaagtagctgggactacaggcacacaatgggactttgcccagccatagtttatagtcttgctgcctcttctctacagtgcccagtcatagctcccaatagccactgctgactaacccctattctgatctctggaacaatataagagaattc

SEQ ID NO: 200528 - DNA, 1000 bp, Homo Sapiens
tttgacttaaagctacttgaagcagatgatgctggaggctggtcccatgaccgtttcacaccctagtcagaggattttcagtttctgtcttcaaggtgacattcacaattgctggttttccataccacatttcttccctatacttgaatttctaggattacaataaaagagagctaatattcaccaacccaacacctttttttttttttgagacggagtctctctgtccccaggctggattggagtgcagtggcgcgatttcggctcactgcaagctccgcctcccgggttcacaccattctcctgcctcagcctcccgagtagctgggactacaggcacccaccaccacgcccagctgattttttgtatttttagtagacatggggtttcaccatgttagccaggatggtcttgatctcctgacctcgtgatctgtccacctcagcctcccaaagtgctgggattacaggcatgaggcaccgcacccagcccagcatctttagtgtaagaaatcatccacacattgtatatatgtaaggcccaacaactgacataaaggcagcgcagtgtcctgtaaagagcacagatttgggaatttcccatagacttgtcttgcactgactgcaaacatttaagcaacagcttctggtgccctttgctgctcgcctgtatcatgagcataatggctatgtttatagtattttttgttgttgttttttagaagatacttttaaaaccctagtttttatttttatttattttccagtggccagttactagaatgtttttattttttgcatgttataaatattttctctgtggtttgaactttcaaaaccgtgagtgattttccactctctgttatagagtgtttttcttttctccaaagttaaaaaagttgtcccttgaaggcacagaaaataaacttttgaaatcaatgaaaacaatggaagcgctgaatccagtaaaccaaagataacacaaagaccaggctacaga

SEQ ID NO: 200529 - DNA, 1000 bp, Homo Sapiens
agtattctcagtgtgccacgtccaaaatgaagccttcatttcatggctgggaattgggaggaagaagggagcaccctgcatcttgactgcagtcacccaagacttggccttggcaacaatatgctaagggcagaataagaaatgttacagtcttgccctgtgttcttgactatagtagtctggagtgcagtttccacatcacggaacaggtggggagggagataaaaggagtcttcattcaaataccacagaccttcacattttgtactgaatttttatatattctcttgagtagatgtttcttcattggcttagggtaaactcaagtccatttccagaggtcatttatagatcaagactcatattgactacgccattgtaaaaacatggtttccaaggttgctgtcgtcttggctattcagttttgcaggaagaagaaagagtgtagaggagtgtccacgggggattttattgaccatgccagaaagtaggacacatcactatcacttatatgttatgagtgggtagaaataatgtgtctcactcaccagtggaatgcaagtgttcaccccagtggtgagggaagttgggaagtgccattagccatgggtttaacagttttgccacatgggtactttagattttctcttagcttatttgtattttctgattttgcacaatggatctatatttctaatacaatgtaaatataaataaattaataaatagagaacaagcagtaaggaagtaagggtagggagtatagacaatcccttctaagaagttttgcaggtgccattactggagtgagaaactaggttaagaaaaggtttctaaatatgaaggttctggcatatttttgaaagaattatccagaagacaggaaacaactattaagtctttgagttggttctccctaaacgttatatagagtgtctctttcacttgagagaggagagggaaataaagaaagaagggtttcaaaatggtcacccttgct

SEQ ID NO: 200530 - DNA, 1000 bp, Homo Sapiens
ttcttattttaaagaaatgacaatagtgggtccctcccttatttagccgaggcttctataataaaaataattgagaacaaataattgtgagaaaatgtgcaagacaatatgtgttttgaagtgtttctacttttctccttgaactgacatcagaattcccaatgtagtctaggaaaagtacttaggactgtttgggtcatcatcgcctgggcagggacagagcattcaaaatcaaggtgaatgagctctgaaaagcgactgcttttgccaattcattgtctgcattttggcaacgtatttaacctagtgtcattctctctagggcgtgaaatggagaaactaatctaaattggtagaaaagcaagacacaacattaatcctgccacaataagtgaatacggtacctatccaaagcaaatatgatttattttttttaggctgactcagtgctgttttccgtacttataaaaggagaaagtatctaatagcatttcggatccctatctcattttttttttaaatcgtaaaaccaaaagaaaatcaacttttagccaacagtgcttctatgactcacttatagaccaagttaccttaacattcagacacactaagctaattatttatttaaaagaacttttccttgatcatggaaaacagtaattctacaacatcagtcctatttcataaagttcctcctcaaaatctttaccatgtcattcccaggttcatgtataaatggatataaatggttgaatgtctcagactgaaaaataacttatttcccatttttatgcacagtaatatgtagagaggaaattggcctcatgctatagttagttgccagtgcacaactgctgtccaggtttctaaaacagacaaaatggcagtccagaaacaccctgattcaccgtgtcagtttctgatcaattaagttgagctaaagttagacttagagagctgaacaggacagtatgttcaatacttacctagctgaaaaagc

SEQ ID NO: 200531 - DNA, 1000 bp, Homo Sapiens
tgaggatggggatgtcaggtggccagtccttaggtccccaggtggcactcttgggttggtgtcagtggcagcagcagcaggctgagtggtctagttcccaggcctcccaaagttgtgtgcagacactggaggtggcagcaagagtggtgggtctatccttaggttcctgaaggtgctactgttggccaatagggcctgctgaaccttagtgcccaggatcttatgcccacagtatgtggcctatgtgcagcataggctgcattgatgacacttctgttctcaggtactcaggcagtgtgcatgagtattgtttgtggtggtgggtaggatgggccagtcttcaggcccccaaaaggcacatgcaggtgcatggtggccctaccactggaggagacagcgttgttgtcagtgagagcatttccagagagttggcttccatgctcttggaaacatgtgtcacctccctttgtcctacaggcagcattcctgttgcactgaacctcatgttgctctgattgtaggacactacatgggctagattgctgggttcttagctgtacctccactaggtccagccaatattgtgatgctgcaacactctgggtggttgtcagtgcagcttccagaatgtggagttgcaggggttattaggatgtaatctggtgggacctgggctctcaaaatggcaccatgttgcagcagtttggatctcagtcgcagtgtgggatgtagagtgaattctctctcaggaacaatgcagtcacatttactctaagctacttcttatactaggattagggcctatggtagccaaggtgctctcctgtggctaaattgcaggcatttgtgatacaagtgtggactgctggggagctcttgcttcccttttcgccaaaacaaggagactctcctggctataaactcatctcagctggtccagctgcttaagtctcctatttttctgtgcctgtgatggtccctgtctctccttgatgaattc

SEQ ID NO: 200532 - DNA, 1000 bp, Homo Sapiens
tatcagtctgagcccctaggtgatcatgtggcgtggaactgtctgcagctccaagactacctgcttacttctggacagttacatgagtgagaaatacatcttcattttatttagccaatgtatttttgaatggcataattacagcaacatcacctatactctagctcattgtgtttcaaagtacttgtctatgagaagataaggagcttgtgcaagaatgtgaatcaatgcattgcttgtttcaaaaagaacattctgttacaagataaaaacaaaatttcaaggaaagcaactggtatgcttagtgatatagttgatttctactctggcaccagcttcttgtctcatggtaaatcagcaacgaaataattcaaacaggctattaatggaccacactttgagtagcactattctgagttaataattgccaacatcaacttaatgcttcagttatactgtattcactactgtagaaattctcatgtttgtaccctaatcattgaattatttctccatgtgatgctcatatttttccccaaaattttgcctacatttctagcttaagctaatatctaccataaaccttccctatttattttagaggggtagcatagcccagtcattaagagcatgaactcatgagggagactgcctgtgcattaagcaattttcctaaattatctggacctcagttccttatttataaaatagtggttggtaatatttatctcatgtggttgttgacagcattatatgttatttaaaatcattaaatcatgctgtatgtaagagtatttattatttgattccacatttgcccttcttttctttttgtccagattagttaggcaagattagttaggcaattggagcaagagaaagagtaaatctcactgatggattgctttactacaggtgttcatcttgagagacttcttggtccatcattagaatgtaccagcaccatgtgtgactgtctgtccacaagataagttttgcc

SEQ ID NO: 200533 - DNA, 1000 bp, Homo Sapiens
ctcttcggctcctggggacgcgcagttttgcccgcgggtgaaccatgcgcatcatcaccaccacccgccgcagcaccaccatcaccatcatcagccccagcagcctggctcggccgcggcggcggcagcagcagcagcggcggcggcggccgcggcggccttggggcacccgcagcaccacgcacctgtctgcaccgccaccacctacaacgtggcggacccgcggagattccactgcctcaccatgggtagggcggggtcttggggcacctgcgctccgcgcctttcgcgctcctggagcaaactttccacctccagtggaggaagtgggagcccggggacagggtgaagagagaggacgggcttttagtgtaaccgtagagtcagccacagaagttccacgaaagtggaagttagtttgccagcttctccactcagcctggtgcgttttactcctagtagtaggtgctcgagtattgccttattaatactggggccttagggacctcgaacgtcacggcggataaaccagaggttaactgcttgggatttggggtgggtgtgtttgaacctgtgtggcatccccgcgtcggggcggctaaagcgtcttgacgtttttggctaagcctgcgcgcttctccgcttggctcaaagggaggcgatcagatagtgcaagcccccatccctctttaatcctgtgacttcgcatcctgcgcatcgaagacctttatttgctttgcacgtctcttttcttccccgctaagcaaccacgtgccttgaaatgggaaagggatacagatgttcggctgggcttccccgggtgggtccctgaaatgcgtcctggttagcacatggggtgggagcaccttgcccgagccttacctctctaccctctcttcgccggtccgcaggaggctctgacgccagccaggtacccaatggcaagaggatgaggacggcgttcactagcacgcaactcctggagctggagagagaattc

SEQ ID NO: 200534 - DNA, 1000 bp, Homo Sapiens
agtgcagggagcgcgcagggacgtgacgttcgcgggccgggctcgccgcaaccccgcgaggcaaccgccggcgactgcgcggggaggcgggcgggggcggaggccgcagtcatgtgccctgcggcggcggcagtgattcggcccgcgccctccccggccggtccccggtggccctgagtggctgcggcgcctgagccaggcccggcctggccgctcccagcgccctgcaccgcaggcccagcgctcgccccaccgaaattgccgaacctggttcacacactcatttactcattccgcagataggtctgagggcctcccatgggccacgcgctggggattcaaggtggctgggacattcccctgctctagaggcgctcgcaagttagcggggacaccgttaccgcaattacaacacaatgtagcaagtgcttctaccaggtgcctgctgagatcatgccagcaagcatgttctgcctggatgacctagggccccacattgaactggggcctgggggatgcataagtttgtcacgtaaggggcatgtgcaagaatggaagatgtgcaaaaaagggaggaggaggcatttcacggagaaggaaacggtgagcaaaggcattgggggtgaaagagcaaaacctgtaggaagcaagaaggaagttccttttgactgtaggctcaggtgttcagggggtggagtcggaggtgttgaggccccaagaggtcagactttgaagggctcttggtatcctgttaaagatgtggaagttgggaaggagcttaaagcaggcatcgctggtgttcttgcctgctttgctcactgtggtgtcccagacacccaggaccaagacctgcacacagccaggactcaagaagtgttcgttaaatgagtgtttcttctacgccagccctttactagtttctttgcacagttctactcatttaatacccttggcagtcctatgaataggaggttgtgtttgtcccagtcctccagaaaca

SEQ ID NO: 200535 - DNA, 1000 bp, Homo Sapiens
cctctcccaatttcttcttctccctacccctccatccccaggcaatcatttgcatagttttcatttctgtaagcttacctgttctaaatatttttttaaatttgactcctcttatctgtgattgtatatcctttgaccaacatttcctcatttaccctctcccctaactacccaagcctttggtaatcaccattcccattctactctctccttctgtgatatcagcttttttaggttccacatatgagtgagatcatgtggtagttgtctttctgtgcctggcttatttcatttaacataatgccctctaggttcatctgtgttgtcataaataacaggattttgttctttttatggctaaatagtattccattatgtatatatggcacattttctttatccattcatctgttgatgaacacttaggttgattccatttctcttgagatttctcattgtattaaaaagtaggatttattgagtatgtatcttctaatggaaaatattaaggaatttaatgccttaagaaatctagttaaaggccaggcatggtggcttatgcctgtaatccaagcactttggtaggctgaggtggacagatcatctgaggtcgggagttcaagaccagcctgaccaacatggagaaaccccgtctctactaaaaatacaaaataagctgggtgtgatggtgcatgcctgtaatcccagctatttgggaagctgaggcaggagaatcacttgaacctgggaggcggaggttgcggtgagctgagttcatgccatttcactccagcctaggcaaccagagtgaaactatgtccacaaaagaaatctagttaaaaacgtgtgtgaggccggccgcagtggctcacacctgtaatcccagcactttgggagtacacacctgtaatcccagcactttgggaggccgaggtgggaggatcacaaggtcaggagttcgagaccatcctggctaacacggtgaaaccccatctctact

SEQ ID NO: 200536 - DNA, 1000 bp, Homo Sapiens
aaaaaaaaaaatgttttcaaggttcatccatattgtagcatgtatcagaacttcttttatttaaattgtggtaaagtatgtataacttaaatttgccattttaatcatgtttatgtgtacagtttagtggcattaattacattcacaatattgtgcaactgacaccactgtctgtttccaaaacttcatcagcctaaacagaaactctgtcccattaagcaataacccctcatttcctgctcctcccagcccctgcgaacctctcatctactttctgtctctaggaatctgcctcttctagataattcatatcagggaaatcctacagtatttgtcctttgtgtctggtttattttacttggtataatgttcttaaggttcatccttgtaatagcatgtatcaaaacttcattccttttttggctgagtaatattctgtcatgtggacatacgcattttatgtatccatccacctgctgatggatgattatgttgttttcaccttttagttgtggtgaataaatgctgctctgaacattggcatacaagtatctgtttgagcctctgtcttcagtttgattgggtatttacccaggagggcttctttcacttaacaaaatgtttttggccgggtgcggtggctcactggagggaagtagcttgctgacccctggtcttgagtgtgtatctagaaatggaattactgggtcaggcaggatgcaactgtttagctttattggataatggtaggcggaatcccaaagtgcttagatcacagctttgacaacacttggttttatcagatttttaaatttttgccaatttggtccatatgtgatggtgttttattgtgattttaatttgtatttcctgatttctaatggagttgaacaccttttcacatgttcataagccatgtgggtttcctgttttctagcatgcctattaactttcctgttggtggtttgcttttctaaattaatattgactaattgatatt

SEQ ID NO: 200537 - DNA, 1000 bp, Homo Sapiens
tcaggctctgccccaggcctaatgaatacaaatctacatttcaacaggttctccagctggtttttatgcacattaaagtttgagaaacatggataaagcctctggacaataagaattcttctcttgttctttgtatgtaagagtggacatatattgtagtactctaacaatcacataaaaatgtcttctaaccaaacccagcatccaatcagatggctgaatttcactgtctagcttgatgtgacaactctttcctgtctctatgatggtatgcctgccaatgtggatcacactcaagaaggagcaagaagtgtagaagttggctcagatcttatttttcactctcaggactagcctcaggcagcacttttcttttggttgtcttctttctaattagcatgtcaaggggcgactttcaacccaccgtacaagtatagtttttcaagatatgtttcagggcttcagcacaatattctaagtgatgagtgcaaaagactaaccaggctagaatgcacattgggttcaaagccagaagaatttttcattcttactgatgctgtctacaatttcccaagcagcaataactatccaccttcgacaccttgtggaccatgaaaacctcaaggatagagcaagggttattcatcgctgtatcgctggtatccagctccatgcctggcccaggtaacttaatacatttttgttgaatgaatgaactggatcctcagttagaaaatctaaggcacaagggaaatggtgatgctctaagacctttctcccctactctgctgggatgactgaggttattctagacagtggttttcaactttatactctttccacaaccttatgcttggaacaacccaaaacactactttattcctgacatttacagttattaactataacctttatatttataaaggtatattctccctaaacaaatatttaaaatgtaaagatatttctcaaagaatgaaacaaaactcctacagaattc

SEQ ID NO: 200538 - DNA, 1000 bp, Homo Sapiens
tcaataaatccagtgatagtaaagattaaaaacaaaaacccacaatttttcttcccagagactgacctttagggaattccttgggtaacaggttctgaatgtgtgagcacaatagggcccattcgcttgaaggtattttactcaaaacttgaaatctgggctccagctagaaagagggggaaaaaggttatgaattaatctctaattcagaatattttcctcaacacaggtagcccaggtccactaactatctcatacatgaggacttttcaaccttggttggatactggaatcaactaagaagctttttaaaaaatgctctgatgcccggaagccacactctgttcaaattaagtctctggggctagagcctgggcagtgtttttatgggtttcccaactgattctaatgtgcatccggggttgagaaccactgccacagaaatataaaatcatatggtatggaggtcacctataaacttttcagcttgttgctaaataacgtatgagtatggaaaatgcactttttttattttattattttattttattttttgagacacagtttcactcttgtcacccaggctggagtgcaatggcctgatcttggcttactgcaatctccacctcccaaattcaagtgattttcctgcctcagcctcccgagtagctgggattacaggtgtacgccaccatgcctggctaatttttacatttagtagagacagagtttcactatgttggccaggctggtcttgaactcctcctgacctcaggtgatctgcccgcctcggtctcccaaaggggaaatgcacttttaagatacttgggcaaaggtggctctaaataaccagagtgttcctaacgcaggacaaagtgacgctggagagcccacaacacaggactcaataggtattcacctcacattttctgaacaagcttaaaatcccaggacaaacctattctggatatttcattatgaaagaaacaggatcaaatat

SEQ ID NO: 200539 - DNA, 1000 bp, Homo Sapiens
gtgatcctgccacttcagtcccccaagtagctgggactagaggcatgcaccaccatgcccaactaattttttcgatttattgtagagatgaggtctcactatgttgcccacgctggtctcaaactcctgagcgcaagcaatccactcacctcggcctcccaaagtgctgggattacaggcatgagccaccatgcccagcaagaagtttttaaaaagtggatggacaaggtatagatggaggaagcagttaaaatgctcataccaaaaaataggctcatatagcaaataggtaaataccttctacaaatcaatgaggaagagacagataaccaataagaaactgggtaagagagcaacatgtacttcacaaaagtaaaaaatagataatatataacaagcaggagaatagactcaattcttttaaaaattcaaaataaaagtacatcagaatgccaaaataaaaatcaccagtcaactgttgatgagaatgctgaataataaagaacaattctacactgaggctgggagtggtatatacttttgcaagatagtgtgacaatatctattaaaagtgaaaatatgaacattttgtaatcaagtaattccaccatacagaaatgcacaaggatgtacgccagacatataaaatattcaaagtgcattattcataatagctaaacactgaaaacaaccaaacaaacagaagagattatttaaaaactaatggtctacatattcggaatagctaaaaattggaaataatccaattacctatcaacagtagaaagaggtaatgaacagctagcagtctatacataatggaatactatgtagtaatgaaagagaagttgaaaaatgtaagaaaataattaaatgttggaaacataatgttgaaataaaatttccagaataaaatacatgttttataattccatttatataagggtcaaaaattgggcaagggccgggcgcggtggctcacgcctgtaatcccagcact

SEQ ID NO: 200540 - DNA, 1000 bp, Homo Sapiens
tatcacccaaaatgtacattttacttagtggtctctaatcctaagctttttatacagtggagatcatgctgttattatttctctaagacaaggattcttaactttagtctgtggaacttggatgagggggaaaattacatgtttatcatcactaacctctaattgaaaattttcattgtcttccattttgaatgttggaaataaaccacaggaggataaatcgtacttgtgactttgtccttaatagaaaccacagatattttcacattataattatagccccaaatattattaaaattatattcccttgctagatgttattattcactggctaataaggatgcccatataattttaagccttacatgtaaaaaatattttgaaaactgtatttacataaggttggttccttttctaagtttatgtattttattttacacatttaaacatcactttgagaagggatccataggattcatcagaccgcctaacaggtctgtggaacaaaaagcagttagaatccagctaaaggggaatagctgacagcccagtcatcctccaggatgagactggaaagtctcttgactgcccaatatgaaaagagagtcactgtattagtctgatagtgctgccataacaaaatgccacaaactgggtggcttaaacaagtgaaatttattttctcacagttctggaggctgggaagtccaagatcaggtgttggcaggttagatttcttctgaggcctctttctttggcttacagatggccatcgtcccactgtgtcctcacatggctgccccttggtctgtgtgttgtctatattttactctcattttcttataatggcaccagtcatatgggattagagcctacacatatgacctcattttaccttaattatatctttagaggtcctgtctctaaatagagtcacattctggggtactggatgttaggtacgcaacatatgacttttttgggaaacagttcagcccat

SEQ ID NO: 200541 - DNA, 1000 bp, Homo Sapiens
gtagctgggactacaagtgtgcaccaccacaatgcccgactaatttttgtatttttagtagagacagagtttcaccatgttggccaggctggtcttgaactcctgacctcaaatgatccaccagcctcggcctcccaaagtgccgggattacaggcatgagccaccgtgcccagcctaattttagattttctaagacaagtatgcatattcaaaatataaaggtaatctctgaagaggtggtaaaacaatccataacctccaagagaaaacttgatcaatccacagagggcctgggaacacaaaagagaagcctacaaaaagcatgataaatagaaaacacaaatttggatggtaaaataaaatgaaatgtcagatactcacttttctagccaccctcgcagctagagatggccatgtggacctagttctggccaatgagacatgagatttttcctccttgataaaaagagggacgttcaaggagctatctatgctattcaaagagaatctgttctgatgtctccccacttcatgatttgtgtgtaagaaagtggggaggatgggggctgactgctggaaggaacactaatagtgcctaccaagtgaaccttgataacaacactggataataaccataccaaaaagacacttataggccaatctcagttgagaacatagacatgaaaatactatataaaacattagcgaataaaatacctcagagaaaaatgtatcatgacctaatcagatttacccctgaaattgatgaaattaacatttaataaatctgtgtacttattcagagtaaagtcaggaacacattaaggatgcttgttattaccatgtctatccaacattatgtaaaggcctagccaatgcaataaaacaagagagaaataaagaggaaaggaagaaacaaaatgatcatttgcagataatatgattgtctgatagaaatttcagacatttctacagctgttaacatcaatatgagaattc

SEQ ID NO: 200542 - DNA, 1000 bp, Homo Sapiens
aaggtaattagaagaatttaaagtcagtggtgcacagagaccatgacaacaacaaaatccaaacccagctcaactcctaactagactgattgacttagctcctcacagtaacggcctagcagaagaagagctgtgcctatttccaggcatacattctatttacctcctcccttatcctatacatgatatctggcattcaatgtaaaatgataagacacaaaaaagcaacccttccaaaaaaaatcaaaagagaaagcaattaatacaaccagactcaggaggttcagaagggaaatttaaaataactatgactaacatgttaaaggttctaatggaaaaggtagacaacatgcatgaacagatggtgaacagagcgatggaaactacaggaatgagtcacatgaaaatgcatgaaatgaaaaacaatgacagaagttaagaattccttcaacaggatcataaatagatgcaacaaggctgaggaaagaatcagtgaacctgaaaatagatcaatggtgggggagagagggagacagggagaaagggagagggagggagagagagagacaacagaggtatgagacagtatcaaatagtctagtgtataggtaataggaatcccaaaagaaaaaggaagaatgagacagaaaaaatacttggagaggtaacaactgagaacttttcacagacaaactataaatataataaactgaaagaacaccagctgggaaccctacacaaatatacctagacacgtcatattcacactgtagaaaatcaaagacaaaatcttgaaagcagctggggcagctgtgggggaagaaagcatattacatatggaggaacaaagataagaattatagcagatttctcttcaggaagtatataagccagaagacaatgggacaatagctttaaagtgctagaaaggccaggtgcagtggctcacacctgtaatcccagcactttgggaggttgaggcaggtgaatcagcttaagc

SEQ ID NO: 200543 - DNA, 1000 bp, Homo Sapiens
atgaattttaatgcttctgttattggttaatagataattcctgatttcagaagctagcatgcctaatgagatgatggtttcaaatttataggtcagctgtagttattgttatataaggaagattgcattcattataaaacatgcatattatatacatcagattctggaaataacagcaaatagaaattaataaaattattttaatagagaatatcaggtaaaactccagacaagttgatattgcacttagtttttctcccaatatttgtgtactttaaccatctctgtcttctattcctcttcattctgatttataagaccctattctatcttcctctactcacttctgagatcatacattcatagctttaactgtcaaagccattgtgaatgatctctgaagaaacccaactactctaaattttcacttgtatgtttacaggaatttctagaagactttagaaatcatcattctgaattcttactttgctttgggcagctaaagcagaatacctgagactgggtaatttataatgagtagaaatttatttctcacagtcggaaactctaagatctcatagtctgaaagtctaagatccaggggccagcatctggcaaaggccttcttgctgcatcattccatggcagagagggtgaaagagggccaagcttgttcttttccagtggcacaaatcccacccatgtgaatagagtccccctagcctaattacttcttaaaagtcacacttcttaatactgttactttgataattaattttctaaatgagtcttggacgggacaaacattcaaaccacagaagtttccctatatttcaaagacaacatgagaaaaacatagaaacacttctcagcaaaccgccttccacttcacaattatatggttctataaatggcattgccattctttatgtttgttcttcctttaacagtccttctttttaatatgtcattaaatcttactattctgtctaatgaattc

SEQ ID NO: 200544 - DNA, 1000 bp, Homo Sapiens
tgcaggatataagatcgaaaggccaaaatcagttgtatttctatttaatagcaatgagaaatctgaaagagaaattaagaaaaaaaattccacttacaatagcatatcaaaaagaataaaatactcaataataaatttagtcaaggcaatgtaagacttttctgctgaaaatatcaaaacatgctgtaagaaattaaagaaaccctaaataaatgaaaagacatcccctaatcaaggactgaaagactttattaactatatcaactattttggttagcagttgggcattactccccaaaatgacctccagattccattcactccctaccaaaattccaacagcctgttttgcagaaatggacaaactgatctgatgattaattgctagaggctcagaagaaccaaaacaatcttgaagaaggagagcaaaattagaggactcacatttcagtttcaaaatttactatgaagctagagtaatcaaaataatgttggcaacgggtaaacatacagatttatgggacagaattgaaagtctagaaataaacccatatatctaggaccaataattgattttcagcaaggatgccaaaaccattcatgagagaaaaataaactttcaacaaatagttctagaacaactgaaccgccacatgcaaaagcaggaacttgcacacttgcttcacatcatattcaaaaatgaattcaaatggagagaagacctaaacattatacaagagctaaaattatgaaactcttagaaaaaaaaacacagcagtacattttcatgacttgtatttggcaatgacttcacagatatgaccaaaaaaccacaagtaacaagagaaaaatgataaagtggacatcagcaaaatttgaaacttttattcattactggaatagtgaaaaggcaaccaacccaccaaatgggaggaaatatttgcaaataatataactgataaaagtatagtatccaggtcaaccacaatggctcacacct

SEQ ID NO: 200545 - DNA, 1000 bp, Homo Sapiens
attcatttgtcaacactaaccagcaaaaattatctgcattcacttaaagctacaaatacccattctacgtctacatcccagaccaatgcagtctaacctgcagagttcaaatttattttattataaaaagtttcctgcactttctgtgattgtctttcaatgcatggattcaatctaggtcaggtgcttccataggaagagtcaattttatctagccaagcattaaagatttttcttaaaggagatgttttatattgggaataatggaactaaggaatgtgaaaaagggcttgagaaatatacaggttgttattcagcatcagtcttattgcaccaacatgggtatacagcagctattgatgttgaatgtatttttttgttatgaaatataagaaaatttcagggaaaaaatgctcaagtcttgctgataacacatcctccagtatgtattaatataatgagggtttgagggacatgtcccaaatccaaaaacacgccatcaactgaaaccctgtgcagactacttaaggaaaaaaactagcatggctgtgattatactgccctctagtgtcaaaataaatgttatttacactgaagttcatttgcttttttcagatcagcattttcatgacccatttgtccaactatgggaatgaccgactgggattatatacatttgttaatctggccaactttgtgaagagctggaccaacctgcgacttcagactctgcctccagtacaactggcccacaagtattttgagctgtttcctgatcagaaagaccctctctggcaggtaaaattaattaaataattgatataaccagttaattccaggaacataattctgtgagatatcccaaatttgaaaagtgaaggcacctgaaaaaacctgcattttggaaatgttagtaaatttgagaaactactccttcctaaactgtagttgtatatcattgctacatattgcacccaattccctgttcccttgcacattg

SEQ ID NO: 200546 - DNA, 1000 bp, Homo Sapiens
acagtttagcagttctccataaacatacagttctcacatgaggcagcaattccacttatagtatcaactcaaaagaaagtaaaacatatttatgcaaaaacaagtatagcaatattcctagtagccacaattggaaacaatcaaaaggccaatgaactgacaaatgaacaactaaattatgacatatccatactataaaatattacacaagtggaaaggaaatgaagtattataacacacaacaatatgaagtaaaataaaaaccataagaaaacaacaaaaaattaggctatgtgaaatgtcatttacacagcacctgagactgtatgattccatttatatgaaatatctagagagaataacttatagagaaagaaaacaaattggtgttagactaggactaagcagttatgagaagtgattttggtgtcattgcagtttcttttgtgttgataaaaatgttctaaaattatatatataatggtgatactttaatgactgtaaacatagtaaaaatatttggattttatggcataaataggtggattttaagctatcgaaattaaatctcattttcaagtctgttaaaataatgatgataaaaattaatttttcagcaagaaaatagttatattctgagtcattttagatatttaattaaaacattttattatattatttcaagtttattcttcctttcttctatggattcatgttaaaattttaagaaatgtattttttatattatctatatcattttaaaattatttttgtttagaaaattgcttcactaactggttactcattagatgtatgggattcaaacacaatttttaaataatagatgataaaaacaaagcagatttcagattggttatatcatttaaattctttcaagattactctcttataaaaaggatgaaactcatgctcactattgacaagagaagctgtccacaaataccacctagtgaaaaacattgttctactcacaaagatc

SEQ ID NO: 200547 - DNA, 1000 bp, Homo Sapiens
cctgtacacttttggtgagtatacttttcttatgtatgtcaataaaaagtaaaaacaaaaaaaatcaatttattgtgcccttcgtaccttctgttcctttaattggcatcaagtgtccctggtagatggcaaacattcttcctcctccatcccacttccatcctatgggtaaacctttaataagggctataattgattaatattaaactggagaccttgactgcttagagagagttcatttattatagtcttttctacctaatatttactgagggacagcctgatagaacaggtgcagagagtttgaaataaatgttaggcattaggaaaataaggcccattaaccccacacagtgaagggtggtgtaattataagtaaaaagtcgactttcaccctcttcacaaatttgtggaggcctggtcatctaaccaggcgtttaatctctgtcgtgggtagtttgttcgtttattctgtttagaggcagaacattgattgggaaacctctggagatcttttctggccttttggtttcagataattaagtctattaggggtgatacatatgaatagccaagccatacaacttttcaagcatggttaggagatgggacaatgttctcaaacaagtaagaccttcagcctcctggggctgctagtgagaccactgctgcttgttcttcaggagcagggacaaagcagagattacacggggatgaacgaagatgcaatctgcatggttggcccctcagaacatcttcaggctcggtggcgtcttttcagttcctgtccccccaccttcctcctgaggccacccccgctgctcatggccacacaaatctcttatttcacccccatttctgttgtgatctcctagtacccactccctggaccaaaccatctcttgccactgcatttcattcccaggtgccattttggaccacttctctctttgagggatggcatccaccatttagcacttcccttacgttaccgtgtctc

SEQ ID NO: 200548 - DNA, 1000 bp, Homo Sapiens
aaaaaatgtcagtgctatctcctgaaatcaaatgtgagacttctaaattcaccagaagttcctttggcagttgtttgatttttgagagtagttggaagaaagcagttttagaaacacaaaagattaagaaaggtaactttattgttattattttccttaagaaaacatagaaatagtgccttgaatttccatgtatttttttcatcaggcaagggacattttctgtgacatttatgtaagaattatatcttaaattgatgaaaaagaaaaatggaagcaaactaaaattaatttagttaatgtaattctgtgactcatgatggaaacaaattttaaagagctgtatttctttttttttaaactcaaatttgtctgaaagaactgcatttcttaatatccattgcagtactgtctctgttgaatcacactccgttttataaatggcattttcttttaaataactcaaggtgatttttatattttaagacatccaaatctttaacagtgctgttatgtattaataattctaaccaaagccaggcacagtggcttagcctgtaatttgagcactttgagaggccaaggcaggtggatcgcttgagcccagtagttagagatcagcctgggcaacatggtgataccccatctctacaaaaaacacaaaaattagctgagcgtgttggtgtgcgcctgtggtcccggctactcaggaggctgagggtagaaggatcacctgagcctggagagggtgaggctgcagtgagccatgaccatgccactgtacttcagtctgggcaacaaagtgataccttgtctcaaaaaaaaaaaaaaaaaattctaaccaaaactttatttttgactgagttatgtggagagtatcttaaatcccatagctgctcaatgaagactagtttgataacttttgacatgtagatgagtatattaatagttattcccccttactttcaagttaattatatttcttgtttattctgaattc

SEQ ID NO: 200549 - DNA, 1000 bp, Homo Sapiens
agtagggagggagggatccacaatctgggtaaatgcaaagagtgaggtcctgcttccctggacccagtggaaatagagattctgcataagaacatgaatagggccaggtgcagtgactcacgcctgtaattccagcaccttgggaggccaaggaaggcagattgcctgacctcaggagttcaagaccaacctggcccacatggcaaaaccctgtctactaaaatacaaaaaaaaaaaaaaaaattagccaggtgcggtggcgcacacccgtagtgctagctactcaggaggctgaggcatgagaattgcatgaacctgggaggtggaggttgcagtgagctgagatcgtgccactgcactccagcctaaacaacagagcaagactctgtctccaaaaaataaaaatagaaaataaaagaaaaagaacattaacaggaagggaggccctcttgcttatcctttaggtcctaattcccagaaaagaatagaggaagtggaaaaggaatgggggagatgcagaggcacactgactacctttcaaagctctttattgatacttttctgggatcagttgttattaatggtttgagagttctccagaggatagtctttcttttccactaatgtccccacacccgcttactaagcttcaaacatagtaaccacctttcagcccctccagcacacccagcctctccctctggtctctgcacttgatgcgtcccccttccactccccaaccccttcgtctggaacacctggctttctccttctgatggctggttggtgccctctcatctttcatgtcttcctttaaatgtcacttcctgggaatggcctttccctaccacactatttaaagtaagtgcttcctgtgtgactctctttcacagcaccctgtttatttctgtcatcactttccccgtaacatccataatgattttgcttgtttgtctcctccatgtaaagagctctgacaggactggggcatttccttttc

SEQ ID NO: 200550 - DNA, 1000 bp, Homo Sapiens
tgtgcctcagcctcccaagtagctgggattacaggtgtgcaccaccacacctcactaattgttgtattttttactagagacacggtttcaccatgttggccaggctggttttgaactcctggcctcaagtgatccacctgcctcggcctcccaaagtgttgggattacaggtgcgagtcaccatgcctggcctcaaaagggatttaatgtaagaaattaggtgctttcagagttaatggaaagctaaaacagaagacattagggtccatcactagcttcagggtcacggcactgtggctatgagagggagcccctaaaatgactgctagccatgcaacaggaggcagccacctgcgtagacagggatgggtgcctggtgaaacccaccttcaagccaaaaacagcctgaaggctgaaagactggaccgctggtgccggatgaaaccgagacgcagagtgagaacttctgttcctgtttgcccgcccttccccgattgattctttctgaataatgcctttcaaccaatcaaatattgcctttttcaatactacctacggcctgccctcccagcctctgagcccataacaagccctggactgagccatattaggggaactttcctgctttcgggtaaggggaccacctccatgtccccacctttgggtaaggggactacccccacatccccgccttccggtaagggggccaccctccgtcccctctctgcggaaagctgtttcatcactcgctaaaactccctgccttgctcactctgagattgtcagagcatcctcattctttttgagcgtgggacaagaactcgggaactagtgcacaagccagactcggcccagggtggagcatcgtcagccggaggtccctggcttccaaagtgaccgagaagaaaatcctgactagcatcatcactgcttcccacctcccggtcccaggatctgcagtgggcaggctggagatcaaggagagccgatgatggaattc

SEQ ID NO: 200551 - DNA, 1000 bp, Homo Sapiens
gtcacctcatcccttagaccaggataagatgcgggatcccaacctcgagcctcccatgggctccattccatgtgctcccataagccactgggcccacctcctggctccagggctgtctggccatttggcatcttggtttcctcatctgtacaatgaaaataatagtcccagccttctcgaggagttacaagatgcctttcgtgtgaaaaactgggatttggtaccagactatctggatttgaattttggccctacccctcctaacctgtggctttgggccaatctggcctccctgtcctcagtttccccatttatagagccatctcattgagttgctgggaggatgaacataaggaagtgtactcatgtgcccagagcattgtgattttacttattattaccaaacgaggcacacaataagtgcctaatagatgctcagtgtcatttcacggattctgtgtgccttgtgtgtctccagcagccaagctctggaggtggggaagctgttgacgagttgcacgaggtaattagaaagaggaggccacaggtgcaagggtttgggtgacacctgtggacagagagaggccgatggaccctggcagaggggaagggggcccttgcacatagaaaatgtttcctgcatccaagatccttgtgactctggaacagaggcagcagaggtctgcaaattccaaatcataaacccagaaagcatagaacattcgtagagaggaccagaaacatcatatatcttagtgtgtatagaattttccacatagccaaacaaaagcacgtttctaactgaagctgttggagagttcctgaggactttataccagacaagggccggtaagtggaagttcaatacgcaggagccattccttttgttcacaaatgtttgccgtcttttctgtctatatccgcattcatgtgagggcactcataggtccaccgtccagccccatgctttgtttgctaccaaaaaatttcttaagaattc

SEQ ID NO: 200552 - DNA, 1000 bp, Homo Sapiens
attgcttgcaatctgggatatctgaaaaatgcctacttttatctcagcaacaagtccacatcactcctccctccctctctactacatctaacctacttttcacagataattccacagaaagatgagtttaaagttagtgtcctttcttggacagtacatttttcaaaaattattagtgaacacattgttgtagtttctatcatgagtttcttgctgtgtttattaaacatttgaaacaaagttggagaaatttgtggaacaattagagaattttgccaaatatctcattttttcatatttcttatttattgggtcctgtcatgtttagtaagtgtcttaagagtagaagtttgagcagctattcagtcttacactccgtaattatttggcttctattctgtatacctaataaagcatttaattgacagttcccccagtttacatattcttttgcatactaatgcctacaagtttaaatactatgctactttttcatgccttgccattaaataaatgctcattttctgctttaaatatgttgagggcctatttactaacttgacacagccaatgacatggcaatggggacaatataaaacctaattatttgtatgctgtcattcaacaaaaatataccaaagttgctttatgacatcttgttatataccaaagtaagcccgtagaaagcactttgtttttcagaaagccacacagtatggatattcaataagtagtgacagagaaaaacgtgcaataggcttatactttattctagtctgattccttgtccacctctgtacaccaatatgttagaaaatgactaagtattctgctgatgctatacggtttgtgctaaaatcaagagataaaaaatttcataggctaaaaagttatgaatacttgtaacaaaaagaaaattacagaatactattagaaacacttccaaaaacacttctgctttttaaacaatagtagaaagccgggagtggtggctcatgcc

SEQ ID NO: 200553 - DNA, 1000 bp, Homo Sapiens
tacaaaaattagccaggtgtggtggtgcacacctgtagtctcagctacctggggggctgaggtgggagaatctcttgagcctgggaagttgagcctgcagggagccatgttcatgccactgcactccaggctgggtgacaaagtgagaccccatctcacaaaaaaaaaaaaaaaaaaaaaaaaaggaaggatcagattccagttatgcacaaattaatgaattcattagttcaacaaacatttcctgaatagccaataggctgaagacagtgtgttaggcattctgggaaatagagatggagagaagcagtctttgccctcagtaagttgtaatttagagggggagaatttgagaagttacaatctgatccattctgggtttgaaagagccttttatcagggcagcagcatgtaaaagggagttttcctgctaaaattaaagataataatattagataaatgataatttctccaattcctaattttcatctaaagtagtgaagagatggtaaccaatttctattctcatagctactaacatgctttagccttctgaggtatcatattgccacctgggaagagggaaagaaagaaagggaagaaggggatgtgagagcagtggtttgaaggaaagaaaaaaaccggtgggcaaaacttcctccaggaggcttgaatagcttcatttacatctttggatcacatattcattcacatttctatacaagatttaattttaggcatttatgtgtttattaaatttataaaatttctttttcttgaacagatccagtaccctgaaatgctttatctctctctttcagtttaaccatttggtaatgagataggctgcttgtggttggttataatttgtttatatttcacaatttaaattgcattaatgtaaatcttctctttttacattctacattttcttcttgttaaaactttccataatttctttctctgaaaattattatttacttatgaataagtggaattc

SEQ ID NO: 200554 - DNA, 1000 bp, Homo Sapiens
aagttgagggagaggctcagaaagaagttacttaccaaatattccacggcttactagtggtagcaccaggttaggaacccagttttctactgtcaacccagtacttttttcattacaccactgaccatcttctcacactgcatacctgagttttgcagccactgctgcagccacccaccttcctgtttatgatgctagtttcccatttcaaaatttagacatatgcagaagaggatcggtcatggggaatctggcaaataccagagaaggttgaaaaaccttttcaggaacctcttactcttgccaaaagaacatgcatcttggtaggatgctctatcaaaactcacccacaagaggtactaaaaaaccaaatccaataatagatgatgccttccagtggccatcttgtctatcttgcctcactccacccacctcaaacagctgaaacagatcttgacattctctaaagcttctacaattacccatctgatgtgtgttgctgtacaggctcatattgctcaggctagccacatacccctccaatggagcacttagatcgctgcatggtaattgcccggccactgttctgacttctgcacaagatcctttactctttaagaaaaaaggattgcatctaattcagtattattttctcagcatttagcatggtgattggcatatgtaacttcttaataaaaattatttgaataaatgaatgcaaaacatcaatccttcttgttacatttcttttttccctctccagagtataaaaggaaactagcttgtcactctcctgtgggtgcccaatttaggactccacagatcccagggaggacaaaatgtgggctgttcaacacaaatccagaaactctttaggatgcaagagtccaaggagccagaggtctaaggcattgggaaagatctttctgcatttctggggtggtgtggagtgtgtgagaagttgaggagaatgggctctggagccctggcagggagaatt

SEQ ID NO: 200555 - DNA, 1000 bp, Homo Sapiens
catttggactcgatttggctcccacatggatgaaatttgccaccatgaccctgcttccccacccgctccccaacccccagggcccacccgtggtcgtggtcgcagctgggccagccaacacagatggctgagggaggcaggcttttagcatttctaaatgctccactttaagcattgcttgccaaaaaggtagagcaggcttttgtgcaggcctctgtgatgagatgtgctcatgatttaatttacttaggggaagaatatgaaaccctgcacagctcagccggattcagcgtcctcagggactctgccggagaagaaaacttgctttagcaattctggatccagtgtgctggtgccttgttgctcatgaccttccctcagtgggagacactggggaataaaactgaagtcagtataagaaaagcttgcatcttttttagttcattcctggtacattcattacctaatattttttaattaaaagctcagtctttcatcaattcaaaatgctaattttgatttagagagcactctgacctgaactggaatgaagttgacttatgttcaatcttaaaaaagaaaaacaaaaacagaaagcagaaaaaaaaagaaaggaaaaataaagagggtgattcaggcaaacaaagtgactttgagtgggagggggtagatgtgtgtgatgagtttattcaagaagccatttgtttcaaagaccttaaaaaaatagtctttcaagtagcaccattcgtatcctatagcctttggtctttagtgacatcattccagtcattcatgttcccctgggctgcataaacatgacatgctccaaattgaactcatggtcttttcctgaaactgcattcttctcattctcatttccctatttctttctttctttttttttttttttttttttttttttttgagacagagtctcgctctgttgcccaggctagagtgcagtggtgcaatctcgactcactgcaagctccgcctcctg

SEQ ID NO: 200556 - DNA, 1000 bp, Homo Sapiens
ccaccctgggtgatagagcgagacttcatctcaaaaaaaaaaaaaaaaaaagtcgtgtcaacctaaataacagagagaggccctctaaaagaaaaagatatctattagggaatagagcattgcaataggaatatgcaataggaatatggcatgcatattccatagtaaactatgtgcatattcagggaggtaaaggaagtcaaagattttttaaagaaaaaatgaaaaggataacataattgttttgaaataattatccttggctacaaagatcgacagcgcaaaggtgattcccgtccaaggttagacgagcagttgctgggcagatgttcttgcaaaagtattttttgtgtgaggtcacgatggcctttatacgaggttatgatttttgcaaagtcttctatgatagttttgttatcagacatacaagcatgagaaccctctctgcctggccttccccggcaattttgtcagggttttttgtttttgtttttgttttaacactagtgactattttaattctgacaactttcacagttgtaataaaagcattttaaaataggcacagcatttgtgtataaccaaaactgcacacttttagaataattttttgttttatttatttattttattgttggatattcattatttttgtttcaccataataattatatgaccataaagtaacaatttttaaaaagcccaacctgttaaaagaaataagcctataatgtgatgtcagggaccctctaccatcagcccagtactccaccatccctttatttgtagcctgaaatttcttcaacaaggcataatacctttcactgtacagatacccctgggaaaaaatgataggatgtagtggaggagaattgctgaatgctggctgattgtaaaagcacaagtttcaaggttccaaattgtgaaacactgatattatcctgctcttctggctgagaggcatttgctggatattcctagcttgaatggggactgaatt

SEQ ID NO: 200557 - DNA, 1000 bp, Homo Sapiens
atggtaaaaccctgtctctactaaaaatacaaaaattagccagacgtgatggcacatacctgtaatcccagctactcagcagtctaagggagaaaaatcacttgaacccaggaggcagaggttgcagtgaggcaagatcatgctactgcactccagcttgggcaacagagtgagactctgtctaaaataaataaataaataaataaataaataaataaataaataaataaaaataggccaggcagggtgtggctcaagcttgtaatctaagcactttgggaggccaaagtaggaggatcccttgaggccaggagttggagaccagcctcagcaacatagtgagaccccatttctacaaaaaatttaaaaacttgctgggcacagtggctcatgcctgtaatcccagcactttgggaggctgagggaggtggattacctgatatcaggcactcgagaccagcctggccaacatagtgaaaccccgtgtccactaaaactacaaaaattagccaggtgtggtggcacacgcctgtaatcccagctactcgggaggctgaagcaggagaatcacttgaactgggaggtagaggttacagtgagccgagatcacgccattgcactccagcttgggcaacaaaagcaagactccatctcaaaaaaaaaaaaagaaaattaaaaaacttagctgggtatggtggcgaacacctgtagtcccagctacttgagaggctgaggcagaaggatcacttaagcccaagaattaaaggctgcagtgagctaagatggtgccactgcactcttgcctgggtagacagagtgatgactcccatttctagaaataataataaagtcaaaaaatgtaaaactttttaaaataattaaaaatggaactaccttggccaggtgcagtgcctcatgcctgtaatcccagcactttaggaggccaaggcgggcagatcacctgaggtcaggagtttgagaccagcctggccaacatggc

SEQ ID NO: 200558 - DNA, 1000 bp, Homo Sapiens
gcatctagacgcatgcagtgttttagccgccttccaccagctgcagctctgcagcttcctgacagtccaaataaaaacatttgcccggcgcggtggctcacgcctgtaatcttagcactttgggaggccgaggcgggcggatcacttgaggttaggagttcgagaccagcctggccaacatggtaaaaccttgtctgtactaaaaatacaaaaattagccaggcgtggtggtgtgtgcttagaaatccacctcttcagaaggctgaggcacgagaattgcttaaacccaggaggtggcagtggcagtgaggtgagatcatgtcactacactccaacctgggtgagactcttgtcaccagaaaaaaacaaaaaacagaaaaaaaaaaaagaaaagcactgcctccgccactcagcatcactcctgtgagtccaacatatatctgtgccatagatgccagatgggagcgctttgcatttagaacttaggacaactccgtaagataggtacccctcccccactgtatgaatgagtcaaaggacaggtccagagaggatggccagctgaaaagaagaaaacctgaggtcatactctacagctgtcaaccctcagtaacccagacctgcctccggccacaaaagctgccttatggctctctagccacatgtatctgaggagctctctatctcggggggaggggagagggggaggtgcagaatcacaacaggaggtgtctcaccatcagccgggcgtggttgatgttccaggtgaaggtagtcatggtctgattctgtgggtccacaatagagtcctccaggacgtacaccgagtgagcaacattggcaggaaatagtcgctcggcccagcgtggcatcctgttggtcttggtcaggagtcgccgggacagcagtttctggtcaggggtcacctcccggtgtactatgtcttccgtcaagacatgtttgctgcaggtgtcagggtgaaggtgaccctcagaagctt

SEQ ID NO: 200559 - DNA, 1000 bp, Homo Sapiens
tatccacacgattcaacagaatataacagttaatgtgtaagttgtattaaaacaaggtgcagaacaataggcttaatatgataccatttgtgtaaatatttatgaaagatataaacaaatccttgtatagtcctacatattttctgaaaggatgaccagaaatttaagtttggttgtccctcaagtgcaagactaaaaagcagcatgtacttcttaaactttttaatgccacaaattatattttttatcatgtgcactttattttaaaaatagaatataaaaagtaaacagtgtaaatattccataaacatttgcttttaattgaaacaattacaactaacatattcagaatatctactatgcggcaaattttgtagcaggggctgggtcttctaagtatcaagctataataactgaagaattcaactgtctttctacaaacacttattctacatacaaatagctctttttacacaaagtaagggaatactatttttcctctcacctacttactgtcaatcctttcacattaaggaataaattctctcaagacatactttcttccttgaaattatttcacccactttattatcacacagataaagaatattgtttttataaattaagagtgatttaatcattaaactaagaatgaacttaaaatggattaggctctatcaagaaatgtgggttcagatgctaggtccaccaacaaataatatagtaatgaatggttacagtaaagtcacatcaactcttcaagcccagatttctttgtacgtgaatattatcaatttcataagagtgccatataaagaaattaaacatttacattctttgtattctgacatgaagtgacaataggcatagcccatatttaaggaaaaaaaataccaagagatgcctattaaaatttaatgaggaatattactattacatttatttatttaactaaagtacatactctaatttgtaaactcatcctgagttcactgaattc

SEQ ID NO: 200560 - DNA, 1000 bp, Homo Sapiens
aaaaagaaaatgaaaaatggaagccataagagaaatgagtattggatcaagtgtgaagaatgggaaatgtcaaggcacttgataatttttctgctaacaaacagacattgtgaaggtggaagtttccatggttttccttccctgcgttttcttttgctattgtcatgagatctaggggcatgagggatttgtcatttgagtgttacattgcaacaaaaagcaaggcagaagtacagaatccacttaaatgagagtatgaacacaataggaggttttgctacctggaattagatgttgaattgctgctctctaaactttattttctatataaaaagctttaaatacaatcatttaattattcatttaaagtttatattaacaacatttagtgtgcacctgctatatgtaaagtatcccactaggtactattcatcaaattaaagccagctatttagttatgaaaataaaccatggcccacataccctgtgaagccctgttaaaagcaggcaacatgcccaagaaaatatgtttcctttgaatttcacagaaatcttagtttgaggaagaaaaatcaagagtttttgttataagccactatgtgtatgctctgaaacagttaatgtagagaacagaggtagtggccataactgaaataaggagatagtgagtgagtgtgtgtgtgacctaattcaagtttggtggtccaagtggtatttttcttggcctgtaaaaactacaggtatttgcaaaactgttctaaatagtaatgtaatagaagttttttaaaaattgagttagtgcatatgtttggactcaatttctccctcttttggttactatatatggttctaatttccagctgtgcagttactattgtaaattctcaacattaaaaaaattttcagatacaaattatttttattgatacatactttttacatatttaaggggtacatgtgaattctcaacaattaatattaaataaaaggagaagaattc

SEQ ID NO: 200561 - DNA, 1000 bp, Homo Sapiens
catatgtttcatatttattttcataatttgattatatattattgcatttaaagtttcttttttttcataccattgtttagagttggcaggggaagtgagaacagcctgggacaaataatgctgaggagctttttaataaaattgaattagtataagcttgccaaatgttttatcagagcaaaactgaaggtataattgattatacataagtttttaatatacatcaaatattgaattgtgcatttcctgtaaaatcagtgaaagagaacttttaaaacaggtgtgctgctgaatacactcacaaagccatttgtctcccactaccttttgttctggggttttactgcaccaagatgttttatatataaaatccataatatatgctcaagacttgcctattatagtcacttgctattttagaaaggtaaaataatttgaccattaaattgttttcttactttattattttaaggaatcaagacagaatagtacagtggaggaagattctgaaggtgacaatgattccgaagaattttattacggagggcaggtaaggaaacctggtcttccaaatacctagtcttaaagttctaatagccatgttgtcctagtggtaatctgtgcctgagagttaagggacctgtgtgttgttcagggttctgtaactaactagaaaatctatataatttatctttgcacattttctacctatttttagaaattaaggttcccctgcagtcctttcaattgtaatcatttatttacattgaagtcatcttaattcattacagcgattttgcagatagtattttattatgcttttgacttgaatttcttaagcatgttgtgttcagtcactattctgagataatgacacttgtaataaaagtgtatattgttagttttaaatagaagctggttaacctttattaaatttgatgggcccacattactgagcatcttcatcatttgtttatttgtattcactgccattgaattc

SEQ ID NO: 200562 - DNA, 1000 bp, Homo Sapiens
agattctgtccaaaaataataataataataaaataaataaataaataagataaaataaaataaataaatgagttcatttttgtaaagtacttttcgcagcacctggcacagagtatataagagtgtgttaagtgagtgtgttaagtaactgttggggcaggctggccgtgcagcttccacgatgctctgtccaattcccagctttgcagtgttaatcatttccctcatctccaagtgtcagatgtactagcattcagcccttcttcttgtcttttctctgagccctcattcccttggtgatttcatccagccaatagctttaaatatcatcttttgctgatgactctaatttttttcctccatctcagatctctactctgaacttagtatatccaactgcctgcctaacagctccactctatgccttatgccatttctaactgacatccaaaagtcctgttctgccctcaacaaaacttgctgcccgcatggagcatctcagttgatggaaaatactgagagccaagatctaacatggacctgcaatgcgccaagtcctgtgctaaatgctttacataaattatcatcctatcctcccaaccagtcttgtatgtcagtcctgatattacccccatcatgtagatgaggaaacagaggctcagaaataacatgtccaggtggtaagcggaggaggatgtctggctacaggtcctgcactcttgtccactaactaaaaggaacaatttgattacatgtagccttcagaaccaatcagggtcttggagactgattgctcctttggtacttagtgaatgaccccaaagcaccagacaaccatgctaagcactcaacacatggcatctctgttaatccatgcaacaaacttctgagagggctgtaataatccctacttacagaaaagaaagtctaagttcagaaaggttaggtgacttgtccaaggttacacaaccagtcattgattaagtttggataggaattc

SEQ ID NO: 200563 - DNA, 1000 bp, Homo Sapiens
ccaggattttcaatagaaaatttcacaaccctgtgctctgtcaactctaaaaccctctcctctccccaagtcaaggcttcagaggaaataaaaaagtatcactgcttatacaggctgtactgagtttatcacatccattatctttctgacttctgtccttgggattccagttggtcttgaccttgtatagctgccctcacagtatctttgtcagtttatgcatactacttctattatttctctttctcaaatcaatttcattgggtatgttagaaatatgcagaaattctagaaatgaatgtatatgtaaaaagatattaacaaatatggaaaaaagaaatatataacatatatactactctcaagatggtatcaatcctcaagatctcattttcttattaggtccttattgaacttcacttcttagttataaaagtcccttaaaaaaaaaaatcagaccaaaaaaaaaaaaaaaaaaccacacacatcagatacagcttcagcctcatcagttgtatcttgttgccagctccaggtatcctttttttttttttttttttttttaagacagagtttcattcttgttgcccaggctagagtgcaatggcatgacctcggctcaccacaacctccatctcccgggttaaagcgattctcttgcctcagcctcccaagtagctgggattacaggcatgtgccaccatgcccgactaattttgtatttttagtagagacagggtttgtccatgttggtcgggctggtctcgaactctcgacctcaggtgatctgcccgcctcggcttcccaaagtcctgggattacagggggtgagccactgtgccgggccccaagtatcttaagaaacatctgtaaaggaggttctctccaaacacagctttacaaataggcagaagagatgactgcccaaaggtgtgatttaagacaccaggaaagctcttatgcctctcctcctattagaccagtccctacctttgaattc

SEQ ID NO: 200564 - DNA, 1000 bp, Homo Sapiens
aaaagtgataggaaaaacccttgccctcatagggatttcattctattaagtaaaagaaacaacaaacataataaataagacatttttaagtcgtaaggtgatatgggggaaaaaaacagaggaaaaggatacagaaaggaaagaaggaggcaattttaatagcacagtttgagtaaattttaaaagtgacatctgaacaaagattttcaaataagagagttagttatgcagatatcatggggagcaaagggggacagggaggataagcaggtcaaataactctaaaagtttttggtgttaactctgaataaataaagaactgcaggttttgaacacaggagagtcatgatctatttaacaggatcattctggctgctacattcagaatatactgtagggacttccatatctgtccatgacactgtagcttacaaaaaactaaacctgccatagaaaataactataaaagctgaaatacatacatatacacacatatatgtatgcatatacatatacacacacacaagtactcttaaggggccatgatccttgaaagaagagaagcacaaaaagtgagcccctaggccaggacagtggctcacacctattaatataatcccagcagtttgggaggccgaggctagtggatagcttgacctcaggagtttgagaccagcctgggcaacatggtgagactccatctttactaaaaatacaaaaagtagccaggtgtggtgacatgcgcctgtaatcccagctgctcagagacacggtgggagaatcttgagcacaagagggtaagactgcaatgaaccatgatgatgccactgcactgtggcctgggtgacagagtaagaacctatctctctcaagggaaaaaaagagctcctcattcacaccagctttttccctcagtacatttcccaaattgccatgtgggagaacagaacccaaggagaagtcacagtcttaataacttgaggagacaaatgttgaattc

SEQ ID NO: 200565 - DNA, 1000 bp, Homo Sapiens
tccagtgttatacctgaattgggtgtatctgttagcttaaaataagataatactgtaatagctagagtctggaataaaaataagttatctaacggtgaagtttggtgactttttcaaaacaatagcacagatcttatgtaactttatattccaataaaatctttcctgtgggggaagtgagtaagatggtgctttcagctgattaacaggagaccaggcccaggggtaccaggcagacagagaacatggagatcgggtgagtggctggctttcttgcccttgaggagctgaaagcaaaaagatctcagataaggtggaatactgtgttcaaagccaacggttctgggggcagctgcatttggttttgaatcctggctgtgatgctttctagatggggatgttgggaaaatcacatactctctttaaaacttagttttccattgctgaaaaggggatggagagagccgttaagcacttcctcaaggttacacagggggcaaatgacaacgctgactttcaaacagaaatgtctgatttcagagcctgcacttttcactgcatacacttccattgattgaaaaccacagcccacctccccaacccttggagcccacgctcctttagatttaatctcaatgcagatcttgagctcttagatctagggcattccatctttgctgcttatgttatgattgctcagttcaggaacctcccctctttctgtctattcaggctttccaagtcctttgtaatctggccccagtgtttttccagctgaatcttcacctcttctcaaccataattcctggctaatccttgtgccttttcatgcctttttctcaggccatccgcactttctgtgatactcttctttttttctgcaaaagttggtgtggttctctgcccctgcatttctctaaactatttgtttctagagtgtgccccgtggggttcagtggtcaaataagcttggagaatgattgtttttttcaaatggagt

SEQ ID NO: 200566 - DNA, 1000 bp, Homo Sapiens
cagctgtgaactccccttatagcctcaggctgcagtgtccttcccagctgtgtgagaaaatgaaagccgacgtccacagggacccaggcagggttgggtgttgtgactcactccacctctgtgccctgcagaggtactgttgggtccttgtcttgtgagcctggggtgagctctctgtacatgttgttgttccacgtatgggttgacttggcatgctggggggtcctcgttcactctctgaagttggcctcctttcactggggattgaaaagcacctccacccctaccctagtgatgtcccctgaggacccgggtgatagtacagtcaatattgtcagtactttgctttgattgaaggctgtagagctgagttaccaaaatttctatttcaaaggaaaccaaaccttaaaaaaaaaaaacaaaaactgggctgggtcttccaaacctaccatgaaaccctggtgtgcaggctgcactcaatgacctcaacccaacacctccctgagtgtgcttcttggaagagcctagaagattcctggatggagaccccattggttcagcctcaagtctggcccgtcttcgaaaaaacaaacacatttgtaagctttgtgggagcttccaggcctgctctaagatgccttgcttgtcctttgacccatcagcatggagctcagtggttgctgtttggttctgcaggctggtggggaggccgcccatcgtggtggggcatctgtccagccccattgccactcagggcatccaaacaggaggcacccgctgggaagggtctaaagatactccttgtggccactgctactgttcacacttgacttgtggagaagcgaagggctgaggggaggtttgtgtacacccatgtatttaaaagtgactgactgactgaaatgagcacataccgacatatgcaacatactaataccttcctgattttcgagactttctaattactacaactaacctgttgtgctcacctctggaattc

SEQ ID NO: 200567 - DNA, 1000 bp, Homo Sapiens
tatggagtttccactttttcagttttcaattcctaagtcagagttaagattgttatagttgaaactgtattagaaacatatttaggaacgatgattgtaccgttgagcttttcagttatgatccccacccctatcctaactggaatcctgaaattatcaagcttaccaaagctaatgcattaattctctcatttcatgattcattaactcagtaatttcctgcaagatacatggccaacaaaaatctcaaaatatccctgaggatattccagattaaaaatgctaaattcttaggacataatctttctagcactcatagagtttactatttcttagtttgttacaactatttgcccagatgcctgtctccccaagtagactgtaacctccaagcaaatgaagattgatcaagtaggattcaatatttctttttcttatacacagatctgatcatatttactctcacctggactcttaggggcggggctatcactcagagccaccggggcatggctgctgcccaagtggacccagaaggctggactttggcctcagtgggcccagaggcagagcatcatggaaacaaagagaattattctcaagccttaaaatacaatggactttgtcctgctaggttttggacttgcttgggccccaggattcctttcttccttctaatttgtccctttaggactagaatgtttattgtatgcctgttcgcctatttgggaagcagataacttgtctggtttcacaaattcacagcttgagaagaattctgcttcaagatgtatcacacctagagtctcatccatggctgatttagatgagattttcaacttagagctgatgctagatgggttaagattttgggggctgttgggatagggtgaatgtattttacatgcaagaggaaacaaatcagggatgggagggggcatgcagaaggcagaatgctatgggctgtttgtaaacctccctaaattcacgtattgaattc

SEQ ID NO: 200568 - DNA, 1000 bp, Homo Sapiens
gagatctatatctttggccattgcatgaatacttttgtagcttccattctacaataaacaacaaaatatagcagttccttttaatgagagttcatcagtacaacctttaaaaaaagaaccccacatatttctaaattgtcaccatattccaagactttattggaaagtacacatatgaacaacatgtaaagtcattttcttttttataaattattactgtacccatttataagtaagtttttgagataggtaacaaaaccagagctgcattattctcataaaaataaattacaatttttaaaaagtcaaataaggtagaagttttattttacaaacacatagtgcttactatgtgccaagcacagttctaagtgcttcatgaatactaattctttaaagtggatttaatagtgtgaagcaaaactccccctagttacatgaaccacttggggtaaaatatgaaatcagtccagcacagaggctaacattttctgagtacctactgtgtgctagagctgtcatatcttaaggctcactcaatccaaaacaacccaggaatactcatatagttgcctaaatttacgaaggaaatgaaagacggacacacttttaggtaagaggcacacatgactaatggtaagtacatggaaatgaaaaagacatggtctagagagagtaaggaaaccaaactgagcgaaatggaaggtggagaagggtagagccataagcacagagagggtaaaaacaaaagaggcagaatccagagagccaggcaaaggagtgtagctatttgcctcgtgggactaccaacaactacgcatccttcttacacggagggaatcagcacaggcatcgggagggctctacctcccataatgaggatgtaagtgggcaaatggtcactttgccagcagcctggcagccagggcaaggggaaataaccacaggtcagctaattcatgcttgggtctaaagggattaatgcaatggccaggaattc

SEQ ID NO: 200569 - DNA, 1000 bp, Homo Sapiens
aacctacacccgcccaaaaaagtacaagcaatgcaatcctgtttctgactgcttgaaagctacttaggaatagattacctgaatatgtggacagctactagatcaggcaaagcagaaactggttacagaaaaccagcaaaagaggatccaaacaaagagtgtggaatatgtattaacattttatttaaggaacttaaactgtgaaattcacttgtcaaaatggtctatgttcctaaaaatatgtcttaatgtgaagaagtaaatcctatcattcaaagcatcatttcataattctaaacgatatagttagaattaccaaactaggaaatgttgagccagtcattgtaactgtttctggtacaatactgggtttttgtactttcagtctccagattttggagtatgcatatattgataaaataaaaatatttttagttttgaggaagctatcttttatgtcatcattttttgtaagtatctggaggggcagggaatatgttgttcactactgtacccaagcatacctctggcacatatttggtgctgaataaatatttgataacaaaagaatgaatggatgaacgtaattttaaaaataacatgttacatcttactatatactttattagctaatttgccataacatattcactttattgtactgagcagaaacctttaaaaaggaggcagaagtgaaaagtggaattctccaaattacaattgtttacaatgcagatggggaaaaaaggaaggaaaagaaaaaagagatagaggaagagaggggagaaggataggaagaggcagtgagagacagagtacaagtgtaggacaatgattcgtaatttctgggtggagtagaatattggcccacggagcaggaggtgtgtcagaatcaaccggagaaaatgttccaattttccggatttggaaacatctccccctaccccatgagggcgaagatcatcatgatgaaaaagcagctataactgatgaaaagctt

SEQ ID NO: 200570 - DNA, 1000 bp, Homo Sapiens
tagggaggctgaggtgggacgattgcttgagcctaggagtttgaggttgcagtgggctgtgatcataccactacctccagcccgggtgacagagtgagaccctgtctcaaaaaataaaaaataaaataaaacaaattttcttttcactgctgatcatccctatctttttgcttattaataccatatgattctttaagtcttgaccatatttatagctgcttaaagttgtttgctaaatcatatatacctgtgccatctcaaggtcacatttttctgttttttttttcatgtataatagtcttaaattgcatgctggaaattggtgctgatatttaatacattgtagagaccttgagttttattttcttcctccaaagggtgatgatttttgttctagcaggcagttcaattactggctgatcactttgaatttgcgtagaattacttttaggctttgctaggctagatctggggaaggcccgtatttgtggcaagcccctcccgacaacccctgtaaattggcaggactcaaaactccaaaactgtctctcccctgcagatcttgtcaaggctgttgagccgtctttttcttattattgtttatatatcctggatacaaattctttgttacttagatgcgttgaaaatactttcagtttatggcttgccttttcactttctttatgatatcttgatgaacagaggttatttattttaacatagtaaaatttttcaggctttttaattttttttgagacaggatctttgtaacccaggctggagtgcagtggtgcaatcatggctcactgcagccttgacattctgggctcaagcaatcctctcacctcagcctcccaagtaactgggtctacaggtatgccccactgggcctagctaatttaaaaatttttttatagagctgggggcctcactatgttgcccaggctgatcttgagcttctaggatcaaagaattctcctgccttggcatcccaaagctt

SEQ ID NO: 200571 - DNA, 1000 bp, Homo Sapiens
aaatttccttctcagcatctccaaagggggcctttgattgaatgaagaatctttgctctcttcacccacaacagatgcatgaagacagaaaagcacaaaccctcggcagatcagtgagctttctcttgacgtgctccacagtttaaaatcaagtcaaacaggagacatctccactagaacaattagtcagagacagcggttcattgtcagggtttctggcacattgctgcgggagaaagtgaggaaaagatttgacattggagccttggaagtattttttaattcaacggggaataaaagcactttgttcccttttcctttcaaaatcagtgcttccccttccaacctatcacaaatgtctctcactgcattagagctatgcaaagagatttttaatggaatgctgtcacgtgtgtgtgcactcggcaaggctctttcagcaagcaattcattgtctttgggaggaaaaagaaacgagtgggtaaagaaacacggggctgctttgaaaaggtgcttacataagggtgtgaggaggagaacatgttgctccattttacccagcccctgctatgggcaggacgtgcttcacacagatcctcatccaacccttgccaccatctatgagctcagaacccaggcacagaagcatatatgtgaggtcccagaatctaacgtagggagttctaagaccttgatgtctattagctaacttcattctcacagccacattgtgagacaggcactttgatcaccatccccattttacagaagagggaatgaagacacaaggaggctgagcaaactgcccaggggcccacagctagcaagcgacgagactaggatttgaatccaagcaattagtctccagggaccatgtgtttgactgttacactcacctgcttccaagagctaaagtctaactttgtctccaaactaacaggtgctggtgagaagagtaaaaatgaaagttccaatgtttctgaggcccaggaaagaattc

SEQ ID NO: 200572 - DNA, 1000 bp, Homo Sapiens
tgtacctcagtctatattgactaaatccagatctgtgattgaacagggaggcatccagactgttgatcagttgattaaagaactgcctgaattactgcaacgaaatagagaaatcctagatgaggtatgttttataagatttgcttttcaagtataaacactgtgatcccttgatgtccagcagggattgggactggagacttcctcatgctagtacagtgtagttagtattcatcactttggtgaatttactgtggcccagagccttctctttagcataagagaaattctggttgagtgagaatgggtttcattcttatcttaagggtaagtaagtacacactaatgaaactcaaatgaccactgtgtaaaactagtatactgtgagaaatcaactgtcatacaaactgttcagtctttgtaattattgatttattttatgcatagcatgtagcaagatttttctttttaatttaatttgtcttaacctggaaggttaaaccctttaatttatccctaatttcttaaaatatattaaatatatttgttttatattatttatcttataattccaatatctgtagtttttgtgggtttgagtctatgatttgtaatttttgctgattcttgcttatggtggcttgttttctcttgtgttcagtttttttgttactgttttttaaaactttaaaaaatagtttcagatttacagagtctttgcaaatttagtgtagaaagttcctgtatatttttcacctagcttccctgaaagttaaaatcttatgcggtcatggcacatttgttaaaactaggaaattgacattggtacagtattattactcagattttaccagttattccaccagtgttcctcattctgttccaagatccagtacagaatactgaattgcatttagtgttcagtgagttttgattgtgcattcatatttcctgtacttatttgtgggaattcattgagatctgggtttaaggtgaattc

SEQ ID NO: 200573 - DNA, 1000 bp, Homo Sapiens
ctgtgccaccgcactccagcctgggcaacaagagtgagactctgtctcaaaaaataaaacaaaacaaaaaaacaaaaacaaaaactctaatatacaaaatgggattaatggcagattagattgcaaaaaacagatgagggaaactgaagacaaagcaagagaaactatacaagatatcatattcccccaaatccccacaaatgcaaagcattactatgtgacaagttcaagtggccaagcgtatgtgtaattgggctttgcaaatgaggcatacatgaggccaaaaaaaaaaaaaaaaaacctgaagaaataacggctaaaatgtttccgaatttgatgacaactataagccaagatgctcaataaatgccaatgacacacacacatacacaaacacatgaagaaagctataccaaggcacctcataataaaaatcctcaaagcaggccaggcacagtggctcatgcctataatcccagcactttgggaggctcgaggcaggtggatcacctgaggtcaggagtttgagaccagcctggccaatatggcgaaaccccattgctacaaaaaatacaaaaattagccgggtgcggtggtgcacacctatagtcccagctactcgggaggctgaggcaggcgaattgcttgaacctggcaggcagaagttgcggtgatctgagatggcaccactgcacttcaccctgggcaacaaagcgagactccatctcaaaaagaaaaaaaaaataattgctcaaagcagaaaaaagaaaaaagagaaaaatttaaaagcagctaaagaaaaagatattccatacagaaacacaaagataaagatgacagcagacttctcatcagaaacaatgcaagcaagaagatagtgaatcagtatttctaaagtacggagagagaaaaactgccaacaagaatcctatatcatgtgaattatcttctaaaaccaaaggcaaataaagatgtcttcaggtacaagctgaaggaattc

SEQ ID NO: 200574 - DNA, 1000 bp, Homo Sapiens
tgctgatgaatggaatgtatattctgcagttgttgggtagaatgttgtgtaaatatctgttaagctcatttgatctagggtatattttaaatccattgtttctttgttgactttctgtcttgatggcctgtctagtgctgtcagtggagttttgaaatctgccactattattgtgttgctgtctatctcatttcttaggtctagtagtagttgttttataaatttgggagctccagtgttaatgcatatatatttaggattgtgatattttcctgttggacaagttcttttgtctttatataatgtcaaaatataatgtctttgtcttttctaactgctgttgctttaaagtttgttttgtctgatataagaatagctactcctgctcacttttggtgtccatttgtatggattaatttttttcccacctctttaccttaagttgatttgagtccttatgtgttaggtgagtctcttgaagacagcagatacttggttggttaattcttatccattctgctattctgtatcttttaagtagagcatttaggccacttacattcaacattagtattgagatgtgaggtactattctattcattgcgttatttgttgcctgatacccttttttaaaatttattatgtccttgttttataggtcctgtgagatttatgttttaaggaggttcattttggtgtgtatttcaaggatttgtttcaagatttagagctccttttagcagttcttgtagtgctgggttggtagtggcaaattctctcagcatttgtttgtctgaaaaagattgtgtatttccttcatttatgaagcttagtttcactggatgcaaaattattggccaataattttttttttaaggaggctgaagatggggccctaatcccttctagcttgtagggtttctgtggagaaatctgctgttaatctgatgggttttcctttttaggttacctggtgcttttcctcacagcttttaagatc

SEQ ID NO: 200575 - DNA, 1000 bp, Homo Sapiens
catggcccgttctcaatgagctgttgggcacacctcccagacggggtggcggccgggcagaggggctcctcacttctcagacggggcggccggttagagacgctcctcacttcctagacgggatggcggccgggaagaggctctcctcacatcccagacgatgggcggcccggcagaggcgctccccacatctcagacgacgggtggccgggcagagacgctcctcacttcccagatgggatggcggccaggaagaggcactcctcacttcccagactgggcggctgggcagaggggctcctcacatcccagatgatgggcggccaggcagagactctcctcactgcccagatgggatggcggccgggaagaggcactcctcactttccagactgggcagccgggcagaggggctcctcacatcccagacgatgggcggccaggcagagacgctcctcacttcccagacggggtggcggccgggcagaggctgcaatctcggcactttgggaggccaaggcaggcggctgggaggtggaggttgtagggagccgagatcacgccactgcactccagcctgggcaccattgagcactgagtgagggagactccgtctgcaatcccggcacctcgggaggccgaggctggcggatcactcgcggtcaggagctggagaccagtccggccaacacggcgaaaccccgtctccaccaaaaaatacaaaaaccagtcaggcgtggcggcgcgcgcctgcaatcccaggcactcggcaggctgaggcaggagaatcaggcagggaggttgcagtgagccgagatggcggcagcacagtccagcctcggctcggcatcagagggagaccgtgcaaagagggagacgggagagggggagggggagggggaaggctttttttttttttttttttttttttggtgtctttagtagagacggggtttcacagtgttagccaggatggtctctgtctcctgacctcgtgatc

SEQ ID NO: 200576 - DNA, 1000 bp, Homo Sapiens
gcatggaccttaccccagcctaataacagcacagacacatccacaccccaggtctgctgtggagctgctcaccacttccagctatgtttttccattccctcttcagtcccagcaattggactaatttggtttcccttcatcctgcatttctgtgtgtttggagtaggagggttccacattagtctgctcctctccagccccattttcctcctcagaggccctcaaaaccaaccaggccttaaaacctctgatagaagccagaatcagatgcctgtggggtctagggtaaaccctgcctgcagaaagtatctccagaatttggctgaaatctttctgggaagaagagactgagcttgtttgattattaactggacaatttctgcttaacaactacctttctgttcttgtgctggaacagaaccagaatgcttcttccctgccaatttcaggggatgagatcatctttgcaaggcccttggagagacattaagtcagggatcttttcaaaagaaatgcatgtggcatgtgagatttgaaagaactatgggtgctttccttgaaaaacaaacccaatggggttttgttgttgttgttgttttgggtaggaagcttcccagttttttgtttctgcttttaaataaaagtagcaataagccagggagattggccctttgtggagggaacacatatctacatgggtgcaggtgaagagtcacagctgaatactctggcagtgtttgaaactgtttctttcaaacaggattggtgtgcaaagtcaagaggaaagtcagcaagtatctcaggaaaggacagtcatggaaaacagagcccagattttaaagtccgtgagggagacccacaccgtacagactctctaagtaatggctttcttccacatagacgtgaatgtttaaaggccagtgaacaccacccctatgcactcaggcctaagcttaatcagcccaaggctaagtgtgcagaaatctccttaatagaattc

SEQ ID NO: 200577 - DNA, 1000 bp, Homo Sapiens
aaataaagatttttgaatttcctagtggaagggaggtttttttctggcgttattgttaatgtctgatgttattacgtgatcatcagaaaatatttcctgtactatttatactcttggaatatctgtcattcacaaatgtaacctggacatttaaaaagttcattttctgtttccagggtacagtttatttaatatatatcagttagatttaccttacttaatgttacaaactagaagaagtagtctactaatgtagtttctaccttctccctttatctcttgtaatttctactttgttaaccaagttgctatgttattgatgcataaacacccattacaattatatattcttaataattacacctatttgcattataaagtgcacttatttaatgttttttttggcctgaattccatcttgtctgatattaacattgagacctctactttctatttgtatttgcttgttatactgtagcttgtattttgtttccaattttgatcatatcattcttctgaacacttttatatataagcaatcgtatcagtcagggtttttggttgcaagcaacagaatccactttagtgattctgttagaaatttatttagaaaataagtttactaaagggtatttgatagctcacagtatttcaaggagagccaaagaatttgtccagggggctatgaagccaggacaatatccattcaccccacagaacttctctcaggcatggcccatcacacctgggcactgaccctgcagttcacacccctaacactgagcaatggaggactagatgagaacctctgccactgctattctgaaagctggatttctctccaccacaacacaccactccttccaggaagagactccacacagctctcctttcttatactgtcttcttccaaataaaagtctgactgacagaacccaggtcaattcctctgctctagcttctagggaggctggacattgaattgtagcttctagggagg

SEQ ID NO: 200578 - DNA, 1000 bp, Homo Sapiens
gtaataatgatcatttcctggcagctaatgactagctagaggagttagaagcctcattaggtttataatttatcaaactctaagcttttcatcagtagtgttgcaaaaagagaaagcatcttcaaattccaaaatgattcaaaacaatctctaaccgtatttcatatatgtattcacttgttctttgaagggtgactttatttttaaacttttaaaaataactgtattttattatataagcaggaaaaaatgtttgtgtgacttagaggaagaaggaaagagatgtattgaactctgttagcacatacacacactctaaaagcagaattgatagaccgtgtttcctttaagaatctttttgtgacaattccacaccctttcctgaagctggcttgactatccattaattccagcaatagcatcattgtatttactccacagatatttattgagcacctactgtgtgttgggcattatgctgacgatactgcaggggccagaagagaacggggggagatgggaacaaaacctcctgtctttattaagctgatattatcatcttaaagtttctgtcttcaaaattaccctggaagactgcaattagatatgttcaaagaggccaagctaaaggtagaggaagaccctcactgaaccatgtggacaccttgcctctgactgtctcctcatccatacggccattacatagtagctccagcttctgctaactcaagggtcactcactgatcaaccatatttgggggattacaatcctccttttggtgagagaaagtgtaaatctcttctcctagtttgagacctgccctcctcttcgttttgggacctgacatgagctggtcataaaagaaaaaaccagaaccaaaaaacagtgtcttctaattccaactcgtttccccttgagttcctaatggttggggtatttattaaataagtacagcctgatggagggacagccagacctaccattcaggttgtagaattc

SEQ ID NO: 200579 - DNA, 1000 bp, Homo Sapiens
ctcttatgtagtcagtggattctccctgtgcaacacatctctgaccataatccatggtgatgatttcactctagcaagttcattataaaatttccccaaattttgctttcactatacatgttgcctgtttaactggcttcatgaattcttcagaatgaagtatggtttctgtcatgcacttaaagctctctttactattcattcacatcatctcttataatataccgtaaacatgctcattttatgtatctggaataaaatactgatcttgtgttttggttgtttaaatgcctgcaccactttgattatgcaaacacagctcaatgtttcattctgtggtctcatgtatctttggggagacaattctctatgggagacaaggtttctgcatattttgaatcagctgctattctaggctatctcttcaaaaatgtttgtgtagcaaactgtctcataagatagaaaaagtgtctctttccagagcagagatatttattccctaaccaatataacaaagacaatgttccatttcaaggcaaatggtgcgcagtctggtagcaggccttttaaagaactggaccttcctaaacttgggattattcatttgtgacacaaatccactgtgtatacaataatgacctaggtcactccagatcacctatatagtatttggaagcaagagttaattgatgtgaaggtctatctcatgctgcctcttgttctataaatagcaatgacatttgtctctgacacaagagtctcgtgttttgtaccacgatctgtgaaactgtggcaggaaacttctcggtttgcaaggggagtaaaatctcagacccttttcagttcttggcactacctacaatgatggtcacttatgttattaattgaaacctacacttattttgtaatcctatatatttatttctcacataaattttaactttcttaaaagtaggagatacagcatatattaaccactcagcaaacaatataggaattc

SEQ ID NO: 200580 - DNA, 1000 bp, Homo Sapiens
ctggctcctctttaaacactttaaattgtgaaaaaggggaaaagcacattagggaaagagataaaggctgtagcaagattgctttgtaattaaagaatcaagagaaggaagaatggagtaagctgggcatggggtagctgatgcctgtagtcttgactactctggaggcttaggcaggaggatcatttgaccccacgagtttgaggctacagtgcactaggatggtgcctggaaagagctgctgcattccagccagtgcaacatggtgagactccttatcaaaaaaaaaaaaaaagaatggagtagatgggggctaatataataatgacagaaaagagtttgccttttagcaagcggcctaggatgactgggatgagagagttggggcaaacatgggggagaactcatgggctttacctatctggtgggccgagaggcctgtggtctgaccagctgtctgcagcttctcataaccagtttgattctgaactagaatgttaaggttattggtctgttatttgtggtcaacttctttgcagttttgaatatttcttgcttttctgattgtttcaaaggttgctatcttgtgatttcatttgcaaattgtcttagtatctggaaatagagcataatattggttgcctacccaacacccatttcctctttaccccacaaataactcctctcccacacagccatgtgcttaaaaaaaacctgattccactgcatctcctgatcatgatgaatcttaagttgagagcaatctgtgcattacaactgttacaggtttgggatatgcacataacccaagcaggccaaatcagcctggttagggaataggtttctcttctttgttttttgtttgtttgtttgtttctttttgtttttgtgttttaactgtttctgaagcatttattttattttactgagacaaggcctcactctgtcacctaggctggagtgcagtgatgccatcatagctcactgctgccttgaattc

SEQ ID NO: 200581 - DNA, 1000 bp, Homo Sapiens
gttttaaatcgtgggctttagccccagctctacaactggtaaaagagccaacgttgtcacataatctcaaagagcctcgtaatgtcatctgtgaaacagagataacaaggttactgtgaaggtacctgagaaagggcgaaatgcatcgatgggaagatggtaacgcctggtatcaaaacttcactgtttcaggccgagtgtggtggctcacatctgtagtccccgctactcaggagggtgaggtgggagaatcacttaagcccaggagttcaagactagcctgggaaacatggaaaaaccccgtctccacaaaaaatacaaaaattagccaggtgtgatggtgtacatctgtagtcccagctactcgggaggctgaggtaagaggatcacttgagcctgggaggtcaaggctgcagtgagctgtgatcatgccactgcactccagcctaagcaacagaatgagactctgtctcaaaaaaacaaacaaaaaacttcacgatttcctagagacagtggatgccaggggcaggagttgggggcgggggggggggggggcgccggcggcgggagaatgggaagttagtgtttaagggggacagagtttccatttgggataaagtatggagctggatggtggtgatggctccacaatactacgaatgtacttcatgatacttaactgtcattttaagtgtattgaaccgtacactaaaaatggttaaaatggtaaattttatgttacggatattttaccacaataaaaggaaacttggctataatctgctggcataaaaaggcatcacatttacataagttctggccctaaaataccagcgaattaagttgctccctctgctatcccttgaaacatgatataacctcaggctgtctaccaaatgaaaatatgtccagaaaatgccttgatctagagttgtatgtactgcatgacagccccaaaaggagtctagcttgcccttttttctcctgagccatgaagatc

SEQ ID NO: 200582 - DNA, 1000 bp, Homo Sapiens
tgcctggggcagccaggccgagctcctgcctcacgggtcttcacaggctgacaaggcaaccaagagccctttgctcgctgtcctccccaggcaccactgggcagagctcagatgcacccactgccctgagcagtccctgccctcatggaggagatcagaaattgtgtgctccaagtcccctctccagggtcctcagggggaggtggtccacagagcgaggaagctgggcagggctggggaggggcacagcgggtaagagtggctgggtctcaggaaggagggacagtggctctgtgggtgaaggtgagcagactgatcctgccctccctgcctgctgtttccctccagagggaaggcccagccctgcagccatcctggatgccctgcaccaagccttggctgcctgccagctgttgcggagacagccctcggcaccagcctctgcagcagctgcgctcaccaaccccctcctcgtctcctgctgaggttactggcccaccctgtgggcaccctgctcagcctgactgcctttggaccagcctccatgatcagcccaaccactgacagctggtctgaccaccgtcacatcatcagaacttgagtctctgctggctccttccaaggttaagcccgagcccagagcctcccattgcagcacctggcagccaccccttcctcgggctcctccacattacctcgcagcccctgcattcctgccaccagagtccacattaaagccctgcagttgctggatcagcctgcacctgatgctgtatctttcccctgccctcagggcagagatgcccactttctgactgagtctgaccccaaatctcttccccagagtttcaggatctcctcccctcccagcactgtctccttcctcccactggcatgcctgctgcaacggagactgggcccaacctttgggatacctggtctgtaggaaagcactccacaccccaggaaatgttgatgactaggaaaggctgagggaatt

SEQ ID NO: 200583 - DNA, 1000 bp, Homo Sapiens
tcagcccaaatatccagtgacatggaaagctattagctttgagtagggcccagagtaggtctagagtacaatgagtgcaatcagcatactgcttgggtcctataattcaacagactttaaggtgttaaaaagtgttaatgataggaaagatgcagcatagaaattatggccaactccagtggatggggctctatctctcatgcaaaagaaaggtttgtttattgtctgatgcaataaaggtaccatttcctttaaaggcaaatgtcagggaggcttactacccagtatgaaatatttgtattccttaagctcagaatccttctcctataatacaacccactgcttgatgtcacctggttttcttcacatttctctatgggaactgaagctcaggaagatagaacaatgctgatactctggctactgatattgctgagaataataccacccttcatgttacccaggagtctcatgtcttctgccagaacccagaaactctggcaggattgttagcttgcaagtaaggtaaaatctcattttccttgtaatttgtaacattcttaacatattctttgtaatttgtaacattcttaacatcaactcacttgttgatgattcccacgtacattattttattgttgacttataatgtgtcccaagtttaagggatcattttggttttctagaagtacttatgctcaactagggcatcctctagacctttaagttcatgtcatcttgatagtagagatttaaatgttatcttcccacaaatctctttcttatattatctctttttcctgccgagaatgataagtaaggtttcacaccatataggtcaagaaaatgtgtcataaagcttccagaacacttagagcgtttcacttcttttacacttggggcagaccttttcttttcagaatttgcacaaccccctgagtttcatttttgttctgcaatccttcctaaataaaagagagttcatgtgaaagaagaattc

SEQ ID NO: 200584 - DNA, 1000 bp, Homo Sapiens
tattcccacccttaaggacaattctattttctgcttctaaagattaggtccctaggtctaggaataaattgccactacccatgctttgggcctttcactctgtcaggggctgcaagaatctggcagctagcagagcccaatggtgtttggagaaagaaatcccttaatcaccgtggtataactagtgaggttacttctcttccatgaagacattctgcctctcctctctgattgactcatctattctcctagtaatgctagtccagcgtggaaatgatagcatttacttacacattatttacaccatatactccttttttagtcttttgaacactcattgtgccaccaggaaaactcttcaggtctttgatcacaactaaaagtcagagtatatggtctgactattacttatcgggactctaggtggaatgtttttaaagggtgtgtcagcatagacaggtagcaaatctgtccacagcatgcttttttggtcctctgtgaatttttttttttttttgagacgtagtctgtctctgtttcccaggctggagtgcagtggtgctatcttggctcactgcaagctccgcctccctggttcatgccattctgcctcagcctccccagtagctgggactacaggcgcctgccaccaggcccggctaattttttctatttttagtagagacggggtttcaccctgttagccaggacggtctcgatctcctgacctcgtgatccactcacctcagcttcccaaagtgctgggattacaggcgtgagccaccatacccagttggttctctgtgaatttctgacaaggtttgcatggtgccttggttctgatggaaagtacacatttctgctggcatgtcaagagtccagggtagactggtacacagtggcactaacattttgctgcctccaacccctccacatcccagggcattgaggtatacgtctcctttaaggagtggagagcaaatggaaaaggtagggaggg

SEQ ID NO: 200585 - DNA, 1000 bp, Homo Sapiens
tgcaattccaaactgcccacccactcagaatttgtctgcaaaggtaaaggataaaatttttgaaaatgtaattttctcaatccctattgtcaagttattttctgcttgtgagttgctcataagtatgtcttatacaggcaacagaggtcagtgagaatcagccttctgaccataacagtagctgtagcctggaccactgcccctgcctttattacagcctctcattctgctccaaaaaatgccacttccctgttcaaaaacctgtgatggatacccattttatttaataatcactgccgtagaacttaccttgtgctgggtactggtctaagcaatttataaatatgaattcatttaatcttcacaatcctcctatgaaatccattctttttcaggtaaggaaactgagacacagatatgttaggtaagtaaccccaaggttacacagctagtaagtggtaggaccggcagtggaacccacatagatagtctggctcctagtctgtgcttttgatcactccactctgaagcttcattgtctaacaaattagtgcaaacttctcaccagactttgcatttctctgcagtatggccccaactaaccttttccaggattatctcatatcaccatgacattacaccatctattcagtatccattcatccaaaaaaaaaaaaaaaaaaacaaaaaacctaacgaacaccttgtgaagccacagcctaatgaaaagacagacattaagaaagaattggcagctcaattggccaaggcaagatgggtgaaagtcagagtgggggttatggtcctggagtttgcaagaagaatggaaggacaagaaaaataaatatgaacctcctgtaccaactagagtggagaagaagaaaacaaagggaccagatgctgccagcaaactgccactggtgacatctcacactcagtgctgatgaaaattactgaagttagagagaattgaagactgtcttctcatggaggaagaatt

SEQ ID NO: 200586 - DNA, 1000 bp, Homo Sapiens
gatttcaacaatagttttagaagaaaatgatacaagcatcccactgacaaataaaaacgggataaacaacaacaaaacacaaaaaacaaaaacagaaaaagggaacttccttttagacgctagaagaacttggccttgaccttgctaaaaaaaattcctcacctattttaaaaattcactctcccttcctttatgtgaagagggatctatacaaggactgaaaattaggcagttttattagccttcttcatatgaacaaagtggaagaggggttcaataaagggctagagtgtcttttactttctctctccctgaatccagatgcttaaaaactcaaaagcagccagaacattctttgatgggcagtagaaaaaatagggatagatttggaaaacatagttcaattatagaaagcacccctcccaccagcactttgggaggccgaagtgggcggatcatgaggtcaggagatcgagaccatcctggctaacacagtgaaaccccatctctactaaaaatacaaaaaattagccgggcatggtggcacgtgcctgtagtcccagctactcgggaggctgaggcaggagaattgcttgaacccaggaggcagaggctgcggtgagccgagatcacaccattgcactccagcctgggcaacaagcataaaactccgtctcaaaaaaaaaaaaaaaaaaaaagcaccccttgggaagtgtgacttaagccactgggacgcattataatctcttccagcctgtcaattttgtgttattattgttccaatccaccacagagcaagaaagacgggaaggtaaagacttgagttggcctcaattatccgggaaaaagattctataaattgtatcaaataactattgtaccataagatgcttctttctagtgaaatctgcaaactttttttaaaaaaagaaacattcttatagtatacttctgaagaaattcttaccttgacaaagttattatttcctggaattccgcg

SEQ ID NO: 200587 - DNA, 1000 bp, Homo Sapiens
cagagttacataaggtaggactgaaggagaaaatggtgaagtggaagaagcaactgaagaaagtttaaggttctatgttacagaggccaaggcaggaggatcacttaaggccacacatttgagaccagcctggacagcacagcaagaccccatccctcctcccttccaaaaaaagaatatgctatgaaaatatttaggagaaaggaaaaagtacagcacagtcataaaccttacccagagaaggtaactgagtaatacattttttgttgttgttatttaggagtcatttatttttacttactatcctccctgccaccaaagaggagaaaggcagtaacggtaaaatatgtttccccatcccagagtgaaaccccaatcctgacaatgtccttgtgatataccaaccccccaccctcaccaacttcttccgctcagcttttgctactttctcccttcctgcttctctttagttgctaccctccttggtggtccttaaacagctcagtttctttttgcctcaggctttttgcatttactgcattaaggagcagagtgagtcaaatatactatattaatttgctagggttgccataacagagtaacacagactgggtgccttacacaacggaaatttattttctctcagttctggaagtcaagatgtcatagggttggttccttctgagggctgtgaaggaaggatctgttccaggcctctctctttggcctgtatgtagatggctgtcttctccctgtgtcttcatatcatcttccctctgtgtccagatttcctcttctaaggacaccaatcatagtggattagggcccactccaacaacttcattttgacttaatcatcactgcaaagaccctgtctccaaatagagttaaattctgaggtattgcaagttaggacttcaacatgaaatttttctggtgaggacaaaaattcagcccataatatgcacgcacacacactaaagtttctggctaagaaaat

SEQ ID NO: 200588 - DNA, 1000 bp, Homo Sapiens
tctcacggtatggttgtacctcagtttgtttaactattatccattgaaagttttttttcagttttggctgttataagaaaagttactatgataatgcatgtataggtttttgtgtgaacatattattttcatttctctggaataaatacccaagtgtactcttgctaagtcatagtagttacatgtttcattttgtaataaagtgccaaactattttccagatttgctgtattgttttaaattcccagtagcactatatgagctatccagtttctctgtgtccaccaatatttgacattgctgttttaatgttatctgatctgatagttgaataatgatatctcattgtaattttaatttgcatttctctaatggttaatgatgctgaacaacttttcatgtacttatttgctatctgtatatcctctttggtgaaatatgttaacttgttttgtcctttttttctaattgaatagtttttttgttgttgttgttttttactattgagttttgagagttctttacttaaaacatattttctcctagtctttagcttgtcttttcatcctcttcacagagtcttacagagcaaaagttttaaattttggtgaagtctagttttatcagttcttccttttatggtatcagatctatgcttttggtgtcaaatccaagaattgtttctcatatgttttctttctagaacttttatggttttttattttatcttgaagtgtgtgattcatttttatttaattatcgtataaagtatgaggtttaggtcgaggttctttttttttttttttttttttttgccgtgtgtgtgtgtgtgtgtgtgtgtgtgtgtttatgtgtctgtgtgtgtgtaattttttgtttctttgaggcacggtctcattctgtcacccaggctaagagtcacaatcatggctcactgtagcctctttctccccaggctcaggtgatcctccagcctcactctcccgagtagctggggcta

SEQ ID NO: 200589 - DNA, 1000 bp, Homo Sapiens
ctgtattgcattaattgtcatgtatattccaatctgtaacagctcctccatctttttttaaaaaaaatttttggccaggcatggtggctcacacctgtaatcccagcactttgggaggcccaggcaggcggatcacgaggtcaggagattgagaccatcctggctaacacagtgaaaccctgtctctactaaaaatacaaaaaattagtcgggtgtggtggcgggcgcctgtagtcccagctactcgggaagctgaggcaggagaatggcatgaacctgggaggcggaggttgcagtgagccgagatcacaccactgcactccagcctgggcaacagagcaagactccatctcaaaaaaaaaaaaaaaaaaaaaaattcatgtccttgacagtcttgaagagtattaatcagttatgttgtaggaatgtccctcaacttgggtgtgtctgatgttttgtcaagattgaaatgaggttatacaattttggcaagaatatcagaggtgatacgcaatacatgttattacatattaaattagatcacttaataaggtggtatctattccctttgcaattattgtcttgggggcagggagttgagattatgtgaatatcttatctcatcatacttttgctcattaattttagtatccattaatgattcttgcctgcaacaatgattactgtggtgttcgcttaatggtgattttatatttccattttttatctatatttattgcttggaatgctactgtaaaaatgagctagcatttccagtaatatatatatacacacacacacacacacacacacacacacacacacacacacacacatatatttaattcaaggttttccaaggcttttaaaataataggtctctaccccacatattacttattaattacaaagaagaaaaagatatctttgcaatggggatctggtagacaccatcttaaccaaatgatcaaacttatcacatttcctgactgaagcaatg

SEQ ID NO: 200590 - DNA, 1000 bp, Homo Sapiens
gacagaattaagatttactgatagcggtcagctgtaataacacaatttgcatagagggaaaattaaatagcgaaagataacttgtttgtttctaatgcaacagtaaaataaaatcagcacatttaatcaaatggaaagaaaaacctgtttgatgcttaacttttgtattggaacccaaaattgtcccggcatgttccctctgatgagtatgtattaaactttcagatggctgtgcagatgagctgtaatcatcgcaggctgagcagcatcagcgctgctttgtcacagtgcctcctcttccctcagatgctggtgtgtggcataaacagggctttgttaggtggcgggactgtggttttgctgtgtggaaaatcaaattgttaccaccatcctccacatttcatttatatactgtcacactgcctaaagtaacctgacattctactgctttcctcttcaatgcaaagccatgtatctggttcacattttaaggatgcaaccttctaaaaaggtcaaacagaaagttactaaaacagttcactgcacaatgataaacatttaaatggccaaagatatttgtataattttttcagtagctagaaagacaactgtgaaaaaatataaagaaaaatttccagagaaatgtgatcaataaaaagtaacccatataaaagcatacataattttaatttttcattctaattgttatctttttaaacattctatgtatccacatcccttagattgaaaaattcagaatggcacactgcatctgcagatgtgaaaagttaagattctaaggttttttcttaaattcatatcagtagcctctactacagaagaatacaaaatgaacttgtggtccattatttgttacaaaataacctcccctcagtgtgaatcagtttgataaagttgtttagtattttcttgcactctttccaggtaataaaccttaaattttattattgtcaaatgaaagagcaaatgaatatgaatt

SEQ ID NO: 200591 - DNA, 1000 bp, Homo Sapiens
taactcattttgctgtcaaatttttgccccagggattcaagattagaattttaaatgtaggccaaatctcagataataggcaatgcagtatcacagaagagcagaaaatatgcatcaaccaggcctgagtgaaaatatttgcttctccagttatcatccctagtgcaaaaggggcttcataagcctcagtttctttatctgtcaagtagtgataccagtactaaccttgtacaatagttataaggattaaatttgattatgtttgaaaaagtgcttggctcagagcctggtacacggtttctcattaattctggtatacctctttttccacaaatggagaaatacagacaaccatttacacctattgtttgtaagcactgcatgatcttttcagattattgctttgtagaaatctaaaacctagatggggagggggtagccaagatggctgactagaagcagctagtgtgctgcctctcacccagaagaactgaaggggcaagtaaatacggcaccttcaactgaaacatccagtactcatcaaggactaatcaaggaaacaactcaacccacagagaacaaagaaacttaaggcaggatgatggcccactggggagtgacatggagccagtggaaactccctgcccagggaagtggtgacagaatgtgtgacccctgggaacccatgcttctctcatggatatttgcaacccccaggtgaggagatcccctcgtgagcccactccaccagggtcttcagtctgacacacagagctatgtggagtcttggcagagcagccactcaggcacaggctaagacctgggagccttagatacctgagcttcctaggcttcctggcaaaagaatctgcaaccatgacaaaacagggggttagatcctcatacccctaggaaagaagctgaatccaggatgctaagcagtgacagtctgcaggccatacttccatggcacctcacaggataagactggcttggaatt

SEQ ID NO: 200592 - DNA, 1000 bp, Homo Sapiens
caaaaccaaccaaccaaccaaccaaccaaccaaccaaccaaccaaccgtataagcaaaaactgagagtggcagggaagaaacaaagacaaacatcatcataaaggatttgaatacacctctcaataagatatagagcagatatgaacacagaaagatggtacaaatgtacacatgctgaattctacatccatcaattaggtgataatacacattaatttcaagctcacacaacattttaaaaatagtgatcacaaattaggtcacaaagtgagtcctcaacaaatttcaaataaccactaccatacagatcaatttctccaaccacaatgcaatgaaattagatgtttaaaatataaaaataaacttctctatgcatggaaacttaattgtgggaagtaaaagtagtaattacagagaacgtaaagccttaggcttaaatcagaaaagaaataaaggctcaaagtatatgagctccatgtcctttatgagatagtgaaaaaagaaaacaatatagaaagtagggatggaaaaaaagaaaatagaaaaaaaatacactagagatttagaaaaatatacaagagaattaatattcccaaacgttggttctttcaaatgatgaataaaaatgataaatataactgatgaagaaaagagagagatgacataaacaaactatatgaggaatggatgaaagaaagctcatgacagaacaaggtcaaaaaggaagtgataatatattctgaaaaactttattccaagtaaaatttaaaaattagatcaaatgggaaaattactaaaaatttatttttatcaaactgattccagaagaaaaagaagtcctgaattgtctttacattagtcagaaaaactgaaacaactataaaacttaaaaatacacaggtccagatgttttacactggggaattctaccaaactcttagggaaaagattattacaatcttacataatatttcctagagaatagaaaaagagggaatt

SEQ ID NO: 200593 - DNA, 1000 bp, Homo Sapiens
caacaactctagtataaccccaccaccatcatcaattcctataaatccgtacagttccaatcatatctctgttcccagccttctccttctaggattcattttctgtaatagttagagaaaactttctaaatcctaaaccaaatcatcttatcttttactccaatggtttctattcaacgttccaatcatttcctattgggagcaatttttttgaaaaactcttaataatggcctaaaaaattctctatgatctcactcctgctttcttctctgacctcatctgcttttgttctcttcactaagacacaatggctttgagcatgccaaagcttttgcacttgctgtttgtggcatggactgcgacttaatctccaacattcattctcccgtgctttcgaacactcaatttgtcagggccacatgatgccctggaatacagactacatatgtggcctaccggcagctagacataaccaaacaattacattctatcaatgggatctaagcagaagtatgtgtaactttcaggaaaagaccttaaatagagaaggcacatctctcttttgctctttctgggtcagactggctacagtgcaaaaacagcagcccaagcttggagcgtgtgtttggaaaaatgcaattaacaagagagaaggagccaaaatctgtggagggaaaggcaaaactacagaaggaatctgggtccaggtgatcatcaagctgcatcatcagctctaggttacttaccttggagaagaagaaacatacaatgcactcctatcctgtaagctgctttaatttatgatcattccccttttctttgcagagcaattttccccatggatccatgtgtggctgcctccttctcaccggtcaagtctcccctcaaatggcacaacgttaggggtgtcgctggtttagcaggaccgtctctctctcctgatctataccacgtgactctatgctttcttgtttgcagcatgtgatagcacaggaattc

SEQ ID NO: 200594 - DNA, 1000 bp, Homo Sapiens
tacataaatgtcttctcactggtttttgggaaggcctgtcttctgggagtgacttttgttaatccaactcttggaactagatgtagtcctatatttagtcactgggatagtggaaaagggaaaagaggaaaagtgaagggaagggctgtttgttagtatctctacatacagaagagggttttagatgatgtattagtcggttctcatgctgctaataaaaccataccgacgactgtgtaatttataaaggaaagaggtttaattgactcacagttcagcatggctgggaatgcttcaggaaatttacaatcatggtggaaggtgaaggggaagcaaggcacttacttcacagggcagcagcaagaagtttaaggagggggaatgccagacaattataaaaccatcagatcttgtgagactcattcattatcaggagaacagcatgggggaaacagctcccatgattcaattacccccacctggtcctgcacttgacatgtggagattatggggattacaattcaaggtaagattttggtggggcacagagccaaaccatatcagataataaccgtagatctatatgagcattgttagtaaagcacctaagtgtattgtgaacaaatttaattattttgcaacatctaagctttataaatgtcttggggtaacaatgtatgataaaaaagtagagctagtgaattaaccaatttgtaaattttttttgttataattgatagaaaagatacgtgttggacatagaattattaaactgcctctgagtagtgtgtgtaaggatttgttcattaggttggcatcagaagggcagaagcaaatacaaagggaaagatgtatgcagatgttttcatatttacattttgacaatagccattgaggtatgtgcatctcttgtggttgtaccataggaatacattaattaattcagtggaaacatacattcttattaatattttaatggtatagatctgctaatgaattc

SEQ ID NO: 200595 - DNA, 1000 bp, Homo Sapiens
acccaggaggtggaggttgcagtgagtggagtttgcaccattgcattccagcctgtgtgacagagcaagactctgtctcaaaaaaaataaaaaagcttatattcctttatattaatttctctttgcacatatctgtttggctaggcaaaggttttagattcttgaaaatctttattttttagggtagatctggttctttgactagctcaatcttgcatgttctttggccatgtctccagtttcagaagcattagttttagattcatattaacaaggattacaaaagaagttttcttgacagatctcctggtcgattcttatttttgttcattggatcaaacatttcttcaaatccattatatacttccaaacgatgttttcgtttgggttctgtcataagtgttttcattccaataagtcttcaactgcactgttcttttttcttgatggtttcaataagttactgataactcttgcttgcgtcaatgttttcttttggtgttttaaaaagttccatatgattgtaatcataattggttcatcgcctgatgcacaagggagttaatatgcagagacacctggttgcagcagagaaagaggtttaatcatagggccaccaaacagaagaggagatgagagaaaacctcaaatctgtctccctgaggattttggttttggagtgggccaaagtgttgagctcgttgattggtcagagtacaaaggtgtggtcatggggcagcatcagtattcttatgctcatttgggtcctctgtggtggtcttcaaactggttgtctcagctgtacttctggaatttaggatctgctgaagcaattcttaaacaagagttttatcatttaaagatcagaagtcctatttatggaaagaatggggatgcaactggttagtatctagtgccaccctgacttttgattacaaggaagtgggccaaagtacagcctgattaatgcttaattgtagctgtatatctgtccagaatt

SEQ ID NO: 200596 - DNA, 1000 bp, Homo Sapiens
ctctgttctgctgcttttcctaagacactttttctgcctttttttttctcttgctaattcctcctcattctcaaagactcagcccagtcttttggggagccttccttaatccttcagttctgctcttcctggggctctcttctcattgccgctgcacaatcttgaggctaccattcccattacacacttgaccttatattgcatctctgttcctgtggtatctactgggccctgtgactcagtcatgcaaaaataatatattcaactctgaatcttcatggctagggatagcaactggtgcatgctattgagttaaatagagagagtgggagagtgagagtgtgtttatgagaatgctctcttggactctcttcaatgtctttgtagcctgtgactctaatcaccctggatttatttcattccagcatcaatcctttctacttgaaaaccagtaaatatcctctttgtctagataccaactgacagaatgtagaaggattaagaagctgtcttctaccaagcaatgcaaggaaaccaaccactgaacttctaaaatagtaatagagatgccccttccaggtgccatagaaaatactattctttacctactaatatacgtctccaatatggaagattatttacaagctgtcacattaataataaataatatattttcattattttcatccaaatccttgagtttcaaattaacaacatttgaaggagacccgtttgcacagatgaaatttgaattgtagataaagtgacactctggaagggttaggtcacgttgttgcttttcaacactaccaagatttaatttatgtagtgtcattgtgaagagagaaccctaatggctttttaattattctcaacttcaaagagtaaatgagagagaaatcagttcccagacaaaggaagaaaatattggaagctgagtagagataattatgcaggaatgccctagtaaaagtatcttaggacgtaggggtgtagaatt

SEQ ID NO: 200597 - DNA, 1000 bp, Homo Sapiens
cgtgaacccaggaggcggagcttgcagtgagccgagatcgccccactgcactccagcctggacgacagagtgagactctgtctcaaaaaaataaacaaataaataaataaatacaaataatactaaagaccgggtgcggtggctcacgcctgtaatcccagcactttgggaggccgaggcaagcagatcgtgaggtcaggaaatcaagaccatcctggccaacatgatgaaaccccatctctactaaaaatacaacaattagctgaacgtggtggcgggcgcctgtaatcccaggtactggggaggctgccgcaggagaatcgcttgaacccaggaggtggaggttgcagtgaatgaagatcgtgccactgcactccagcctgggcgatagagcgagactccgtctcaaaatattaatactactaaaataaccaataaaacattaacgataattagtaatgagacaacggacactcctgtttgctgggcccgccgcagtgccagctcggtaacccccaccactcggagaagaggccacacttactatcccattttacagaaggggaaactgaggcatggaagcatgaaataacctgcccaggtggcgccgtccgcacacggaggaggcaggaacggaacacgcgccgcctcctcgccctccaccaacacggaccccaggggcgcaccctgggtccccgggtccctgtgcgggccggggtgacacacggctgacccccgcacagaccgccccgcttccgggtcccccgggaaggacgcgcgggctcctgcttgccaggttttaacccacaagggttgtagggatttacccaaaggagagcaaggagccgggtctgcccggaaaggcagggggcgcggacaagcccagagggcgagtggggccgggcgtgcggcagggaccaggctggagcgcatggccacgtgggtgaaccccgacccgcggacaggggcccaggaccctctggcgggaggctccatggct

SEQ ID NO: 200598 - DNA, 1000 bp, Homo Sapiens
tatccgccatcaaagagaagctctgttttgggaggtccatttttaatatagaaactgctgcagtagtatttactctggtaaatacgaggctttgtgaatcaattgaactcaagctctttttacagatcatcattattctctcactctcccatggatattatgttttgcaattgcagctgagcagatcttcctgttagagaaacagcttacccaagcaaacatgacacgtgaggacattctccaggaagtctgtgaggtctctccctgcaggcaggacaagcgcatgccccactgctgtgttattgatctggtttaaacaaaagaacaattttggtaggggcgtacatgatcagtaatatctgaaaatatggcagaggagtaaatcaaagctacatcaataaaatagattaacttcccaatagggcagtattgggaatatcttctcatttgggggtggggttaggctctgagtataatagaaagacataggttttattctactagggtgagctggagttcatatcccgttcaaatgggtttcagtttttttcagctgtaaaatggggggtaataccttcctaatggtgtcatttggagggttaaattagataataaatgttagtaactggtgtatcctctggcaaatagtaggaacttaatcttatcgttatttttagcaacaatatgggagctccatcccttccccaccctctcaggtgtggttaaagcaagtaacaaaatcactcccagtgggtgcaaagagtcctgtctatcgccgtacctggcacacgattagtaattattcatttaacaaatagctagtttgaatgaatgaatgagcaaataattaatgaatgaacaattttttgatctcgttgaaaccatgctaagaaactcacgtggttctgggtccctcagcccacacaaggacagacttatgtgaatgaatccccccatcaagagcacatggccggtagcccaacttcaacactgaattccc

SEQ ID NO: 200599 - DNA, 1000 bp, Homo Sapiens
tttatttttgtttttgacttcctatcactttttcctgttgatggccaatccttctcagtctcttcaaatccttctccacccactattttcttagtaaataaatcgtagacttgaacatatcaggaaatagctataaagagtgaagagacttgcctggtgttatacaactaattgataatattaaaactagaaaccaggtccattgagtctctctagtttcaaaattcccactattacaggatcatataaatgggctgaattcatgtgtgacatgagattttcctaatttcttttttgccagttctgattttcttgtatttcctctcttttgctgcaggggaagcaccgttcctctaactttttaaaaaatatatatattttttataagagatagggtttccctctgttgcccaggctggagtgcagtggcacaatcataactcactgtggcctcgggactcctgggttcaagccatcctcccacctcagccttccaaggagctaggactacaggcacgtgccaaaaggccaggtaatttctttattttttgtagagatggggacttgctaagttgcccaggctgatctagaactcctggcccataagtgaccctctaaacttggcctttcaaagcactgggattacaggagtgagccactgtgcctagcctgttcctctaactctttaattcaagtttctttttattttttgagacagagtcttgctctgttgcccaggctggagtgcagtggtgcaatctcagctcactgcaacctctgcctcttggattcaagtaattgtccttcctcagcctccctagtagctggaattacaggcacacgccaccacgcccagctaatttttggactttttgtagagacaggggtttcaacatgttggccaggctggtcttgaactcctgacctcaagtgatccgcctgcctcagcctcccaaagtgctgggattacagatgtgagccaccacgcctggtggaattc

SEQ ID NO: 200600 - DNA, 1000 bp, Homo Sapiens
acctcagcctcccaaagtgctgggattacagatgtgagccactgcgctcagcccttttttgtcttggaagtagcagtcaaggccatctgctaaaagtaagaacagataaatttgagatttgaagagaataaaggtttaaaattactgctatagaaagcaggagaataagttgaaagtagaaatttcacaggattaccaggcaacattgagacctgaggttggtgatcaagaatttagagaggtattatcccctcttccataatgtgtgatctttctcaagcaatatctacacagacagttgggcttacaaaggcttggggttttttcaggcaaatgtgacacaaaaacaaggaagtttagcatattggcaagagatatagaaatggaaggccatggaatctaagctagttagagtagtgaagacagaaagagctaacagagcagaaagtatcagttgtcgaaagatccaacagtcttctgaaggatcctcgataatccatgctttggcttggaaaggacttctggcggttgtcacaaagtcaaatgtgacttttccccttgattcacaggtattgccaactgagataggaatagctgtgattagtaaaagggagctaataagtatgaggaatacatggacgggcatctctatactgagataggacaagcagtggtcctaacaatgctgctcgctaatttatggtcaaaatcctacttggcttggggataggagatggcagcatttaagtgttagtgtttctaagagttttgttctagtactctcctcttactctggaatcaggtctcctaaattacatcatccatatctaccactttaaatactacttacgttctgatggctttcataaatatatacaactacccaagggacacctcaaactcattatctacccacaaacatctgctcttgctttagtattctggatcttagtgaagagcaagggatccttcagttacgccacccagaagcccaagatac

SEQ ID NO: 200601 - DNA, 1000 bp, Homo Sapiens
ccaccacctctctctaattccaaaacaacttcaccccccaaaaaaatcccatacccatgaagcagttacttcccagtctcccttgtccccggcctctgacaactaccagtcttccttctgtctcaatggatttgtctattctggacatttcatgtaaatggactcacagaaggacatctggccttttgtcacgagctcctttcaccgagcataatgcttctgaggtccatccatgctgtagcacatatgggtgcttcattcctttttatgaaaatatatattttatacttgatcaagtattatatattttacaagaggaggaaataatctgtcagctatgtgaaacgcttagcaggctgtattattattattttttttagaaagagtgttgctctgttacccaggctggagtttagtggagcaatctcggctcactgcaagctccgcctcctgggttcaagcgattctcctgcctccccttcctgagtagctgggatcacaggcgcccaccaccacgcccggctaatttttgtatttttagtagagatggggtttcaccatgctgaccagtctggtcttgaactcttgacctccagtaatctgcccacctcggcctcccaaagtgttgggattacaggtgtgagcctccatgcccagccccttagcaggctttatataggcattaagaaactctgctcataatacttaacacctgttaaattagtagaatcactcacattgtagacattaacttatgaaataattcatcacaagattcaagtgccctgagttccgcttgctgcatttaaatgatgattctgttgagtcagctgatttcaatttgagcaagttcatgttaccgggggaaaggcaatattgtttcttctgagaacatcatgaccactaggttctttaaggcaatgaaagacacaggctattaatgtctctgatagagccttgactccagcaacgtaatcacaggatgggggactgttctgta

SEQ ID NO: 200602 - DNA, 1000 bp, Homo Sapiens
tcacccaggctggagtgcagtggcacgatctcggctcactgcaacctctgcttcctgggttcaagtgattctcccacctcagcctctcaagtagctggcattacaggcacgcaccacacacctggctaatttttgtatttttagtagagacggttccgccatgttggccaggctgatctcgaactcctggccacaagtgatctgcctgcctcagcctcccaaagtgttgggattacaggcgtgagccactgcatctggtgagatttttagttttacattatttcacttgctttagagctgaagttttctatggcattactaaacatatacaatccaattaatgttttaaagtaggaatgagtaggtattctcaattactcctcctttcaatactgtgccttttggtaatgctttccagtgttttcttggtcaataagaaacaggaaaaccacagcaagcaagaaatagataaaattagcttatcggttccaccaactacttttaataattttcacctggcacaattcactgatgcaagagtaattactttttcttttcctttttttttttttgagacggaatcttgctcttgtcacccaggctggagtgcagtggcgcaatctcggctcactgcaacctccgcctctcaggttcaggcgattctcctgcctcagcctccggagtaactgggattacaggcacctgccaccacgcccggccaatttttctatttttagtagagacggggtttcaccatgttggccattctggtctcaaactgctgacctcaggcgatcggcctgcctcagcctcccaaagtgctgggattacagacgtgagccaccaccgcgcctgaccctcaagagtaattacttgaataagaagtactaggtttagtattgcgggagattcaattccaggaacaaggctacactgacagtcattattaaataaaacagttgttttttctatggattacaataattttctctgaagactc

SEQ ID NO: 200603 - DNA, 1000 bp, Homo Sapiens
gacctattactatgctaatcacatttatacatatttattcctcataaccaaccaataaatcagatactatccctattttaatatatcaggagatggaggctcagagacgtcaatttacttgcccaaaactacgtagctaataagtggcaaaactagaattcaataatgcttacaaactttaaaaatctttgttctagaccactatgctatattgcctctataaagccaccccaaaatatccaggattgattgggattcttaaatctgcacattgatgttgttcattggcagtagaaaatttcagccaatactcctttttaaaaatgttttaaaaacaagctctggcaagttttattaaagaaaaattttgaggccgggcgcgatggctcaaacctgtaatcccagcactttaggaggccgaggcgggtggatcaagaggtcaggagatcgagaccatcctggctaacacgacgaaaccccgtctctactaaaaatacaaaaaattagctgggcatggtggtgggcgcctgtagtcccagctactcaggaggctgaggcaggagaatggtgtgaacccgggagacggagcttgcagtgagccgagatcgcgccactgcactccagcctgggtgacagagcgagactctgtcttaaaaaaaaaaaagaaaagaaaaaagaaaaattttgcatagtatacttcccaccagtctattctggcatgcttctaatatgagaatcacctggatcaatgagagccagtgagcatactctgtagtattttccacatgctgtgcccaattcaatattattgtcactgtagtgatggacaccagtccggccaacatttcatagtactctattttggatttcctcaaagctgggcagttgttagagaggatgaccaatttcactttgccttgtctgatcaacttcagagtctgcttgtaccccagcatgtactttctacttttcataactagagttgatcaactccagtgac

SEQ ID NO: 200604 - DNA, 1000 bp, Homo Sapiens
ccattgcttccttttttataaaaatactgtgtccccctttactgtcatgaagtgaaattcataaatatatttcctacacatataatttaaatgtatgtaattgttatatgacagaactaaaaagaacttgtaattcagttgtatttcaatatagaaatgcttggacatggatgggcacgttggctcacgctgtaatccaagcactttgggaggccaaggtgggtggattgcctgaggtcaggtgttcgagaccagcctagccaacacggtgaagtcctgtctctaacaaaaattggccgggtgtggtagcaggtgcctgtaatcccagctactcgggaggctgaggcagtagaatcgcttgaacccacgaggcagagattgcagtgagccgagatcgcaccactgcactccagcctgggcaatgagcgaaactctgtctcaaaaaaaaaaaaagaaatacgaaaaagcagcactttgctgctttttaagttattgccatggagccaggcatggtggtgcacacactagtctcagctactctgaaggctgaggcgggaggattgcttgagcctagaagtttgaggctgcagtatacagatcatgcctgtaaatagccaccacacttcaacctgggcaacatggcaagaccctgtctccaaaataaataaataagtaaaagttattgccacgggtagtttggagtaatgaacgttttatgctctgcaatgaaaaggagaaaatttcagtgtttagtaagcccttgtttgtatttattgttttttcgagacagagtttcactcttgttgcccaggctggaatgcagtggcgcaatcttggctcactgcaacctccacctcccgggttcaagagattctcctgcctcagcctcctgagtagctgggattacaggcatgcaccaccatgcccagctaattttttgtatttagtagagacagggtttcaccctattggttaggctggttttgaactcctgacctca

SEQ ID NO: 200605 - DNA, 1000 bp, Homo Sapiens
ggcagaaagcaaactacttgaacccaactgtgtgcctgctccccaagtcacacaggtatactggagccagcattcatactttgttcttagtgaacaggcactctggacatacttgctagtgacacttggttagaggtgctaattatccagaatcagctgcagttgctaccatggaagtaaccagctctgcccagtgggttctcctgtgccctacaggcccattaggggaatcagctgttggtgacctcgagtagtcaggtagtttatgggcaataatttacctagaacctgctttgtcctcagaactacctttaaggccaaaaatagttctcagtgcaaagcagcaaataatgcagtcaaaaaaaaaaaaaagagagagaaagattggattggtacttttatacagcactattttgtattttgcccatgtggaaattcagtgattaccataaaaggcctggacacggtaacagcttaagagtatcagttgacaatatggctgtccaaatgggggcagaagatgtgcttggggacatccatcaatcatccatgcctatgtttattcaacaaacatttaataagttcctactttgtgcaagacactgggctggtggctgagcatccaactgcaaataaggcatacctcacagcctggtgggcaagtcaagaaaataaacagataattttaatacaggtcatcatattaagaagggaacaggggataagggaattagagtaggagcttggaattcagggaagtactttaggagcaggcaatacctttggggaatctcaaatgacaggcaaatattagtgaggcaaaaagaaaggggaaggcaaaaggacattccaggcaaaaggaacagcttgagcaatgtgccccagaatgaagggagaggaagaggagaaaagcagcaagatgcttggagatggagaggatttaaagacaggtgagtgctcctgaagcacaaagttcaaggtagggagccatgaagctgca

SEQ ID NO: 200606 - DNA, 1000 bp, Homo Sapiens
tgatatcaaatcccaactcctaagcctgatgttttcaaatccccctttgctctggcctgaaactaccctctccagcttcctgctccaaaaggaaccttccacttatcatttatatttctttatctcaggcaaatacatcagttgagttagtgcactttctataaacatacactttctctctctctcacacacacacacacacacacacacacacacttccaactatacacagcacaagaagacgagattgactatctcttcttcaggtgtgaattttactcctctctcagggttttcctcttacaatcatgtcatggctctgagtggacgggagatgattgcttggcagtctagtctgaacctttaacgccatccttcaattaagtgttcttaaaacaagtcttaaggaaggaaaatttaaattacatggtgtgagggataataatgggtaagttctaatggagactaacatccaggccagagaagagggattattctgatcattacctaaaataggaagcctgagacatcagattagtgtgtccttgttcacaccaattcacacgtagtccagctttacaggtcacccccaagcctgtaaattctaccccatgtggttcagcaggctttgggggtgctttctatctctaaaatttttggttcgacttgttcagatgaaataatttccagtaagggatactttcaccagaatacacagtggttccattaccctggagccaaggctactatttggatatttttttatactttaagttttagggtacatgtgcacaacgtgcaggtttgttacatatgtatacatgtgccattttggtttgctgcacccgttaactcgtcatttaacattaggtatattttgttgtctcatgttactgaaccatcagggtagaaagtgattgatcccagtttactaggctgaagtgtggtttctgatatcaaaacagtggcaagaaagattgtgtttggaatgcaaagaatt

SEQ ID NO: 200607 - DNA, 1000 bp, Homo Sapiens
tgtagtaaccaacatacacatagtcaataacacagacaccttccttggtccctgggtttgtctgaaaatgggaggcttgggactgtgtgtcagggtgaccccaggaggaatgaagaagcctaatggtcctcaggatttgcaccaagccatttaaaggtattgaacaattctgagtatttaaaacgttagcactagcaaaggagacagaatagttcagtggaaagaactctaaattcagagtcagaaactgaagttctaatttcagctttgccactaataagctgagtaaccttgaagaacatcttttctctcaatatctatccttgtcttttcccttctctctctgctcactcactctttctcctttctcacttaattttaagttgaaaatagtagacttgatgattcccaatgtcctattttcagtggatctaagttatagatatgtgaagattccattgaatgtttgattcctatatggtggtttcacatatacatagtgatctcaggctgggttctagggagttttcactgaagtaactgtaaaaacagaaagtgtaggattttgcatcggaaactaggataatgaaagcaatatacattaataaatcaaccagtgaggatgtattcggcaagtaacacgtctaaaggagacttgagggaggcagcctgaaaaaggattagtttcaccagtggtggaaaagacactcaactgggaactggtacaggaaagagaatcaatatgaaagaagaattaatgtgaaacagaatgaaaacgactagaccctatgctgtctttccttcgtatccatgttctgagcaaaatcaaccttcaggataaatcgcatagagtcatgtggatagcagtggggaaatgacataatgtgtgaaattaatgaactgcttggtgaaatttttcaattcaatcatactgatttctcacattactagataacctttctgggaagtggttagtgtcatattttgttaaagaaaaaat

SEQ ID NO: 200608 - DNA, 1000 bp, Homo Sapiens
atctcaccctccacctggaaatggacttggggctattgcagggggcatggtgggagtgagaccagcctttgggtttgcacgggagctgggtgaggcctgtgactgccagctttcccccacttccctgacaacctgcatgactcagcagaggcagccacaatcctcctaggtacacaactccagtgacttgggactctcacgcccatcccccccagcagccgcagcaagacccacccaaggagagtctgagctcagacacacctagccctgcccccacctgatggtccttctctacccaccacagtagcggaagacaaagggcatagaatcttgggagttctagggccctgcccaccaccggtgcctctccatactaccacagcttatgctctctggaaagcgtcacttccaggaaggaggccaacaagcacaaaaatagagcattaaaccaccaaagctaagaacccccatggagtccaatgcaccaccccctcaacctccaccagaacaggggctggtattcaaggctgagagacccatagacagttcacatcacagaactctgtgcagacaacccccagtaccagcccagagccaggtagactcgctgggtggctagtcccagaagagagacaagaatcactgcagttcagctcacaggaagccacatacatagatgagtatactacatcaaggaagagtactacatcaaggaagagtactacatcaaggaagagtactatatcaaggaagagcactacatcaagggagggtactacatcaagggaccaccctgtgggacaacagaatctgaacaacagccttcagccctagaccttccctctgacagagcctacccaaatgagaaggaaccagaaaaccaactctggtaatatgacaaaacaaggctctgcaacacccccaaaaaatcacactagttcaccagcgatggatccaaaccaagaagaaatccctgatttacctgaaaaagaattccgcg

SEQ ID NO: 200609 - DNA, 1000 bp, Homo Sapiens
gacccaagtaatcatgaatggaagtgtctgaaagagtgaggcaacacactcagatattatgtcacatagacaggaagctgacacactggaggctgttttttttcccccacttatagaaacatctaaatgtaacaaaagttatttagaattgcaactctgggaacaggaactttctggacggttgttctataaagacatctttagtatctcacttacataaacataactgagaccagctgtctattatggacagatgaatgcttggtacttgggctgtgactgtaaacacacagtgggtttcaaaaatttagaacccaaaccctcattagggatttcttaaaagagcgactacatggtgaaataatatttttgatgtattgtgttaagtaaaatatgatgtcgattttgcccatttctttttaatttaagaaaatgtgtcctcaataaaatgtaaaactatatatgtaatttgtgactttctttatggttctggggattgccataggtagcaatgggcacacaacaatatgacaacacaactcatgaatctttagaaagagtcattgaatgacaggtgaatctgaatgaagcagggaaggtgtcagggagaggtccacctcagggctgtctcagagaacaaagaactactcaagaagaatataacatgtgtgttctgagtggggaaacaatccatagaataccaaggtttgaggtaggcatggaaaatgatagtttacatgatagatatgaggccaatttttgaagaatttatctgaaagtgtccttagtagtatagtattatgttaacatcacagagttccttctgtaatgtagaaagaatcagtgatatcaaagaggatgaaaaatgtgttccagccatctttgagaattgtggaatcaaggaaggaaaggaaacacaaaataaggagatcaggcgtacagatcatggctatatgcattgttttgtgtgtccacttacttgacacctgtcatagaattc

SEQ ID NO: 200610 - DNA, 1000 bp, Homo Sapiens
gtttagcctgcttggtttgttttcagtaaaatgggaaactccacttgtttaggtaaattctaccagatgagacaatggggattgcaattacttctttaaatcctgttctcggattccaaaagtcatagacccttcatgtttgaaaatctgtttgctttgtaagtacgtgtactttagagagagcttcaattccttcagcatcacccattccgctggcttggcactatgtgtggggatctaagattgactgaggatctagagtgtgctgagaaccacaccaggtgctttatgtccatcatctcatcacatcctccaataattttagggatggctactgtttccccattttcaaataaaggcaaggagtttcatcaaagttagaaaaaataggtaagttcttatatatggggagaggtggactaggatacaaactaaaatcatcctgacacccaaacccagatgccttccatcacactgggctgctgccatagttaactgcaggccactaggattctagctgagggcacaccaagtcagacatactgatcttctatttctcatgttgctcccttcttataggtcctctcctgtgcccacccctcctggggaagacagtctacttgacattactgcttggatcagctatcactggatttaaagctccagaacctgcctcctcaattctggtggacagatggaaacaaactctccactgagccgggatgtatttggctggctccaaacccaaagcccttctagtttccctgtgatcttcaggggccttgaattgcctcccctcttttccaacccagacctcttcatgaatcctaccctacgtatggccccacattacctgaggatatagaataaataaataaaatcctttttgatttgtttgtacacctgcaatatgccttcttgattcaatgagtgaagatgcccattagctcaaaaaagagcatttcctgatgtgtcccaggagctagacatccaagaattc

SEQ ID NO: 200611 - DNA, 1000 bp, Homo Sapiens
atgatccaaaaagcacccagagctgtttgggttcggctgtaaagccccaaccgttggaacagggtgcctgtgtctctcgcggagggcccccacaggcaaaacgggcccgcagggtggcgtgggcaggccacagtgactcagggtgacattgtcgcaggcagaaaggagaagtggcaggactgcaggaaatgctgggatcctcccaaggaggtctctgccatcccagatgcacccaaaactgtcccaggtgggctggaaagccccaggctttggaggagtgtgcctctgtctcttgcaaaaggcccccaaaagagaaaacaaggccgcagggtggcgtgggctggccacagggactcagggggacattgagtcaggcagaggggagaagcggcgacagagtggggtatggtgtgagcctcccaaaaaggcctctcctatcacagaagccccaggcctgtctcgaacatgttgtaatgctccaggcttaaaagcaggttgcctgtgtctctcgcggaagacccccaaaagaaacaacatggtggcagggtggcaaggagccttccaaggatgcctctcccatcccagaagcccccaggtgtgtcccggcctggttgtaacgccccaggctttggagtaggatgcctgtgtctttcgcaaaaggcccctacaaactaaaacaggcctgcaggatggcctgggcgggccacagggactcaggggaacattgagtcaggcggaggggagaagcgatgaaaccgcagggaattctgggagcctcccaaaaactctcgcattccagaagcccccaggactgtccctagcaggctgtaaatccccaggctttggaacagggtgcctgtgtctctcgaggaggaccaccaaaagagacaaaggggctgcaggatttcatgggcatgtggtgttaaactgaggaacggacagaccaatacggagtatggaaggatttgtttattttagtatgcaccgtttcagagaattc

SEQ ID NO: 200612 - DNA, 1000 bp, Homo Sapiens
tacccaggctggagtgcagtggcatgatcattggtcactgtagccttgaactcctgggcccaagcaatcctcctgcctcagcctcctgagtagctgggactaggtactatagatttgcaccaccactatgcccattttttgttttgttttgtagaggcagggtctcactttgttggccaggctggcaaattcctagtcttgaactaggccactttcccatgacaactccatcatggctatttgtggttggctgtttagagtatccatgaaacagtaatcatgtaaccatgaaaaatgagaagatagcttataacttactatttttacttagtactttttaccttgaaaataatgaacctgatatttcttttgtcttttatggggttttttgtttttcagttgtttaaaccttttatttgaatatgatttttaaacttagaaaacgtcgcaaagattaatatagtacaaagaaaacctatatttctttacccagattcatctgttaacattttaccccacttgcaatatctttttatgtgtatgtatctaagatataaatatacacaaatgtgtgcacacttttttcccccagaaccgtatgatgataagttacatcttagcccattacctttcaacatttccatgttcattttgaagacttcagtgtttaaatctgggaaacattaaaaaacttttttaaaaatgcacactgccattttaaaggctttcacaagtactgcagaaaagaatttatttatttagcagtcttacttaaccattaataaacccccgttccttttttcctttgaggaatgccagttgggatcatgctacccctgtgttgttgccttgggagagtgcggattaccagagtgtttttatgccttttgttagtggggctcattactcttctggcatcatacaagcatttatttttagatgattctttttggatgttagtaattggctgtgaagtgctagtttgctcttcagagaattc

SEQ ID NO: 200613 - DNA, 1000 bp, Homo Sapiens
ctcggcctcccaaagtgctgggattacaggcgtgagcccctgcacctggccaagatttttcttaaagcgctgcaggttgccccaaaatgaacttgggtctccagaaggtaaggggttaattgttcctccttgcagctcccaatctgggctgatccctgggagggacctgcattgaggcactgcagccttagtgctcctaacttaggatacatttggggacccttgggcaaaaggacacacctgtcttgaaaattccttaagctgctttagtgattggggaaaactttatggattttattaacttttagtgcaatgaataaatgttaggcacaacaaagagccctaaactagctggggaaagtttttctcaggccacttttccagttttgttttgatttttttcttgaaaaaaaaatgtattctagaccccttccttttctcctttggacttggtgttgctaaatggaactcaggccagagcaactgttgcaaatgcctgctgcggttgcctctacaacacaggcctgtaaagactagagtaagaagaggtttgaagtgagtagttccctcccagatgctgccagtgcagaggcaaggggagggtggttccggccaggggctgctcccattgctcctgtgggtgaggaggggacaggcgtgggaagagcctcgaactccagagccagcagcccctgcagatggctgggtcattttgtggtttacaaatgaccaagtcaggttgaagccacagtcactgtggttacaggcacccgtgattagtcacactgttagtgacccagttacggcacaccctcttttaaaaaggacattattcaacatcttgctagcttgatttcagaaattgtccctgtatataaggaaaatgaaaactgcaagggttgggggattgaaatctagggtgtgtatttaggactgccaggagtttggtctgctgaaaaggagcacaggtggggtgtgacttttgtggcaagtagaattc

SEQ ID NO: 200614 - DNA, 1000 bp, Homo Sapiens
aaaatatgtctgggcatggtgacccatgcctgcaggtctagcactttgggaggaggtggtgggtggattgtttgcttgcggccagaagttaccagcctggtcaatatagcaacgctttgtctcaaaaaaaaaaaaaaaaaaaaaaagagtctggaaaatagccatgtcctttgacctatttattccacttctagaaatacagcctaataatacagtctttggaggcatttttggcaggatatttaatacagtaaaatgcttatgatagatagagaaaaatgtaaaaatatacatcttgggctgagcgtggtggctcacgcctgtcatcccagaactttgggaggccaaggcaggaggattgcttgagcccgggagttcgagaccagcctggccaacatggtgaaacccggcctctaagacaaagacatacaaaaatcagccgggcgtggtggcacgcacctgtagtcccaactatttgggaggctggggtgggaggatcacttgaggtgggaggaggtggaggttgcagtgagccaagatgatgccactgcactccaccctgaacaacagaggaagaccctgtctgaaaaagaaaagaaaagaatatacatcttgcagttcaagttgttactgctaaggtttgagattggagtgggacataaaaaacatttttatgaacaggtattacttttttaaattttaaaaagtgcttaagattcattttctagtgaaaaaacaggatacataactatattcagaataatttcaaagttgtgtacatagagaaaggattgaaagcaaatacactattaacaatttcatacgtggataatttttatcttctctctttttctgtcatttacagattttccacaatgagtttgtcttttataataaaaagttaatttaaaaggacaagcaattcaggctgggcgcagtggcacacacctgtaatcccagaactttgggaggctgaggtgggtggatcacctgtggtgaa

SEQ ID NO: 200615 - DNA, 1000 bp, Homo Sapiens
actcttttggtttgaaattcattctttttgggaaaatgtataacatattcatagaatctttcattcttagagtgtatacataacaaattaactattttgaaattgatctaaattgattactgatatatgattgaattatctaatcaaatggtaatttgtacactcttagaaaaaaagtctcatttgttttttgtaagttgtcatttggggttcaaccagggaagaaaaatcggcaggaaagataagatattttatatacacacacgtacacacatacatatacatatatataaatttggggtagacataattcagcccatagcatcatgcttctgacttaacactttaaagagtgtatgtcagatccagttactcaaattctacatttatttgagtgactaggaatgtcaaacagtttcaaatcatttgtcattacactcaataaaaccaaaggtaagaaaagattttctcttcatcaatagagaggcagcatccttcccctcaataatccacactcaagggaggaaaaaactttcttgggcagctcttcctactcacttatcacctttccaatgaggcctgccatgaccacatatgccttatctcaccttctgccacaaccaatgtttaactttgatctatgtttttatagtacctatcatagaacttctatatatatatgtttattttttattttttcctattggaatctaagctccatgaggacaaggattgttgtctggcacttagtaatgctcaataatgtaatatatccttattccactaaaaaagcttcaatttacttatttccattttttatattattatgtagatcagatcatagcccttaaaaatggaaaactaagggaaattgagacatgaactttccaggatatgaggaaagaatctaaaaaacaacatctctgtgtaattcttttatcaaacaattagagaaataaattcaaagtcccttagaagagaatttatactgaatgaattc

SEQ ID NO: 200616 - DNA, 1000 bp, Homo Sapiens
ttccagataataaaatatcagttggaaatgtccatttgataggattggcttctgtgagatctgctcagctgcttgcgtgtatttttatgtttatgaaaatacagccaatcttgggcaaaagaaataaatcaggtttgaacttttatcataacctgttgattaactactagcaatctgtcatgttctgggtcacattactacagaaaatggagcgtcacctcccggagtgcccctgagaaccttaagttcatgggaatgaacagtagaagggacctctgaaccctttcccacagccaaatgacagctgtgattctttggcctcagcttgccttcttaagctgattcggcatgaaatttattatgcttcctccacagcatcccatgtcggctagggacatttattattctgaccaattattgaaggatatatgtttttcctatcattcagtttgatcaaaattctagcctctaaaaaggaacaaaccacagctcaggaatgaggtaggagtgtactctgacatgctgccaaagtttgttccctgcctctggagtgcaaacttaagtacactttaatcctgctttaaaaagccatgttgaggcttcattttaccagcaagtttctcagatcggaataatgggggagacaaagacatcaaaaagacagatgaagagctcaaactttttagaaaaatgctgagcttcaatcttttcaagtttcttctacttttaagcagtgagaccttgagtaaatttcctgaccttgagtaaatttcctaaccttgagcctcagtgttctcatttgcaaaatggaaataataattgctcccagtattgttgtgaaattcaaatgagataatgagtgttaaacatctgatgcagacagaattcaatgaatattagttcttatgagtaggtttattgaactttgaagtcacatgtactgtttggtctttgttggagtttttgaattatttgctcatatcttgaatacttgaagctt

SEQ ID NO: 200617 - DNA, 1000 bp, Homo Sapiens
gaatgtcatacagttagaatcatacaatatgtagccttttcagaccgccttcttggcatgtaagtttcctttgtgcctttttgtggtttcatagctcatttctttttagtgctgagtaatattccattgtatgagaatactggatatatcagtttggttatccatctaccttttgaaagacacacttgttgcttccagtttttggcatttatgaataaacattaatgtgcaggtttgtatggacataaaatttcaacttatttgggtgagaacctagaagcacaattcatggatcataaaagactatgttttgctttgtaagaagctgccaaactgtcttctaaggttgctgtaccattttgcattcccaccagcactgaatgagagttcctgtttctccacatcctcgctagcatttggtattgtcagatttttggattttagccattctaataggtgtgtagtggtatattactatttttaatgtgcaatttcttaatgatttatgacgttgagcatcttttcacatgcttatatgccatcttgtatctttggtgagacatctgttcaggacctctatccatttttgaattggattttctcattgaattttaatgcttttttggggtatattttaatgtagttcctttatcagatgtgttttgcaaatattttcttccagtttgtagagcaaaagctttttcacagagcaaaagtttttaatttaatgaagtcaaacttaccagttctttcatggctcgtgcttgtggtgttatatcaaatctatgtcaaaccctagattacctagcttttatcctatgttatattctggaaattttgtagttttgtgttttatatttatgtctatgatcatctcctttacttttgaaggataattttgccaaatacagaattctaggttggtgattattttctttcaacaccgtaaatatttcccttctcttcttacttgcattgtttgtgaagtctaatggaattc

SEQ ID NO: 200618 - DNA, 1000 bp, Homo Sapiens
catgcctgtaatttcagcacttttggaggcctaggcgggcagaccacgaggtagggagtttgagaccagcctggccaacatgagaaaccctgtctctattaaaaatacaaaagttagctgggcgttgtggcgtgtgactgtaatcccagctactcaagaggctgaggaagaagaatcgcttgaacccaggagacggaggttgcagtgagccaagatcgcgccactgtactccagcctgggcaacggagtaagactccgtctcaaaaaaaaaaaaaaaagatagaagttgcatctggggctgcagagtacacatattgacttatcaactctcaccaggaagaacaagtgagctcttgacggtgagaaattaaaactggcatataatctccctacaaagagaaaggttaccttaggatcagctgtgagcaatttgaatgcttgatatacttgagcttcctttacaccacctccaagatccaagaagttggctggcttcccaccattaaggaaaatgatatcacaagtagccatggcgagcccagcaccattcactgtgaaatgcaaatgggacacaagacaggctacatttagcaacatgaaatggtccataaacattttccctcccccatattgccaagagagaactctgtcattgccaggccaatttatatcctgtttggaattccattaaaccagattagttcatagacttttaggataaagaatcaggacatgtatatgcaaacaatgaaacaaaaaagacttaggaatgaggaacaggatgtattgggaagttaaatcaatctgaaaaacagaaagaaggaaaggtttaagtaagtaaccgatttgggccagtagtaaaaaaggaagttttaggttctgcaaagtgtaagcttaagagaatcaggaggcagagaaacaagctattggaagttgctaggacctatgaattacattctttttaatatactttaagagacaggagtaaagaatggaattc

SEQ ID NO: 200619 - DNA, 1000 bp, Homo Sapiens
tcaacacttaggaaagtacttggcatccccctttcccgcccccactgccggtttaaaaaaaaaaaaaaaaaagaatacactcctgacttctgcttccagccaccaccacagtcactgtgtaatacttaaaaaaacaaaacaaaacaaaacttaggtttgcctaaagtaaaacgcacagattttcagcgtacacttcatgagtttcggcaaatgtattcacccgtggaaccgccaccccagtgagggtacagcacgtttccaacaccccaggaagtcccaggacacttcccaattatctgctcttccctaggcaattctaatttgatttctagcatggtaacatagttttccctgttcctgaacttcatacagtctgtgcttctttggagtctggtttcttttagcataacgtttggggtccatccagcgctgttggtgtctcagaagtccattcctttttattgctttccattctgtggaatcactaccatttgtcgatccattcacttgttggtagatatttgggttgtttcctattttttataattatgaataaagctgctacaacggttagtgcacaagtttttgtgtggatatattttcttctctcatgggtaaataaataccaaggactggcattactaggtcttgtaagttgtatgtttaactttagaagaacctgccaaattgtttaccaaagtgactggatcatattaaatccccaccagcaatgcttgagagttccagttgctccacaatatttgatatggtcagggttattagttttagccattctggtgggggtaaagttgtctaatacattccaaaagcacactgtgtttatcttcttgacaattattcccaatcacaacaaaatgattatttatgtaatatctttctcttctaatacacagaaagctccaggaacctttgtgttttcctagggtggtgcctagcaaataatgggtggccaatttaagttaaatgagtgaatgaattc

SEQ ID NO: 200620 - DNA, 1000 bp, Homo Sapiens
gacagaaccaacagtacagggtggcatctgagaccgggtctgtctgattcccacgcccctgactcaagcaacctgacgccgatgtccggggctgccctgagggtgcaggcatgccccttgagccggcagtccgcgcacgccttcggggcagcctggactggcggatcagacgacgtcaggatctgggctcgagggccgggagatgagggaagaggtgctggcgggggcttaccggctctcggggtacggcgctcctgcacagcgcggccaggcttagcagcacgagcgacatcgccgggccactgcgcgggatccaggccacccgcacgctgcgcttttatcccggcgccgccgggccgccccttctcggctccgcctctcgcagcgccgacccattcccgccacccgaacagagggcgggcccgctggccccctcccaggctggggcaggtcgcagcgccctcgcctgctggggctcggagggatgggccgtgtccgagcgctggcggagcacgggccgccgcggcgcgcgcctacccccgcgcacacgtgcatgcagtgagccaggtgcatcagctgcacccgccctcgggcttcgcgcgcctccgctggagcccagctagcctcgcggctccggggccgaccgggtcggaactgctgcgtccccattccggacgcagagagcgcgcggggcgccggcgccgccggttaaagtgccgcggggcaggggccgggccgcggccacccgctcctcccgctccggtcccgactgtcgggctctcggccgagtcgccccgggtgagtagccgcggaggcgccccgaccaccccgcagcagcgccgcccggccgctagcccggagaggcctgggggccggaggtttggggccgggctggacgccgagacccgggcccgctttacacaatcgccccgccgcgcgaagcgaaacgggtggaacgcagactgccgaagctcactgactcctttgagggagcgaattc

SEQ ID NO: 200621 - DNA, 1000 bp, Homo Sapiens
atgtggctgtactcctagctacccagggagctaagatgagaggataacctgagcctgggaggttgagactgcagtaagctatgatcacaatgtcagttttgtaaaatataaatgacctcaaactctccagttaaaagtcaatctattggctgggcgcagtggctcatgcctgtaatcccagcactttgagaggctgaggtgggtggatcacctcaggtgaggagttcaagaccagcctggccaacatgatgaaccccatctttactaaaaatacaaaaattagccaggcatggtggtgcgtgcctgtaatcgcagctacttggcagaccaaggcaagagacttgattgaacccaggaggtggaagttgcagtgagccaagattgcaccactgcactccagcctgggtgacagggtgagactcagtctcaaaacaaacaaacaaacaaacaaaaatctatcatcacattaaaaaatttcaaatttccaggccaggtgtggctcatacctataatcccagcactttaggaggccaaggcaggtcagtcactagagcttaggagttcaagacaagcctgggaacatggtaaaacctcatctctactaaaaaaagaattagctaggagtgggggtgcacacttctagtcccagctactcagggggctgaggtgggatgattgcttgagtctgggaggcagaggttgcagtaatccgagattacaccagtgcacaccagcctgggtgacacagtgagaccatgtctccaaaaaaaaaaaaaaaaaagaagaagaaaaagagaaagtccaaatttcctgttagaatgtacaaagtactatataagatgacatattgtgtggagaacagtgagaaagtgtagccataacacaggttttaaaaaaaaaaaaaaaaaaaaggaggagagctggaatgcataagtagttgagaagaaagaaaaagagaccacaaaaaaacagagataatttggaaataaaagcagaattc

SEQ ID NO: 200622 - DNA, 1000 bp, Homo Sapiens
ctgtctcactatagccaacatcagcctagctagtgggcttctgatttttgctttgaaaaaatccctgctgggcactggcaaggagacagtgtcatggaaatgtaattaattggacgacatagttttctcatcaggaagaatatagaaggttgtttatttaaatatagagtcataaggaataatgccacagaaaattacaaccctacatccatgaagatgttcattccattgcttattatctagaatagcaaagacctgagcaatctatttcgtaagagaagaatgactaagcaaatgatggcacagagatttgatgcactattgcacagtcattgaaaagaattatagaggttgtctagcaatgtggaaaaataaatgtttggtgaaaaaatagaacacatgttgatctctgttgtagatactactctgtaaaatgtgcctacatatgtgcatgcaggaagcagagaaaatgaaagagtcaatggtgagggtggtgtgatgatgtccctggatctgtttgttactttctgtttttattttctatccctaatgtaattataggcagtgtttcaaaggaagatcacctggatcagctttctgaggacctgccttagagtatgttttaactttttattcccactctgcatttgtctctgtccaaggatgtttggctccttgtgaaaatggatgtttgttctgcagaaagggcatttttttcttgcgctggggagggagcagagttccaatggagacatgctgcatggaggccctgaccattttaaaaccacaaattaaactgcggctactttgggaaggatttgtgctttgaagtcagtgcttcaaagcatgagtctttctatcattttaaaatcttttttttttttttttgagacttggtcttgctctgttgctcatgctggagtgcagtggtgcgatcttggctcactgcagccgccacctcccaggctcaagtgatcttcctacctcagcctcccaaaca

SEQ ID NO: 200623 - DNA, 1000 bp, Homo Sapiens
gtgacccaaaagccagaggggctgagggcctaccttgaaagtcctgccattagaaattcccagggaagcagggcaggagggagaacacatcagcagaatttgagctcacggtataaaattacaatccacatgtgaaagggagtgtgagctgacactcctcaagaaattcagaagctggctgggcagtggctcacgcctgtaatcccagcacttagggaggccgacgcaagcagatctcaaggtcaggagtttgagaacagcctggccaacatggcgaaaccccgtctctactaaaaatacaaaaaaattagctgggcatggtggcacgcacctgtagtcccggctactcggaggctgaggcaagagaatcgcttgaacccaggaagtggaggttacagtgagtcaagaccgtaccactgcactccaacctgggcgacagagagagactccatctcgagaaaaagaaaagaaattcagaaggtggaatcactcaaaaaagacttcaaataattatactaagaagatctaggtggggcgcggtggctcacacctataatcccagccactcaggaggctgaggcaggagaattgcttgaacccaggaagcagaggttgcggtgagctgagatcctgccactgcactccagcctgggcagcaagagcgaaactctgtctcaaaaaaataaatacataaaagatctaaagtgataaaggaaaggtaacagcatcatgaaagaataggacactataaaaaagacagcagtggaaaagaatcagatataacttctaaaagtattgaatataattgcgaaaattaaaaactcagtagaagattaaatggagatcagacgtagtttaagaaaaatctggtgaactgagaaaccgatgacaggaaattctctagaacagagaacacagagatggagaccaaaaacgcaaaaagatgacacaaaacatggaggaaaaaatagtaagatccacatatatcaactaggaattc

SEQ ID NO: 200624 - DNA, 1000 bp, Homo Sapiens
gatattcacacctcaagaggaagaaatgaagtaccaaatgaaatgtggggagcggaagggtggagaatgacaagtgtcagccatcatttctccccaggctatgaagacaggcttaagcaactaaatgcaaattaattactttattcatatatcaaaaaaaaaaataggacatttacacacacaagcaagactcaaagacataaagacttctacagttggaagattatagacttatctctaaatatccacatctggtcaacccccatccccaaaaaaaccttttctaaaaatggatcagtgctagagtgatgtgggagaggagaagagagtgtgatggtgaagtgtccatcaagttttaaatacatatttctatatttatataagtaacatgacaagttgacaaagtcctttccaacaggcagacagatttgtcagaggtgtttgaaccacagtgactccatcttgagtaggggctgggtaaaataaggcagagacctactaggaggctgcattcccggaaggttagttgtgtttagtcatagggcgagataggagatcagcaggatacatgtcacaaagaccttgctgataaaacagcatgcggtaaagatgccagccaaatcccaccaaaaccaagatggcaacaaaggtgacctctagtcatcctcactgctcaattatatgctaattgtattgcattagcatgctaaaagacacttccaccaatgccatgacagtttacagatgccatggcaatgccaagacgttatcttatatggcctaaaaaggggaagaatcctcagttccaggaattgcccacccatttcctggaaaactcatgaataatccaccctttgtttaacacataatcaagaaataaccataaaaataggcaatcaacagtcctcggggctgccctgcctttggaaagccattctttattcctttactttcctaataaacttgctttgactttattctatggagtcgccctgaattc

SEQ ID NO: 200625 - DNA, 1000 bp, Homo Sapiens
accctcagtttggtctaggaacaacagtacatgtttataatcccagctattcaagaggctaaggcaggaggattgtttgagcccagaagtttgacaccagctttggtaacatagtgagaccctgtctcttaaacaaacataaacatagatatgtgtgtgtgcgtgtgtgtgtgcaggtgtgtgtgtgtgtgtgtgcgtataattaaaaagataaaaatataaaagagacaggaataatacaaggtggtcacaggagaataaaaatttcaggcaggctgggcatggtggctgacacctgtaatcccagcactttgggagtccaaggcagacggatcacagggtcaggggttcaagaccagcctggccaagatggtgaaaccctgtctctactaaaaaaaaaaatacaaaaatacaaaaattagccgggtgtggtggtggaagcctgtaatcccagctactcgggaggctgaggcagggaattgcttgaacctgggaggcagaggttgcagtgagccaagattgcgccactgcactccagcctgagtgacagagggagactccgtctcaaaaaaaaaaaaaaaaaaattccaggcagcattttcacatgactaggggctgtgggctgataagaccctaaaaaacagggtgtgggccaaactggctaagacagactgggcccaacatggtgctgggttcaacctaggtttcacctaggacctcattacatgctcattaacatgctaaacacacacccaccagcgctgggacagttctgagaacacccgtatttcgtatacaaatgtgtagcgccacatttctgagaaatctccacctttttttgaaattttcatgaatattgcaccccttggttaaagaaatccgtaaaggtagcagtccccaacttggttactcaagactccgtgtgaatacgcctgtattccccttgcttgagcaggtacatctccttagtttcactattttctgactcatcctagaattc

SEQ ID NO: 200626 - DNA, 1000 bp, Homo Sapiens
gaggaaactgtcatttctggaggcaagttgccttggtagagggaaaaaaaaagaatgttcttcatgcaaataaggcccactaaggcttcctcaagtcaaatgattcagtcaaatcattctcaaacctaatgatttttcacatctaattcaaggagaaattagttattagatattaagacaaaagcaggcagacttctatcttgacaaggaatccttcccgctgaagtggaattatctccagaataattaaattgcttgctgaagtataaaagcattccattaaccggagttgcctttgttgaacagtgccttcctcatccccaaacaaatcatgatgactctgaacaaggacagggagataccaggacctaaatagataatgtgataaaactgaaatcatcatcagtgtcatttctgagccaaagagcaaagttgctaatcagcaaatgctggaggtatcagcctcagcccggcagcagttttacttgtgaccaagcgtggctgtgatgctttattctccaggagtcctagactctgaagattctgcaccctaatgaaaaaaatgaaggctacagtgaaagcacggcagaggatcgttttcctggaatgtccccagcctgcctatttgacattggcaatgtttccagaatttagatatctttattccaaaagagcactgtgattgagaaatggcgttattacttgccaaaacacataaaccaccgggacattcaaatgtattcattacaaggaggcgctgttataacccgacgtgatccatactgttcttactacattgtgaaacttgttgttgtgtggcatggccgacaggtctcctgccacaggtacactacaccatcagaacgtgccacacagtatagcaaatcagatttcactcattcatagtgatttatgaggatagacttgtaacatccaaggggcttctgtacatgaagataaatgcttacctcattgtcctctgtttatgcccaatgaattc

SEQ ID NO: 200627 - DNA, 1000 bp, Homo Sapiens
ggaattgaagaagctgcacacttatggaaagttttggtaatgaggctgggatgctgagagatgactttctggcccctttgtaggcctggtaagaggacctgtgaattctcttggccaagtggtgagcaaggtggggatgagtgtcctgcactgtcctgtctgcgaatgtagcgacgagtgggtgagacaggattgaaacaagcagcctgagtactttgcttgttcatgtttctcctgctaggaaaaaggggtaaggggtccccagagctgacactgagccttgaatgaatccaaagcactagaagttgatatggttgatctgtgagtggcaagaggctgctagaaactaaaggaaaatgtgctttgttagtggctttcttaccagcatggaggtgcccattccctctgcactccgtaatcacccatccaccagtatccaacttcagcatcttgaaagattaagccaagtatgaatgggtatttgagagaggagagtaactctttggagataggtgttcagttaaccatcctgtgtagtcccctggagcacacggggagctctgggtgcagggtaggtggaagccccagaggactgtagggtctagagtggtggcaaatgggcagaaaggagtaaattccggatcctgggtgctctccaaatgctgggatgcccacaggggagaaggtagcacaacccttagagaaaaatcccatcacccaaaccctctcctcaccctagccccttctggccccttgtgcctccacacccttgcacaggggatggtgcaatcttaagtcagcccctgactcagacaggtgtgaatcaccatggtctgtgcttactgagctaatgctaagcgtgcttcatggctctctatagtaaatcaaaaatttgtttgggtgacatatgaccaatgagagttctgtaaatatgggtattaatgaacactatgtgacaatgaagccttttgtattatagaagcacatattcaatgaattc

SEQ ID NO: 200628 - DNA, 1000 bp, Homo Sapiens
tacgagcacagaagacttggctctttagcttgatcaactgtgtctcttggactcctcactactaagtacaattaaactaagtatagtttccaaatgagacgataagggcaattactatgtgttgaatgaatattacagcagcaattagagctctgacttctgtcctgccaccagctagctctctccacctctgtttttcatttatgaaatgtatgtgttggacagcagaggtagggaggagaggaaaggaggtcaaagccaagatctttttccagctcttaaatcccaaaatttcttataaatggttaatgtaaacaaaaatgagacacacctattaaaatggccaaactccaaaactctgacaactccagatgctggtgaggatgtggaacaatgggaactttgtttttctggttttttttttcttttttgagacaaggtcttgctctgtcacctaggctagagggcagtggtgcaatcttggctcactgcaacctctgcctccagggttcaagtgattctcatgcctcagcctcctgagtaattgggattacaggcataagccaccatgcccagctaatttttgtatttttagtagagacggggtttcactattttgcccaggctcatctcaaactcctggcctcaagtgatctgcctgcctcggcctcccaaagtgctgggattacaggcgtgagctaccacgcccagcagcagtgggaactttgattcattcctagtgggaatgcaaaccagtatagctactgtggatgacagtttggtagtttattacaaaactaaaatataacacaatatataatacttgatattttgataattatatacagtatataatattttataataaatgtgttactggtttgtgtatttactatattttttatcatgttagcatgtagtccttctacttactaaaaaaattaactataaaacagcctctcgggaggctgaggcagaagaattgcttgaacccaggagg

SEQ ID NO: 200629 - DNA, 1000 bp, Homo Sapiens
aataatttgttaataacttgtctatttaaggtgaaatagacgtatgggaaagagctgtaatagaagtcagggtcttattttagctgtcctgttgtttcaaagaatgtatctttcccttatatcttttcctctcagtttcaagagactacatggcttttaaaggtattatttagaatattttaagtgctgcaagtttctatgaaaaaccaggtattaataattttttttctttttgagacagagtcttgctctattgcccaggctagagtgcctgcttcggcctcccaaagtgctgggattacaggtgtgagccaccgtgcctggcccaggtactaatttttaataatgggctgagatttaatctaaagcccagcaaaagctgctttaatcattatatgatattctatccaagcttcccacataccctacttttttgtccccacttagttcctcctctcttcctttgtttttcactgaatcattaggtaaaataaaaaggttattggaagcatgtatctaatactgtaatatcacagaagagagatattagttgatattaattgaatcctgcctttaagttcttccttctccttttctctcccattcttcctcttgtatttattcatctatcagtgcatcagatgtttattgaagaccaaatatatgtaaggcaatttgttggttactgagtatatggaaagatgcataagatagaataccttttctcagaacctttgcattttgtttaaacctttgttttgatagcgtaacttgatgaagtcactgtgtttacggtatacaaagctcaaaaagtcaccataagtgtagagccagactgagattcctaagttttttcttttgacctcatttgggagctttctgaattaattatgtacctttatggaaatctgagaaatagagtagtgtaactgtttcataatggcgcagtagaaggatagacaagagtctctctggagtggatagacctaggtgtgaattc

SEQ ID NO: 200630 - DNA, 1000 bp, Homo Sapiens
aatggtaaagggatcaattcaacaagagctaactatcctcaatatatgtgcacccaatacaggagcacccagattcataaagcaagtccttagagacctacaaagagacttagactcccacacaataataatgggagacttcaacaccccactgtcaacattagacagatcaatgagacataaagttaacaaggatatccaagatttgaactcagctctgcatcaagccaacctaatagacatctatagaacattccaccccaaatcaacagaatatacattcttcccagcaccacatcgcacttatttgaaaattgaccacatagttggaagtaaagctctcctcagcaaatgtaaaagaacagaaattataacaaactctctctcagaccacagtgcaatcaaactagaactcaggattaagaaactcattcaaaactgctcaactacatggaaactgaacaacctgctcctgaatgactactgtgtacataacgaaatgaaggcagaaataaagatgttctttgaaaccaatgagaacaaagacacaacataccagaatctctgggacacatttaaagcagtgtgtagagggaatttatagcactaaatgcccacaagagaaagaaggaaagatctaaaattgacactctaacatcacaattaaaagaactagagacgcagaagcaaacatattcaaaagctagcagaaggcaagaaataactaagatcagagcagaactgaaggagatagagacacaaaaaacccttcaaaaaaatcaatgaatccaggagctggtttttttaaaagatcaacaaaattgatagaccactagcaagactaataaagaagaaaagagagaagaatcaaatagacgcaataaaaaataataaaggggatatcaccaccgatcccacagaaatacaaactaccatcagagaatactataaacacttctatgcaaataaactagaaaatctagaagaaatggatgaattc

SEQ ID NO: 200631 - DNA, 1000 bp, Homo Sapiens
agatactgtcatttttacaaattgaaggtttgtggcaactctgtgtcgagcaagtctatcagtgtcatttttccaaaagcatgtgctcacttcctgtctgttcacattttggtaattctcgcaatatttcacattttttcattattattatctctattatgacgatctgtgatgagtgagctctgatgttactcctgtaattgttatagggtgccacgagcccatataagacagcaaacttaatcaataagtgttgaatgtgatctgactgctccacagactggcctttcccctgtctcttcccctctcctcaggcctccctattctctgagacacaacgatattgatattaggccaattaatatccctacaatggcctctaagtgttcacgtgaaagcaggagttgcgtgtctctcactttaaatcaaaagctagaaatgatgaagcttagtgaggaaggcatggagaaaacctactgggtcaaaaggaaggcctcctacaccagacggttagccaagttgtgaatgcaaagaaaaagttcttgaaagataaaagtgctactccaatgaacacgaatgatgagaaagcaaaacagcctatgctgagataaactttgagtggtctgggtagaagatcaaaccagctataacactcccttatgccaaagcctgatccagggcaaggccctaaatctcttcaattctgtgaaggctgagagaggtgaggaagctgaggaagaaaggctggaagctagcagaggttggttcatgatgttcaagaaaagatgccatctccataacgtgaaagtgcaaggtgcagcagcaagtgctgacggagaagctgcagtgagtaatcctgaagacctagctaagatcattgatgaaagtggctgcactaaacaatggattttcaatgtagatgaaacagctttctgttggtagaaaatgccatctaggactctcataactacagagaagtcaatgcctggcttcaaagctt

SEQ ID NO: 200632 - DNA, 1000 bp, Homo Sapiens
agtaacatgctttgtacattccttggaaatatttttttaaatgcagaaagtttaatggtcttttttttttttttgtaggttgcatcatccgtacatcaaacctacattttgtaggttgcatcatccctacatcaaaatagccatattccctgtgttcatttgaggttattcattaacctaagagtcaaagagaactcagggcacccagaggtaatagaacatcctgcaagggaaatagcccctgtaagcctgaaccgtgacttggagcaaatcagaaaaaggcactcctaccttcagacactttccaaccatacggttgtaatcattaatctgtaataacacaagtcacaacatgtagaattaaaaaatggtgaccacgggggagatagacatgacaatccttaccctgtctcacaactgggcctagaactgaccatatatgtcaatgtgtactttgtctctcagatggagtgtgaatggtaaccagtatagtttgctagtccataaatatctgggatgaatcagatgcttttcaatttcaaaagccaataaaacaataggattctagattttgatactgcatttccattgtgagcagagataaaccagagacctctgctggaaacacagctgagactgattcacgtgaggcccacactaaatgcagatgcatctggaggaaagggctgtccctcaataggtgatttaattgaagcccagatgttgttgctcagaagtattttctgattactgacaatgtgccagggactgtgctgggtacagaactgagaacttgccctaacagtgggaatgaccatattgaactcactttatttactttcttttctttttgcccctttcatctcagtccaacccctttatttagaaaacattttttagctttgtccaaagctctatctctgagacagtatcaggttgacagatccctatttggcttgtgctgagcccattcactttaaattactcaagatacagaggc

SEQ ID NO: 200633 - DNA, 1000 bp, Homo Sapiens
tgtagaagtgtagggaaatagagtataaaaattttgcaattgctagctcccatctcttctcccgtcctagactctgtcctttttggagtggtcatcacagaaccatttgcctttgtatatacagatgggggaagagatggaacaggtgatgctcctacaggctttctgtctttgattcctcccacagagatctaacacattatggggtcctctggatacatcagcagatatttcttggaatcattgtttcataggtatctgactccaactccaatttttgccttttacaccaaattaatattgtcaataaatcagcattttagatttagagtaaacctgaagcttttagaaactctcaataccagaataaattacatatattatgtgtgtgcttaagtatttttattttactattgcacacacatatatcctatcctggctaaacactgtttttataataatttactatgtgttcccactaagtagtagtaaaggtaattttagagcatttaggttaatttatcagatttaataatgccaaacaaatatggctcttttaagtaatgagaccagagtaggaaagaagcatcaggacaaatctgaaaccacagaataattagatttaggctttcaaaagcacttggctccatatcctccatcccacccacaaggaaataaaaggacaaggcatttaaaaatgaattattctctgaagactttccctactgtgtctgtttagtcttcacagttttcaatattgacagtgagtttcttttcaccaccaatatggcaagttcctttgagataaagagagatttcacctttcattgccttgtgttatttcccctctactgaactatgtaaagaaaggtaaatggtaaaatggcagtgcaagaaatggagagctttggactattcactcctgcacaagaagattgttttcttttttatggtgtcagttgatatttggaaaaaaaaaatctgctttagcaaagaattc

SEQ ID NO: 200634 - DNA, 1000 bp, Homo Sapiens
gacagggtctcactctgtcgcccaggctggagtgcagtggcatgatcttggctcattgcagcctaaacctcctgggctcaagtcatcctcccacctcactctccaggtaagactacaggtgagtgccaccatgtgtagctaattttctttgtattttttgtagaggttgggttttgccatgttggccaggctagtcttgatctcctaggctcaagtgatccacctgcctcggcctcccgaagtgctgggattacaggcgtgaactaccacacccggccatatctatcattaacttatgcattccttactgaatgcaaagggggcataaagtcactgattacattaagttcagtagcctctgacaaaataaatttaaatccttctatactaatgctaatagagctcagccatctttcttttctctaataggtgttctgtaccaagagataataactctcagcccattttactcccaacacataaattcagcagggaaaggattcgctcatattcctaccaaatctatcctatagagatcaagggcttctgagaagtaaagaaatagttggcatgccctattcagtttggtaacaaaaatgctatttccttgccttaagagtatatgaaaagtttttttaaaaaatcaggagagatgttttctgactcttcattcctgttacccacaattctggcagctggcattccaaaaacattttcctattgtcaggtgtcatcacctgaagccctcttcaagcatagaacattctaacatcaattaggaaagacttcatgtatttcctggaaatgacaacagggaagttagaaatttttgaatgttcctttaacttattcttctaaatattctaataagtcaactttaaaggacaggttttaaagaaagggcttttctttctttccaggaaaggagagtactggctatctggaccttgtgaaaagatttttagtacactacttagcttcttgatttcatgaagaattc

SEQ ID NO: 200635 - DNA, 1000 bp, Homo Sapiens
atgcaggtgaaactcttccacaaaataaagcaaaaaatattaatggctgtcaaattactcagcataaaagccaagaaataatagttgtacaaggcagtggctgtttaaaaagaattgtcaattaaagtgtttagccatttgcaaacaaattcatcagacaaaagcaggtactggtaaaatatttaaatccttaaaataataaaagaagattaaggtgtcaaagttgatgaaaacaaatatcccatagtaaaagcaggaatattttctttctaaatcaaaaactctagtgctgctgtcactgcagttgtattcgtatgtgggtgagagaggtagagaggtatttgggtgtctggttagacttgaagtggtctgaatgttagcaggattattgataaacgtgatatctcttcatgcacataacaaatcaccttgcatttgtgtagcattttatacttcaccaaatgctttcacatatattatttcacttaatcttttcaagactgttgttactaacaaagaaactgaatttcaaagagggaaagtgaattgcccaaattcacacagcatctatatcaaaagtaaagtttcttatttctcacacagctcactgcagccacactatagctgccttttggtttatagtgtagtggatgaattgcttgcctgtctgttctagaatgatttatctgactgtgaaataacaatataagtattttttggcaaattccaatattctttgtcaaaaaacccctaaaaacaaaacaaaacaaaaaaacatagagctgtcttagattatctagctcaaactcttcctttcacagttgaggaaaggaaggctgaaaaatttacccaagggcctttagcaagttggagaacagtcaggaacaggtggacatatcttatgtgctaagccactgaggactcttttctgctctcctgtgctgcctctaccttatcacccaacttgttctcagcatatctactaaaactcacagaattc

SEQ ID NO: 200636 - DNA, 1000 bp, Homo Sapiens
ccactactaaagtctacagcggtcatgtgactggtactgttggtctcctgccctcttgcttctggcccttgaagcaggcccccatgatgcaaggtactctatggagaggccgtacggtaaggaactaagggggggtctccagccaaaaggtcagtaggaactgagacctcagaccaacaacccatgagaaactaaattctgccaacaatcatgtgagtgaactgggaagtggagagtcttcagtgattgcagccttgcgagagacccacagctagaggatccacaatctaagctgtacttagattcttgacccacaaaacctgtgaggtaacaaatggtgaatgaagccaccaagctgtggggaaacttgctattcagcaataactgacatagcagccaaggttgataattgccaatctaagtgtgatttgtgaggagagaacttcatcctcttctatcataactagcagaatcattttttaaaaaatgacaactgctgtccagagatttgagaatctgctggaagaaaggaggctggagggcctcaggcttcagtaactaagtgggtaggtgaggattagaatgaaggacactgccattgttatctatagcttgattcttccctaggggtagcctagagccatagtttctcacagttaaaaagataattatgattttcatcacatatccatgagagctgtcttaactttcatttatgtaaaactcaccttaaactaaagtgtaccccaaatgaaaatgaaccaagcagagctgcattcattaattggacgcaatgttagtttcacttaactgtgaactgaatcaatttgtataaaactagtagcctctttgaattcattgatatttcttaaattaactattaaaaacaaaaccctgcaacaccaccatgttcctcaaacctgaggaggtgcggatgcaaagttttgccaagtcatgggtgggagatttagcagaacgaggctggggcatccaggaattc

SEQ ID NO: 200637 - DNA, 1000 bp, Homo Sapiens
gaagagtgtgtgatcactgaccagcatctcagacagacttttaaacctaaatctaacttgtgttttcacacagcagcataagtctagcctctctttactaacaaaatatcaacagtgacagcaatgtaagtctaactgtggtgccttagctaattttattcttctgttgtatccttcaagctgacattcattacaatatacaacacacaaagagaacctaggaaagatggcagtatgctaagtttgtgcagcgagaaaagaagaaaacccaatttcacaggtggggtatagaatgtggaaagttctggcaaagctgttagatgtctactctatagccgtataaacactctttcggactagcaacttcacttttacattcaatactgaaaaataactatcaaaaagcacataaaaaatgctctatgcatgagggggatttatcacaacatgattataataatgagaatatctggaataacctaaatatctaaaaaccaaaggagagttaggtatattgtacaaaaaattaacatttactaagaattttaaacacatgtgaaaaaggcaagctactaaattgaagatacaatatgagctcaaatacatcataaatgaaaagaaaacaccccataggaacttccaaaacaagcatagtgtcaactctgagagttggaattctctgtgagttttgtttccttcattgcatgttaaggtacttacattataatttttgccacaaaacattattttataacattgcatgaataaatacttctataaaaatcttttgccagattatatgaaaaaagaagtgttcaccaatatttggaagaggcagcaagataggaatcaaggataaatttatctttaaattctaaaacatctgaaaacagttttctccattgggaattgaaaagtaaatagacgcatacatcactaatattgtaggttgggctccacaccattgcaataaagagaatgccgaaataaagtgagtcgc

SEQ ID NO: 200638 - DNA, 1000 bp, Homo Sapiens
ttacctttgtaccatcatgtctgagggaaaactataaggggttctacaaaaaagaatgtttcagtgttctatctttctcatatcgcaatttcacactttaccggagcctttttcttccagttttatgctattttctctagttcttcttggttatatgactgttcttccatctcttctacagtacacattgaatttgataactggtgggagatttaccaattcagtcaggtcaatcctagtaagagaaaatcacgtttttttgaagataggaggcctggatttgaatcttggttaccatttcctgtttttgagacttgcatcaagacgtttgaactccctgattctcagttgcttgcctaaaaagtgagggctttaataattatctcatactgttaagtaacaaaatgcaccttgttaagtcacttgtccccagtggccttattgactgaatagaatccagagcctggatgtatgatacctagttcttttttctcttcctatctatttgtggtatttatagttctaggcctaaaatggcactaaatagtcatactgaattttttttgtctgcccatctcttttcctgcctcacagggactttttacaatgtgtctattttcagaagtaagtgtttttaacataatattaagttatattccatcgagagtctctggcctttgtatatctttgcttttctaacattgaggttacattttcacttatattcttgcatgaaaacctacagttatttctctagcttcttaatttatataattatattatatttcatatcttccttcagttgctgttatttaatttgaattcccttaattttgattcatggcatagaattttattttctccttactctagctcttttgtgtgtgtgaatatagcaaagcatttcttcccagccttatctaaactgtttgattagctgctaatgtgaaaaatcattaatggagaattcaaactgctaaaataaagaactgatgaattc

SEQ ID NO: 200639 - DNA, 1000 bp, Homo Sapiens
ataaattcctcgacacatacaccctcccaagactaaacaaggaagaagttgaatccctgaatagaccaataatgggctctgaaattcaggcaataattaatggcttaccaaccaaaaaaagtccaggaccagatggattcacagccaaattctaccagaggtacaaggaggagctggtaccattccttctgaaactattccaatcaatagaaaaagagggaatcctccctaactcattttatgaggccagcctcatcctgataccaacgcctggcagagacaaaacaaaaaaagagaattttagaccaataaccctgatgaacatcgatgaaataattctcagtaaaatactggcaaaccaaatccaacagcacatcaaaagctaatccaccatgatcaagtgggcttcatccctgggatgcaaggctggttcaacatatgaaaatcaataaacataatctagcatagaaacagaaccaaagacaaaaaccacatgattatctcaatagatgcagaaaaggcctttgacaaaattcaacagcccttcatgctaaaaactctcaataaattaggtattgatgggatgtatctcaaaataataagagctatttatgacaaacccacagccaatatcatactgaatgggcaaaacctggaagcattccttttgaaagctggcacaagatagggatgccctctctcaccactcctattcctattggaagttcctcaccacttcctattggaagttctggccagggaaatcaggcaggagaaggaaataaagggtattcagttaggaaatgaggaagtcaaattgtccctgtttgcagatgacatgattgtatatctaaaaaaccccatcatctcagcccaaaatctccttcagctgataagcaacttcagcaaagtctcaggatacaaaatcaatgtgcaaaaatcacaagcattcttatactccaataacaggcaaacagagagccaaatcatgagtgaattc

SEQ ID NO: 200640 - DNA, 1000 bp, Homo Sapiens
ttctaaattatttggatacatttactggaattgaagagtgaacctttctctggcttttgataaatatttccagactgcttaaaggacgtgacccagtttacactgtcattaacagtattttcttgaggaccttacagcaatagatttaaatgggtgttttaaattttgttaattaattaatttattactattttttgagaccagagtctcaccctgtcacccaggcaggagtgcaatggcacaatctcggctcactgcaacctctgtctcccgggttcaagtgattctcatgccttagcttcccaagtagctgagactataggcacgcatcaccatgcccagctaacttttgtattttaggagagatggagtttcaccatgttgcccaggctggtctcaaactcctggcctcaagtgatccgcttgccttggcctcccagagtgctgggattgcaggagtgagccactgcacccggcctctaattttgttaatttagagctctgctctccaataaggtggccattagctccttctgtgtatttattattatttaatgacagggtctctcgctctgtcatccagtctggagtgcagtggcacaatcacagctcatgtatagcctctacctcttgggctcaagcagtcctgcctcagcctcctgtgtagctgggaccacaggtgctcgctaccatgcccagctaggttttgtatgttttgtagagatggggtttcggcatgtcacccaaggtggccttgagctcctgggcttacaggtgtgagccactgtgcccggccacttgtgtgtatttaaatgtaaacttaaacgaactgaaattaaataaaattttaaaattccttccatatttgtgccacctacatttcaagtgctcagtagccacacgtgtggcaagtgactatcatgttgggcagtgcagatatagaacatttctatcattgtagaatttcttttggacagtgctgatttagacaagtgaattc

SEQ ID NO: 200641 - DNA, 1000 bp, Homo Sapiens
acatcaacaagtgaaaggaatgggaacaaagaatttaaaggatcagtgtttctgtgtgtcattaaaattaagctggtaaatctaagttagtatataacttaaggatattatatataatctataagataactatagtgaatatggatataaaatattcacaaaaggaaataagaaaataatgtaaggatttgtattacaaaaataaacacaaaaggaaataaaaatgcagaaaatgacgaacaaaaaagctataaggtacatagaaaaccaatagcaaaatgacagaagtaaattcttccttatcagtcaactataaaaaggaaggggattttgacacaagctataacatagatgaaccttgaagccattatgctaagtgaagtaagtcagtcacaaaaagccaaatactgtatgatttcatttatgtggggtaactagagtagtgaaaatcatgaggacagaaagtagagtggtgattgcaggggttgaggaagtggggaataggaagttattttttaatagagttaactagagtttcagttttgcaagatgaaaagagttctgaagatgaatggatggtgggttgtacaaaatgagtgtacttaatgccacaaaaacatacacttaaaatggttaagatgataaattttatgttatgtatatttcatcacaattaaacaatcccaccactaggtatatatatatttttaaaagggcatcagtatatcaaagagatacctgcatgtttactgtagcactattcacaacagccaagatttggaatcaacctaagtgtccaagaacagatgaatggataaagaaaaagtgtttcatatacacgaggaatattattcagccataaaaagaataagattgagtcatttgcaacatggatggaactgcaggacattatattaagtgcaataatccaagcacagaaagacaaattttgcatgttgtcaaccatatgaggcacctaaaaattaaagcaattgaattc

SEQ ID NO: 200642 - DNA, 1000 bp, Homo Sapiens
ctttaatttttcctcaaatttttttattatggatttgtttgaatttctttttcacagctctccttttctttttatttctgtctccctttccttcatccctctgaaatagtgaaaatctcaggaaagtaaagtcatatggtttcaaatttcccatctttaaactatattaagcaatttatggggtagatattttgaagccaattgccatagtacatttaagattcttggatgaagacgccttttataaataagaagattttccctttcaaatgtagaatggctcctttttcactatgaagagaaatgtaagcaattcttttaaaggacgttcattataaaggaacttgtttcttgaatgtctgtccttcccgaatatataaagcaggtaaaattcttttctgtaaatttttgttatacttgcacctatacctttttagtgatttttttatggttaagttgatatcttttaagttttattgaataattttaaaaatttaattcttttagtgtttcaaaagaacaacatagaggtggctgcaacctttagtgttcactagatttgtttatttttttcattgaaaaaatgatcttgaaacattgcgaccttctttcatgcaatgattttttatgatgacattagaactgatacaaaaacagatcaccattgatttccctagagtgataaccatagtgcttctctactttttctctctcctgcctaaacattgctttacagaattttcagtatcttaactctccatttttttagccttatttcaaattcacttttctccaaactggatactctacctagcctcctcagcaaccctcatttcatagtaagtcccatgtttatatagatacatttttatagagaaccagattaaagaagttatattcctcactctcagctcagagatgagctttatagcttctaaaataaaaccctaacttttttggattgcattaaaagactaccatacgtcatatttgggaattc

SEQ ID NO: 200643 - DNA, 1000 bp, Homo Sapiens
ctactctgaaactataattcataattgcatatttctttggctagaggtgccataatatatctatgcacctgctatgaatttaacattactctttttcaacctgagttaagcaacacaaataatctgatccagatgctacaagccccagccttcctgcatcaaccttccatgtcctgggttaatgagacaatttgtactatctctgagactttttatataacacctgtctgtctttctggaggattcttcttccttatttggtttccccatgaccccaagaacaatgctccacaccagtgaagactgtgttagagatgagagattgaactgtggctcttttacatttggagctaccaaagaggttgctctttctggaaattacattattgtatactgttgaaggtaatgactgctatattagtctaatatttgaaagtccaaataaaatatgtgacagaggataaaatttgttttaaaaagtgagcatttttagattgagtagtcatgcttagacttaaatacaacatcgtatctatttagaaaagcaatgtttatcttctttctttactgtgtccatgatttctcctattaattgcaaaacatcaaacagccaccaaaatctaattatttatactgaggcagaaaaagctgtggaaaatagctagcctagatcacttatatatggtttgggaagtcagattttaacatcatcttttttatgtctaattctcaccacttacaaagcgatccaattattggcagttaaagaataacatgaaaaataggggaagaacgccaagggtaagttattttaaagttggctatacataaatctgctgaatttcatggaccatagttgctacaaatcaaccagggcattagacgctaccttgataactcttgatgtagtgtcaaaataccatgaaatatttaaagagctcaactaccaagcaaagtactgtgaaagctactatatccagaattctatcaactagaattc

SEQ ID NO: 200644 - DNA, 1000 bp, Homo Sapiens
ttttcctgaattattctttcaaatatgttttccaaatttctcattttttttatattctccctaagaaatgcgtataaggaccgggaacggtggctcaagcctgtaatcccagcactttgggaggtcaaggtgagaagatcacgaggtcaggagattgagatcatcctggctaacacggtgaaaacctgtctctactaaaaatacaaagaaaaaaaaaattagccaggcatggtggcgggagcctgtagtcccagctacttgggaggctgaggcaggagaatggcgtgaacccaggaggcggagcttacagtgagctgagatggcgcctggacgacaaagcgagactccatctcaaaaaaaaaaaaaaaaaagaaatgcctataagttgtaagtttggttactttacataatcccatatttgtcaaatactttgtttctttttttttttaaactctttattcttagtgggttaatttgttaatttgaaagacctgtcttcaagctctgaaattatcttttttttttaatttgtgctcactctgttctattgttaaagctttcaactatacttttaaatttattcagtgttttttttttaatttccagaaattctatttgctttttatctatctcttctttcattgctagcattgcttttcagatttcattgcattggttttcaacggtttttttgacttcattgagcttccttacaaaacacactctgaattctttatctgtcatttctgaattttcattttggttagggttcattactagagaactcatgagatcctttgtggctgtcgcaacatcttgattttttattgtgccaaaattcttacactgattctttctcatctgaagaaactgacacttcttattcctgaatttacttttgttttgatgggaccctccccaatctctgccttttgaagatatgactgtagaacgtgataggtggcactgtttagctttcattctaaactctgtggaattc

SEQ ID NO: 200645 - DNA, 1000 bp, Homo Sapiens
taacactacctggttttgttcaggtacctaagccctctgacatagcccaaaaacttcaagggaagctgactcccacatggcctatgggtgaggcggattgattgagggataagtccttttctctttaggaatgggtatatgatccagttccagaaaatataagatgctgacagatttgtaggaagtttctgaaactatgaggatctagttcctccctcccaccaaatgtgaacaagaaagcaccagaactctgactggtactgtggccattctgtgattaacgtggagtggactttagtactgggctttcactctgaaggcagagtgaacagactaatagaacccagacccaggtcgatgtattgaacgatgtcatccaacaatgctgaagccctcactatatctggactttctgatagatgagccaataaatctattgtttaaacaattctgagcttagttttctgttacttgaagctgaaatccacctcagtaatccgtcttatttaagtctaaatccctcactcaaggtcttaattcattccctgctttcaggtatctttcattagcttcttggcaatttaccttgtttttatgttttttttttttttttttcagttttatgacctccactcaccctgataacttagtgactactaatctgccatttttatcatctcttctctgcctactcttggcccatcacaaattagcatttagacgcgttgaagtttacgtgtatatatctatatagctcttgttcacagtaaggggatactttactagtgacaagtggagaggaagctaatgtacagtcagtcacccattttagaaatctaaattggaaattgtaaaagaaatttccaatgtccacttcctagctttaattaagtaaaggaccatttgaatcctgatgctaaaggatcaagaaatagattatttcatgcagaatgtaaaagttctttcttcttaccttggggaactgattttataggaattc

SEQ ID NO: 200646 - DNA, 1000 bp, Homo Sapiens
agtcttgctagagtgcctagagtcttaaacaattgctggaagtttggtagagtcctccaggggaggtggatttggctgagaaagagctgttgggcctggtgggaagcctgtttgtatgggagactagccggggttgaggctgccggtgataattgttttattatcaagggtactacaggtcaggctacggaatttgtattttatttggaagatgacaggaaaatcttacattcaagaaacatttaaaagcttgtcaagagtgtcaagactagaaatagagaaaccaatcaaatgactctataagaagcagccaagccctatacttcaaccaagaatcaaattatctgtgacccagattttatcatctcagtttgtgtgagatggtattacttttcttttgggtctgtaatattaatgtaatcctgagaaagcatcaaaataatattaccagactgggcgcagtggctcatgcctgtaatcccagcactttgggaggccgagacgagcggatcacctgaggtcaggagttcgagaccagcctggccaacatggtgaaaccccgtctctactgaaaatacaaaaattagctgggtgtggtggcaggtgcctgtaatctcagctacttgagaggctgaggcaggagaatcgcttgaagccaggaggcggaggttgcagtgagccaacaccgcaccattgcactccagtgtgggtgacagagcgagactccgtctcaaaaaaaaaaaaaaaaaaagataaaattaataaaacccttgatgttaatggtgtttgtaaatatatatatataaatacagaaggctgggcatggtggttcactcctgtaatctttgcactttgggaggtccaggcggacagattggttgagcccaggtgttcgaaaccaacttgggcaacatggcaaaaccccgtctctaccaaaaatacaaaaactgaggtgggaggatcacctgagcttggggaagtcaagtctgcagtgagctgt

SEQ ID NO: 200647 - DNA, 1000 bp, Homo Sapiens
atcttttcttagtctcaagacctagttaaatcaactgtaaaacacggtcccatggatacgtagcagggaaaatgagatatgaaagagacacaccagctactacatgcttggatctcaaagttacacattcacttcatttaaaaaatagccacatgggactatctttttgaaaggtaggctgaaattacaggtaagtcattgctgtcatttaacagtaaggagagggaccacctaaccccatatttgatgtagatatatagactggtgataccacacatgcaccaagagggcataaacagatttcttactcatataagaaggttttgaggaaagaatatgggaaaggctctcacataattccaagtaagtgcagatagagccaaaatatcagagaggagtgactggcttggggttttatagtggtgaagggataaagctgcgctaaagggtgcctcacaagagccaggtttcagcttcctaccgtcaccaaataagagagcatgcaggctttcttatcagcattcccagctgtgggaaagaaaggggaaatggggattgaaagatatcagaagtcaatcatcaaaattagagtaaaatgctttattataatttacttttgatgtttaagtgatgattgaaattgcttgcttcatttacttgcatttgaaactgtttagataaatcattgggatattctatgaggcctgtagcctcaggttgataaagaagccagaagttccattgaacatcttgttcaaaagcccagcattatgtattttaagtaataaactgaatgctttgaccattcattttaataatgcctaaagaggaattatgtaattcgaataacattactcaaaataataatgaccaattctgaaggggaaaggagcatgtttgtggggacttacattgtagctttagtatgtgtagagacatgtgtgtctttgatttgtagtacacatgttcaaaatctgtgcagtatgagactccagaattc

SEQ ID NO: 200648 - DNA, 1000 bp, Homo Sapiens
cttggtgcttagtgaaagctcgaacctgcctgggttcccaccttgtctctgctacccccagctctgtgaactcaggtaagcttctctccctctctgggcctcagcttctatgcacaggaagcagaacagccgtccctcctcatgggggtggtagtgagcctcagaatttccagacatccccttccttgctgcccctggactcctgtgctcacatgagcagctctttcacctggtgcaacctgtacatgggactcaacaatagtggtgcacacctcaaaggggttctgttaggatgaaatgggataattttggcaaagttaaactaaaactaaaactcccctccccaatattagcaactattggcattgtatgggtccgttctcacactgctatgaagaaatacccgagactgggtaatttataaagaaaagaggtttaattgattcacagttctgcatggctggggaggcctcaaggaacttacagtcatggcagaaggcacctcttcacatggcagcagtagagagaatgagagcaagcaggggaaatgccaggtgcttataaaaccataagatctcaggagactccctcattatcaagagaacagcatgggagaaaccacccccatgattcaattacctccacctggtcccacccttgacacatggggattatggggattacaattcaaggtgagatctggatgaggacacagagccacaccatatcaggcatcatcactatcaccatcatcatcgccatcatcaaaaccagcatcatcaccatcaccaccagcatcaccataacccacatcctcatcattaccaccatcaacaccatcatcatcaccattaccctcgtcatcaccatcctcatcattatcatcatcaccatcaccaccattaccatcatcaccaccatcaccctcatcctcattattagcaccatcaacaccatcatcatcaccattactgtcatcatcaccatcactatcatcatc

SEQ ID NO: 200649 - DNA, 1000 bp, Homo Sapiens
tatgtaaaaagcacaagccttgctgggaccctggagtggcgttggagtctctcgtggttaggagcccaggccctggcctggccatcgggggctggaatcctggctgtgtcctccgtagccatgtgccccaggcagctttcctcaccgcctgcctgtcatccagggatgcaggtaggtcctgctccatggggttgtcatggcgatcacagagacttgtccgtgtggaccacctagagcagtacctagcagggcacctggcgccctggggtcaccttggatcagggttgcagctgacccactcccatccctcccaaaggcccttcagcccagacttttgtgcaccccaaattccatcaaaatcctttttcctttgagagtaactttattcatttccctgcagcttattaaagaattctgaagaacagtgggtgttaaattttttaaaagaaagaaaacattccagtaatccaaagccatcacgcaatagcccacccgacagaggtccctgaaaaacagcccacaggggtccttggggtttgcgtccacgaccctctaagcaaggtgcctcacctggcggagctcctgaagacgggagctcctgaagacaggcgccccctcctaggatgccaaaggtcagaggccgcagtgggagaggcctggctgacagcttgtattccagtgggctagagcctccagagccctcaccactggattgccccttctcttggctgggcgggacctgatttccacctgcacagccctggtgaagccacgcaaaaggaacctgggaaaggctcaggtccagaattggatggacacaattgtggaactcagccctcctccccggctgggggacctctggacaggtccctgagccccttggaacttcgcttccccagcctataaaatgaggcaggcatgcctctctgagggtctggtgagctcttgagctcctgcaaagggcccagagtgaagtaataggagtttttgagctgaattc

SEQ ID NO: 200650 - DNA, 1000 bp, Homo Sapiens
agcagaagtgtgaggtccggaagggaaggagagcgacagctcagcgcgcttcgtgtcccttcctctggcctcacacagagcctgcgctgagttccaggtcctcactgtgaaaaagaagctgcctgcaggtgtgtcggaggggagtgagtgcgaaagcctcgctgggcgggggaggttgcaaccgtgtggaatgttctgcctggaaaactgagggtgttgggggatgaggcaggggctctgtttaaatagcagaagggtcacagcaacaaacgggctctcaacagacaaactatttttaaatcacaaaataaacagagcgagagggaggagatcttctcagagtaaaaatcccttccactctccccctcggcatagctcccaggggactggaggagcaggtactggggacaatagtgggtcctgtctcgggattaattccaaatccagaaatgcccctctcctgtgaagcgttcagtgggcagaaagctggggttgacacaaagacagctgggcactgttgctgccctaaaggtgctcctgttcagcggaagaactcagacatctttaggcagagtcagcaacatgtgagaagggctcaaggagggaaggacagggcgctgtgatgctctgaggaggatgagcctctggttggggtgtgtcgtgggctggggtgaaagatggatttgtgggtgcaggcaaagacctggctggaaggacaggagttgggcgcttgatgggaaggtggagatgggaggagaatcgtgggggcaggaaagataggctaggacccccattagaccacagagggcttaagggatgagatgcgcgccctgtgggaatttgggtggcctggccccagcctcagactcaatgagaaagccgatgtgggagccacacacctcccctgaaagaggcgcctctcacagggtccccacaggcacggaggcccaagacctgtccgtcaaggggacagccccaccacctgcacaccaggcagatc

SEQ ID NO: 200651 - DNA, 1000 bp, Homo Sapiens
gtatattcatgcagtggtagtgtttagtgctgaatgctatttgttactctgcattgagctaaaccccagaaattttcagctgtggaagtgaagaatgaagagagtattttttcagtgtggtggtagtcgtaagtatgtggatgactctgctcccattatacgctaggaaggatacccttggttgttcttggtatagttacctctttctgtttctttttctttttctttttttttgagatggagtttcactcttcctgcccaggctggagtgcagtggtgtgatcttggctcactgcatcttccacttcccaggttcaaacgattctcctgcttcagcctcctgagtagctgggaccacaggcacgtgccaccatgccaggctaattatttttggatttttagtagagatggggtttcatcatgttggccagattggtctcgaactcctgacctcaggtgatccgcccgcctcggcctcccaagtgctgggattacaggcgtgagccactgttcccgacctagagttacccccttttttttttttttctcctgagacagagtttcactcttgttgcccaggctggagtgcaatggcgtgatcctgcactacagcctccgcctcctgggttcaagtgattctcctgccttagcctcccaaatagctgggattacaggcgtgtgccaccacacccagctaatttttgtatttttagtacagacggggttttgccatgttggctaggctggtctggaactcctgaccttaggtgatccacccgcctcggcctcccaaagtgctgggattataggcttgagccaccgtgcccaacctagagttacctcttttcagtggtaggttgtgggagctcccattgtcagaaagttgcacaagagtatggacctattgggaacaatgttccctcaattctgggagccatctgaacgaaatgttttctgtttcagccagagtctttccaccttggctctcatcgaggaattc

SEQ ID NO: 200652 - DNA, 1000 bp, Homo Sapiens
ccacagcatttacttatatcacagctatcttctccccaagaattacaacagttaatattcatgtaacatttacaattagaaaattattttaatatacattatctcattttattcctatgacactatacagattggtataattatgtgcactcatcactaaaataccttattaaattctaggtgtgctaaatcaccaaaaacagaaatgaaagtaaccatgtagtagttgtcacaacaaatcaacaaatgaaaatattgagttggaattaataaagtagttaaggcctgaagcctggatgaaaattttggatttgttagaaaggcaacagagttactgcaggttcttaattgtggaagtgaaaagatgaaagcagtgtctgagaaataattctaacagttatgtgtaggatgagttggagggggaaagggactagaagcagggaataaacagctacaaaagggttgaagtacagaagcacgtaccatagctacaatgtatattgaagtacatgaatactgaagaagcatgaagtacatgaagcatgaaataataaagtcttagacaaaagtaaaaataaaaatatgaaaaaagtaagaaaatgataaaatcagagaagcatttcttatatttatttaatattaactatttttgcacaccccctagtcaccacattcaacatatacacattttagaatttaataaggtatttaatgatgagtatgcataattatactaatatctatagactgtcataagaataaaatgagacaatgtatattatatacattttagaataaggtatttaatgagtgtgcataattgtagtaatatctatagattgtcataaaaataaaatcagacaatgtatattaaaagaattcattcattataaatgttacacaaatattaattgttttaatttcttggggagaagacagctgtgctaaaacagtaatgctctggccataaagtcagaagacctgaattcaaattgtgatc

SEQ ID NO: 200653 - DNA, 1000 bp, Homo Sapiens
gcaataaacatgggagtgcagatatctcttaatatactgaatttctttcttttggagctatatacacagcagtggaattgctggatcatgtggtagttctactgttagttttttgaggattcttcatactatttttcataatggctataccaatttacattcctaccaacagtgtacgagctttactttatctacatctttgctagcatttattattttctctatttcataaaaaccatttttaactggagtgaaatgatatctcattgtggttttaatttgcatttctctgatgattatatatgttgagcatattttgtatatgcctgttggcaaagagacaacctatagaatgggagaaaatatttgcaaactattcaactcacaataatctataaggaactcaataaccagaatatgtaagaaactcaaaaaactcaatagcaaaaaaatctgaataaaaatgggcaagagatcggagtagacatttctcaaagacgaaatacctgtcttaagagctagattaaatataatttttatccatgaaagctctttgaaacttttttcccaggtctcaaggaaacttttgctcaactctctattatagcacgttttacattttttgctaattcttcctagaagaatgacattgaacatcttattcaaaattctctcttctcttagaatcacaaaaccatgggctcattatgaccaggacaggaatatccatggcaccatcctaatggttctcaggtgttaggtgtatctttaaactatgtaactagttgcaggtgctacacaggctactccacacctagcctgaccacccgctgctattagatgaaaccagtaacattttgataagtgcaaataaaaggaatctctccctgtgtataacatccagtagttgtaggctcaactgaacaatctcacatgactacagtaggccacacttgctaatggcttcattagaataatacaaatatcataaacaaagctt

SEQ ID NO: 200654 - DNA, 1000 bp, Homo Sapiens
gcatttatttgtaagtggtgaacacaaggacaaaataaaattcctgaaatgaagctttattttaaaacatttcttatagaaaaggaatctactgtttatctctggggatttttaaaaacagaaaatgttattacaaagattatttacagaaaacaggaccagaagtacattacccttcaatacactgtaccaaagtctcctaatagggaccagggagataataaaaacactagcttattaaatgtcttcctcccttcattttaaaatgtagacagattctattaaactgacaatataaaagcttaacccaataattttagctgtacaaagttacttattaacctttaaaggctgttatgaatttacacttcctgcagttcacctgccatctttcccaactgaaatagccactaggggtttaagacagtcaccacttgcgacatcaataataaggaaataactttgcattcaagtttaagaaaaggataattgcggattttgcctgtgcccataaacaggtgcttaatgaatatctgttgagtaaatggtgacattttattatattagtgcaacattagcttttccccccctaaatttagagttctcccttgctcaaaaagcagcaagaccataccacagtcccttctcaaaaacacataaactcctttattcataatgaaacagaaagctgggtttcaaaatacaatcccactccctctttatcttctccattatttttaaagattagaaataaggcctgtttttaagaaacagaaaatgtataccaacttctctcaaaccaaaagagaaaatccaaatttgatatatattttctatgttcataatattgagagtaagaacggactgttcatcaacagtatgttatgtgggacaaaaactaaaaaacgtatatcaaaaatacatactgtttgccgacattctttccttaatcataatcaaggagtatgtgcctaaattttactagatgtgagataagctt

SEQ ID NO: 200655 - DNA, 1000 bp, Homo Sapiens
gttgtctgaccccattcagtgaaacctattttcaaaatactgttgatatgctctggcactggtcatattttagtgatgtactcataggcctcacaagtattcctgcccaatgtggcctttaaacaaatctttgcagggcaaagcactggaaaccaactcccctacaagtcagtctcctgagcaatcactcttgcaagaagtctattcctctgtagcagattacctcatctgtgattcttactagggtcaggaggtgactgtaatttgaagagtgcagtgtttttaaaacagttttgtagaaaacagtgtaagaaggattagggattactggagaattcattgggcttgtttttcctctgcctactctgacaaatccagaattctatttttcaagtctaaatgcaaaagaaacgtaaaagaacatacaaggtcaagtttcaaagtcctcctcaccaaaaagttgaaactgtgttacctatgtacctaattttcccaagtattacactctttcctcatgctcaaggctgtgcatgaattcctttttactttcgctcagcaagtaaaggtaggcagtgtattgtattttgggacttttcaagatgccgggactacaaacattaagcacatggggcacattgctaagtatcttaaatgtaaaaaagcaaatcagtgtcatcaaatgttacaatgcaggactttccagaaggcatcaagaaacattttgccaaaagtaaaaaaataaaacttctataagaagttcaaatgttggctcaggcaaccaaatcaggtagaagaatgaataagttgaccaaggttattctacagagggaaattatgaaaacaaaaaagacaccaaaaattgtgacctcataatgcaaaatctgataggaaaatcatatacggaaacaatttttggtaaaattttagagatattacaatcaaggacagggtaaattgtccactgtcactattttttttttccaacgttgctccagaattc

SEQ ID NO: 200656 - DNA, 1000 bp, Homo Sapiens
tgtggtggctcatgcctgtactcccagcacttcaaaaggccaaggcgggtgatcacttgagatcaggagttcgagaccagcctggacaacatggcaaaaccacatctctactaaaaatattaatacaaaaaagctggatgtggtggtgcacacttgtagtcgcagctactcaggaggctgaggcaagaagattgtgtgaacatgggaggtggaggctgctgtgagctgagaacaacaaaccccacaaaaactaacttcaacaaacattaaacttcactacacaccgagtccagcagttctccacccatctttctattccatttctctctctctgcctcaacctagggcaagataagcttgacctgatgggtcatggctctgtacaatagtttagtcttaaacaactaagatgctacgtatctaagaacactcatgactcaaaggcttgcaaagggctctttaaatttgctcttttaatgcataaataaatccatatcatgtattactttctggaaaagggttaaactcaaatatccgaaatactttcattataccaggtcaagaaaaatgccacagccagaaaaatttattttaaaatagaaacatacattaagctttaaaacaaccaactctcaaacaaaagaggaaagagcctttgatcccagagtccatgcggaatgaattccatacgtgtttgaaattcacataaggagcacttagaaaaccacctgaaatggaaatccaacagcccccttgcctgtgagggctcccacccctgcccgcgtgaggacatggccgaaccccggacactcgtgtgccgggagccaccacagctcaaggtgaccggcagcacccagctctgtgaccaagacagatgttcacacgtgggggcatcgtaagcgctaccagctccaaatctgacgtgatgggaacttgggagatgtctgagaaatgtccgaagggattttggcaacacagaaaacgcaatgtctaggaattc

SEQ ID NO: 200657 - DNA, 1000 bp, Homo Sapiens
gtaatttttggacagaaggaaagaaaacatagcattcttggtgactagaaattaaacttcatatagttatttgaaggtgaaactcggcatagcaaacttaaaattattcaaaccagctaataaaagcaagtctagatgtttcctattaaccttggaatgtgcttggaaaaagccctgctactccagatgtctagtattagaaagcatatcaacagcttttactctcaattgtggtgaataataccattctaaaattcacaagtgcagtttggtgtgctggggcataatatagaattagtattcaagtttgttctttctttttaaattcttaatatatcttaaaagtcggagaaacatcacaagatgtcatattcctaatttcttagttacaaattaaaaccaatttatataatggaataaggtgggccagacttagaactcagatgtgttaagtaaatatttattctggttccactccagggaggtaaaagattttattaacatatttcttgaattaatatatttcttgaggtcacaggggcaaagaaaagcttatgcagtgcttaaatgcctgaggggcctttttgctgcaagctaacaaaggctgatttttttttttttcttcactaaagagagcaactatcttgtattgtggcctttgctttattattgttcactcacaactgcataatctcaaaccaagttttaaaaaggctgctttatttttttcccattgtttggaaaggctcttagatattacttataagatttgtatccaagctttattcttgtgctttttctcctggtttactttgggctgttaccagccatttgtactttgctttctcttcattgctgaaaagaaaaattgcccattaaaagtcaagatttgaagtgctgaacttaattccttgagtccagtccacagtttggctccgattactgtaccaggctgacctccagtccaagggagggtgccttggcagaaatctgagaattc

SEQ ID NO: 200658 - DNA, 1000 bp, Homo Sapiens
aatatgagagtaacttaaaatattaataaaccacaattttaaattaattaaccgtgataaccaacattaataaaagttaagataccaaaacactggtgtctaattctttcaactaacaacttgaattattttccattttaaattaattaaccgtgataaccaacattaataaaagttaagataccaaaacactggtgtctaattctttcaactaacaacttgaattattttccattttatttcttcttactagatcgatctgcaattctacacaattgttgggcagctatgaatgacagtaggtttacatgatatattttaaaaactgatttttctgccacgcaaataattgaactttgtctgaagatagtgtgcctgggaaaccagattttttttatttttatttttatttttatttttttgagatgaagtcttgctctgtcaccaggctggagtgcagtggtgcaatctcggctcactgcaatctttgcctcctgggttcaagcaattcccttgcctcagcctcccaagtagctgggactacaggtgcgaaccaccacatctggctatttttttgtattttagtagagacagggtttcaccatgttggccaggatggtctcaatctcctgaccttgtgatccacccacctcggcctcccaaagtgctgggataacaggcgtgagccaccgcgcccggccaaaaccagattcttaaagaaattacattttacaggttattgcatgtgcttagtaaaacattattgtatcactgttactgtactatgtactattattgtactaagagtaaatactgttactatatcatgagttactgtattatgagtaaatcacctcgttaatcctttaagttttctttttgaaaagttacatttttattgaagtaatataggtgtgcgatttaaaaaatcaaaagtacagcagaatttataataaaaataacatcctcccaccctatcctccctactcctagacctatc

SEQ ID NO: 200659 - DNA, 1000 bp, Homo Sapiens
ttaaagagacacactgaggaaaactcagggaaagaagctgatttgcatggacactaggcctgtcgttgattccctcatttcaaaagttgcatgtgccatgggaggcggagtctctgaggacatcctggctgtgcctcggcggctctggactccagctctacgcagagcgccttaacactgtactggaagaaatgggaaatcgcattgaggacttacagaagaatgtcaaggacttaatggtgcaagctggcattgaaaattctattaaagaacaaatggtaaggttattagcaaactatgtcaaccgttttcgtatgttttgactgctttcatcttgaaacatacaatcccatatttgttcactatgggaattgctgcctctgtgctgcatgaaaactgctcaggaataataaatttccaaatgctctcttctttttttgaggtggagtcttgctctgtcgcccaggctggagtgcagtggcatgatcttggctcactgcaaactccacctcccgggtttaagccattctcctgcctcagcctcccaggtagctggaactacagacatgcaccaccacacccagctaatttttgtattttagtacagacggggtttcactatgttggccaggctggtctccaactcacaacctcaggtgatccacccaccttggcctcccagtgctgcaattacaggcgtgagccaccacgcccggccacacccagctagtttttgtatttttagtagagacggagtttcaccttattggccaggctggtctcgaactcctgacctcaggtgatccacccgcctcggcctcccaaagtgcctcctctgcagggcatctgaggccacccagtgcaacccgaacctcatcagggcactgtaggcattctcacagcttctgatgctgaatgtaaacatgccacaaaagaatgctaggatcagaggcatgtttaaagccattagtaaaaataacagaaaaaatgattcagaagc

SEQ ID NO: 200660 - DNA, 1000 bp, Homo Sapiens
aaatggctactattaaaaagtcaaaaaataacagatgctggcaaggttgtggagaaaaagaaacgcttatacactgttggtgggaatgtaaattacttcagccgttgtggaagacagtgtcgtgattcctccaacacctaaagacagaaatgccattcaacccagcaatcccatttctgggtatatacccaaaggaatataaatcattttagtataaagacacatgcacatgtgtgtttattgcagcactattcacaatagcaaagacatgtaatcaacctaagtgcccatcaacgatagactagataaagaaaatgtgatacatatgcaccatagaatactatgcagccataaagaagaatgagatcatctcttttgcagggacatggatgcagctagaggccactatccttagcaaactaacactggaacagaaaaacaaacactgcatgttctcacttataagtgggaactaaatgatgagaacacatggacacggaaagacaaacaacacacactggggcctttcagagagcggagggtgggaggaaggagaggatcaggaaaaataactaatggatactaggcttaattctcgggtgatgaaataatctgtacgacaaacccccatgacacaagtttacctatgtaacaaaccagcacacgtactcttgaacttaaaagttaaaagaaattattttgtcaataaaaactcaattttttaaatttaatttaattttttttttttttttttgagacggagtctcgttctgtcttccaggctggagtgcagtggtgcgatctcggctcactgcaacctctgcctcctggattcaagacattgatgtgcagttgtctttttttgtattatctttatctagtttggtatcagggtaatattaacctcagaaaataagttgagaagtatttcctcttctgttttctgggatacattatataaaattgaggttaatttttcttcaagtgtttcacagaattc

SEQ ID NO: 200661 - DNA, 1000 bp, Homo Sapiens
tatctgcccaaggtcaccgggctacacaaagtaagatgaagcagcatggctgtggcttgggctgctctggggctaggagaagaaagatagcccaggaagaagagtgtttttcttaagtgaatttctgattttcctttctgattatagaaggatctatgctcatgatagaaaattggaatcactaggattccctctactagctaggatgagttgtttgcaatgtcgtaagatttttccaactccatctaggtaactaatggttgcagctgtgtgtctggagtgtagatgctgtggtgactacactatagatgggttctttgtccttgattctttttttggagacagggtcttgctctgtcacccaagctggagtgcagtggtgtggtctcagctcactgcaacccccgcctcctgggctcaagcgatcctctcacctcagcctcccaagtaggtgggattataggcacccacaaccactcccagctaatttttgcatttttagtagagaccaggtttcaccaggtcacctagactgttcttgaactcctgacctcaaactatcctcctgcctcagcctcccaaagtgctgggattatagacatgagccaccacaccctgctggctctttgtccttaatgctttcttaagaactctccttggaggtgctctggaggagctgtcagcattgaaggctgaggatggagtagttcagctgaatatagtagagggaaatggccctctcagcacctggagaaatgatagggattgaggcctcaggctctttgtcttggcagcctttcgagttctgtttgagatgacatccaggtgacctatagggcaagggctgagagagcctgtcttgcaggagagtggggtgacccaggagtacacttttcattggaagaaagccctcaacagcacataaaggccaatcccatcatgtacctgcccagactttggaatacagactgtactcaccaccttgggctttagtgaattc

SEQ ID NO: 200662 - DNA, 1000 bp, Homo Sapiens
gtatactccatcatcatttgttggagagttaatatagagaacacccataaaattggcaacttggtgaaggatccatttattaatctataaacaggatgtctacccatctattgttgcaacatatcagtctccacagggttactgtccctacaagcaagaggaaaaaatatatttctatgagtggtttcttctcctttatttgtgattaacatcaattagaaaaaaaaatagctaagcagagagagccaaaacttaagaccacacagattcacacttcacaccacagagaaatgaagacaaatttagttaatggcaaaacccactgtttctgtaaataacaaatctaatgtaaaacgatggtggaatataatgatcctgtgaggttttaggcatctgttcaaataaacctatttgatcatttagttttctggaaaaataaggggttgacaaagattcatatcaaaaccctagtggataaatatctggctggaaagagtaaaaacataagattccagctatgatttcagtgatctataagctatttcttatagactaaaatttatattaaaattattttaagtaaaagcatttttaaaacacatacatgttttattcattacaaatctcactagtatatttgtgaaaggcaatttactgccaaatttctttacaaaaacaagtttccatttcatttccccaaatccccaccttttgttcattccagtaaaatgactctaatgccaaacctgacactcagaatcttaaattctgaaatttcagaattttcagtcactgctgaaaaaattcattagcatctcaaacttaaattcaggtaaattaagaggaaaaccaaataaacaataatgcaagaaagttacacattcaaacatgtgttataaaaatcaacaccccatttgaattagggctcctctgaaatccctgggcagggctggtgcctggtaatatttaatatcaggaggaatggaatcttgtagaattc

SEQ ID NO: 200663 - DNA, 1000 bp, Homo Sapiens
taaccttaggaaattttgggtaaaacaggtttgtttattgtaggatggagtcttttttttttttttttttttttttttttttttttggagatgaattttgctcttgttgcccaggctggagtgcaatggtgccatcttggctcactgcaacctccgcctcccggattcaagcaattctcctgcctcagcctcccaagtagctgggattacaggcacgcgccaccaggctctgctaattttgtatttttagtagagatagggtggagtctttaatatactaacagctttaagaatggagttataatatgctgtatttcccaaacttgacatacgactcatttccaaacttttattacaaattcagcattgggaaatgttgtatgaggcctattgagttgacttagtccatagaaatgatatttgtcatgaaatgtcatctacctatgttagtctcttgaaaagataaatgtattctaatggagccagaaagcctttcactatatggacacttgaaaatgttcacatatttttataagaaagcattttcaaaatattgttcaaaaactggatacaaaattctgagagtaaaacatctgagtgtgtggctattaatagctttttgttgtttttgtgttgcaggtcggatcatgctaaaaggagataatattactctgctacaaagtgtctccaactagaaatgatcaatgaagtgagaaattgttgagaaggatacagtttgtttttagatgtcctttgtccaatgtgaacatttattcatattgttttgattaccctcgtgttactacaagatggcaataaatactatgggattgtttgtattaaaaaatttacattgcttcttactattcagcagtagaaactttttacacagtaacaccattcgttgctggtatttagttttctgaagggtcgcagttgccttgagcacttggtattcgcagagcttggacctgtagattttgaggcagattaggaattc

SEQ ID NO: 200664 - DNA, 1000 bp, Homo Sapiens
gtgatacgatgaattcagtgcttttcattttaagcgtaaccaatttagtatttttatgttagtatcgtaagttactatacatgtatgtgcttttattttaagaagtgaagaaagaaattaagatcctttccatttttaaaaactgtttatttatgtttgtggagagtatactaaagagctcatctttgtgcctaaacctcaggtttttagctgagctactgaatcagttccaactttaagttatgtaagactaataggactgtctcaggtttcacctcctgactttttgcccctctttctgagttaaataattaaatctttcttaaaggaagaacttaagtcttcaagaatatgttttgaaatgaaagaaacctgagcctcaaaaggaagagaaaaaaatgatacttcggcagctactgatttaaggaattattttgtaaattattttttaaagaaaggaggaaaagattgtccaagtgctgtgtgctgcataatatctatactttacgtgtaggatgagaactgaagagtatgttaacttttctgtttaacaccagatcctcatttacctgtggaacagacccttcactcgctcctcgcaagctgaagttagggtgcctaaaatacttcatagattactcgtaatcctttttttttttttttgagacagatttttgctcctgtcacccaggctggagtgcagtggcgctatctcagatcactgcaacctctgcctcccgggttcaagtgattctcctgcctcagcctccaaagtagctggtattacaggcacacgccaccatgcctggttaattttgtatttttagtagagacagggtttcaccatgttggccaggcggtcttgaactcctgacctcagttgatccacctgcctcaacctcccaaagtgctgggattacaggcgtgagccactgcacctggccctcataattctttaaaatgaatattcatagaactcatttttccagcagttgaattc

SEQ ID NO: 200665 - DNA, 1000 bp, Homo Sapiens
aagggaagccatgccgagtgaaaaggcacagagctgcttagaagcagagcagggataggaatccacacctcctcccttccaattcagtggcctcccacacaagacttcctctttatttggtgtgatgggcaatcaggtgcttagaagatactttccgatgatgaggatgaaactgatggtctggcagcagctttctgcctgctctctcagcaatgtgtaaacccacacatgtgtttttccctttctgagacacagaaaggctcaacctttgacaagagattgtccaggaaacatcagtaaacacaccaaatgcctacattcccattaaaacatgcctatctccttctaggcagttccaagcgagacttctaagaggtctgccttgcacaactcacaggcagcagctgtgaggaggagaggtgcaccccaggctgtgggtgggaggacagagggaatggggaggcaggaacaatggaccagcctccttggcctcacaggaggcgtctgaatgaacgatgatggctcttggccttccaaatggcaaagacacattcccagagaggccggctgtggagggctcctgcccagatggactcgctgtactgtgaaggagcattctgtgttccctaactggcagcggctgcccagcccatcagcttgcctgactgcacaccaagggccctgacggctttctcatggggcaccccggggcttctgccccaagcagatgctgggctttatgttcccacagagaaggcttgcccgtggcggtccatccatcttcctctccttcatctgagaggcagtgtggcctgccctgagggtctgcagggagcgctctcaccaggcctgggaggatgctgccagggaggagagtgccctggagcctgaatgcctcttttgtttgcaatgaaataaaatctgcccttttaaaaagcatccacgctgccaaaatcccaggtaaagggggtgtggttgacttgctgctagggaggaattc

SEQ ID NO: 200666 - DNA, 1000 bp, Homo Sapiens
ttgctaacgtcatgctatgtcttgtccgtgtaagccaatgctaatgtcttacctctctgcaaatgcctgtctcgttagtttagggggcaattggttgccctctgatctccgtattctgatggagtcagaatactttattttgttgttggagggttgaaagtgacattctttccagctctcaacattccaagcctttagctttattttagagttcctttgcttttaggtatttaatagtgtttgtctcccaagagaaagttaatcgcttcttgctctgatgttagtacttatataacttagtacttgtataactgtatttatcacattatgctgtaattatttgccaatatatctgtctccactcttagcacactgcttgagggaaatagaagagtatacgcaaaatgcaagatctgtgacctctgtatacatagtgcttcctgattggttgtaggcacttattatgtgctcatagaatagaattacagtaagattttaatttataacacagtcctggtactttaagattctgaagaaatatttgttaaataatttgtgaataaaatggcttatttagaaagtatttagaaatggatttagcttctatttcctcagatttccagatagttttttttaaagctcagtttaatcatccctgtaaaaaatcttgctgtgattcagacagaagattcagttgcgtgaattaatccttaattgctcaaaaaatattaacggggttgaattattttctgctcctattgactttggggtaatattgtttacctgagatcttcagagtagtgagtaataaattacaacatttaagatattttttaaaaaatcaaattgggctagcttgtcattgaaagagtgaaatgatattctcttgatagtatttagaaataggttagattaagagtaagtttagttattaggtccttcttttaagtgaacaaattaaagagatttttttcaattttaactgaatcttttccagatc

SEQ ID NO: 200667 - DNA, 1000 bp, Homo Sapiens
gggtccaagaggacaaggaggggcccccagaagggacgtgagtacccccaagaactcctgagtgttccacccagtgagctcagcggcttgtgggccaggtgccccaaggcctgcagtcctgcaatctatcagctttcccgtcgggctgccagtcatgggcacaaacagatgtgctgcctgggacacacttccccacttgaccacctgataacctcataactattctgttctgaataaggcaacgtttactaaacaactcctacatgccagtcactgtgcactcagcatcacctcatttcatcctcatcagggctggtttcccccattttactaatgagaaaggaagctccaaggtctcatactagagagaggctgaggtgggattcaaacccaggcctgcctgactccagaggccgtgctctttccactgtactacactggctctgacaaaatgccactcaacttggacctcctcggagacaccttccctaatttgcatgggaccccgagtcactccccgcctccatctaagcccctggtccttgcccctcttatcctgttttcgtgctactgtttaattgctcctttgcacacctgctcccctttcccctgacatgagcctgattctcctctgtgtaacctccaaagtgagcctcggggatcccagccccaaccacaccactccccagctgaggaagtcttcagcggctcctccacggctacagccagagtgtgaaactctgagcctggcatgctccggcccctgctgacctgtccaatactgtttcccacaccccactgggcagccaagcacactgcaaagccatatggacctgtggaaagggcacagattctagagccagacacatgtgggtttgattcccagctctgccaccgtcttgctgtgtacccttgggcaagacacctcatctctctgagcttcagattctctgaaggtaaggaggacactttctaccatataggttcattgtgagaattc

SEQ ID NO: 200668 - DNA, 1000 bp, Homo Sapiens
actgctgggctcgagcaatctgcccaccccagcctaccaaagtgctgggaaaacaagccacagtagcgggcttgtttttctttttaaaagagggcttcaattagtatttttcttcacttctggaaaacgttctgccattatctcttgaaacactgcttctctgccattctccttcagtctcttcatttggaatgccttttcaactgatatcaaaatttcccaatctatttccatgtttttttgtttttgagacaggatcttgctctgttgcccaggttgcagtataatggcacaatcatagtcactgaagctttgatctcagctcaagtgatcctcccacctcagcctctcaagtagctgggattacaggtgcatgccatgatgcctagctaatttttttgatttttagtagagatgaggtctcgctacgcccactctggtctcgaattcctgagctcaagtgattctcctgccttggcctcccaaagtgctgggattacaggcatgagccactgcatccagcaacccccactcccccaccattttttttttttttttgaaacagagtctcgctctgttgcccaggctggagtgcagtggtgcgatctcggctcaccacaacctctgccccgtgggttcaagcgattatcctgcctcagcctcctgagtactgggattacaggcgtgcaccaccacacctggctaatttttgtatttttagtagagatggggtttcaccatgttggccaggctggtcttgaactcctgacctcagcctcccaaagtgctgagattacaggcgtgagccaccatgcctggccctaaagtcatttttgtatatagaaaagtatcaagtgactttgaagcaagataactttatttatcccaccttcccatatcccaaattttcttaagttcttggagaataaaaaccatgcctgtgttcttcacaggtataactccagtgcctagactagtgtctcgcacatagcaagaattc

SEQ ID NO: 200669 - DNA, 1000 bp, Homo Sapiens
aaaaaaagaaaagttaaatctgaatgatttagagtttggatttcaatcattttagatttacaagctgccttttctgttaatggcagaaaagatacaagagtgtcaatgcaatctgctcattatacataaaatcatcacagacaaaatcctatttattcttaccacattctttaaaacgttttaaaacaaaatgtaatcatgaaacatttttaaaatgtaaatgcctatctttattctgaaattgcaaccatccttttttttaatgttaaaatacccttacatatttcaaaacaggaagttttttaaaaagtcttacttttctgaatcaatgatggtaataaatggcagttgtatttttaatctctccacacatagcaaaataaatgagtagctatgttagttccaaagttactttagaaatttctttagactattaaatgccaaaaactaggaaccattgcattaattcaccacttcccatgatatgtattatgagcacccaaagaggtgctctctataagatatgccttctttatagatgaggaaagtgaagctaagagatgttcagcaacttgcccaaggtcacaaagagactacgtgcacagatgggaatcaaacccagtctctctgttttgttttttttttctttttgagacggagtctcgctctgtagcccaggctggagtgcaatggtgccatctcggctcactgcaacctctccctcccgggttcaagtgatcctcagcctcctgggtagctgggattacaggcactcaccaccatgcccagctaatttttgtatttttagtagagacagagtttcaccatgttggtcaggctggtcttgaactcctgacctcaggtgacccacccacctccacctcccaaagtgctgggattacaggcatgagccaccgcacccagccagtctctctgttctaaaacccaagatagcactgtcatagatgtgaaaatataaagtaattactacaatgaattc

SEQ ID NO: 200670 - DNA, 1000 bp, Homo Sapiens
ggatttagaagtattaaagcaaaggggaaaaaaaaacccaaacaaacactgcagctctctgtataacatgaatgcgattattaataactcttgggtgggaaaatgattaaccttgttattttcttgactatccaggtttctacaataaatcaagactgcacaaaaatatttggatgctgtatggaaaacaacttttaccaggtctccaactggcataaaatgttttcaagtatgaaaacatctctgggcttcctcaacaggctgacagatccctgcaggtagcacttcccttgtttaatggtcttgccaattacatcaaattagagatgaatttttaactctgtgatgaagacactgcttactataagataaaacaggacaattagctatttcccttaagtgaactgttgttttaaattgaataagttagggtgggggacaggagaggaatagccaaacaccttcctcagtattctatgcttcatataacatcatgccagtcatttgaaagtaatttaaggaaatactctagagtcaggttcacaaaatgtgtacatctctcttcttttgtttgtgttatttaaaaaattctatttatttcaaaactccaagagttcgaaatggtcttccttgatgtgatctttgttttgtggatagcttaactttaacctctgactcatctgtcattcagttttgtaagaagtgatgatcacccacacaaatgtatttgcacattaggccaattcttgctggtctaattatgctttttataatataatgtttaacataatttgtgtaatcatttgcttttcaggaccaaagatcatatgatatatattagaaggtaatgatcagtttatcacttgaacaaaaacacccacaccaagacaactattactttggattatcggcagcaacaaatattcacttggataaaatcacgaattttacttataagtgcataatacactttattaaaaaatgcaatctgaaggaattc

SEQ ID NO: 200671 - DNA, 1000 bp, Homo Sapiens
gtaactgttgaggctgatctattttggtttgctcttactctcagaacaaaatttttctcagatatcaagttgaaagcctagggtgtattaccatggctctctcctcctttgaagaccataaactacaatatttgtccctcctattctgtgagagtgttgaattttggctagtgaaaaactttgtgtctgagccctagcacacacaattaggagttagcaaatgccttaagtggatactacttacaaaaagttgaactcagccaggtgtggtggctcacacctgtaatcccagcactttgggaggccaaggcggacagatcacctgaggtcaggagtttgagaccagcctggccaacatggtggaaccccatctctactaaaaacacaaaaattagccaggcgcagtggtgggcacctgtaatcccagctacttgggaggctgaggcaggagaattgcttgaacccaggaggtggaggttgcagtgagctaagatcaccgcactgcactccagtctgggcgacacagtgagatcctgtctcaaaaaaaaaaaaaaaaagttggattcacccctgatattcctcaggatctcggctctgcaacccctggctctttggtaaccccaaactccaattttgtctccctggttgaatgactgctctaggctactgctctctgtgtagcccctatgccatgcactgagaatcgggaaatgcaccaaaggaaaatatacaaagcttatctcaatgtgtttaactattctctgggctcctgacccctgaagccctggttgtcttagtttccaatacctccctcttcttttttttcaatcaaggaggtgggtggggaggggtgtgtggctatgtatgtctggtattttacacagataggcagaaaggttaatctaataccagtattctgtcatatctggatgcagaaaaccaaaatcttcagctcctttgacatccacattatttggtcataaagtcccatcattactac

SEQ ID NO: 200672 - DNA, 1000 bp, Homo Sapiens
ttactacgagtagaaaccacattaaagtaaaagtcagaagacttgccctagtctcagctctgtgaagctcttaatagatagtaagatgaaagcttaaagaaattcccatttaggccagatgtggtggctcacacctgtaatcccagcactttgggaggccaaggtgggcggatcatggggtgaggagatcgagatcttcctggctaacacggtgaaacaccaaaccccgtctatactaaaaaaaaaaaattagccaggcgtggtggcacgttgctgtagtcccagctactcaggaggctgaggcaggagaatcacttgaacctgggaggcggaggttgcagtgaaccgagatcgcgacatcgtactccagcctgggtgacagagactccgtctcaaaaaaaaaaaaagaaattcccatttaaatggggataacagctccatcctccctcgtcagagagctgtttgttgtaaaaagcaagtgagataattgtgtaaaatactctgaaaattatcaagtactgtgcagatataaagatgttattataatcactactactaccagcatacttggagttacttggattcctactagtttgtacctgccacacagaggcaagtaccaggggaattaacctaataactttggaacaaagaaatgaaaagctaaaaatactttaccccctacaaagctcattatccaaagtaatccaatgacaatctccctgtaaaatgtgctgaattttactgatttttatcttgtatatcataaattcaaatggaaataaacatcctgctttttacctgtgattggaccatcatcttcatcaaattcaattttcactccttttccgttggctgtgctaactccacagccgcctccacgacaaagagaaatgggcacaaccccataaacatatgccagcataatggggacaccaatacctgggggaagagaaggaaacatgtcagctggctattaggttgcaagtgccctgaattc

SEQ ID NO: 200673 - DNA, 1000 bp, Homo Sapiens
actgcactccagcctgggtaacagagcatgaccctgtctcaaaaaaaaaaaaaaaaaaaaaaaaagagagagaaagttatatgaagcaacatgtaccctcatacccaacctgaagatgtgattagacacaatcttatgaattcaactaacatcaatgcaaaatgaaataaaatttcctatgtttgaattatttgtcataagaacaaagatcaagactattggatagggcagttaatactttgagtgttttaaattttccttgtaagaataacacttttttctgatagatgttcaaaaaagagtaacttaaatagcaaacatttggccaggtgcagtggctcatgcctgtaatcccagcactttgggaggctggggcgggtggatcatctgaggtcacgagttcaagaccagcatagctaacatggtgaaaccccgtccctactaaaaatacagtaattagccaggtgtggtgtcaggtgcctgtaatcccagctacttgggaggctgaggcaggagaatcacttgaacccaggaggcagaggttgcagtgagccaagatcgtgccattccactccagcctgggcgacaacagcgagactccatctcaaaaaaaaaaaaaaaaagtaaacatttgtgatactattgttccatttttaaaataacttttatttggcatttactttgagttaatgtctccttcttttaatgttttctattattaaatgtctgcataaggtagagatcatttttacatgtccttgaaatacatcactgagtcatggtatattaaaacaaaataataaaataaattaaaaccatgcactttaatgcataataaaaaccatgcactaaacagaaaacctctgacatttttagtgtatccctgtcacagaaaaatgttcactatttgtttttatggtcagttcttatcttttcaaaacacataagctgttaggaaaaatacagaatagtgtgtcatttttaggaattcttggaattc

SEQ ID NO: 200674 - DNA, 1000 bp, Homo Sapiens
tttttttaatgctttgagacagggtctctctctgtcgtctaggctggagtgcagtggcacgatcttggctcaccacaacccccaccaccctggttcaagccagtcttgtgcctcagcctcttgagtagctgggattacaggcgcatgccaccatgcctggttaatttttgtatttttagtagagacggggttttgccatgttggccaggctggtctagaactcctgaccttaagtgatccgcctgccttggcctctcaaagtgtttggattacaggcgtgagccaacacgcccagcaaacactttttagtttactatcaccaacagagtactgaacaattttcatcaccccaaaaatttcctaatttttctcctttgtgtcaaacctcttcatccctaacatttgctgattattgatctcttctttgccctatgattttttttgagaatataaggaatcctatacatatatataaaaccttttgaggctagcttcttttatttaagctgtgagaatttgtgctgtatagcactattgtctttagaaggcccaggaacagtccagataaagagcccaaagtaagccatactattgacagtaagtagactttactagcacaagagtattattgttaggttagtctatcctcacagtggagacgagggcatcaatcaaatttggtactctgttggtggtagtgaatctatgcaaacattaaaattcttataactgtacaccaaaaatgtttatttcactgtatgtaaatttacatgtcttgaaaagtataaaagttatcatagcttgatgacattaatctattttcatgtgtacaagaagtcttctagtgattctgacgccagtgagctcccaactccattctgggaaatattgtgcacagctattaaagttgatctaagtttccatgttctgattcttcattctccaagtatttatatgatggaaaagggatgggaagttcaattttggaaaacctgaattc

SEQ ID NO: 200675 - DNA, 1000 bp, Homo Sapiens
tgcctctgtcttattatttattttcttttcttctaaaattttcattagatgtacatttgacttgctcacgattatttacttcttcgtatggtgccattcataatttaagaatttacctcgacaagctctaggcactaaaaatcaaacaaaagactaattggtcagtgttcctatatttgaaacacttactgtaatctctttgaagtcatttgtttgttatttagctgtgcatcattttatccctttctgcttttctctgctccagagtactgagaactttgtcttggaactcttagtgtatgctgcttgagttaataaaagggatatttacttgttaatcgttcaaatcaagcctccacatattgccacctaagaaccaccctttgaaactaaggataatagtgtgtatgtgtatgtgtgtgtttgtgtgtgtggaagcatatacgaatgatgtaactgtccaaatgttttcattagagaaaatacattccactatgcagctagggaagtggaggaagatgacaagttgggagggaacaattgagatttctctttctaactctccctcctgcctccccatagaagtgtcttctctgtttaagagagagagaagtttgacttgcatatcaactgcattaatcagagggtggggccaaagcagggtgactttgccagttctttcttagctttctgtcaatctcttggaaagacctgcactcaaacatttctgtatttctatatcatgaaatgagtaatccaagtcagatctttactgtctcagttataacttcctcacttgtgacttaacgtttgagtcagaatagtgtggatcctgaattccaaaacttgagtggaaggaggcagcactgctgtagtgttcagtctagctgttcccggagatccataaataaagctgataatttgttcaatttagctcaattctgtggattttttttccctactgactagagaccaagaaaggaatatggtgatagaattc

SEQ ID NO: 200676 - DNA, 1000 bp, Homo Sapiens
ctactttgctttcagctctagctacacaaaggaggtgagaaaatggaaaggattaacgccacattgagttttatcctggaaaataaagattctcctggaatttatcactaaaaagtcaataaaatgcaacaaagcaaccactctataatgacattacattattgccaaattgccagagtcctatagaaatggcacccaagtcctaagcaatttttgcagttttacgcctataatttccatgcaaaaaaaaaaaatcattttatgccaaactaagaatagtttatgactactttcctccttgtataaagagtttctctttaagacactttccttatttagaaaacttaacctatgacaaagtatggcactctatatatgcacttttctatatatatataatttcaattttaaaaaactatatatgggattagaagccaattcttcaattataaattgatcataagtaaatttgctaaaacaaaaagctttacaatctaaatgttcaagatttgatagactttctatgttgtaatatattaatttgaattttcaaaactaacaaataatgaaagtcagtcgtaggtgtcattaatagctcagttgaaatttacgcacaagattaacaagactgaaatcaattaaaagaaattatttgaaactgtatttgtgtgtgtgcgtgatgtgtgtgtaactatatatggtcaaaattaaagtccgctaattgttacctaaaagtgaccttaactattttagggaaccaaaccaaaaatattagaaatacaattaggatcacactaaaaatttataaacaacctcttctgtaagaaagaaaagtcaacaagaacaacgaatagctttctatatcacaaagagaatgtctctattaattgaaaacactcaatttttgaatgtttcaatgaattaattcaaattttgaacaagtttagggcaatatatatcaacttaaattttaaataactccacaggtaattttaaataa

SEQ ID NO: 200677 - DNA, 1000 bp, Homo Sapiens
gtagagatgaggtttcaccatgctggccaggctggtcttgaactcctgacccgaggtgatccgcccacctcggcctccaaaagtgctgggattacaggcaccaccgtgtccagactgaacttctataaatacattaaatctcagaataaatcaatataaaacttacttatcaatccagtcctaaaagaagagacaatttccacttagcccttttctttgtatgtgtctaagtcctaaaatggagtctactacaaatggagcctactcctacaggtttattaatccattctggttttcaaattttggcagtttaatgaagaggaaaaaacacctctttttcctatacaaggaaaaataaaatattctataaatatttataaataaaagataaatatttataaatgtaatattctatcttacaaaatataataaataatattgcctacctcctcaaagaatcactgtggttaacttaattgctgtgaaaatatttttaaccaggaaaactacataagagatcattattctcaaactcatctggtatctttgtctggcatttggcgcaagccaaactaaaatgggtcccaaacaattttaaagatttttttgtaaagtactgaaaaccatttaagaaagatattccaatttcttcacttatggatgagaagattaggacaaaagaagtgtctttccgaaggtgtacagaaagttcctatcagagatgaaaaatgaggaccaggcaatctgattttcagggcctgtgcttttcccttactccccattgccttccaaaaatctaaccaacatttcttttctagaagtgggctttttgcatggtgagaggagaggaaaacggcttcacaatcaacaaaagccagcttacacccgcactgacctttcaggatagagctgactgacaacccagataagctagactgcagcactgcgcacttgttcatagtcatcagagagtaatttacaggcctgcaaagaagaattc

SEQ ID NO: 200678 - DNA, 1000 bp, Homo Sapiens
cataatccagatgacattcatgcaactacaatctgttgtttccaccctgccattacacaaatagaatcctagaactggaaagtccaacagaattcatttttacaagtgaatatcaaatatttaaactactctgttcacaaggtttccttttcttagaaaaagttcacagcctttgatggacaaaagtctaaatcagggacaatgacagcgttaagcccttgccaggcagacacatcaaagttaaaggagcctcctgatatagagaagatccagaataaaactttgtgaaaggaaataaggctatacagaaaaaccatctaagtattggtccgtttattattattattattcttattgagacaaggttttgctctgttgtccaggatagagtgcaatggcacaatcatagctcattgcaacctccaaccactggtctcaagtgatcacctcatcctcctgcttagttgggactactggcatgcaccgccacactcagcttggtctattatttatttgattcaaatatgtaagaaaatgcaagcatagcttaaaataacctgaaacatttattagcaaaaaataagcaaggtagatgccattcaggattctagacaataggccatttatgatttgcttgaccatcagaaataagttatagtaatataaaattccttttcaaaactcaattaatgtttaaaagagagcacacaacatagttgattgggaacctctcagttgatatgatttctgaataaatcgcatgtatcagttgactagaaaccatcactctcaactataaaatggagattacgttgttcagtgatccatgttacatcaacaccaataagagaggaagacagggtgatgatacagtatcttagaaagtcattactaccattttataaattccatttaaacaaattaactgggaaagtagccagcatcagtgtagataacaggcagtacttttttttcttaaaattcgaccaaaattcaacta

SEQ ID NO: 200679 - DNA, 1000 bp, Homo Sapiens
gtctgacagatgaagaataccagtgggacaagcaggaattcctcaaagcaaggtgtcactggactcagcctcagggaggacgttagtaccacttgtcaggtcaaggggcgtgagggggctgaagttcccaggctcaagggcagccctcagtgattacacacttagtagctggtgcccgtgctggcgccctgatcttctctgccgcctgcctgatgttcatgtcactgtctcgccatacctctacacagcactctgcctttctaggcacttcctgcagctttcctggctctgccccacacagcagctcactggaggatgaggctccttgatctgcctaccttctgaggttgacagagctggaacccaggtctctgatcctgggcctggtgctctttggaccccccaaggcatcaagtttgaaaaggtcatcatgcagacatgacagccacccacccctgccttacacttccctccaggtcctcagaggagagggctgagttgttgtctctgcagaattcggatattccctgcctggctgccatcctgcccaggagagaggccgagggcttggagacaggtgtttgccaggcctaggcccgggcacaggtggtaggtcttatccatgacatgaagctctctgtggaaacagagtggggctgtgctcactgaggcctcagcctgaggagcaggccaaccgcaaaataaaaggacagcaagactggccaactgctgtgactctgtgtccccatctataaaatggaaagtcaccatgtgactgtcaggccagtcaccgtgcctctgcatccttatctataaaatgaaagagacctttgacctgcacccaggtgacagagtgacgcaaacaggtgtaataacccttcctaatcagcaaagggtgactgtgcccatattctgctatgtgagaaactgaagcataagttggatgaatgttgtatccaaggtttcctgtgggaggaactgggagctggggccagaattc

SEQ ID NO: 200680 - DNA, 1000 bp, Homo Sapiens
gttttacgttaagttaacccatattctctcaatacgttattttactttctcttataagttaaacaaaatcagaaagcatggttatccttttctggatctgcaaaccaaaatataagccccatgaggtcagaaaatctgtttggtacattaaacatctgcaatagtgtgtgatagctagtgtgcatctaataattgtttttaaatataaaatgaatgaatacaatctgccgagtgtcctgaaaggggtctttaaagcagagataattggattcaagagagatgtctgtttctagctttagctcctcttcagtgagtttgttcccacatcatatgaacttgttttcccccaatagtaaaggcttctcactcttctgtggtctgttgtcactttttgtggaagatgatatgctctgatttactgacttgatcagactcaatttactaaaccatgtgacctttgggcaagtttcttaagcactctctaaatcttagtttccttctctgcaaagcggataacaatacgtgctgtttcatgggtaataccatgaactcaccaggcgctgtttggtcttttgtttctaagcactcagagaggttcctttctcaggttttgcgagtgagtcagggctatatgactaagtgaaaatgatgcatgctactttgaggcctgacccttaaaagcttagactcaatccatttcacattcacttttccccggtctattggccactgccatccagtggagaatactaaggacccaatggtccaggatagtcagtctggatggcctccaaatgactgcattttaccttcatgtgagtaagcagtaaactgtagtttatttaagccactaatatttggaatgttgtagttgtttttattgttgttacatcaggtaacataacttgattaagtagatctataattacaataattcaagtaaggattacttaggatggaactagtacaaagcatcactcacaaaagaagttcaaaaaaa

SEQ ID NO: 200681 - DNA, 1000 bp, Homo Sapiens
atcttcaaactcagcaaaccggagagtgtcgtaggtcagagtagctgttgaaaccaaagatgcacaatcatcagacacttataatttcataaactagtatcgaaagaggccatttacagcatttctgtgctgaagagaacaactgtaaattcttgtaacagcagcactccctctcgtatctcgggcctaccaagacacccaccatggatggagtaaactcttaggaaagagaaggaggccctgctgggcagctgctctgctaaggtatggggacagggaggtggggccagcatgctacttcctgagcctttcatattctgagccactgagtcagtgtctaacagctgacacgagggtgagaggccaagttaggggccaacctgaggggtgagaaagcaaaaaaatgaaaacccacccgattcaagcacttactttagacttaaaaagtaaaggacaaaaataaagttaaaccacctccttcatccttgtacgcaagggaagccaagaagaaacagggcaaagagtcgttttccatggccatcctaaggtttaccagatgtcaccatggcagcgtgttcagagtcactgtgatgaaggcagatgctccggggcaagaaacactgagctgctgggaagactggggttctggtctaccccaatttcctggttaggagcaggtgctggagaagcatggggtgctactctcaggtagaaagttaacccctggacactgagagatcaaactctctgccaagtccccagaggtacccgggtacaaaaagcctagtgatcaaggactgaacctgttttcatttcaacaatgctaccagaagagcatgccaccacttccatggggcaacaccccactttctaaggaggcagctggctgcagagccatggtgcttacctgctgggctaatgattagccctgcatgccatcttactctgttttacttcaattaagaaactaggccaggcacagtggctcatgcctgtgatc

SEQ ID NO: 200682 - DNA, 1000 bp, Homo Sapiens
aactgaatcagaagaaccgttttctaacttctctgtgagaataaaatcaccatttgatacacaggtctggaggatctcaagattggctgcatatttctgccccatcaatgttttcttctcctaagcattttttcctatccttgcacagaaacttcaaaacctcttttgtcatcatagtcactaattctggctgtgcaaacacactaggtaataagtccaactccccataccctggcagcatttgggatgttggaagactgcaacttttctctaagacagaacttatcatggcatatagtgggttaaatctgtaccctgcatcattccaaagttgttttttaaattaaaattaatgtatatattgccatgtgaaaaaaagagaaacaaatttctattactgttcagaattttgatttgagaccaattcacatttttaagtggactaatattttagatgactaatttatcaccctacccatctcaaataatgaatgggagagggcctgaataatatggattgcttattacagcatctgcaagacagcatattgtaaacaaaagtttgtcaaactgaaatgttcagttaaataagtattggtctgtcttaagtaacttatgaccagtatgattgctgaaaaaaccctatttaccacgtcccttgtatttgtcagcagttggggtgatacagtgattatatttagatcagaaaatccaaaaatagccaaattttattcttaactacttctactagactccataagcttcctatgattcataaataggaaggcagacaaagcaaaataatactttaatagccaaagctttgtctccaaattttaatgtagaactctgagttctgcttacctatataaataaatacttttccctaaaccagatcaccttgaattagttagttctgtctatttcacctaaccttgaactagactttcagttctcaatactatgatataaggaagatcataccaattacagcaagctt

SEQ ID NO: 200683 - DNA, 1000 bp, Homo Sapiens
cctcagaataatcattctggtaacagtgaagaaaatggattgggagaggaaatggcaaatgtgtaagttcacttttgactttacaaattcgtgcctagaatagtgcttggcaaatagcgggcacttagtatttgttgagtgaaaaaacaaaaagttgttatatgaatcaaaaaaagtcgataagtctgaagaaaaaccacacagaaatagtgcctatttttttttgttgctactgcttgattcatctgctggcttgtttgttatcttaccataagattttcatgaacaaatcagtaagtaaaataaccgaataaaaaaaacagtcaaaggatttgaatagcaggcttacaaaagaggaagtctgaagggtaactagaaatatgaaaacatgctcaatttcactagcaacaactagatcatttaaatcccatgagatggaagaatatttaagagtttgcacaaaacccagtcttcaccagaatgttgaattggaattctcacatgctgctggtgagagtgtaagttggtgaaatcattatggaaagtggtttggctgtcagtagtcattaagttagaagatgcttatctcttttgactcagcatttccactcagatataaaccctagagaaatgcttgtacctgtacagagacatgttcagcaatgttgatcacagcattgttgattaaacaaaaaactttgaaataacataaatgtctatctgcaggagaatggataaattgtgatatatttgtacaccacatactattcagcaatgaaaatgaacaaattagagctatgtaaataaaacatgaaaaaagtttacaaagtgatatatatatatatatatatatatagcattatgttacataaagttaattatgcaaaataatattacatatatgtaataaaagatcaaaattccaatttaagaggctagttatctctgagaagggaaagcaggagggaaatgggattaggggaggttacacaggaagctt

SEQ ID NO: 200684 - DNA, 1000 bp, Homo Sapiens
caggatcagggctccctgcagccccgacctcccaggctccagcgatcctcccgcctcagcctcctgagtagttgggagtagagatgcctcccacatcgcctggctaatttttgtatttttgtggagaggggatctcgccacgttgcccaggcttgaagccagatcaagcaattgggttccttggatttccgaaatagaccccaatattctgcctttaccccggaggatgcagatgtaccttctctcaggccgatgacctcaggcctccacggtccctggagctctaggaaaggtgggcgcgatctcgcgcccacacccagtgctctgggtcataagcctggatctggaaaaacaaacgcgctttgagaagacggggactccccaggatacccctctctcccctcgtccagcctccagcccacccgattcctccccacatcctccacgtccccaggccccacccacctcttccaactcctccagggaaacccaagccctgcagcgcatggaacaaaagaagtggaaccgatacttccggaacaaggctatctgagagcagttcttcctggccctcgggttcatgtaacggcataactggaaccaaagctcactgagcaagggtatatgagagcgggtctcctcgtacaggaagtagaagatgttttgtttgggggcctcgtcgtcctcctccatgtcattggccagatagctgaggacagaaatcaggttgctgctcaggggcaccaccaggagagacctccggctgaggtcagcttctcagagaggaaggtaagggaccgtccctagctcaggactggcacccaccctgcagagagccacgccttcctcaggagggctctgctggacagagacctgatcaagggcgtctcccactccttcaggatggagacaaaaacccaactggtgaccaagagtggtggcttatgcctggaatcccagcacactgggaggccgaagcaggaggatcacttgaggccag

SEQ ID NO: 200685 - DNA, 1000 bp, Homo Sapiens
tgtaaggctttaagaacatgcctgacccagaacacattcacctggaagtatctgtacatattctcatttgtcatccctgacttcagaacgctttgctgttaccttgcagaaacttcttgctaaaagcctggaatccttccgaggtcctgtttcccacagagtcccaaatggtgagaccagcaatgctgtccagcaagagcagctccgagaggttggctgacgaggttgtcttggtgttgttaacaagcagccatatgcgggctgtctgtgcttcactcgacccagacacctagggcagaaggagaaggcatgagggcagatttgctgacaagtccagcttcctaaaatggggcatgagcccagcctgtgcacattaggcatccaggaagaaggagggtagcacggtctcgcagagggcctgggaatttatcagtctcagtatgatttcaaagacccccaagaggttttgacccacacttcccaagctgttgcttggagacagtttcaaagaaactgagatgctgaaatgcagtgaaataatccttgcagagaatcttagaagaaaaatctccaagtgcagaaccagtcaggttggggaaattgtgataaccagtgttaccaagcaaacaatggctccttggtacttagttattttgaagattcagcctcagcccagggtctctgatggtcatgtgatctccaggaaggacccgagctgctcgtccgcctcttggatcatctcccacattcaggctctgcccagcacatgtctcagtggctctactgccagaagccatccagcggcccatgcaacaggctcatcacctgggctctgcactcttgccctgccttcctctctaatcttgtctcccagccctcctgcaccagcttctctccagctctgctgaaatacatgcaggagccagaaaaaagagaaggaagcaatgtgtgtgctgagatgagcgagctctggaatataagaagtgataaaagaaagctt

SEQ ID NO: 200686 - DNA, 1000 bp, Homo Sapiens
acactaacatttgatctagctttctgtgatattattaaaaacaagcgaaaaaatcagaatgaagcctccccaaagaattgaatttcagtatggaatatgtgaaatctctttaacaagtttttaaatctttttaagcagtgtccagatggtcaataacttacctgcagttactattacagaaaattaaaataagaataatcctttattcattttataatcatctgattagttttaccagtgtaacgttatacacatttgcagatagcatcttttgaatattgtgaagagagatgctatcatcttttatgtatacacatttgtttaaatacttgtgttttttttattctttagatatgtaactaaggctggaattgttaacacatagggtagttctatgtttaatttcttaaaaactgaaatttgtttttccacagtgactacatcattttacattccaacagcaatgttcaatggttccagtttctccatattctctctaatacttgttattttcttttaaaaaattataccaatcctagtgaatatgaacttgtattttgtggttacaatttacatgtcactattgactaataatgtttaacatcttttcatgtgatttttgtccacttgtgtatatttagagaaatgttaattcaagtcttgtgccaatttgtgaatttagatgtttatcattttgttgttgagttgttacagtatatttattctggatattagaccttttttgtatacatcatttgcatttttttcatcctgtgttttgtcatttactttcttgataatgtcatttgagggacaaaaatttttcattgaggaagtttattaatttattttgtttgttgctgttattgcttgtacttttggtgtctaagaatccattgccaaatacaaagttatgctaattcattctacgcattcctctgagagttttatagttttagttcttagatttgctattgattcattttaatttaattatttt

SEQ ID NO: 200687 - DNA, 1000 bp, Homo Sapiens
tgaagaaacatctccttcttgttcaccattctaggattgtgaaaagtcttgcctttaggttcataaatcatggtcaaaatagaacaattaaagaaagatacatgaaaataaacatccagaatctaggattagtataaaaattagagatgtgtgtatcaaagtattttgaacactacacgttttcatcacaccccatggtactccagcaaatccacgggtaccagacagactccagatccacaccaacaaagcctcaagattcctgtcaccacgctgcatcaattcctttatctcgggaccgagtggatgtaaagaagtcccagttactgaatctcaggataatttcttcttcccttttaatagaggaggcgggaatggacacaatagctactttaaaaacaatttttaaaataaggttatgttctcattcattccttatttgtagggcaaaccatctggtaaagcatgagtattctgattttaggtttctgacttaataagctggttgtagtaacttagcttttctcttccacattttgtcatataatgaagaaaagactaaatattatgatctcaaaactagcaaacattttgaatctgagacagttgtgaacaggtaaacaatgtacatttttgctatttaaactgatttagaaatagatagctatttcttccatatgctgaagaggtatgtgcactcccatgtttattgcactattcacaacagccaagatatgaaatcaacccaagtttccattaacagatgaatgaataaagaaaatgtggtatatacgtacacaatggtatactattcagcataaaaacaaaacgaaatcctgtcatttgtgacaatatgaatgatcctagaggacatcatgtaaagtgaaataagccaagcacaaaaggacaaataccgcatgatctcatttgtatgtggggaatctgaaaaagctgatcttacagaagtagagaacagaacagtggttaacagaggctgggg

SEQ ID NO: 200688 - DNA, 1000 bp, Homo Sapiens
cttagaccaagcttggaaaacacagtgtctgctgccttcatgttgcctgggttaccaggcgacttagccactcacagcacagtgacctgcgactcaattagagaaatgccattttgagttccataagaaaaataaggctttatttttaaaaactaaacataacttcacttttttcccgaatataagagtaataatggctctttacttgaaaaaaatctacacaatacagaaaaattaggaagaaggcaaatctcatctgtcatactgcacgcagagtagcagacatttttctatgtgtttttatgcacatatttatatttatagacccaagaggctatgtgggacattaggagtgcgacccagagcagaaccatacaaccgccggttctagcctttgtacaaggtaaatcatgggtttcaaacatatcattgcctcctgactgatctctctgcttctgcttggtttctccttcagcctaacttccacaatgctgccagagcaatgtcctacgctagggtcctgagtgcatcgtcctcttgctcaaaatcagcaatggtttcctacccttggcaagacaaatttcaaattttaaaatctgctcttcaagaagccgggcgcagtggctcctgcctataattccagcactttgtgaggccaaggtgggcagatcacttgaggtcaggagccctggacaacatggtgaaaccctgtatgtactaaaaatacaaaaattagctgggcgtggtggcacgtgcctgtaatcccaggtactctgaaggttgaggcaggagaactgcttgaaccaaggacacagaggttgcagtgagcctagattgctccactgcactccagcctgggtgatagagtgagactctgtctccaaaaaaaaaaaaaaatctgcgattcaagatctttccatttgcccctaaactgccttactaggtctgtgtcccaggagaccccactgcactctccatgaaccttctctcagttccgtat

SEQ ID NO: 200689 - DNA, 1000 bp, Homo Sapiens
tggtggctcacgcctgtaattccagcactgtgggagaccaaggcaggaggatcacttgaatccaggagtttgagactagcctgggcaacatagtgagaccctgtctctgcaaaataaaaaaaaatattgggcatggtggcatgtgcctgtagtcccagctacttgggaggctgaggcaggaggattgcttgagcccaggaagttaaaactgcagtgggctatgattgcaccactgcacttcgtctgggtgacagagcaagaccctgtccccccaaaaaattatagtcatattgtccttagattaatccataaattcaatgtaaacccaattttgtggccaaaaacactttaaatatggtggaaatacaaaaagcaagctgaaaagatagttgaaacagtgtagtacacacatttaatatttgtaattcacagaatactcttaaaaataagtcaggtgggctgggcacggtggctcacacctgtaatctcagcactttgggaggccgaggcaggtggatcacgaggtcatgagatcaagaccatcctggcaaacatggtgaaaccctgtctctcttaaaaatacaaaaaaaaaaaaaaaaaaaaaacccaaaacaaacaaaaaacctagctgggcgtggtggcatgcacctgtaatcccagctacttaggaggctgaggcaggagaatcgcttgaacctgggaggcagaggtggcagtgagccgagatcgtgccactgcactccagcttggtgatagagcgagactctgtctaaaaaataaaaataaaataagtcaggtgaagaggctgggcgtggtggctcacgcctataatcccagcaatttgggaagccgaggagggtggatcacttgaagtcaggagttcgagaccagcctggtcaacatggcgaaaccccatttctacttaaaatacaaaattagctggtcgtggtggcacatgcctgtaatcccagttacttgggaagctgaggcaggagaattc

SEQ ID NO: 200690 - DNA, 1000 bp, Homo Sapiens
agctgtacatacattgattaataaaaacaagataattcttgactcacttattccagttcaggttcactggtgaccagagcttatcccggcagctcagggcacaaggcaggagccaaccctgcacaggccgccatcccatctcagggcacactcacacatatccacactcatactgggaccatgtagacacaccagttcacctaacatgcacatctttgggatgtgggaagaaaccagaatagttggagaaaacccacacagatgtggggagaacgtgcaaactccacacagacagtagccctggctggcaatcctttttttcccctcatcagcgttataacaaagtaacattgaacaaaacagcactatctgtggacctgctgtaaaactccaacctagcctgataagtgaaatccaaaaaatttaatcaatgaaatgtgacactgtgagcctttgtggttggcctatggggtcctgctctgccatccaagtctgttttagtccacagcaggtgtggtttggtgccacctgctgtggatgtgtagaatgcagatggggaattagaaactatgaatgcatgtgtcctcagagtcaaatgaagaaaatatttcaagtgggattgatcatgtgtcaaatgctgctgctgattcaagtaagatgagaattagatttatcagtatggaggtttgggagcctcacaggcatggatttaaaagagaatgaaaaacgaggaattggagatatgaatatcgaaaactcaagagttttgccttaaagagaaacagagaaatggggctataggtagaaaggaatataggatttgagtttttgtttttttttaatgggaggatgtttatacattaatgggaatgcagtcaggagggaaaaaagactgaagagggagagttgctgaaacaacacttgataggccgtaagaagggatctgatgaacaaatggagaggctggctttaagtaggaatagaaacagtccaattccag

SEQ ID NO: 200691 - DNA, 1000 bp, Homo Sapiens
gggccacacattgtgatggatcaggaatatctttttttttttttcttttgagacagtttcactcattcaggctggagtgcaatggcgggatctcgactcacggcaacctccgcctcccgggttcaagcaattctcctgcctcagtctccccagtagctgggattacaggcacccaccaccacgcctggttaatttttgtatttttagtagagatgggatttcaccacgttggccaggccgatctcaaactcctgacctcaggtgatccacctgccttggcctctcaaagtgctgggattacaggcatgagccaccatgcctggccaggaactctactaaaaatacaaaaaattagccaggcgtggtggcaggtgcctgtggtcccagctactcaggaggctgaggcaggagaatggcatgaacgcgggaggtggagcttgcagtgagccgagatcgcaccgctgcactccagcctgggtgacagaactagactccgtctcaaaaaaaaaaaaaaaattgtgtatttatcttataagcaacaatcaaacatgtgttactgcttttttaaaatgttaaatgagaactcagcaaaacttctccactctgaggtgttccagatcaactctggagtctaaaagctctgacctagagagacaccttgagtcaacagagaccgtaggcgtcgcagtgggctacagaggaggccaggtgtcctaaacaaacacatttgccaagccacctgtttgcttgtgagcaccaggagcaagagaggagcagggataccccaaagttctgctatggcttcatccctctgctttatttaaatgcagtggggttcggcatggctgttaaacactaggtggttttagaagtaatgcaacatccgcttgttcctccaaatcagagctgtgatcctgctcgcccactgactgtatttcagctgcccgggtgtcagcttatcatctttttccgcagccttgtcatcattctcagtgaattc

SEQ ID NO: 200692 - DNA, 1000 bp, Homo Sapiens
aacatgataagtatgatactttgcctgtgtagtcttcctcccaaaaacccacaatcccagtgcaaccatcagaaaatcattaggcaaatcccagttgaggaacattctataaaatacctgacctatactcctcaaaactgtcaaggccatccaaaacaagggaagtctgagaaataattacagccaagagagacctgaggagatgtgacgactaagtgtagtgtggtatgctgggtgggaacctggaatagaaaaatgatgctaggcaaaaactaaggaaatctttatttaataataatgtattaatattggtttatcagttgtgacaaatgcacccttgctaatgtaagatcctataataaaaagggaaattggttgggtatgaatctaaaactgctctaaaataaaaggctttgtttagaaaaatgaatgagtctgccattgctttaaatattcaaatttagagaatgtagaactaataaaataatcaaaatatagcccttctattatttttgcagtctattaaaaacaccattgtaccagtaatttgatgcaggttcaatccaatatcaacctccaatcaaaatttccaagtcagataaaagtatatgtaataggaatccagaaagagatccagaaaattgtgtttcaatattatgtatatcatctgattttaatcacaaagtgaatctttcatctagcatgttgcctgcctctcctttaatttctaatatggtaagtattgagcatactaaccatgtcctatggactatacttactagattaccatatttaccattacttatctacgtagatataacctgcatcaaccaaaactctttgaggtcctgagtaatatttgagtgtagaagtttgagaaccaaacagcttgagaaccactattctcatcatagtgaccgatttcaagtctttcaagactgggacatttgttactctatggccaccctgtatcttaaccccatcagtgtttagagaattc

SEQ ID NO: 200693 - DNA, 1000 bp, Homo Sapiens
tctgtgtattagaggtatttgtgcatgtagttctttgtccccagcatgcctagatcaccaagcttgatttttttctacacttgtctatatcatacctataagaccatgcctgatacaaccgtgtgtcgttcccttctctaaatcatgttaataatgagtgcttatagacacctttaagagaatcattcacaagacaacaatcatgcaatttccaatgtagcagcagccacttggttttcttccttccttcttctctttctctctctttctctctctctctttctcttgtttgttgttgttgttatccttcccttgtttgctgtatattttcatatctctatgttattttaatataaattttgtggtttaaaatagcatattcatctgggtgctgcttctgttctgtatagccttggctagagtcactcattcagctatatttagctggcaactgtccaagaagactttagccgttttttacgtatctcaatattcctccacaggaccttttcaacagtatgtgacctaaacatggcagctggatccaagtagttcaaagggacaagcccctaaatgcaagctcttaataagcctctacataacatttgacccatttggtcaaaatgaaacacaacgccaagcccaatgtggaagaagattaccaaagcgtatgaatactgggaggtatgggggtcatcaatataacagtctacaaagtaatattttttactaatggatcccagaatgtgcccaactcccaatgttgtgatgtatgtgtctcttcatgtttttatgtgagaattcctgctagagaaattttatatacatacatacgtggtacacacactcacacacactcatacccacatgcacacattctccgagagtaaaattgctgggtcctaattatgtgtatatttaatttgccttaagtactgtcgcaatgatctccagaattgctgtacctgtggtcattaccatcactagtgcatgagaattc

SEQ ID NO: 200694 - DNA, 1000 bp, Homo Sapiens
tggccttttttgtctcttttgatctttgttggtttaaagtctgttttatcagagactaggattgcaatccctgcctttttttgttttccatttgcttaatagatcttcctccatccctttattttgagcctatgtgtgtctctgcctgtgagatgggtttcctgaatacagcacactgatgggtcttgactctttatccagtttgccagtctgtgtcttttaattggagcatttagcccatttacatttaaggttaatgttgttatgtgtgaatttaatcctgtcattatgatgttagctggttattttgctctttagttgatgcagtttcttcctagcctcgatggtctttacagtttggcatgtttgtgcagtggctggtaccggttgttcctttccatgtttagcgcttccttcaggagctcttttagggcaagcctggtggtgacagaatctctcagcatttgcttgtctgtaaaggatgttatttatccttcacttacgaagcttagcttggctggatgtgaaattctgggttgaaaattcttttctttaataatgttgaatattggcccccactttcttctggcttgtagagtttctgccgagagatcagctgttagtctgacgggcttccctttgtgggtaacctgacctttctctctggctgccttaacattttttccttcatttcaactttggtgaatctgacagttatgtgtcttggagttgctcttctcgaggagtatctttgtggcattctctgtatttcctgaatttgaatgttggcctgccttgctagattggggaagttctcctggataatatcctgcagagtgttttcccacttggttccattctccccatcactttcaggtacaccaatcagacatagatttggtcttttcacatagtcccatatttcttggaggctttgttcatttctttttattcttttttctctaagcttctcttctcacttcacttcattcatttcatc

SEQ ID NO: 200695 - DNA, 1000 bp, Homo Sapiens
tatacttttaatacctagatagtcaacaatatgctatatatttaactcagtttatgtttattagagctcttggattataaacaccttgagggtagagactgttgttcatttttgtgtcccttgtaatacctagtatactgtcttgtgcatgctaggaattcaacagatgtgtgttgaacttagttcaataaatacatattgttaaatttgattcaacaaaatatttgagtggctaccatgtataaaaaaatcattttgctttagacctatcagactgacctgaacttattctacacatgcattaaaaatattaaatatatgtggagaatttggaacccttgtgcactgttggtgagaatgtaaaatggtagagctgctatagaaaactgtaacatggttccgcaaaagaatcaaaaatagaggctgggcacggtggctcacgcctgtaatcccagcactttgggagggcaggggtgggggatcacgaggtcaggagatttagaccatcctggctaacatggtgaaaccctgtctctactaaaatacaaaagattagccgggcttagtggtggtcacctgtagtcccagctactcgggaggctgaggcaggagaatggcgtgaacctgggaggcggagattgcagcgaaccaagatcgcgccactgcactccagcctgggcgacaggctcaaaaaaaaaatcaaaatagaattcccttatgatgcagcaattccacttctgggtatacagtgaaaagaattaaaagcagggactcaaattgatgttcatatgtttggctgttttatgtttctttatgttttatattgttttgttttgtatgttttatgttttttatgatatgttcatagcagcattactcataacagccaaaaatggaagctacccaagataaatggatatataaaatacggtatgcacatgcaaagggattttttttttttaaggcagagttctgctctagcacccaggctggagtgcag

SEQ ID NO: 200696 - DNA, 1000 bp, Homo Sapiens
tgataccaagatgataatttctgggaggaaattcaaataaaagggagaaaaataagttttccaaaataaggtttgcagagccttaaagaaggacaagagggccctaaaactccttgaaccaccttcctcacatagtatcagttggacaaagttttcagttgccaaaacaaaagcacaatttctcatcttccaaaactaccttgaaagttgatgttattaagcttgttctgcaggagagcaaaatatctcttagggaaaaaaaatggaaaacttagtcaagccagtgaccaactctggcatcatacaggtcaataatccaatgaacactagtttgaacagagtcagtgttttttggaaatttaaactgaattcagttaaaacaatttgtgcacagagactggcaaaaaagcagctatctattgaaccaggggcactttggatgcctgaagtgctagattacattttgagaactaggaagtaccaaggggtgtgtgtatgtgcccatattcagggttggagaggatggaagaacatgtctaacccatcaaaattatttgttaaaaagtgggtttttggtcaagaacccatttggaaaaccttccaactcagagcatattctatgaccttcatgatgagtactgggaaaatcagacttaaaattccaacaactttgaataatttacaaaaacagtcacaaaaacaccagaatatcaagtttgaagggaaaattagtctcctgtccttcaaaacaaggacaagagctatttcctatctttctttcagcatcaacaggctttgtaggaatggaaaagtacatttaaagggttgtcctgagaaggccaagtcccttaacctttctattcttgttagaggaggtacagtgtggctgaggcggagagcaaccacactttgcaactctccaggcctggcactctgaagggcaaagaaatgccagagaatatgggggaagcccagacctccacattcccttaaggaattc

SEQ ID NO: 200697 - DNA, 1000 bp, Homo Sapiens
tgcaatattgatgtgtctggaatgactcacagaagtaagggggaggggttcagcaacagtctctgaattttaacttggctatgttgttctacactcattatcatgcacactagcgctcctgaagtgataaaaactttgtttctttgtgtaaaatgggctataaaagaaaatcatctgctagtgttgctaattgtagtaaagagaaagtaaagaggtctacgaaagcaatgattctaagccacagaacagaagtgttggaggtgcaaagtacaccatcaattcacagttaactcagcaaagaatcatgaaaaagtgtttatctgtgctaataatcaatgaccaaattaaaataacatattttattttattaacttgaaaaaaatcgataagtattggtgtttcaagggtttgagaaaggttcttgtcgaagttagagcaatatagtggaaagattaatgaatttatattcagaatgtctgagttcaagctcttctaattagctatacagcctgaaattgtacctgaaatctgtgggttgtaaattccaaggggacattgtttattgatttgttgcacatgttacatgaatttgtaggtttgaagttggccaatgaatattacaaagatccctgcccttaaagagcttttctattgcattataggatagggaggtagggaaaagaaagatggtgagtagacagcaaaggaataaataaataaacaattatcttagaagaagataaatgacatagaaaatagaaatgaaatacggtaagtaaagattgacattacgtgtgtgtgtgttgtgtgtgttgtgtgtgtgtgtatttgtacaggtgtgttgttgcagtgtgtcactgcagtaataaaaaaggtggtgaaggaaaaacttcatgctatggtgacatttgagcaaagtcatgaaaagaaggtgagggagttaaccaagctggaaatcacatccaggagtggagaacagataaatcatagtggctaaact

SEQ ID NO: 200698 - DNA, 1000 bp, Homo Sapiens
tatcatttcttgctcatatttatggaaacacaccgtggccaaacagctctatttttcctccctttgctggcctacaactgtttctccagttcccattgtccttaaagggtaccagaatatctcagcccaaaatatgcctttttggcttatgaattattttgagctaaaggcaattaagagccagcagatacaggaaaagctctttatctcctgatgcctgcctgaaaacaaagtgtattagtctgttttcgcactgctgtaaagaactacctgagactgggcaatttataaagaacagaggtttaattgactcagttccacatggctggggaggactaaggagtcttccaatcatggcggaaggcaaaggggaagcaaggcacatcttaaatgacagcaggagagtggggtggaagtgccccacactttttaaaccatcagatctcatgagaactcactcactatcacgagaagagcaagggggaacatctgccgccaagatccaatcacctcccaccaggctcctcctccaatttgacatgatatttgggtgggaacacaaatccaaaccatatcattctgcccctgtcccctcccaaatctcatgtccttttcacattgcaaaatacaattatctgttctcaacagtcccccattctttactcatttcagcattaactcaaaagtccacggtccaaagtcttacctgagacaaggtaagtcccttccatctatgagcctgtaaaattaaacagttacttccaagacacattggggtacagggattgggtaaatgctcccattccaaatgggagaaattagccaaaacaaatgggctacaggccccatgcaagtccgaaacccagcagggaagtcattagatcttacagctccagaataatctcctttgatgccatgtctcacatccaggtcatactgatgcaagaggtgggctcccaatgccttgggcagccccacccctgtggctctgcatggtata

SEQ ID NO: 200699 - DNA, 1000 bp, Homo Sapiens
ataccaattagaaactcatgtacatgttaataccatcacacatatgtgagttttatgcatattacagagagagaggaatagtaaggagactttgaaaatagagttggttaaagtaaagtcttgattatgcaacacctaagaaggtattgatcattcattcagagaatatttataaagggattagcacaaaacacaagtaagtgcagaaatttcagagaaaaaaaaagacacagtttccgtccctacatactttacattctactttgaaatatagaatataagtaattaatgaaaatgttataaaaaactattatctcaaggaaaaacccaatgtcaagaaagcatcagtggagataatagaaagtatcctggagttactgattagtaagatgagatctgaacaatatgtaggaataggtaaaagaatgacggggaggggcagacaaaaagggaaagcagataaagtggtcaggacagctctcaagtcctcaggttttgttttcagggaatgattaagaatcagatgatattaagaggtaaattagagccagatatgtattaggagtggaaatatttgttaagaatattgaaaaactactaaaaagagttaagaaataaatatatatgaaatgattctcttttttaagaaaagcctccaagatattcaatggattaaattacagaagggccacactgtaaagagccaaccattcaggaaattttgcatggattcaggtagcagatgatggaaaagtggactagaatgttgatagaaataattatgcctacatttactaaaatagtgccaaattcatattgtgttgtgtggaaaaaaatattaaaacagacaaaacacttaaaatgtctctggcatacagtcagtggctcagaaatgttattaattttgcaattatggttattttattactaatactactaactacttaacatgtgcaagtcacttgagatatcattcctcatttaagagaaccagattatt

SEQ ID NO: 200700 - DNA, 1000 bp, Homo Sapiens
cggattagatttcctcatagaaattggagctttagattggaccagaaagtgagaaaataatgagccaagtattcaaatagcatcactgcaggaaacagatttctgcttttagtatgcaaatgtttctattcccttctactttacctcttcggtcttcacattctcgacagcctctatttttccattaagtgctttttgttattgtctttaaacattattaatttaagtacttattctaatcaacaacagaattaaataatgtgcttcgtatataccaggagcaaacaggaggttcctattatgtagagctgtgtctcttagttctgttgtgaaataattttctcttttcccttcttgctagtttcttccaacccctagaattggtaccagcacctagtccccttgctgacctctacctttttttgtggtcccagaatacttagcctctttgtgtagtccccaagcaaagcaagggaggagacctggcaaagtgatgggtgtggagagaggagaccccgagcatcttgactgtcccagagtgctgtgagatgaatgtctattagcctgaccacttaacattccaccacacagacgcagcctaatcttaacaatcggctgccaaaggtgaggcaatggccttctttatatactaaagaaagaggtaggggaaatatgtctttatgatatatcataaagacaagtcaggggctcagcttaaaaatcagcttccatttggtaaaaaccagttcatctgaggaagctgtcatatatctgactctgaaaataaggagaaaaagaaccttggagagcttggacacaccctgcctgaagacaaaagttaaaggggatggcttctgaatgccttccccccaaaacacacacacccacccacacacccacccccccccccacacacacacacacacacacacacatcatcatcatcatcatcatgatcatcatcatcatcatcaggaaagataatgcatctagccttctg

SEQ ID NO: 200701 - DNA, 1000 bp, Homo Sapiens
tctttgatcagtaaaagaaaatgtgacactgccttctttccaaaccctacctcttttcctctgaaaactatgactttatcaagtgactgagtttttccctattttaacaaagactttctatcctttcatagattcactgcactgaataaattgtctgtttattacctgttgatctacttctagtgaattctgcttgttaaaaaagtggaatcgtaatttctcactggttttctattaagcctccactcaatgttcttggtctcctctctaacaatggagctgatgagtttagtggagtctcccggtaatttccctcttgtattgcatgtttctctcagatgaatatttcagttaaaactgagactagttgataattttttccactgaagtctgtattccaatttttttttttttgatacagggttttgcccaggctggatcacagtagcaccaccacggctcacagcctcgacctcctgggctcaagtaatcctcctacctcagtctcccaagtagctgggactataggcatgcaccaccatgcctaggtagtgatttcatatttttgtagagaaagggtctccctaaattaccaaggctggtcttgaacccctgggctcaagccatcctcccgcctccgcttcccaaagtgctgggattacaggcatgaagcactgcacccggctctactcctatttttgtctggttgttcatctggatctgaccaagtacggcctatctgcctcacccacttctgtcttccataagctctgtttaatgtcagataacatgtattgactttttgttctatctgccaaaattgggattggagttgagtatattgggttgaagttgattatattctttccatgttgtcacactgtgggtgtttttcactgtaaaattagagctatttaaatacattatctgctcacctacaaaagctctcacttcttcagaaacacagaggttggtcaatgcttcccattccactgaattc

SEQ ID NO: 200702 - DNA, 1000 bp, Homo Sapiens
ccaaatttgttcctactcttgtaatttctgatctctcttggatgcatcatccaccaagccagaaacctcagggtcatctctctccttcccatcatacttcctcacccatccatacgtcaagtctgccaattctgtctctgtaatcattcttatattatttctctaatctctctttccaccacttttaggctaccatcacctctagcatggactactgctacagtccttttatcttgtgtcttttcaatctaatttttattgaggcaaagtaccatttttgagcagagatgaactagccattcaccaaactggtttttctttcctccaaagcaacatcttggctaggcaggagaccaaaatatgccacctcaaaatatgcctctttgatatagtattatcttgagccaattatttgggaaccctgcagacacaagagaatctctgaaaagagagtagacgttacccttttgcagggaaaatttgcatctataaaaaaatctccatatgcaagaatcttagttggttttatgctgctgtaacagcataccacagattaggtaatttataatggacagaaatgtatttggcttatggttctgaagtctaggaagtcttcttgttgcatcattgcatggcagagggcatcatcagtacatagcaagggaacaagagagggggctaaactcattcgcatggtctaaaaacatcttaaaggtcctacctctcaacagtgttgcattgggaattaagttttcaacccatatgctttgggagatacattctaatcatagaagagtgtctccttctttgtaccaggaagaaaaggatgactacatctctaaagactcttatcaatggagaaggcactgacttaatctgcataacaaaccttaccctgtttactgagcttttcctgggtatttctccataaccagccttccccacaccttttttccatttcaacagacatggtatttaaacctgaattcaaagccacttc

SEQ ID NO: 200703 - DNA, 1000 bp, Homo Sapiens
tagagcctggcacaaagccagctcgtaatgagtgatggcctttatttagttctctgttgttgttacagctactgctgccactatcatatatgaccagttcttataatcaggtgacatgccccgcagtgtgggtatgaaaggaagcacaagccattcaatgcagcactgtgccctcgctccagatggtccccagtggagaggaaaatgatcatgaggatgtgctaaatgtgcatatgccagccatgagctcctcccttcacctccctcctctgtttccttcttacagcccagtggtgtgagcccattgtcagatgagggaaccccacagcgtggctgagatagggtggagtcagtcctaccagcaggcagcaggcagaggggagtgtagacaccaccttcccgtgacaaacccaggtgctggaatcctgctgggtcttctcaaacatttactcacaaagcaaacactcacgtgtgcctactgagtgccagggctgttagtgctggccgtggtggaatgaacaaatgcaggacgccctctgtgctgaggccctcagcaaacacacaggctcgtgatggctccacggcaagatgcatggacgtgcacagcattcctgaaggctgcttcctgttcttcccatccatagggaggccttcagggagtccctggacatcgtgctccagtgccccactcactggcctcagcatggcctgcacggatggggcctcctgcctctcctgcttctgcagcactgcccggggaagtgaggggctcagaagacccaaaccctgttctcatgaaccaatgggaagtgacagagaagggtgaggaggtgccctgtgagacaccacaggggagaaattctctttcttggacctattgaacttttctttgtctcgagtgaacactttatttgtggcctgaatttctggtaaaaatgacttttttttttcccctgagacggagacttagttgcccaggccagagtgcagtgatatgatc

SEQ ID NO: 200704 - DNA, 1000 bp, Homo Sapiens
aaaaaaaaaaaaaaaaaaattagcctggcatggtggcacatacctgtagtcctagctactcaggaggccgaagtgggaggactgcttaagcctaggcattcaagactgcagtgagctatgattgcaccactgcactttagcctgggtggcagagcaaagtaataataataataatgtctgtttctagaataataataataataatgacaaagaaagaactcaaatcagtgacttcagcttccaactagggaacttagaaaaaagagcaaattaaaacatgtaaaagaagacaaattataaatgtcagagcagaatccaatgaaacaaaaaatagaaaaagagaaaaatcaatgaaacctaaagttttttgagaggatcaatacaattgataagcctctatccagactcaggaaagggagaaaaaacacaaattatcagtatcaggaatgagagaagacagcactacatactctacagatattaaaaggataatagaaaatattccaaatatttttatggcaataaatttgacaactcaaatgaaatggacaaatgccttgagagaaacaaacaaataatgctcattcaagaaaaaatgggttacctgaatagccctacatctagtaaagaagttgaactcacagttaaaaaccttcccacaaagaaaactacaaggccagatggcttcactggtgaatctccaaacataaggaaagaataatactatctacacatactcttccaagaaactgaacaggagggactactttccagctcattttatgagatcagaattactctgatatgaaatccaaactaaaacattgatatagtttggcaatatgtccccaaccaaatctcatgttaaatcgtaattctcagtgttggagatggggcctggtgggaggtgactggatcacgggaatggatttctcatgaatggttcagcgccactcccttggtgctgtcttcaccacagtgagtgacttctcacaagatc

SEQ ID NO: 200705 - DNA, 1000 bp, Homo Sapiens
atacacatcaacacatacactaaaacacacaccaacatacacatcaacacatacactaacacacacaccaacatacacacaccaacacacacacatcaacacacacatcaacacatacaacacacaccaacacatacacatatcaacaaacacacaccaacacacatacacacacagtaagcacaccacatagcaagacacacacatatcccaacacacacaccccaacacatacacacatcaaaaaacacacatcaacacacatcaatgccacacatcaatacgtacactaacacacaccaacatacacacacaccaacacacacacaacacatacaacacacacaccaacacatacacatatcaacaaacacacaccaacacacacaccctaacacacatactccaacagtcacaccaacacatacagcacacatacatcaataaacacatcaatacacacaccccaacatacatgccccaccatacaaacacatcaacgcatacaacacacacatcctaaacacacacatcaacacatacatgaacacacacatatcaacacacacagccccaaagagatacacaccaacacacaccccccaacacgcacggcccgcacactccctcgggcgccttcctgcaccctgtacttcgcagtgacaaccccgcctccgcatggctgccctggtggatttctcatggcactcgcccccagtcggggtctagttaacagactgactctgtctgtctgggtcggccgctcagtgtgagcctcaggagtcactgtccgcttgcccactgctgcgaccccaggggccggcccagtgctggccacagcgggcactcaacactgttggcccagtgagtaaacaacgctcctggctcctgccccagctgcctgacaaagtgaccctgccacagtccacaaggaggtggcgcatgaagggggcctcacccatcggcctgggagacaggggcggcaatgggggctggtggg

SEQ ID NO: 200706 - DNA, 1000 bp, Homo Sapiens
taacccaactggatgatcactcaaagaatttgttctggagtgccattgcccttcggctcatggaggaaggagtgaattctctttacctaccatgcttctacactaacagctgattcactccacttgatttcaagtgtctttatcctctacctgccctcatggcacccatagcacctatactgattgttgagtttgacttcctgcctcctgacctaatggtaattttaaatctcacatcacttggccagttactggaatgtctgaatatttactacaagcatttaattgccccaaacaatgaattaactatcaaaatgccgagtctggcagacacagcctattttttgtaaatgacattttcaccaccattgctttaaaaggctcagcagctgacatcccttgggcgcaagctggcctgttgtttcgaaaactatcagctcctctcaagattctacataatctacagctcattcatacttccctctaaagaaatagttactttagtttttgatagttcttcctatcttacaaaacctattgatgtatgtcatttcattctatcatcacatcctttaaaattagttctgcatcatcatctatggagatggcacctccaaggactgtgtattgtatcacaagtatgcatcattgctctgcaacaccaggaaccacagatttacatggagtcttgtgttgagatggcaattttctgaaaagctctatgaaccaagcaacaccatgtgagcctccgtctaacagtgtgtaacataaaagaacaaacatgtctttacccgctacaatagaagtgcagacagcaggtgattttaaagagaggcaatgtccacctccccacagggaggtgtatcagatgaaaaaagaagtatgttagtgtgtaaaactatttttcaaaaggatttgactacttgattatttttcagccatttaagtaactttgataaaaggtgagatattatgtttatccatttattaaagaaagctt

SEQ ID NO: 200707 - DNA, 1000 bp, Homo Sapiens
tagatttttaagactagttaaatttctagagaaatgctgataaaacgtcaaactaacagaagcatataaaattataaatttgtatatacccactaacttaacatgttactatagacggattatagatagatgatagatagaagatagatagatagatagatagatagacagatagatagagaaaagttggcagaagaaaaaagagaaacaattccaaaatcactggaaagaatttaattcaccaatcttcctagacaataaaacaaatgaacatgtaagaataaagaatatctaaacacaacaaataacttattgtcataaattgaccagtgcatacaaatatcataaaatgtatattatctttaaatgcatactcaatatatactaaaagctattattagcaaatgttaactaactgaataattcagagaatatacacttggccactactgaattaaattgtaaaataatagcataaataactataaaatctccaacttttggaaattaagcaatatacttttcaataatacatgagtgaaataagtcatgatggatattgaaaatcttatgtgctaaatagagtatgatacagtcagtgtatcaaaacttttgaaataccaaatattgtttctaaagacttgtttacagccttaaattcttacattaaaaaatgaaaagagctgataatcaatatctaagattctatctcaagaagcaaaagaaataaacagcacattacacccaaaaattagactgaatgaagtaataaacagcagaaaccgatgaattacagtagaaagcaaacacactacagagaaattgaacaaaacacaaaattgctttctgtttttgaagattaaaatttctaatcacttacagggctgatcaagtaaaataagagaaaagccacttgccaatatcgggaacaaaataggtctgtaggtcctgtctgttgcagaaagaaacactctttcaagttgacttcgccagtgaattc

SEQ ID NO: 200708 - DNA, 1000 bp, Homo Sapiens
ttatctttcttcacttttaatatgaaattttaagtcataatattcctctaagcactgcttttgcaacatcacacttattttgatgtcttgaattttctttataattcacttaaaatattttctaattttctttgtgatatttttctctgccctatgcattttttcagaatctgtaattttcaaatatttgggaattgcctaaagaaattattttattgattttgaatttcttagtttggtgttcataggatacattctctataatttaagtcttttaatactgttatcatagaaaaccttatggttgaaggaaattatctgacctctttcaatgccatgtagctgaagtataggaagttacccagaaacagttcttgaattaattgaaactgaaaactattattctcagaatttaaattcatcaaattaaacattcacaagaaacaatgtcgggaatgtaacatatctctttagctctagacatacatattctaagagagtaaacattcaatacattattttatgcttccagaatatcacactgaccttcatgcactaaaacacctataatcattttaacatttttctgaacatcttcaagttgctgatgattagttcaaactttgaagatggatggtgtagggaatagatttaatttcagtatttgaggcaacctgagaatactactgaaacaaaaataccgtgtttcatctgcttcaaaggcctacaaatatttaatactgaaatctccgattttaaatgtggcaaccttgggaggccttattttacagtaacttgatttttcaaattctaggagaggcttgggctctttatgagtactggaaatctagagtgacaggaaatgaaataaagtacagtgatgatagtggctattgtgtaatttaacaaatctacttagaagaggtttttcccttcatatggagaaattatttattacatgtaattactcctgaatatagaacattcacaatcccttcct

SEQ ID NO: 200709 - DNA, 1000 bp, Homo Sapiens
aaccaccgtcactcaactacaaaatttaaataaaatgggaataattcgatcccgaggtgggggggggggccaagtggcagcactcaaccatcaaaggcaagatgggcatagctacagtaatatacaggagaagcaaagcagctatcagaatagtttgacccatgtagagctctggcattggctacttaatcatggtgttcatagaagtgaaactgacaagaagcctactgcattcctacttaatttatataagaagaaaacttctaggttgaatggacaaaagactaatctgaattataaaaacagagagtcatggcccctcaatcaatttccagactggagctagtttacagacccagtaccccttgaatgaaggagaggccaagtttcccttaagaaggatcccaccacactccagacaatttttgcagtgaatctttcccccatccttccccaaggagacatccagccttttaccagggtaactgtgctttggagaaggggaagtgatcagacatttcagtgactactggacactggctctgagctgacactgattccagggcaaccaaaacatcactgcggtcttccagtttaagtatggacatatggaggtcaggtaattaatggagttttagctcaggtctgacttacagagggtccctggattcatcctatggtcatttccttagtgtcagaatgcataataggcgtcagtatacttagcagcttgcagaacccacacattggctccctgactgataggatgagggctattatggtgggaaaggcaaaatggaagccattatagcttcctctacctagaaaaatagtaaatcaaaacaatatcatacccctcgagggattgcagagattagtgccacttgtcttgaaagacacaggggtggtgattcacaccataacacagttcaactctcctatttggcctgtgcagaagacagaaggatcttggagaatgacagtggattatcataagctt

SEQ ID NO: 200710 - DNA, 1000 bp, Homo Sapiens
ctgcgtctccaaaaaaaaaaaaaaaagtcaagggccaaagtaacaatgtaggaaaaatttgatgactttaatttcatttacttctaggagtcttacatgcaagcctaatgcagagtagagaagctcaccaacttgaaggaagcatgaatgaaattacaaggaaatctagcttagaaaaattaaccctgtagcttggtttttccactctttgctcttggcaaaaggatcttacgtatgtataccaaatgtctatttgaaaattttgtttctctgaatatagctttcttttctctttaacacactggtccagtggttctagattttatgctcccataaattaagtaagacagcattctatatcatgactgaggtgttaatgacattatgcagttgtcacattttgaaatataaacttaaatgcgagcttttcactgtgtgtaaagtttctctgtatttttttaaaaaatttttaaagaccagagattttcagcaacaagaaacataaagaagtaaaaagagcgtagaaaccctgccctagaggacctgctccaccacttaaaagccatgtacctcttgaagcctgtttcctttatttccaacacaggaatttttatatttacaccctaaccatcacatgggtcacatgtgataacaatgtgcaagtttcttacaagtgttctaggaatctgtaagtcttagagttctgaggtttattcccaaaggacaggaaattgtgggttacaccaaacagttaaacagggtggcagggaatccctgtcacgtacccaggcctttgggttattttctagggtgaggggacatggccagtagtacaaagagcatgtgaacgcatggatgtgggtgtgtgaggtcatgagtgggtgtgtatgtttatgtacaacacatgtattggaggataaaagggaaaataatttgtcttcctgacttcttctctattcctggcttttcttagattgttattcctctctaaacaaagctt

SEQ ID NO: 200711 - DNA, 1000 bp, Homo Sapiens
acattaggatactaattccattatgagcaggtgtttttaggacagagcaacccaaattacaagtctggtacctcaactctttcatcatattatagcattctctcagttctttaatattttaaagtcaaacaccagggaggaaaaaagtctatgtattttgggttgaaaaaaagtaggagatatggaaagaccacttgcataaactgacttgcaaatatttttcacaggcaatacaataactgaataaagaacacctaaaatcagtattatagtcagtgtttaaatatcaatggtaagtcaggataagacgggttgagaagtccagtgaccaacttttacctactaactcaacttggttgacaccacaccttgctgatacaagaactggaagagcagcaacatgctattcttttcccctatgtgagtttgcaccataacacaaggtataaactgaaaaatgaacaaaaatgaggtagaggtaaaaagaaagggaaaaaagaaaagttctcccagtcaagatcacagtctggaagactgacattcatggaccagggaagctcacagaatggagacatttgtcatgtctctcattctttctgtcctaggtcttttaagtatggcttcactgtatccaccattcaacaaacattcattttatcatatgcgatctgtatttgtatgtgttatttgtattatataattcaatgtctactgtagtgaaaactagcaaaatggtgaacagatttgttatttaaatgcattcaaaatccaaatattaattgcattaattatgtctactctacctctttttttgacaaagtatctaaagcagaatttgaatcatttgttgaataccctcataaaatattagatataacagggtaatcacaggatctttgtcaagagaataaaagggttgttaagaagttggatctttcaatgagtatgcaaatgtcaggatagacagaaagtaaatagcactggttatcactaggaattc

SEQ ID NO: 200712 - DNA, 1000 bp, Homo Sapiens
caggagatatatagtcaaagatttactgcaagtaattgacttacacagttgtggggactggctaggcagatcctgaaagcaagccatcaggaacagcaggctggagcttcaggcaacagctgcagctgcactccacatgtggaattgctttttcttcagggaagtctcagctttgcttttcaaatcttttcaactggttgaatccagcccatccagattatctagataatgtccctaatggcaactgctatgaactttatgtctaccaaattccttctcagcaacacctagattagtgtttgattgaataactgggaattgtagagtagcctagccaagtcgacccataaaactgaccatcacacccttattatgagttgagtgtttttagaattgtgaatccaaaccaatgcttgagcatttcctttgaaaatttgcatctccagcatttcttacaacaaataatatttttccaaaaagtgacccagaagttggaagaagctcttcacaaatatgatagtgtttaatgactggacattggattgtgaacttttttcagttcaaggataatttctacagcagaataaaaactgctatcaaagagctattgccaactatcaatggtgatacaaggatgttttttgttcaactgaaacccagctgaatttataattatgtaggaaataaacagttaatatggttatataatagaaacagtaccacacattgtaactaaattatactatgtatgcctacactaccactgtaacgtttggaataatgattatactatttgccttattgctttttgaagtatgggtatttcagtgcatactttgtagacctcaaaacccatgaagggtctcaaagaagctggctggataaaagcctgctgcgaatgcctttttactctcatagattgggattacctgaattcaacctactctctgtttacaaactccaactagagcagctatgcgatcttatgcctttagactct

SEQ ID NO: 200713 - DNA, 1000 bp, Homo Sapiens
gatatttagcctttcaaacctcatgttgaaatgtgatctctaatgttagaggagaggcttaatgggaggtgtttgggtcatgggggtggatccttcatgaatagattagtgccctccccagggagtggggctaagtgagttcttgctgtattcattcccacagaagttcctctgaaagctggttgttaaaaagagcctggcaccttccctctctctcctgcctcctctcttgtcttatgatatctacccaagccagctcccctttgccttccaccatgagtggaaggagtttcaggcctataccagatgcagatgcctgtgccatgcttcttgtgtagcctgtagaactgtgagccaaataaacctctcttctttataaattacccagcctcaagtattcctttatagcaacacgaacagactaagacagatgctctcctgcttaataacttcctctgtcctctttagcatgggctggaagtccctgcatgaactggccctacccaactctctgacctcatctggtaatattctcctgctaactaacttcactcctcccatagtggctttattctgttgcttgaatataccaaccttgctccagctcagagcctttgcttatgctcacccctctgcctagaacactcttttcttggctcttcatatggctgaatcctcattatcatggactcaacctcaatgtgccactttagaggggctttcactggttatcatatccaacaaaacttttcttattcgccataatatcatcctattttattttcttcataacacttctagctctctaaaattacgttgtttgtttaattttttgttgaatgtctcctctgtgtaagctataggaaaacgaggaccttgtctaatttttttaaatacagtgttgtatttacagtacttaaaaagatactgagcactcagcaggtgtttcattattttactgaatgaattttaataaattggcgagttattgaatgaattc

SEQ ID NO: 200714 - DNA, 1000 bp, Homo Sapiens
ttttttaacttttaagttcaggaatacatatgcaggttttttatgtaggtaaacttgtgtatgagggtttgttatacagatgatttcatcacaaggtcttaagcctagtacccatttgttatttttcctgatcctctccctcctcccaccctccaccctccaccctccaataggccccagtatgtgttgttcccctctatgtgttcatgtgttctcatcttacatcttagcctttagaatttatccctctttttgggtgggggggcggtgagggaggagagggaattgaagtaggagagttctagggtgggtttagaaatctcacatcactttatgcctatattaataacaaataaccaccaagtagtctattgttgaattaaagatgaaagctgtagtatccatgaaaacaaaaatttgtaaaagacatgaaagaacataacaactttatatgtataatgtttttgtctgttgaagagctgcagaaaattacttgatgtttagtgccagctgcagtagcatgctaaactgcacatgttccaccaaggaaaaaacaagtcctcattcctcgtggataggcacacaaatttgacttttcactatcacctatctaagcaggcacctgttattactcatgtggtataatactccatttccattggagatttttgtgagaagtaactcataattgttaatgcaacaaaatgtgtgtccatacaattagcatgaatgtaaatatgtccatctacattttatttccttctggatgttagcgaaatactgttatatgtaagaagggggtttttgttgttgctgctgttctttaattcttaaagattttagtagtcttgccatcattatgcttctttaaaaactcaatagtaagcattttagaactttttctaaatttgaatagttgaagtttcagcttctgttttaaccagaatttattgtaaatggccaaaatacctatctactgctaaacatcattctggaattc

SEQ ID NO: 200715 - DNA, 1000 bp, Homo Sapiens
aagtcataaagtaataagataatggcaaaggcatcagcagccaaacatctgaatctatttcactaaactaccaataaaactagggttttaaaacaaattaatgttgtctcattttattaaaaagaaaagcaaacaattttagaacaacttaccagcaacactgaatagaaacctggctgtgtctcccactgcttcaactgctcctcagctggttttaacacagcagtatcctgactggtggcctgtgttaacacctgaagaacaacagtgctggcactattgagatccatggaaacctggcaatgataagttaacatacttgaatatgtattacaagtaataaaaaattaacagtaaaataaatggagacaaaaagctttcatgttctgaattactcccattcatctaatccttcatgttctgcctttctatcttttctaagtataccccatactcatccttaaaattcataatcaaattatttttgcttaaatcaatttattcctaaaggaaactctctttcattgttccataaatagaagataataaattgagggaggggagatacacacacaaacttcaaagtttctaaattctgagtaagtaccattacgtgcccaagactaagcataatgtcttctgtcttcgttttaaaaaggagattaataagtgttataaaagtattaaaccatacagtaagtaacacctaactttatccttgacaaaatcagaaggaagaaaagaaaactgcaaaagaattgctttgacttgttagtaaagtactctccaacatcatcttacgtgccaccaatggtgcatctccaaatcattttaagaaacatacaaaatgaaatgctatggggaaaaaagccaaactgacctattaaacaaaaatctaaaacctaagtcagaaaggatcttaagggctgggtcatctaatcctataccatgtagctgaagccattcaacaaacacacaatttcttgattttgttgaattc

SEQ ID NO: 200716 - DNA, 1000 bp, Homo Sapiens
ccaacacactccagcctaggagacagagtgggaccccatctcaaaaaaaaaaaaaaaaaaaaaaaaaaattgctgagccaccattgtcgcaacatttttagaatataaaaataaaaaaaaataaataaagacacagaaacacagccaactgaatagtcagatactgtttttatcacttttttgttcagagaagatgatgccagttttggccaattttgttcaacaaatatttttgaccacctagtttgttgcaggcattgttgagtcactgaggtaacctcaaaggaaaaaaaaaatctatgttctgctttcatttttatgagaaaatctaacaatatatagacaaacaataaacaattacataacaatatatgctatgaagtaaataaggaaaagtgaagtaaaagtgaccaagagggctcctctaattcagagctcagaaaagtgtctctttaaggagatgacatttaagttgaagcctgagagtgccagtaatacaggctgggggtaggggtagagtgaagtgagaagttccagaacagaatgcaaagaccgaaaagaataagcgtaatgtgttggagttatacacatcaagtaggtagagtaactgccctgatagaaatgagctaagtaatgtattctaaactccagaggcaagaataggaaaatcatttaaaaaccttaaaactctccaacattgactaccaagaatcctaattagattaagaactcaatttttatgcgtccctttagctacccaccgccaccactgtcacagttgtccatcttccatatggtaaatgccatctttcctctaaaaactatcatgcctgtcattcatatttcatcacatctccgatagaagtacttttttaaaaggggctgggggaattctacccagaaattgctcctgaattctcctacagatccctacttcacgtagtacaatcataggttaagagcaaaggccctggagacagactgacttgggtttgaattc

SEQ ID NO: 200717 - DNA, 1000 bp, Homo Sapiens
agctgggaccaaaggcacacaccatcacatgtggctaggcttttttgttttgttttgtttttgtagagatgaggtctctctacattatccaggctagttagaactcttgggctcaaacaatccttccacctctacctcccaaagtgctgggattacagatgtgagccaccaagcctgatcaaagcatgattttttaaagatatttttttcttcacgaactttacagatgaagattctctcaattaaaaagggtatgtttgcttttagcctggctctaataggatcagaggttttgtgtgacatcagtcacactctcactgctgtctggtgttaggggtttagtttttttaggttttttttttttttttttttttttttttgagacagagtctttggagtgcagtggtatgacttggctcactgcaatctccaattctggggctcaagcaattctcatgcctcagcctcctaaatagctaggactacagatgtgcaccaccatgcccaactaattttttgtattttagtagagatggggtttcaccatattgcccagggtggtcttgaactcctgagctcaggcaatccgcccaccttggcctcccaaagtgctgggattacaggcgtgagccactgcgccaagcctgataccagtcttaacaccctcctactgcatccagctctgggatctgagccagaaaaacctgagatctcatcctggttctgcaactcactggacctcagtttcttttgctttttcaaaaagaaaaaaaataaaaaggagacggtactatcccctcaaagggtaacacttggttaaatggaataacacctggctccttgtaggtgttcagttgtcatcattccaaagtctgaacacacagcctcctttctgaatcgatcaagttaaaatccctgacgcagactgacagagctcaacctaaatgctaatacctacctcttcctcaccctaatagtctcctctaataaaatcaagctt

SEQ ID NO: 200718 - DNA, 1000 bp, Homo Sapiens
tcacccaggctggagtgcatgacaagatcctggctcactgctaactccacctcacaggttcaatcgattcttatgcctcagccttgcaagtagctgggattacaggtgtgtaccaccatgcccagataatttttgtatttttagaagacagagtttctactaaaacacccttgatcaggctggtctcaagctcctgggctcaagtgacctgcccacctcaacctcccaaagtgctgggattacaagcatgagtcgccacgctcggtgtgacaatctttgttttagcaaaaaccgtctgggcaattgtgatcctcagagttttcagaacgactgctctaatctgagcatttcggctatgaattatttcactcttactcccacgttagcagaatcacaaacatggtgaggtgttgggtttcccttgttattcagttttaaatattttctaaaaatttgtgagattttattgacccatgagttacaagtatttttcttaatttcccaacatttgggggattttctagatttcttcttgttaagacatttctaatttaattcaatcatggtcagagaacatattctaaacaatttcaatactttgttacaaagatatgttttgtggccaagagtatggtctgtttcagtgactattcagtgtggtttcaaaataaaggtattgcacaattgtgggaattagcattctataaatgttaattttttcaattttattaatatcattcaaatcttccatgttttcacagaatttttatctacttattttaaaaatatccaacaataatgaatttgtcattatcaagttctccttttagttctgtcaatttttccttcatatattttaaagtagtctcattttacacagacaaaataaggattgttaatgcttcctaatgaactgaaactttcattattatgaactgtttttatctctagtaatactcccttaatttttactttgttattaatatagctactcaagctt

SEQ ID NO: 200719 - DNA, 1000 bp, Homo Sapiens
aaacacagagttcttatgctaaaaggccgacatgccaccctaccatgccaatcacatttcttagccaatcaaaagaaggcattagatttaagaacctagttatttaaatctgagtagaagctggattccatttccccaactttccaaataaagaacacttaaagatggggaaggatgtaaaagcactgataaataaccaacaagcattgattaagcaggtattatgttggcactgttctaggcactgaggatactatagtaaagaagaacattcttgccccccaaaagcttatgtgatttttatataattaaatattaacaatactttcaagtactgaaaaaggctagaaagaaaatatggcaggtgaaagaaaacaacacacccttttacctggggtggccagagaaagcctctctgagatgacatttgagttaagactggcatcttgaaatagaaaccttgagaaaagaggcaggtgaaaaaaatatttcaaggaggatgaggagtaccaagtactaaggtccctaacaggtaagcttagcgcatgtgaaggccggaaataaggccaacatggctggagcaccactaacaaggaagagaataaagacaggttggtactagcagaccatgataaaatttggattttattaagtgtaatgggttactattagaggattttagctaaggaaatgacaagatgatgggaatttgggccagggttatagcaatataagagatgaatagtcatactcagaatatattttggagaaacagctaagggaattacagatgcattgtatttgaggtgtgagagagaaatgaagagtgattcctaagttttgggcctaagtcccaagtggatagtggagacacttattgagaagggttctactatatgtgttatgtttgcgggtgggggagcagattaaagggataaatcaatagtttaggatcactttctatttttctatgaatatgagcctgagaaaatatgaattc

SEQ ID NO: 200720 - DNA, 1000 bp, Homo Sapiens
gactcaatatccccataagcatagggaaaggaaaacaggtcattttttgttcagaatcttatttgagaaaaaaaaaaatgatcaaagaaaagatttgcataaaaatctgcaaattcaggataaatgtatgaaaacattttaaaatgtgattataaaatagaccagtatagcttttcaacatttggttgtaagaatcccaagaatgtaagtttatgatcttagtataccacctagaatcgagacaaatacatgaggttatgaatcatgccattttcagttttaaaatctgttacatagtttcttcattgattcttttttgccacagtgtgttatggtcctcattatttggatgaataatttgaataataagtcagcttgtgacttacctaaataaatcttctgattcctagtaaagtgtttttcattatatgaaatgccagctatataagaggagattaaaagtactaagaactataagttccgcatggattatcatatgctaaccatgggccaggcacggtggcacacacctataatcccagcactttgggaagctgaggcgggtggatcacttgaggtcaggggttcaagaccagcctggccaagatggtgaaaccccatctctaccaaaaatacaaaaaaattgccagatgtggtggtgcatactggtaatcccagctactcaggaggctgagtcaggagaatcgcttgaactcgggaggtagagattgcagtgagctgagattgtgccactgcgctccagcctgggtgacaaagataaactgcatctgaacaaaaaagaaaaagaaaagctaagcatggacttaatttctctgaggtttaaagctgcaaagagttgctcttcatgaagtaggtgggatctcagctgggcagtgaaatgtgagtggggtttggtcagctggtggaggctgcaggaaaattatttacgtaggtgaagagtaaacacaatcaggtatctaggaaagagaatgaggaattc

SEQ ID NO: 200721 - DNA, 1000 bp, Homo Sapiens
tatacaaatagccaataaacagttggtatttcagtaatcagggaaatgcaaattaaaaccacaatgaaatattacttcacacttagcagaatggctaaagagactggcaataccaagtgttggtgaggatatggaacaacataaataaaaatctcatatactgctggtaagaatataaaccgggctgggtgcagtggctcacgcctgtaatcccagcactttgggaggccaaggcagttggatcacctgaggttgggagtttgagaccagcctgaccaacatgcagaaaccccatctccactaaaaatacaaaatttgctgggcgtggtggtgcatgcgtgtggtcccagctactcgggaggctgaggcagaagaatcacttgaacccaggaggtggaggttgccatgagccaagattgtgccattgcattccagcctgggcaacaagagtgaaactccgtctcaaaaaaaaaaaaaaaaaaaaaaaaagaatataaactgaaacactccctttaatacattgcttagcagctgggcgcagtggctcatgcctgtaatcccagcattttggaaggctaaagtgggcaggttacttaaggtcaggagtttgagaccagcctggccaacatggtaaaactccatctctattaaaagttttaaaatgtagctcagtgtggtggtgcatgcctgtaatctcagctatttgggaggctgaggcatgagaatcacttgaacccaggaggcagaggttgcagtgagtgccaatacggtgccactgcactgtagctgtaatcccagcactttgggaggcagaggcctcacctgaggttaggagttcgagaccagactgaccaatatagtgaaaccttgtctctactaaaaatacaaaaatttgttgggcacagtggcatgcgcctgcacctatagtcccagctactagggaggctgaggcagcagaatagctgaacccaggaggtggaggttgcagtgagccgagatc

SEQ ID NO: 200722 - DNA, 1000 bp, Homo Sapiens
ctactctcctgccactgtgatgagtcttgccatgaccgggaccaaagtgtgactttggtgccaggttgagaaaaattttgaagccagagctatagattggaagtggcaaacttgacggatttgatcagtgcagcccatcaagaatgataaggagccattttcctagagaatctcagacctgagtaattggatgccccgatacccttgcctcgcagccaagggccgtcgggggctctgcagaagtgctccctgcctggaaggcagtggtttgctgattgcagctggaggtcagagccttacctctgtcctgatctctggtttcatccctggcaacactgctgggggctgagttcactcctcctccagagggattttagaaatcttttatgctgaaaaccaggaaggcaaataaaactcatggacaaaatatgtacttgtacatggaaaaggagggatgggatactccctcatcaccaccgatctggaagaaaacgaggagcaccaattctccaggggtctgtgctattcgggggtgtgagccaggcatcttgattcttttagacctcaggcacattcaggttgggtgccaagaatatttggtgcaacagagttgctgacatgtcctagctctggacagtgtcttgtagagtacttcatcctctctggagggaggagggaggggagttttcatagcaccttagccacaggctgcagttgtcctgatgagcccttattaggagaagagacccaagaagggtcccgtgctttggaggctgtggcaatgtgacttctccaaaaaccaacaaggtgttggtttgggtgttctctaagttcctttctgctccaaagctccatgttcctggttggagatggcttcagctcactcatttacagcaggagatcagaggtctctgttcccaccctgtgtgatagaattaagcatcctccccatgggagaattaccctgtggcataatttagtccccaagccagaacctcat

SEQ ID NO: 200723 - DNA, 1000 bp, Homo Sapiens
gctcagtaaataaagtggcatgaatgagtaaaggcaagctataagttagacaggtaactgacaatacatgttcaagtaattcagttggaatgacaggtttgaagggatagttcccaatttattcttccttgttccgtgaattgtgatggaggtgttttgctgctcagttggaagaatgttttcctcaaatgcaagggggaacacttatacataaatgaataaaatcttctcatttaaattgtctatgaatcttgggaacctgctcctacctctgtgatagggagtagttcataaacaagtgagtgaacaagtagcaaacaaatattaacaggtcatcttagaaacggctgatggtccttaggtccggagactgatatttaaagaaaatgtgtgttgaaggttgtgattctttattgcacacttgtagtatataggctagtaaaattgttcttggtttatacgatgggattaaataaaccaatgtttcattgtgctcatcaaaggaccttagcagttctggggttaggactagatacactgtcagcccacaggcttttcaaaagagcagcctgtgagaagagtgctgtgttatccatttttgtataacaaactaccccccaaacttactgactttaatcagcaaccattttattttatctcaggactttgtgtgtaaggattttaggcagaggtcagtagaagagctccatatagcatctactgaagtcatttgctgtgttcagatggaggctgagctgtctaggagggtccaagatcactttagtcatatgtggtaccttggcaagttgaaagaaaagctgggatcagctggaacttcccccccacaaccacccccagagccaacttgtggattttccatcatggtggcctcagggtaattagtctcctaacagagcagctcagggctgaatggccatttatgacccaatctcagaattgcatagtggcacctctagaaggaaggagtgtcaaggaattc

SEQ ID NO: 200724 - DNA, 1000 bp, Homo Sapiens
tgcctcagccccctgagtagctgggactacaggcgcatgccaccacgtccagctaatttttgtatttttagtagagacgagatttcaccatgttggccaggatggtctcggtatcttgatcttgtgatccgcctgcctcggcctcccaaagtggtgggattataggcgtgaaccaccggcgcctggcctatggcacagttttaaaactgcatttgcctagaaagtggactgctgtatatagaccaagtgttgggctctatggctccattgtcttaggctatttggggttggaggaaggaagaggcgtgaagtagaaaaggaacaagctaataaatgctttttaaaaagtagaatttaaaacaaaaccacgttcagctgaacaccagaactcaaccccaggataaaaatccaattttcaaagagctagaagatcaagctaagcacttattgtattttgctgaacgttaaaattatataaatgtactacagttgcctcaagatgttaaaaagtcagcttttcaaatctagtcacggcctactcatatgacagacccaattcaaatgagcaaaattgaaaagttacacatacagacaacttctcaaccaccaggctgtttagtttaagttagaagtcagaagttctgagactctccttttacccaccttgagcaaccgcagcaagttttcccttttcttcagggctgagctgcaacatcgtatttataacaggaagaagtctctctctttcactacctggcttcaagaaaatgaactgcagcaagacgttcttcaagtattccaggttagctgcagacttctctcgctcttgattcctttccaatcttcttatttcacttttgagaagctggtgttagagaaatgagttaaaaatgggctttaggagcttctgattaaatatggcagactgaactcatgtatttttcttctcttccccccaaatttcccccttccctccatatggcaataaaggaaggaattc

SEQ ID NO: 200725 - DNA, 1000 bp, Homo Sapiens
agagagaaggagttctatttattgttgcttcctaggtactctgcaatatctgacacagcacgtgctatatgatacctgttgagggcttgagggcatgggtgagatcacagagccatgtttaatcactcattttgtcctctttatttatgtatttatttatttttatttttgagatggagtcttgctctgtcacccaggctggagtgcaatggcgtgatctcagctctctgcaacctctgcctcctgggctcaagcaattgtcctgcctcagcctccaaagtagctgggattacaggcacccgccaccatgcctagctaatttttgtatttttgtagagacggggttcccaaaatcctagaattacaggtgtaagccaccgtgcccggcctgttctcattttttttttatccatctcatttttttttcctcaccaaagatatgttgctttgtcttggggtttttttacatgtgaattcctgaacctcatccagcccctcgtcccctccccagccagctcacactcgtttgtcacagctcctgggactcccattgacatacaggtaacagccacccacagtggactgtgctgttctgtttgcacccttaaatttatcatgattacagaatgccacttctgcaaactagtcaagtagggggaagtggctcatcgatatgcatgcttgctcatcctctttgaaaaggtaaccagctctgaattcttttttctttgagacggagtttggcacgatcttggctcactgctacctctacctcccaggttcaagctgttctcctgcctcagcctcccaagtagctgggattacaggcatgcgccaccacgcccatctaattttgtatttttggtagacatgagatttccccaccatgttggtcaggttggtcttgaactcctgacctcaagtgatccgcctgccttggcctcccaaagtgctgggattacagacatgagccaccatgccctgcctgagctctgaattc

SEQ ID NO: 200726 - DNA, 1000 bp, Homo Sapiens
gtattaatttttttgagccgtgactcatggttagctcagttggttcactgtacttatatagcctgggctctggtctgatcttcttatgagttttctcccccaccacttctctggggtcacagactgtatccaattcctgataagctactgtgcacatagctatacttagtctaaggaaattgagtcaataaccatcactacttgaagaaaaattcagaaagccatcagtctccagttatttacccggcaaatgaaactcacatttacttaggcccctgttaagtaacaggcacatagcaagaatcagacatggcatttcatgaatacaagcatatttaatcatcatatcaaccctatcatgccatgagccccattttacattttaatgtccttcctaactgtaaacataaacacatggtcacattagtaaaactgacacagtgacacttctgcttcattcttttagttaaaacccagattcaaaggaagaagactacacaagcacatgaatacttactccacttatttagggggtgagatacattggagtaacagaccctgtctctgcggggcttagttcaaattccccagacaatcaagttcatcccagtccatccaaccagttgtagccagagaggaagagtcatataagacgaacatggcctcaaaagccattctttcatttagagctatgtggtggagagaacaattcttagaaacaaagaacgttaagtcctgcagttttgttcttaagattgccttcgatatggtattagttttctactgatcctgtaaccatgtaccacaaacttaacagcttaaaacaacacaaatttattgtctcacagttctgttaatcagaggtctagatgggctcaactagttcctctgctttgggtctcacgaggccaaaactataatatcagacagtctgggtatttatttgtagtcccttagggataatctcctttcaagttcattcaggtttttgaatgaattc

SEQ ID NO: 200727 - DNA, 1000 bp, Homo Sapiens
gaaggagcaggaccgctaagaatgtctcacttttgagacccagggagacagagtctgcttaagactgaagctgggtcaagacaacagggcccaccccaaccctcagcaaaaaaaaaaaaaaaaaaaatatcaagcaccaagcaataagcaacagcagcctatctagggaggagggccaagaacatggaaaaaagcatgcccctctgaggggcatgcccacagggctggctgaaaggtgagagtgaggaaaatgactgagaaaatcctccatcaaccagacctcatcctaggtacgttaggtaacactaaactaagctcaactcctgataagactatttacctcagtctttactgtcctaagcatgatgcctggcatttaataaaacattatgagacacaaaaaggcagggagaaaaaaaaaccccactgtcaagagacaaagcagtcagtagaagcagactcagatgacctagatgttgaaactatgagatacaaaatttaaaataactatgattaatatggtaaaggctctactgaataacacacatgatcaaatggagaatttcagcagaaaggcagaaattataagaaagagtcaaatggaaacaacagaaataagaaacccagtaacagagaagtatggctataatgggctcaatgggaaaataaattagtgatcttaaagatagatcaattcctcaaactgaaacacagagggataaaacagaacagagcttccataagctacaagacaatactgtctctaacacatggacaattggaatcctagaaggagaagagagagaaattagatatttcttataatacaaatttgctggtaaaaaattgtcagctttggtttttctggaggggaaaaaaaggtcttatttccccatcattgctaaaatatttttgctaagtacagaactttgggttggcagtttttctttcaaactttaaagatgttactctttcagtttgtatagtttcacgagaattc

SEQ ID NO: 200728 - DNA, 1000 bp, Homo Sapiens
gagcgaagatcctgagaaaggaagaagggcgtgcatgtagagggaatagagcagcgagagccggggtggtttgatacaaatgccttgttctttggggtggttatgtgaatgtttactttctggtacttcgatcaagctaaggaacatggcgtgtatacgttttgtaggaatattttattaaagattatggaaagaatgaaaaatgccaagaaacagattaatctagcaatctatttttatgggaacacacacacacacacacgtgcaggcgatttgttgttttggtgtttgttgtgtactccaccttacatgatccatcaacttgagaattaacttgaatcaacttgagagttaacttgagaatattttctcaggattacttactatggtgctaaaactcaataccaagccctcttcgttaatcattatctgcttttattttcctcctcgattgaaatttacatgcaagaatagactgaataggatgtcccagtctaaactaaaggaaattaaactacaggtactagaaattaaaccacagtactaaaaaactactagatttttacccaacagatcctatgactcttttgtctagttaggtaaaacttaaaatgcataaagaattattgcaactttctccgtagaatcaaatcattctgacatatgttttctcacctactccagcagggagaatatatgtaattaaattgttcactcccttctactcaaattaaaatctttctactcaatgtgagaccagctgatgtagaaacagattaaacttaaaatacatgtgtgggatttttttttgcttgtttttataaaacattttgaaaaaacattataaatactgtgataatgttataatggtaaaatacccctaattaataaatgatacagtacactgtatttaacttgagtttaggttaaacagaaagaaggctttgtgtgggtttagttggctgtaggtacactttacatacttctaaggaataagctt

SEQ ID NO: 200729 - DNA, 1000 bp, Homo Sapiens
tcagtttcagggattgaggcttacagggtaggcagaccagtctggtgaatgcatgagtatgtgagtgctgtgtgcacttttgattctggtatcattcaggtacttttggagactttgaagtgtcagctccctgtaccttttgggagcatccatctggctgtcttcatctgcctggtgtctgagtgttcacgagtctgttgaatgccttagaattctgaatgccttagaatgttctcaaggatcttctgttgcattccatcagtttccacgcatggttccatttccaatcatgtttgcaaacatctggcctctcaaaattttttttcatatttgattttcataagcagtttactaaatgtgggtaccttctagggtttgtggcccaaatagttgagaagtatttagtatttcttgccttattggaaatgattccattaatcaaacaagtcataattgtaatgcgttttaagatattccctaagtaatgtgggtcatcccttgcttccagtcctcatgttctgcataaatgttatttcacacattatcagaattgtgaattttcttttggaactctagtcatgaccttgtcaaaaattggatcatgcagattgtatgccaatatattcttttgttattttgttatttttattttttgagaccgagtctcactctgttgcccaagctggagtgcagtggcgccatcttggctcactggaacctccgcctcccaggttcaagtgattctcctgcctcagcctcccaagtagctgggatcacaggtgcctgccaccatgcctggctaatttttgtatttttagtagacacagggtttcaccatgttggccaggctggtctcaaactcctgacctcaggtgatccacccgcctcggcctcccaaagtgctgggattacaggcgtgaaccaccacacctggcctcttttgttgttttcacatgcattcttcctgcagcatcaatatctctttctttcaaatcagatc

SEQ ID NO: 200730 - DNA, 1000 bp, Homo Sapiens
ataacttcacagcttggacacatacacacctcaacaaatcaggtatatatattatacacacacacacacacacaatatatatatatgttatatctactatcagccctcggattcaaccaagtctggatcaaaaacactgaggaaaaaaataatttaaaaacatagtaaaaataatacaaataaaaacaatgtagtataacaactacttacgtagcattgtatcaggtattataagaaatcttgagattatctaaagtatacagaagaatttacataggttacatgcaaataccataccattttatataagggacttgagtgttcacggattttagtatccacaggggtcctggaaccaattcctccaacccacagatactgagggacagctatattgttacatatatatatgaatatatatgtcagcatataaatcacatatgcttggaaatataactaaaaaaaaacttcagaggtctgataacctagaacattagaacatgtatgccccaacagctcagagaactcacatcctgggatgtacatccataaagagctcaaagatcaaacatctcatagggcatgcttttacaaatagatcagaaaattcagatcctatgttaaaaccctcaacaaaggtcaaagacttcacacagtggttcattcaccagtgaacacatcagacatttcacaccatcagacaccacccacaaacagatcagggaattaacatcctgagacatataccaacagatcagagacataacaacctggacatgtatccacgaacatcagaggcttcaggccacgggacctgaaaccacaaagggttcacaaactttcttccctggacacacatactcaactagatcagagatcactcatcctgggacatgaatccagaaatagaccagagaattcatattctgggacacataccctcaaagaggttaaagaccttccaccctggttcattctcctgcaaacagatcacagaatt

SEQ ID NO: 200731 - DNA, 1000 bp, Homo Sapiens
cacaccctgtgtatgtgtttgtgtgtgtggtggggggggagggtgatggagagagagagagattgagagagacctaggcagagaaaccatgagctggataatctttccttgtctttgaagtctctgttactgagaactggtgagaacaggtgagcaaagacaaatgaatctctgcctaagagcctattgctgttggggactacatgtccatattggttgtttctgcctttctggctaatttgtggctgttgatgaccatctcgacttcccagatgttaaatatgacaaaaataacctatcttgtcctttttcttcacctttcagctctcagaattggcagtacaccccacagcttcttgctaaagtcctatcacctggggacccacttttcattatttcacatgaactcactagaaatccatacatggttgccatgacaaatatggtattgcaggcccctccacatggccccaaaattttctttgctctacgaactttttccagttcttttgtctattactcaaggataagtgcaaagcagcctcagcacgtgacaaactgaggcatgaactcccagtctctccagtagccagtgactgctggagttttatcttccttgactcaagggagttatggactctcctttcagatgttttgcctgtagccggaaggggaggacagatagtggttctggccacagtgatcgtatctgactgggtttggttctattctgttgttctgttgtctcgtagaagagtaaggcacttagtacctcttcattttagcttttagattccagcaacctgtcagagacaatagaataattcctatttaacatctcattacaaaaacctatgttatactcttatatttttgaaactacagcttataaatcaaatgtacctacttttttttgtcccagataagtggaactaatattttctcatcaaagaatttttccacaattgtaaaaatccttcctgtttctgatttcttatga

SEQ ID NO: 200732 - DNA, 1000 bp, Homo Sapiens
tttaaagagtttgttgaaggcatctttgagcagagtggtgaaaacgattgcagaaacacagacaagatcatcacctgttggaccagtaccttgtgttttgcttcctgactttgtgggaatgctgtgatagtcttcacagtgatttggatgacaggaccgtcagaaagaaatactgtttctactgtaatcattggcatggatttgcacctaagtgccgttgtggttggaatgggacctgtagtaacttgatttaatgagaaaaagtacatgtactaaatgggtgtattttaggggccaaggtttccaatgtagactttaagtttttattttaatctcttgagtacccttctctgcactcattgcctcttttagagagtgtgggaacagatctcctaatcttttgcatatggacttttaaggatcgaataaaatagttacagaaatcaggtggccaaaattagtctccccttttgaatgctgttggaaaatcgggattgtggttaagctgtcattttccgtgaacagtgacacagcttacctggttttgctcaagtgtctgttagctgagctgactgctaaaattactaagcatcagcagtctttgttaccacctctcacaccaacttgaaaactaatttttgattcttctcagtcatgtgcagtggtttccatctgttctgtggtgatgagatagtttcttctcttctaccctccctgctgagagttctcaaggtttctcctgggtcccattgttttctctcatcagtttctttcctgtagtttcctgttgtgaacctccgtgttaatttctagggttcatgatacaaatataaatttcatttctattttgtcaccacaaaaggcacatttgttttatgttccttgttctgaaaaaaagatcaacttacttttaaaggttgactgcattggaaaagttaaaacatttttttctttgagaaaattaagagagttaatgtaactttctccgttagctgaattc

SEQ ID NO: 200733 - DNA, 1000 bp, Homo Sapiens
ctcactgggtggattgtgcacattggggctctattcctaccccttctctcatatcacttttctctcatcttatccttcctgttcatcttatggctgtattttctgtaagattttcacaactttacatccagctcgtctcctgaatttaattcttctattttagtcttctttccaagagttgttgttctctcaaggtcttttaaaaaacaaaaatcctattcttgctctgatttcatgaatcaatattcttcgctcatctgtgaggtattatatttaaaaatattgttaaatcattttctgttgtatgtatcatctgagagtttttctttttcagtttgagttcacttttctttctttggtgtgagaatgttttctcacatatctggtaatctgtagtgctggtttcatatttgagggtgaggttggctgtgagtgagggctggcagctgctgggccacctcctagggaaccatagatgacgttggaccctaaatgtctatttcagtcttttctcttctgcttagtttcctcatagatggatccttcagccttctgcccaggggctgccagaactttgcttcatagctagagaccaagaccttttaaaatttgtagtagagacctcacttccttttccctaccctatccactgttgtgaatctagagccttttttgttcaatctctctagagagtaagcctttgctatttataactggaaggctctagtataagcatcttaagacttgatagacattacaagttatactctgatcaataatgtatgaatattcctgtcttacatcctctgtgtaaatacttggtattttcctttgaaaaattcaccagtgtaataaatggaaaatgatattttacatatgtttctttgattgttagagaggttgttttccatatgttttatgggatttgtatattttgtgaattttctgtccatgtctttctttggtttttattctcaagtgcttactgaattttgaattc

SEQ ID NO: 200734 - DNA, 1000 bp, Homo Sapiens
tagtcaataagaaaagcaaaagaaatgagttagggacactgtatcaacaaactgaagtgtacgaagcatgatattttatataaataggatgaattgacttgaaaatcttcagagcggcagaagagagagcacagattttggagtcagttagatctgggtctgaatttcagctctgcctcttaatagctaaacttttactaactctaagaacttccatgtcattacttataaaatggggataattccagataagctacatcttctgttctcaagttgttctaagtgaggtcatgtcaaagtgcccgacctcagtagctgctcaagaaatgataaccaatgtcattagtcatttgaattgcctctatttttacttccaacttaaatctatgacataagtatattaaagagctcaagctcaagaaaagtatttgtatatgtgctctgtattaattacaaatgaaaaaagagtctacttctcaagagacaaatatatatacactaccagatgttccttctgtagagttcaatcattacatctaaagacatcttggctgcggttgcattgctatctcttaacatggtgtacatgaaattttgcaatacctgcagaaaaggaggagaaagaagacttaatgcactgatggtacaatgctgcaaacatggaagacagaagagtacttactacattcactttattgttcttgtgttttgcatttatattcttgatatcagtcacaatatgtgtgtataaagtctgaggaaaagaaacaaaaatatatacattaaacctaaccaacatttttaaccttgctaaatttggagaacagtatgaatgtacaggatgacttaattttacctatttttcattctatcccaaaagaaacccaaaccaagcaaacaaacaaaaaagcaactacaaagcaaagcaaagttgtcctcaagaagttaaacatggagtttaatgtaatacggcacaattctcctaggtatatatcctaga

SEQ ID NO: 200735 - DNA, 1000 bp, Homo Sapiens
agctctgctaagcagaagggtggtagtgtcccatggtggctcgtaatgcatttcttgacccaatgacttcctttgtggtttcatcagagttcgcaggagctgccatcactctagctttatggttttcaactctaacaaagtgaggagtatagtagtccttttgttttctcgaagaccattaggatcacttgttgtacatacgttgtccgtcatgctcagatttcctaggaattcaacttctgtcctgagtctctgcctttatttctatcctggtgcgttaggctgtcaacctagaaggaaacatttacatcccctcaaccactctctctcttaagtccttaccatttcccaaggtggtgataacgttttgcttttttttttttttttttttttttttaggggggctgttatgagtgctggaaaccaagaaaggatgagcaaagaaaaaagttcccctgagtcatttggccccaaacattttagcatacccaaaggcgccagagccctttcagtaacatgtattattcctgttaaagatccttccccttggtttgggttctgtagctagacaaagagaaggttaagaacatctgcttctgtgtcacattgttccaaacttttcttttcttttcttttctttttttgagacggggtctcactctgttgcccaggctggagtgcagtggcaaaatctcccgctcactgcaacctctgcctcctgggttcaactgattctcctacctcagcctccagagcagctgggactacaggctcccgccaccatgccaggctaatttttgtatttgtcccaaagttttctgcttgacctagataaaacttgggtattaatttatcagttaccttttaaacacattttaaaatttacatttgcaacacccctttgattattaacttccattatatgttgaggcaagtcagtacgaagtggtttcaaagtcacataatactttaaaaatggatagcgtattaaggtaatata

SEQ ID NO: 200736 - DNA, 1000 bp, Homo Sapiens
ctgaaatgaagcaccctctgtccaggggactatgttctatttgtcgaaacttcacaggacataagtcactgctgggcctgtgctctttactttcttcaccaatctctctgctccccacataatactagacatatttccaacccctgaaattcccaactgctctctcatatataagtaagcaaaggaaaaattatgtggaagaatttttttttgatgtcaagaaaagaggaatttaggctggctgcagtggctcatgcctgtagtcccagctactcaggaggctgaggtaggagaatcccttgaaccaggaggcggaggttgcagtgacctgagtttgcgccactgcacttcagactgggtgacagagcgagactccatttcaaaaaaaaaaaaaaaggaaattaaaaaatagtgatatgtctaggatatagcatgatgcaaacccaaaccagacagacctgggtttgaattgcagctcatgatctgcaaggccacctattaaaaggggcctctaagcagaatgtctccacctgtgaatgtggccattctatctgacaggatgttatgagactaggagataatgacgaacccaccggctctgacctgcagtttcttctgtaaagatggggacagttcatagatctcttgagaggatgaaaaatcatgcatctccagcgtccagcctggtgcctgacatgaaatggaggcttactggtcgggagctctgacattatctggaattctccattactcttctcacacctgtccaccatcgtctggaattctccattactctcctcgcacctgtcccaccatcgtctggaattctccattactctcctcacacctgtcccaccatcgtctggaattctccattactctcctcacacctgtcccaccatcgtctggaattcttcattactctcctcgcacctgtcccaccatcatctggaattctccattactctcctcgcacctgtcccaccatcgtctggaattc

SEQ ID NO: 200737 - DNA, 1000 bp, Homo Sapiens
gaactagttagactgcctactttgtcttagataatttttagtgagttatatctttcttgaaatttatctattttttctgttttcaaatgtagttatataacatttttcaaaattatttttctaatttctgtgtatctataattatgtcctgttatttagtcccatttgttttcttgactaatcatgatagaattttaatctattttattaacttcttcaaagctaaattttcaattaattcattctctttattctgtgttgttttaccttttggtaatttttgttcttttaaaaaatattttcttcttttacaggcagttttttttttctcttttattccatgtcttaagtttaatgttttactttttaattttaacctcttatttcttttatgaacttttaatgtgatagatttccttcagttactgtgtctgccatatctcataagtttgaaatttaacatttttattatcacttggttctaagtactttagaatttacattacaattttttagtcataaattatattatgtacaaatatataagcatttaatagagttccatacctgcaacatggaaagaaataactaattgtaagtaatttataatcatatgaaaaataaagcattatagtcttatgtctttattattctaagcaatgcagaatcctaagcacattgttatttcaaaatggtcttatgttcaaagcatgaaaatgaaaaagaaattgacattctgatcactttttcttccgtggctttttaatacaatgcaactcccagatattagttataattagctatcatcacttagctttctctgtcaaaaaaaaatcagctggaatttcttttctctaatttttctttgatatgtctgaaaaaatgtcactagttaagacaagaacaagagtccagttgttaacatacacaacctttaaagtcattatttttatattcttctgtatagaattatcactaaacatacatgttatgagaattc

SEQ ID NO: 200738 - DNA, 1000 bp, Homo Sapiens
ctcactgtgtaacccaggctggagtacagtggcgcaataccagctcactgcaacctccacctcctgggttcaagcgattcttctgcctcagcctcctgaatagctgggattacaggcatgtgccaccaaacccagctaatttttgtatttttagtagagatgggttttcaccatgttggccaggctggtctcgaactcctgacctcaagtgatccacccgcctcagcctcccaaagtgttgggattacaggcatgagccacagctcacggccagaattattattctgttactttggagggctaaaagtatagtgagcctgatgttcattgctaatggttgagacacttgtaagtggcttttacctattgaaatattttggagagaatgcagagggttctcccatgttaagatagattgcactgaaaactttgacatttctctgtcctgataactagtggactgcttcttgtctttgatagtgtggttggtattgggggccaatgaattgggaagatgcagagatgaagctgaaagggaaaccagatggttctttcctggtacgagacagttctgatcctcgttacatcctgagcctcagtttccgatcacagggtatcacccaccacactagaatggagcactacagaggtaagagatactggtaagagaggcttcttccccccttgatttgctctacctttgctgtctgacttttttgtggaagagattcataggaatggaactacaaataggggaaaaattatcttagactcagttgaatattgatatgagcgctgatttccgtcactagaagaaatggagggggtagggaagggagagtaagggttccatttaaaagtcttgtcagcagcatcttgtttcctaaataggagggcctgaacaaaactgttggagaggctcccgagaaatgagccggtaaaactctttaggtaaaaggaagaaagaacgtaggaccattaggcaaattctcacaagctt

SEQ ID NO: 200739 - DNA, 1000 bp, Homo Sapiens
cattatcttccagtctatgaacatagtgtgtctttccatttattaagtcttctctacatttttcaagagtattttgtatttattagtgtacatatcttgcacttcttttgttaaatttgttcctaataattttattgtttttgatgtcgttgtaaatggaattgtctcattaatttcattttgggattgttcattgctgtttcataaaacttcatttgagttttgtattttgatcttacattaatatcttgcaacgttgctgaactggtttattagttctaataggttgtgtgtgtgtttgtgtattccttagaattttccatattgaaaattatgtcttctttagatagaaatatttttactctttcttttccagtctggatgtcttttatttctctttctttcctcattgtgttgagtaaaacctctagtacaatgttgaatagaagtggaagaagtggataacttgttttgttcctaattttaaggggaaagcattcagtctttcactattaaatatgatgttaattatggatttttcatgggaactgtttagcatctagaagcagtttctttcaattcccaatttattgaggggttttaataataaaagtgtggatttgacaaatgtcctttctgtatctattgagatgatcatatggtttttgtccttcctttattctattgatatagtatattgcattgaatttcagatgtttaaataaccttggattcctggcgtaaatcacactttgtcatggtgcataatcctgtttatatgtacctggatttgatttataactattttgttaaggatatttgatctttattcttaaggaacattgtctgtaattttctctactcgtgatgtttttgctagttttggcctcagtataaaactggtctcatagaatacattgagaaatgttccttcctctttcattttctggaagaatctcagacaaattgttaattattctttaagtgtgttttagaattc

SEQ ID NO: 200740 - DNA, 1000 bp, Homo Sapiens
gttttgatggtgagttttctttccttttggggtacttgccagcagctatttttatgagactttctttgctcccctaaccccatccatccccttctctctgcctgcctcattagagttggatttccaggccagccagtttcacagcttggtggcatctaaggccccaagagatctctcacccttcttgttggtacttggcagcctcatgcttctagttctttctatagttttttttttttttttttttttttttttttttttttgagaccaggtctcgctatgtcacctaaactggagtgcaatggtacaaacatggctcactgtagcttagcctcttgggtgcaagtgatccacccacctcagcctcctgagtagtagggagtacaggcaagcaccactcctggctaattttttgtactttttgcagagacggtttcgccgtgttgcccaggctggtcttgaactcctgggctcaagcaatcctcctgccttggcctcccaaaatgctgggattacatgggtgagtcactgcgcccagccccagtcttagacgatcttcctcagcattatgtcctctcttgcttttctggacaacccctgataaagcactgccctccatccctcaaggtggctgcccttccccacttcctcctgggacacccggctccagctcccagggcagaaggagagaaaacctgaagggctctcagagtactgggtcaaccccatcttcaggttttaaagccttctaacagtggggcagaaggtaagaagaaaaaagtcaacctacggccttggtgcccacagagattctaccctgggagccaagggctgcctggggaggtcccctggggccctccctgtgctcactgtagccccaatgctttctcagaactctgtgcactgaagccctcgcagcatggtctggggcgtgctgtggctggcctgaggcctgctggcattggagtgcactgtgccaggcgctgtgcctagtgaattc

SEQ ID NO: 200741 - DNA, 1000 bp, Homo Sapiens
ggatctggcaggtgggtcccagtcaccaccaatgccccatatacccaaggacactggtgacccagcagacctgaggccacagaccaaagacagagtaacaaccccattaaaaatgtgcccccatgggcgggcatagtggctcctgcctgtaatcacagtgctttgggagactgaggcaagaggatcccttaagcccaggagttcaagaccagcccgggcaacatagtaaagtaagaccttgtctctaaaataaaatataaaaaatagccaggtgtggtggtgtgtgcctgtggtctcatctacttgggaggcagaagcaggatgatcacttgagtccaggaatttgaggctgcagtgaactgtgattgcacgaatgcactccagcctgggcaacagagcaagaccctgtctctcaaaaaatttttaattagcggggcatggtggtgtgcacctgtagacctgtagtcccacctactcgggaggctgggtgggaggattgcttgagcccaggaggtcgaggctgcagtgagccgagatggtgccactgcactccagcctgggcaacagagccagagcctgtctcaaaaaaataaaaaagtgtccccagacacaggggcatgggtgaggcctgtcaggactgctgtggtagctcatggtgtcctgtcccttcttcccaccagggaatgaccgtggctgtgggcacaccccctgtccatctgggcctgcctgtgggagctggacactgccctccccagcagccagaagtcctgaaggaaccgtgtgtgaccctcaagaccagaccgggcctgccacaccaacccttcaaagaccgcagcggtccaggcaatccaacgtgggtcccaaagctaggtgaataaccacgaggagcccacggtcagccccttcccatcacatacgcagggaaatgggtcactttcactttcagaaaacaaagcctggaccgcacttaacttggaggcagataacctaatcagaattc

SEQ ID NO: 200742 - DNA, 1000 bp, Homo Sapiens
attttttatagcaatgcaaaaactgtacagccggaaatgtgttgtaggaaatatgtcaacataggaagtaaaataatgtaatgaaaaggttctttgaataaagtgggttaaattgattttctttgcttctcattaaatctgtggacttcagagtaccaaagctcagcaacaggcttgaaacaaacccagtgaaaagcaactttattattgagctgaggattgatatcaataataactcattaataaaaaagcttgataataaaaactcccagtgcctgatgccagctgacagacactgggagttttcccaggtaccctgtgacctagagaaagcttggattcctgcctttggcttgggctggcaagccctgtgcctttactctacattttaatgccagggagacctggaactggagaagggagtgctgtgggaagaaaacagaaggaatgttgttcccttgttttagctttgtgttcatccattatgggttttgggtttttttgttttttgtgtttttttaagaacatttgagatagtttgacagcagcagtcattacatcactgacgaggacgtttacttgtgtaaaatgcaccaggaaatagtgacaactgtatgttgtgctatgaggatgtaagagatttatctcaaatggcttagaaatcaaaatataggtcagtgcggtggctcacacctgtaatcccaacactttgggaggccaaggcaggcggatcacgaggtcagtagattgacaccatcctggccaacatggtgaaaccccgtctctactaaaaatacaaaaattagctgggcatggtgatgtgcgcctgtaatcccagctaccggggaggctgaggcaggagaaccacttgaacccaggagttggaggttgcagtgagccgagattgcgcccctgcactccagcctggcgacagagcgagactccgtctcaaaaaaaaaaaaaaaaagaaatcatagtatttctccgtatgatggaattc

SEQ ID NO: 200743 - DNA, 1000 bp, Homo Sapiens
aaacctctgaggtttctggagatgcaaactgggggcatgaaggcaggggaaagggagagacttcactgtttacctttttattattttccaattttaaatcatttgaatgtataacttgtctaaaaatcaaattttaaaagttgagggaattaacattacagaaagtaacaaacctcaaggaagcagccaccttcaccagatggacagtctacctcactcttcccacgctccagtagttactgaatgccagtcccctccctccattcagtctgccccacctgctggccttctagagcctcagagcagtcctattcccacacctccaaacacatccatacactgtgatggtggatctgggaccaccagttgagaggaaatgtgttgtgtttccactcttcagacaaacagagtgttattttattgaggtttgggattttttcttgcattaacagggtttctagatcccagtaggtgaatgagaaagaagtatgcttttattgcataaggaatttgtttctgatacaccaaagtgatgatgtatgacttttcttaaagaagtggttattagaagagttaaaaatcaatagaaacaaaaagtcataggtattgttccaatactccaggaacatcacaatttggattctgtagatgtgtgtaatataatgtgtaatattacattctgacaacctcaagttgaaaactgcacagctgaagatcacttatagtcaataacacttttcaaactttaattttaaattcattaagtctctccctaatgtatcgtactttttaataaaggaaactgtcagatacgctataatacagaggaaaacgtttatatactctttcattataatttttccacaacttccaaaatgaagaaaaagacatggaaacattaagttcagagaataattgtggcagacaattccctcctcctgaaagttcaattaccccaacacaggcaaaatttcttactaactcaaaaggaactgaattc

SEQ ID NO: 200744 - DNA, 1000 bp, Homo Sapiens
ctacccatccatgagcatgggatatgtttcaatttgtttgtgttgtttatgatttctttcagcagtgttttgtagttttccttgtagaggtctttcacctccttgggcaggtatattcctaaggtttgtttggttttttttgcagttattttaaaaggggttgagttttttctttgattctgaaatcaaagaactgctcggtgttggtgtgtagcagaactactaatttgtgtacattaattttctgtcctgaaactttgctgaattcatttatcagttctaggagctttttggaggaggctttatggttttctagatatacaatcatatcatcagcaaagagtaacagtttgacttcctctttactgatttggatgccctttatttctttctcttgtctgattgctgtggctaggacttccaatactacgttgaaaagaaggggtgagtggtcatccttgtcttattacagttctcagagggaatgatttcaacttttccccattcagtattatgttggctgtgggtttttcatagatggcttttattacattaaggtatgtccctgtatgccgattttgctgagggttttaatcatacagggatgctgaattttgtcaaatgcttcttctgcatctattgggatgatcatgtggtttctgtttttaattctgtttatgtggtgtatcacctttattgacttgcatatgttaaaccatccctatacccctaatatgaaatccacttgatcatggtgaattatctttttgacatgctgttggatttggttagctagtattttgttaaagatttttgcatctatgttcgtcagggatattggtctgtagttttctttttttcttatgtcctttcctggtttgggtattagggtgatgctggcttcatagaatgatttagggaggattccttctttctctatattgtggaatagtgtcaatagaatttgtaccaattcttctttgaatatctgatagaattc

SEQ ID NO: 200745 - DNA, 1000 bp, Homo Sapiens
ctccgcctcacaggttcaagcaattctcctgcctcagccttcctagtagctgggattacaagtgcccaccaccatgcctggataatttttgtatttttagtagagacggggtttcaccatgttggccaggctggtctcgaacacctaatctcaggcgacctgcccgccttggcctcccaaagtgctgggattacaggcatgagccaccgcgcccagccagaatcatcattttaaatacctaaagagaccttagaagtcatctaggtcaaactccttattttaaaaatgagtaaactatagctctgagagttaggagactaaccaatcaccaaatctgacagtgactattcctggcacacaaaaaaagaacaagtgcaaaagccctaaaatagaaaggaggtcagtgagtttgaggaacagacgcaggcttacagccagggctggaacctgttagcagccatgtgccaatacctggacagatccatttaccagagtggaagcagtcaaagatcgccaccttaaaacagcttcccgcatatagtggaccttccagtgtgatgcttatattcagttgaccatgcattcaacacatatttattgagcacctaatatatgcctggcacagttctcagtgcgatagatacaatgaggaacaaaaaagatcaggttcctattttcatggaggttacatcctagaggtggagatacatagtaaaataagtaaacaaatacataaataagaaaactaacattctaagttctaaaggaaataaacaaggtgatatgagaataatgttgggagaggactgttcaattttagataagatggtcaaaaaaggcatccatgggaagataagatttcagatgatacctcaaacaggaggagccagttatggaaaaagctaaggatgagtattaccggcaaaagaagagcaagtacaaaagctccaaagtggaaaggaagtcagtgaattggaagaactagagtgtggctgaattc

SEQ ID NO: 200746 - DNA, 1000 bp, Homo Sapiens
cacactactgaatataaagtcaaagggcaggaactgcaaagtcacatggaacatagcactgacatagagaaggtaaaaagtcagggggcaataatgcaatcaaacctaccacaattacaaggggtggcttttcaatgcagcatttgacaatacagtctttacagtgtacccttcctcacaggtagcagtgttcatattcctgaacactctggtgaaactacagtgaaaagaaggaactgtgacatatacttgtagggtatgcattagaatgttcacaagaaccatggacaaaagccagcttattcagtatggatggcatctaaaacttgccatctcaactttcctttatggctggttagcatcttcccatagatactcatatgtgaggaaaagggacttagacgtgtcctgggtgagatcaaaactaagtcacctatggaaggattccaggaactaaagggtttaccatgaagaaaacttggggaagagattaaaattgtcttcaaatatctgaagtgttctttgtgggagttggtttagacttgttctatggggccacaaaaggcagcaccagagtagatggatagaaattataggaaataggattgggcacaacatgtggcagaaaattctagccatcagcactgtctaatgatggaagcattgccatcacagagatattaaaaaagagcctgaagagcaacacttaataagcattattgtaattagcatagcagctatcatttattgaagccctactaaataccaggagctgtgctaaacactttaaccatgttctaactctcaacaacaagcattgttcacaactcacagctgaggaaatcaaagcatagagagattaggtaatttgttctaggtcaaagggacaatgggtggaggagctgggacctggcccaaggtctgtctgattccagagccccttctctttccactatacctggctgcatgctgaatcaccattcgtcaggataaggaattc

SEQ ID NO: 200747 - DNA, 1000 bp, Homo Sapiens
aaatatcgggtccttgtgacttcaacggactcttccaaattgtatgaatgtatcaatgtattagataaacccagtttcagaatgataaagaaaaaatgttagaccaaataatgcggctagttaacagtggtacgatttctagcccgtggctttaaaatgcacttaaagtcctgtccttgccttttattttctgaacttgatgtttttgcattctttgagttcagtttaaagacaactacgagcatctgtaaccaatctgacaataatgtgttcatcaggtgcctatggattaaatcacatactggcatatttaagctgaatgtcaatctggaaaataaattgactgtattaacagaaataccactctttgtgtagatatttgtcgtatatttaagaaaaagctaaaaagaatggaaatcgcatgactataacttaagtctttcttcaaagtgcattgcagtcttttgcgatacctcattcagccaagtattggtattcttcctcattcggtataaggcagctttcaatttgcttagaaggcaacattggaaggttagagttcatcagaaacagaattctaaaatgtgagttcaattcaataaatttgaatttctgtaggaagaatcaaatcaccgatttaaagagtgcaatatataataatcatttttaaagtattggattaaatctgataggttttccagaaatgaacaaaaatcagctctaaaaccaaagctgatttttagaaaatttgaaaatgtaaatcagccctatccatactatagtttctctaaaactttatctgaaagagtcattttaaaataactattaaacaatgtaactgctatcttaatgttctgaaataagttaaaacattttaaaatatgaatactgtaaaggaaataaatggtgggaaggaaaagtagagaaagaaatgccaattccagtccaaagctttatttgccaagttttcttagaatgaattttaccaatttatgaattc

SEQ ID NO: 200748 - DNA, 1000 bp, Homo Sapiens
cctttttctggatcaagtacttttttttctggagcatgtgttatctagtctctcagttttttttctaggtttccggttatcttggtcagctcagactgccgtaacaaaataccataggctggacaatttgaacagcaggcatttgtttctcacagctctcgagaccgaaaagcacaagatcaaggtaccattcagtttggttcctggtaatggctgtcttcatgacttgcagacagctgtctttttgttgtgtcctcatacagaagggagagagacagtcagtcagacagacagagagagatagagtgcagaagcataagctctctagtctcttcttataatgtcactaatcccatcacagggaccccatccttaatgacgccatctaatcctaatcacctcccaaaggccgtatctccaaataccatcacatttggggttaaggcttcaacatatgaatttggttgggaagcggggaggtcacaaacattccatcgataatgatcacggaggcagcttctatttgtacctgactataagagggctgctgcactggtgtttcactgaccttccccagagtttcatgtgatggtaaacaagacctattcctcaaaacttctataatataaaaattgctaatgtgatttttgctaattagattgccaccctagaatataaattataacatcaatagagaatcttggcataccatgcctggcataatgtacctccaaaggtatgaagtaatgaaaatttgtgggaatttttgggaatgttgagggaaattgatttctcaacaatttttgactctaaaatttttgattctttggttctttctctctattctgtagttctaaaatgtagtagaacaacagcagaacacaagtctttgccccatgggaaaattaaaaccccatagccctgtttcaattccatggtcataaaatagggaaaagagaaagttggtgatcttacttaaaagagaactgcacccctaagt

SEQ ID NO: 200749 - DNA, 1000 bp, Homo Sapiens
ccagcatgtcttcttttttgactttttaatgatagccattctgactggtatgagatggtagttcattgtggttttgatttgcatttctctgctgatcagtaatactgagctttttttcttaagcttgttggctgcatatatgtcttcttttgaaaagcgtctgttcatgtcctttgcctgctttttaatagggttttctcttgtaaatttgtttaagttccttatagaggctggatattagacctttgtcagatgcatagtttataagtattttctcccattccgtaggttgtctgtttactctgttgatagtttcttttgctgtgcagaagctcttaagtttaattagatcccgtttgtcaatttttgcttttgtagcaattgcttttggtgtctttgtcatgaaatctttgtgtccaggatggtattgcctaggttgtcttccagggtttttaaagtttggggttttacatttaagtcttatccttgatgtaatgaacatcgatacaaaaatcctcaacttgcaaagcaaatccagcagcacttcaaaaagctaatccatcatgatcaagtaggcttcatctgtgggatgcaaggttagtttagcatacacaaataaatcacataaacagaaataaagacataaactacatggttatatcaatggatgcagaaaaagctttcaataaattcaacatcccttcatgttaaatactctcaataaactaggtattagaggaacatgtctgaaaataataagaggcatctgtgacaaacccacaaccaacattatactcaatgggcaaaagctagaagcattccccttgaaaaccagcacaagacaaggatgtcctctctcaccactcctaatcaatatagtactggaagtcctagccagagcagtcaggcaagagaaggcaataggtgacatccatataggaagagaagaagtgaaactatttgtagattatatgtttctgtatctagaaaaccccatagt

SEQ ID NO: 200750 - DNA, 1000 bp, Homo Sapiens
ataaaaaaatgaaaataaaataacccaaataagcacaaatatatcagtactcacaataaataaaaatgggcctgttgtgcatcaataggtatatttgaggaggattcttggaagagtagagctaagaatcccaattcctcctcccaaagtgtgtgtgtatgggaggaagaggtaatatggggaattcttaccttcattattttaagtcttgagagatttggcttcaacaagacaccaagagtgtctctttgcccatggaatgagacatgactgctgcctgggacttcacaaagttgcaatttggcctgagtagtggtgatggtatagccaggagtgtgcagttgttctgggactggactgccatctcagggtttgtacaagtgtagactttataagtattccccctgtactgaatatggaccatgtggacagagagcagagctatggccatttaaaatcctaccctagataactgccttaagggagaaagaatgcatgagctgtgtggtccagactaccagagaagaagaggctgtgggaggacttacaagtctggggaaaggaatgcattatctgatgcatgagagttacaggtaagatatctagagactcagattccacactttgtcagctttaactatctgccagatacaaagaacgcaatggcactcagctaaaaaagaactgccccatcctcttattcttattccccgctgatctcccccattcagtgctggaaattcaaaccagcagctcacaaagataaagcaggcattttttaatcaaaagaaaatgggttagtataaatagtagaaaatagaattttgagtaaaaagcattaatcaggattaaagacggacataatagagtgataaatggaacaaactactaagaagatacattaatcatgaacttttatgcaattaacataaatgtgatattgaaaaacatcaaataaaattaatagcattacaaggacaattggaaaaataaagaattc

SEQ ID NO: 200751 - DNA, 1000 bp, Homo Sapiens
aaaacattcattacatcttctgactcttatcacctgttagtaacatagcacaagagaatgaactgcattttggaccagaaagacttggttttaaaatggcttattttttatgttaactgtgagctcacatgcatttttcttaacctatgttttcttgtatgctgagataattttcattatccttaaagtgttgctgtaaaattaaacataatatatataatcacccaacagagagtacctggcatgttaatatgtacttgagaaatggcactaaaaatttctttgtatatttagttttatgattaaagattgacatatatatgcaaatgtgttttatttattcattcatgatggatacatttagctgacacaaaacataggcacaaatattaaaaatacatttatctcccattattacattcacagagatttttgccttttagtcttgcaagaaattccaaatgtctgatagtatatgaaaagaaaaaagaaaggaataaaaagagcttattaaatattactaagcaaacgtttcatgaaagactgtgtctgtgataactttcaacaccttggcaaaagctgacagcaagattttctgaagttaaataatggatgtgattaattcagtgatcaatataagaacattaattaaatctgccactttgggctacatgatccaatttttctttaataaatttcataggtcaaaagttctgaaatgaactaactagaaattctcgagcaagtgatcacaagaatagtcaaagatcaatcaagcagtacaatatgaaattaaacctcatatttacgcacacatcttttattagacatatatttactcaaattacataaaattattgaaaagtttgaatgaaactatgtgtgttatctccacttaaagtaaaaaaaagtttgcatgaatttttgtggtaaatttgctgtctttctgagctctagtaacttcaaattatcatcactcttttatatttgaaagaagctt

SEQ ID NO: 200752 - DNA, 1000 bp, Homo Sapiens
ttcccaaaccaaaatacaagaatggtcaggaagcacatggcaaggggcttaacatcatcagtcatcacaagacgcagatgcaaatcacaacgagataccagtgtacacccatcagagtggcgaacattaaaaagactaataatatggagttggtgaagaggtggagcaaacagcccctcacacactgctgggggaatgaaaaacgatagagccccgtgggaaacagcaaggcagtttcttaaagcgtgaaaataagcacgggtctaccatgcgaaccaaccatccttgtaaccaagagtcacgaaagctcacaaactcacaaaggtgcatacgtacgtgttcatagcagctttctgcacagtagctcagaattagaaaaaactcaaatattcatcagcaggggaaggaataaataaatcatggcatattcacagaacagaattctcctcaaagaaaaaggaacaaatcattgacacacacagcaaccagggggaagttcaaaatacccacactgagtgaaagaagccagaccaaaaaatgcatgcatctatgactctattcatatgaaattcttgaaagtgcagactatcctacagtgaccaaaggcaaatcactggctacccagggtgcagggcagagataggaatggaccacacagagaacaggaaacgttttgtgggtgaaggccatgctccaaatcttaattatgggggtgatttcacaaacatatacatagcttgccaattctaagaatatggaagtctacactttaaggggatggcatttattgtacttagtaaagctttgaaaagtcttcgtttgcagtaaaagggaaagaaagaaaagaggggagaggaagtgccagcagccacctgcactcatctgaaacccagcaagctgctaatttaatcccctcaacgtaatcgagtccaccacccaagcaatcgcattaaaggaaacagtcatttggtgcatttttcatcaactaagatcattgatc

SEQ ID NO: 200753 - DNA, 1000 bp, Homo Sapiens
ttcttttttcagtgttaatcagagaaagactgaaagtgatgctttatgactaaacttttgaagaaatgagactattcaagttgttgaagtctttggaatctgtggttagcgttaagcagacacttccgacattcttttttattatcttgactaaatttttaaaatttaagtatgccaagtgatgaaatttaaaatttctgaataattttaactttaaatatcataaaatatgcacttagatctcatatcctagttcatctgtgaatgcaaaacatagcaatgagttatcatcttgattaccaaaaaggagaaaaagttctgagcaacagtgaatcaagatcggtgtgaacacaaagagggggaaaaacactacagcaaagtacagggaaacagacagtgaaaaacatctatttttttttttttgaccaaatgagagtcaattaaaaactcacaaaatataaaaaagaaagatcaatgtaactcagaccacagtgaagactgattgctttacatactccatctgtcaataaaatgcgtttttgaaatgagtctggagagtgagcagccttgctcctcttccctggccacccactcttgcagcctcctaggaccgtgttaatttgggacacagtgcaggtgctctatccacataacaccagaccgggtggctgaccggggaaaagttcagtgcattgtgtgtctgacctccaaagaaagactggtttgatagttaatattttgaattgactgactttggtgattgactagaagagcccaggtttgcatgaaatcaaataaagggagcaaagtaggaaaatcaacctttgatgctgaggacaacaaagaaagcacatatcatggatcaaccagcaataatagccaccgtttgctgaatacctgttacgtgccaggttcctgctaaatgctttaaggctcataactgccctttacaaaggtattattatctgcatttttgaaatgagaaaactgaggctgagtg

SEQ ID NO: 200754 - DNA, 1000 bp, Homo Sapiens
aagacaatgtttttgttgagctagttgtaaagggtaaataattaccaacataaccatcatgttatgcctaatatcccaaaggacctatcattttatatctacttgcacagtaatttattacactaaactttatgactctaaagtcagagaaaaacacgtgcaagattattacaagagaatgccaatgttttgagaagaataacagaatacagtcaaatgtgtagagatatatatgcacactgatgagtcaatgtgagtttataaaaaattctggcacaatgtaacaggctaatccccaaagtatgtattaaaattaattatatcagacactggttggccataatgagcaatttcccggaactgatggccaaagctcatcgatattccatcatcacatgaagaatatccagaatttcaacatgcaaagcctaccaaccttttagttcttctctttcaactatgaacattatcttttattatgtatatgcttaaaaaagaatgagctatccctgaccatgacaagattctacagaggaaaataactaaaatgaggtcatagaaagatcttgcaggctttcagaattcttcctttatgcatctacttcttactatacaataacataactggttgacatgactgtgctctcctaagagttccttgagaataggaacaaaccatgtcttatttaccagttcctgccactctattgcaaggactccattcaagagagagaaggagagaaggggttttaaacaacacagtgtgcccaataaagtatactgatttatacactatctatgtctctttttagagaaaggatttagaaaagcagtatagggtagcagttaagagttctagattgccactgccaggttcaaagcatttgaacaatttacttctgtgtacctccattctttcatgtgtaccatgggattgataataaaatctcctcagaggactactgagggatttaagtgatgtagtttgtataaaaagctt

SEQ ID NO: 200755 - DNA, 1000 bp, Homo Sapiens
ctcatgtagtacactttttttttttttttttttgagatggagtctcactctgtcgcccaggctggagtgcagtggcgcatcttggctcactgcaacctccgcctccccggttcaagcgattctcctgcctcagcctcctgggtagctgggattacaagcacctgccactatgcccagctaattttttgtatttttagtagagatggggttttaccatgttggccaggctggtctcgaactcctgacctcatgatttgcctgcctcggcctcccaaagtgctgggattacaggcgtgagccaccatgcctggccatgtagtacactttcaatacatacagacacttgacagtgtctacacaggaatgaatctaatagaatataacgtcccaaggaggtgggtgcgtttgctaagctcggctttgctgaagcaccagcattgattcattcacttcaacaaattaatgcattacttaatcagttaactatttgaattttaattagttgtgatttagcatttgttacttatctagttatctaatgagttatttatttgccccttatctaattaaatatctgatgacttgttatttatcacttgttatttacccaaaataattggttattttttgccatttgttatttcttgtcaatttaatgaaatagttaaatcattaagacatttgagtgatattatattcaatttacatttacttaatgtaaaacaactgtattgggtaatttagataataattcaatgattgggcaacactttaagaatctccaagctcctgtctccttgctgtctctcctactctgacacagcacgggacgaatgctaggcatgaaataaacatctgctgaatggaagataagtgaaatgcacgagaacacgaatgaaagcctgaaccagcggacccaggagcccccaagggcaaggactggctggctctgcccctactagggtccccactaccacacttggtctaacctggggaattc

SEQ ID NO: 200756 - DNA, 1000 bp, Homo Sapiens
ctctaaatgcccacaagatcagcatgagattagtagtaatcactccttttttttttttttttggggggatggagtctcactctgtcgcccaggctagagtgcagtggcggatcttggttcgctgcatctcctggattcaagagattttcctgcctcagcctcccgagtatttgggactacaggcacatgccaccatcccaggctaattttttgtatttttagtagagacggggtttcaccttgttagccaggatggtctcgatctcctgatcttgtgatccacccaccttggcctcccaaagtgctggaattacaggcgtgaaccaccatgcctggtctaatcactccttttttatttctgatttcagtaatttgtgtcctctctcttttttccttggctaacctgcttttctgttttagatttcactgatactactctaagttttattatttattttcttcttgcctttggcctaaattgcttttgtttctctagtttcctaaaggatgacacttcaagacacttaagctcagtatcttagtctgatacctttgagaagctgacaccaatgtggaattaaacatctttattagggaaattacgtgtgagagaaacctcagaccttcagaccactttgcaagtctgctcctgagtaaagaagagaggaaaggaaggttggccttagtagaaggaaggtttagcaagggtttcaaggagtattcaagccagagttgactgttagaaagttctgtgtctcctagggaaagtcctgccttcatattctgccaggctctgttaatagctgagagcatcccttgggaagcatggccttagcccagatacagcaatggatttcagagcataccagttggggctcttggtcagttatataccctcagcaggagggtacctctgagacgtacattttcacggctaacatgccaggtcttgaaaaagggaaagaaggagtcagaggcccctagagccatgagagaattc

SEQ ID NO: 200757 - DNA, 1000 bp, Homo Sapiens
caggagagaggatgttaaccctttctccccaccatttactgaactgtacgttggacgatgggacgcctcctccccctaccccgtgacggggtcctggaggggcagactttggagaggagctgctgaagggtggtgggagagcaggcagggtgccaccacagcgccacagcgacactgctgctgggggctgggttccattccctctgcctcgagatcatggggggtacttggattattgttcagcaaacacctgctctcttccccctccacccctccgaggacacaagcatgctctgctctggatcaacagtggatcaataatggatttcaagcaggctgggcttggcctctgctgtcactgtaagaaacacaccccaggggccaggcgcgatggctcacgcctgtaatcccagcactttgggaggccgaggcgggcggatcacaaggtcaggagatcgagaccatcctggctaaaacagtgaaaccccgcctctaccaaaaatacaaaaaattagccgggcgtggtggcgggcacctgtagtcccagctactcaggaggctgagccaggagaatggcgtgaacccaggaggcagagcttgcagtgagccgagattgcgccactgcactccagcctgggtgacagagcgagactccgtctcaaaaaaaaaagaagaaaagaaaagaaacacatcccaggtaaggctgccggcccctggagggtgagagacctggagagaggtctcagcccagagcacggcccagaagggccgataagcctagaccagctggccctgacagtgagcagggataagtaactgcagctcgacttgttacgcagtgttactgacccaacagcagactgatgcacttgtcctgcacccccttgccgaggtaaatcctcccagggcctcagcctcctcacatccgaagttgggagaacaatggtgcctccgccccaggacgggctcaaggttgagatgactcagcgcaggggaattc

SEQ ID NO: 200758 - DNA, 1000 bp, Homo Sapiens
gacactaaaaatgtaatccaggaattaaggaatcaggctaagaagtaatacaattgaccttgaagcctctgtttttagaaataactgaaattgtgagcgcatgcttaagaaggcggattttacttaaattactatctacaacagtaacagtaatagtaatagtaaatagaaatttcaaattttatatcacgtaatttataagagccagaaactattattgtattataaacagaagtaatattatattacttatacatttgttctgtttagaaatggtgtgatcacaaacaatttgagatgaccagtagtggatatcaatttacacaacatcagagaactcatactgtgaaaaacacaatagatgtaaaaaaatgtgagaagatattacaattcaatttagtccttatcacagacatagtgaattcatactgatgaaaaactttatgaatgttaagaatatgtgaaagctattatttgtgtggactatttagccaacaccagagaattcatactagtaagaggttctatgaatataaggaatgtgggaagctctttagaatgaattgagtttattctgtaaattagaattcatgctgattctacactttataagtattaggaatgttggaaatcctttcttgtgtgccggcaagtcactcactataagagaattcatactgttgaaaaacctgaaaaaatgtaagaactgtggaaggacatttaaattttaatccttattatgtatcagagaattcatatggtgagaaactatgaatataagggatgcaataaagccttccttgtattcggacaatgtactcaatatcagagtattcatataagtgccaaatttcatgaatgtaaggaacataaggtctttaatctgatttgagttcttctgagaaacagataattcatactggtgacaaactttatgaatgtaaagaatgtagtaaagcctttattgtgtctggacacattgctcaatatcagagaattc

SEQ ID NO: 200759 - DNA, 1000 bp, Homo Sapiens
gacctagccgatagtaagagctccataaatggtacctactgtgaagcttaccaccatctattgcgttgacctgcattctaaagagggggataagagacacacctcctcagtgtccagatcttgccaagttgctaaggagaaataacaacaatcctgaataaatagttttggtgctcagctctacaccaagaatacatgcatgacctcctttggcctgtaaaacatggtgaaagctacacggctgagtggctcagcttaccaccgagcacctgtaagcctagtggtcccctaaataagaagcccgcttaagtgcagcatcacaggccaccctgaaggtcagcttctgaaggactgaagcagctagggccttcctatcaggctgggagaggttagctgacaactcacagcttctcaccctgaccaggtgccatgtccattacacctgctatccaacaagtatttcctgattttataccccagtgactaaaaatggctacacgaggctacacacaatggctcatccctgtattcccaacactgtgagaggtcaaagcaagaagatcacttgaggtcaggagttcaaggatgtattgagttggaatcatgccactgcactccaccctgggcgacagagcaagatcctctctcaaaaaatatttaagcaaataaaaaataaaagtggccatgtgtttatctgtatcttggcatgttatttttgctcctcctctttcaattcctcagctcatctgaatactctaagagagcccagtgatcacctgccaaatggattacaaatgtgcatctcagtgctaatcctaattcttaccacagatcggagttttctttcaacagagcggtgtattaggaactctgtaaaattcaatggctgcataatttacaaaatgtaacacagataaagaaattgcaaatatcttcaattaccccaacattaccaagtgcaagtcatacgatacaggatattagatgctgatacaagctt

SEQ ID NO: 200760 - DNA, 1000 bp, Homo Sapiens
gcagcactcagtataagggaagcagcaaggactgctgggtttgcagatctgggttcaattccccattgcatcattcattcactggcaagggacaagttgctttacctctcaagtttcttcagaaaagcagtagaatgtagcaattgtaagtgggcggactcatgtatcagactttctgggttcaaatctcagctctatctgttttttgggggttttgttttcgtttttgagatgggggtcctgctttgtcacccaggctggagtacattggcacgatctcagttcactgcaacctccacctcccagatttaagcaattctcctgcctcagccccctgagtagctgggactacaggcacacaccatcatgcctggctaatttttgtatttttagtagagacagggtttcgccatgtggccaggctggtctcactcctgacctcaggtgatctgcccgcctcggcctcctaaagtgccgggattacaggcgtgagccaccgtgcccagcggtagtcatctaactttctaagaacacattgtggcctaaagctcaatgctctctttgttgttctccattactacaaaaggtttaactaatttttaaacatacattacatgctgaattatacttaaatagaacatgctcattgtaggaaatgccaaaaatatgaaatggaaatcaactacaattctactatgctaattggttatttttcaacgataaaagctgatccagttggttatttagaggaagagaatttaagtagctcaatgacccaggcacagtttttgcatggtactttacttaattctccaatacgtagtgttctatcacatgaaaattcataatgaaattttccaattgccctatattaacatttttagttttttacattgccccaaatcagaccacttaacacttttgattatccattcctgttttgattttgttctttaattatgattatactgtatatataattttatacacagacaagctt

SEQ ID NO: 200761 - DNA, 1000 bp, Homo Sapiens
ggtccactccaaaccccgtttgcctgggtatcaccagcagaggctgcagaacagcaaagattgctgcctgttccttcctctggaagcctcatcccagagtggcacctgccagatgccagccagagctctcccgtgtgaggtacctgtcgacccctgctggaaggtgtctccccatcaggaggcacgggggtcagggacccacttgtggaggcagtctgtcccttagcagagctcgagtgctgtgctgggaaatctgctgctctcttcagagtcagcaggcaggaacgtttaagtctgctgaagctgtacccacagccgccccttcccccaggtgctctgtcccagggagatgggagttttatctataagcccctaactgaggctgctgcctttctttcagagatgccctgccagagaggaggaatctagagagacagtctggctacagcggctttgtggcactgcagtaggctccacccagtttgaacttcctggcagctttgtttatactgtgaagggaaaaccacctactcaagcctcagtaatggtgaacacccctccccccaccaagcaacagcatcccaggtcgacctcagactgccatgctggctgtgagaatttcaagccagtggatcttagcttgctgggttccatgggaatgggatccgctgagcaagacctcttggctccctggcttcagccccctttccaggggagtgaacagttctgtctcgctggcattccaggcaccactgggatacagggaaaaaaaaaacaaaaaacaaaaacctgcagctagctgggtgtctgcccaaacggttgcccagttttgtgcttgaaacccagggcgcttgtggtgtaggcccctgatggaatctcctggtctgtgaagactgtgggaaaggtatagtggctgagctggaatgcactgttcctcatggcacagtccctcacagcttcccttcgctaggggagggagctccccaaccccttgcacttc

SEQ ID NO: 200762 - DNA, 1000 bp, Homo Sapiens
gaggtggcgtcggtggtggctgtgataagcagaagtaggggcatggctgctgtcacagcattgtgcaaccacacactctggagagggctggatactgagaacatctccctaactactggcaaaatcaccacgttgtgagattaaaaaaaaaaaaaattggacaaatgatggtgtggggaaggaaaacagtaagtactgactcaagattcatgagcacccagaacgctttggtctaggaattttataggttctctcccctctcctgccttctctcccagttgcattcaaataagaaagtcctatgtggagccaattattatccttgcaatatgttttgttgtggttggcaacaaaacaacttagtcatattcccccagatttaccttctttttattacttttcttccactttctccatctcaactctcccattggaataaaatgttattgttttaggttttatcagactcagagcctctgctctcagtcaaaccaattctgttttcatgcgatgagatagaagtcacaaagacagatgtgggcagagagctcaccacgctcttcattcgctgtcaaatacaatttaatgcccagggagcacccacactgctcttgctccctgccaagaggggggttctttactcatcgaatcagcactggccctgatggtgttgcttctacagcagtgggtggtgggagggagagactggaggctcacggggcccagacacctcctcctagtttcctcaagtcccaagctgcaggctgggttccatatccagtttcaaaactctaacttctttgggacatctaagggcaggtttttcctattgtttactagaaacctaagaagtcagtactcgtaatttccaacccggaggcactgagtggggaatctgcagagcctacctattcttctcccattctacagacagggagcctcatctgggaagagggctcacggacctgggtgtgttttgcttcaggacgagagagaattc

SEQ ID NO: 200763 - DNA, 1000 bp, Homo Sapiens
gccagcagtcttaatcagatgcatcccttgctgttaaaaccatcaatggcctccatttctgccccttggctaccatattcatactcactgtgcaagcactgggcaggtagagaacataggctggataatccttataagacaaaccattctacttcattgatgcatccaattgaccagtccttcctctgtggtggatgatatttagtggccattggcatgaaatacaagtgtctaccaattctgtgcctattttctataaattacttcatatgcctcttttctagactactttgtttctgaatttctaaactcttcctcagactctgtctagttaacaaaatgattctcattgcccaatagggtgtatatagtgataccaggtcacttattcatctgtattaatggacaatctagcagatctctgaattctacctaataaaggctctactacattttagaaccactactgactggagctgtaggacttgcacacacatattaggctgatccatctgtgaacaaagccaataattttctttttccattatattgtagtaggagccaccattaatccatacgtggatgctgagataaaaattgcaagatttccatggagatctgggaacccatatgttgacccccaggatctgtccaggaaaaatttctagtgattgcaactgcatttgtccaacatgatttggatgagcccagtaatatctagttcacgagttgcagctctgactgaagtcccttcatttcccacagtcaggtgctcaggctccactagccacaggagctgcattttgaacaatgaggaattctttgctggtgtactgcaaaacccaagtatgtacactgcaaatctcttaatgagacttgccatagactccactctacctccgtatctgtgatgaacacctctagcgctattggatctgttctgtcatatgagccaaatgacagaaattttgcaccagattctgaatattatgtggaattc

SEQ ID NO: 200764 - DNA, 1000 bp, Homo Sapiens
gcagtggctgggtcaggcacagtggctcacatctgtgatcccagcactttgggaggctgaggcaggtggatcacctgagatcaggagtttgagacaagcctggtcaacatggtggaaacccgtctctactaaaaatacaaaaattagctgggtgtggtggcatgcgcctgtaattccaactacttgggaggctgaggcaggagaatcacttgaacccgggaagcagaggttgcagtgagctgagatcgtgccactgcactccagcctgggcgacagagcaaaattctgtcaaaaaaaaaaacaaaaaaaacagtggctggagagtccgagacctgggttggagtcctggctttgcttgacctctctgggtgactgtgggcatgtggcctccccagtctggcctgtgaaccgagaaagtctgatggcatgggctctgggcctgttctcctgttgaagtctgggagttctgtagccccaagagacatctgttactagagggagggagtgaaatggagatggacagtaggagggggttgcaacacctattaccaatggtgggaggggtaatcacagccgggagcctctgggccccacaaggagtctccaccactccccccagctcctcttctgtcgctgcccctcagattcaattaccagctcagctttcaaatcgggctccagccagtaactttactggagaaaattattatgtgattatttcaaccttgctccaaacgctgttttaattggatctgggaaaaggcgatttgggcatcagaggagccacgcgggggcgggagcagcataggaatgtcaggcaggggagccccacctgcccatgaggttcgaaaggcagacaggactgcttcccagccccctacctctccccaggccccccacgttcatcgtagatggagggtaagcctcagccggaaagagaaaatgggtgtggggagaaaggcttcccaggcaagtgggttgtggagggggttggaggggg

SEQ ID NO: 200765 - DNA, 1000 bp, Homo Sapiens
gaggggtggggtgaggcagcaagctggcaagtgtgtgtgtgtcaaatgggggtgcctgaatcactctggtgcctggagagcataaaacaggtgcttgtgtggtgctcattctgggctcctggcctgtccgtcagagaaagctggtttggagtgcacctgagtgttgcagaaggggagctgattggagggaggcaaagcaggggtgatggagtaggggctgttctctcctggacttagggtgctgtgaggcccaggactctctgacaggaggtgacttgtgcctacactgtgccttgtgaggggtgggccccaagaatggagggcctcatggcattaagcagagctgtttcctcccctcaccttcccctgtgtggcagagacacagcatgaccagcatcgcctagagctccccagccaaaggtcaatttgaatcacctagatttttgcttattttgctataagagaacagaagccaacttggggaaatcctgtgttgactgagtggtagggagtgtggattagctggggtctgccctaatggaatggtttctgcgctatcctagaggttgctggagaaattatattttaatgggaatgttcttttctaaactttaactagcaaagccacagaagcgtttgccagttaataatgtacttgatgagttgttgagctgaaatttaacagccagtttaaaaaataaggtagagaatttaaaaacaaaggacattgagagcatgtgtgtcttagaatgctttctgcatttctgttggaatcagtgattttgtgctgactgggagagtttcaagggccccgtatcttcggtggcctttccaggaggccctaaggcttggctccttgttcctgaaaagtaatttaatgtgtagcccatttgtagatgaaccatttcgccacttcatgaagccacaaggctggggcagctcttcttgctgtgagatagcccagtgaaggtggtggcagtagaaacggtggcctgaattc

SEQ ID NO: 200766 - DNA, 1000 bp, Homo Sapiens
cattgccttgggcagccccacagcccatgcaggtgtaactcagcttccccatggggccgggtcatcctcctggctgcggctgcccaggcccacccctctctctgtggccccggctgccctgttgtgggaaggggcagcgttaaacaagcggctgcctacttgcaccggcgggcacatggacccatcgtgcactctccccttgctgctgggacctcgctgacccctttccatcttggcccctgggaaggaatgtggtccctctgcctcagcgaagcctttcccgctccccagcacggcgagcgcctcaccatgcatcttctctccacagacggggccctgctggtgtcattacggccgcttgcgcgctctgcatcggccatctgctcccggctatatgcctggcacacagcaggcactcaataaatgcttgctgccgggcgtggtggctcacgcctgtaatcccagcactttgggaggccgaggcgggcggatcacgaggtcaggagatcgagaccatcctggctaacacggtgaaaccccgtctctcctcaaaatagaaaaattagccgggcatggtggcaggcacctgtagtcccagctactcgggaggctgaggcaggagaatggcgtgaacctgggaggcggagcttgcagtgagccgagatcgcgccattgcactccagcctgggcgacagagtgagactccatctcaaaaaaaaaaaaaaataataaatacttgctgcatctgtacatgcatctggctcgagcacctgcccctccccacgctgtccctcctccacgggggaccttgcgacccccaccccgcctctgctgggccccctccctccctcacccaccagctcccatgacggccttggccaggcagccctgggattccaccccagacgctactgcggttccttgggctgtgggatttattaggaacgacagaaacaacctgactgccagtatttcctgcgttcataaatgaatggaattc

SEQ ID NO: 200767 - DNA, 1000 bp, Homo Sapiens
aaaagaccagagtgggaagttcaaaactgacagagcataaaaaagccagaaatatgttattgacccatggaagattgacacatggaagattgacccatggaagattgacacgtggtagatgattgacacatggaagatgattgacacatggaagattgacacaaggaagatgattgacacatggaagactgacacaaggaagatgattgacacatggaagactgacatggtagatgattgacacatggaagatgattgacacatggaagatgattgacacatggaagatgggatgtgccctgttttgcaggtacagcacacaggtcctggtgagaccgctgaggagggagtgtggcgcggaggagccctgccccttcaggctcaggtgggggcgtgagggtggagcctgaggtagagtcagtgaagagcaagaggaaggtgcggaagggggtcaggggaacacagagcccctgagcttagcagtgagggttgtgggagggcgtctgagcacctttgtgtcagggggaggcgacctacccagagagagctgttgatgctgcaaaaccctcaaagtggtgacagggtagtagtgtaagccaggagggatgggagacagggagacacgggatgaaggtctcattgcaagtgctgtgcatcaatgtcatccgtgcagctgaaaacccggctccctcgctgatggaaaaaattaaaattaaagcttcactgatcatcctaatgccatctcaatggactccttcgccttccccagattttcagttacatcatctaaataacaacaacttcatctctccctccctggaatttaggctccagattcctgtttcctgtcttccaaagtaacattagggacagtgttatggcggttgtctcagactggcatcgcaggacatctgtgaagatggcacaatccctcccttctttgcctcgtgcctctgcaatgagactctgctgctctgttatcaagaggtgaagacttttc

SEQ ID NO: 200768 - DNA, 1000 bp, Homo Sapiens
tcccatagttctttgaggtttgttcactcctttttattcttttctccctaatcttgtctgcctaccttatttcagccagctattcttcaagctctgatattctctcttctgcttgattgatttgactattgatacttgtgttaacatcttgaagttctcgtgctgtgattttcagttccatcaggtcatttttgttcctctctaaactggttattctagttaacagctcctgtaatcttttatcatggtttttagcttcttcgcattgagttagaacataatcctttagctcagagaaattcattattacccactttctgaagcctacttctgtcagttcatccatctcagcttcagcctgattctgtgcccttgctggagaagtgttgcaatcatttggagaagagacattttggcttttgcaattttccgtgtctttgctcatcttcgtggatttatctaccttggatcttcgaggctgatgacctttcagtggggtttttgtggggtctttgttgttgttgttattttctgtttgtttgtttgtttgtttttgttctaacaggctgctgcagtttgctgggggcacttcagaccctgtttgcctgggaatcaccagtggaggctgcagaacagcaaagattgctgcctgctcctcccttcagaagcttcatcccagaggggcactgacctggtgccagctggaactgtcctatatgaggtgtctggtgacccctgttgggaggtctcacccagtcaagtcaggaggcatgggatccaagacctgcttaaggaggcagtctgactttccctcagtggagctagtgcactgtgctgggggaattcccctcatctggatcagccagtctcttcagagccagtagacaggaaagattaagtctgctgaacttgagaacgcaatgcaccctcccctgcagtgctctgtcccagggagatgagatttctgtctgtaagcccctgactagagctgctggaattc

SEQ ID NO: 200769 - DNA, 1000 bp, Homo Sapiens
ctctagagaagcaacataatgaccaaatgaataataggtatatggctattttgggcacactgcctacggggtagccctgctctgcaaggagcagtaaaaaaaaaagtgtatatatatatctagagctaattatatatataattttatatatataaatatacaataatatatataaatatataattatatataattatatatatataattagctctacaaaaaccaaagagttatgcattaaagtcagtttaatccatgactcagttaatatttacagttttgattaaacaaaaagaaaggacagaaaagaaggaaaagatgtctgtttgaggaaggggaatacgggagtatgataagagttaaatcctcttttccatagatgaaaacagaaaaatcaagaaatatatacactttctagaaatgcagaggaaaacaaactccaggggaaaaaaataaacatctaactgaggtacatttaacaaatatttattgagtgcccactatatatcaaacactgttctaggtcaagatttcttgaccttagcacattttggactcggtgttgtggggggcctgtcctatgcattttaggatatttagcacatccttgacttctatccactagatgctagtagcacgctctctagttgtgagaatcaaaaatatctacaggccttgccaaatgtctcctggagggcaaaatcacccccagttgagggccgttgatctaaataatagggataccgcaacaaacaaaacagacaaaaagaactaaaagtagttacctctgagaaatagattcgggggttgtaaggagtaggaaaacagacttctgtgtttactcataaactttacagaattctgcattttcaaactatatatgcacatttcattaataaaaaagaaagcaaatcatctaagagaatataaactccattcgtaccttagttaaaaatttctacacaaggcagtgtagtcatgcaattctggatttgaattc

SEQ ID NO: 200770 - DNA, 1000 bp, Homo Sapiens
aatatttcataaatattttagcctatgccctttttttctctactgtattcacagtgtgtaaggaatacttggctgttgttttttttgttttgtttagagacagtgtcttgctctatcttccaggatggaatgtggtagtaccaccatagtttagtgcaggcttgaactcctgggctcaagggaatcctcccacctcaacttcccaagtagctgagactacgggcatgcgccaccatgaccacctaatttaaaaaattctttagagacgaagtctcactatgttgttcaggctggtctctaactcctggtctcaagtgatcctcccacctcgacctcccacactgctggaattataggcatgagccgcggtgcctggcctatttggctcttaaatgtgctgccttttgacttatttcatattcttgaagggaataatcatttaaatatttttgccatcatagtgctttgtatgtctctcctgaagctcatttaatagcatgtccatctgtgatagatgtgatctgttctttgggaaaggatgtatgacatagctctgttttcttcctagtacttgcataaagaaactttcagtattcattggaatggagttggtgagcatagaaagagttatagttatcacataaggaagctacatgactcactctctgctgcctcactgcttcccctgggtaattgtctgtcctgattcccatgtggattcaagaatcccccaaggaagccctggtgggaagacctggaaggtctggctctttgcccagatgctggtgttggtgttgatgttgatggatgtgctctgctgatcataatactctagagaagaaattgcgtcttatctttgaacccaccattcataatgtttattcctaactcaaattggatagttcagtatctgtatatcaggaatttggtttcatattaaaggtaatatccatttatttgagtctttgcccttattatttaacattcttttcaataatta

SEQ ID NO: 200771 - DNA, 1000 bp, Homo Sapiens
caggagcacagaaggtgtggcctcctgggttaacccctaacttggagcagaagaggggctttaacaaggacctggtgggaatggtaagcccagaaggcttcctggaggaggtgatgggcgcacagagaagagggagctggggttgaggctggagggaaggttctagcgaaggccagcaaggaagagggtgggaaggtccgtcccattctggacaaggctgggccactggagacaggcctgggagagagggtctacccagcatggaggcctctatgaaggacagagggtgcactggtttgctttgctgctgatggagcccagtagcccctgccagtgctggattgagacaatggagtttgagggagaaggagttgcggggaggccctcagaggcgtgggctggttactcggtagccatctcctcagcgcttccctcctgccggggctgagtggccaccagggtgggtggagtagggatttgggccacttccccaggcttcggcttcctgtgtgcagtaggtgcctttggctggtgcatcctgagtactcagagtttgctgtagccgagaatttcccagggagacagtggaatctggggtcagtgagctggagaggggcctacgccttcacctcatgctccctgcaagaaagttcaggatccctgtcctcccccagggcagaggtgggtggaaatgggtggaccacagcttctaaatccatctctaccccgagcctggggtggccttgggcaggagggcaggagatcttgtgtctctgggtctctgtttcctcatctgtgaagagggcgatgctggcggctgccccaggtgctgtgagacagaaggagcagatgcaggaaaagccccccagtggcacagcaggccggagacaccccgggacgtgcacgctccgcttggcctggcctggcctggtggtcttcatatttgctaactgtatggaaagacggagttttctttctttagaataatacaaatgaattc

SEQ ID NO: 200772 - DNA, 1000 bp, Homo Sapiens
ccgtcttcctccttgtttgtgctttaaaatctcggctttcttggctactgtgaggacacagtttcctggtccctcttttaactcaatgtttaccttgtctctttttatttttttgcctcccaggagaattgactagttccttactgaaaaccctaagagatccctgctgtagcagctataatactcaaaagcttttgtttttatgaatttttctgtactagatttaaccccttaagagcaagaattatgccctaatctttgttttcctattacctggcaatataacatgtagtaaatcaatgattgacaactggataaatgaatcttaaaaaggaaaacattataataagctatttatgaagatatgacacacagactttcctttgacttccttcatttattctattagagtactttagaaacttttgttagaagacttagagatacctaataaataacacctctcttcctgaccaagttctgaatcattggatatttaagaatctggagttagagaactaaaaccggctttgtattactgataagacatattctcctgtatcagccagggtaagagagccaggagttactaactccttctcccctagggtagactttggggtggcccactggaggggaagtttgggtctgaaggacagatgcttcccaaagtgtagagaggaggaggaaagaaaccaactcctccaagagcccctgcccttctcaccccttcctacagcacaggatgcttctctgttgcccaccaattaggtaattccttgacctccaaggagagaggaaggcttgggataaaaggacagtagtgtttagggaaagagaagcctctcattgtgacgtccttggtttctgtgctcttgaccctttggaattacctgttaagcctgagatcagccgatttccagccctgtgctttcaccttcttggacctgttcctccttcccctgagagccaacccctcccctgatttctttgttgaccc

SEQ ID NO: 200773 - DNA, 1000 bp, Homo Sapiens
gatacactgaatgctcccaactggtatacctgaacatttctattcctataaattaagttgtatgtttacatgagttgtattttttcctcaaacctactgacacaagttgtacttattgtaactggttgactgaaacactttttaaaccgatacaatgaatgcaaaaagagttgcttctaaaaattaaatttttattttctatttcctcagtctctcaggaaatgtacacagaatgccctaattttatctctctctctactcaaatgatgcctgtttcttttcaaagaagcctttcctggttcattcaatatgaagtggcattctctgtattcttaagtaaagtacccatactttacttttcttcagaacattcagtctgatactatgttttctgtctatttctaccattagattacaaactgcatgaaggcagagaattgtcttagttactctagacctctagcaattagaacagtgcaagaaatgtagtaggtgctcaatgaaaatttaaatgtttagaaagaatccttcaagataaggtttaattaaaatgagggaatctgcactcagacaagactttttcaattagccacagataagacagatcctacgtgttcccttgttcccaaaatgaatttttccttcaattcaaacgcaaactttcttttcaagaatacctcacatgcaagctcttcactactactcaggaaaaccctaaagaataagtgcaatttatttccaatcccaacagcagtaaattatccactttgttctaaggttgataatatcagaatttgttaatgaagtgccaaaaatcataccctaaaataacaactaaaaaccttttctctgcttttcttcaaatttctcttaagaaattaactctctgccttttcaggaagtggggagggaaactctttggtattcaaataaaacgttacaattctgcttttaaataaagtgtgctcccttctagtgttttccaaaaccttatactaga

SEQ ID NO: 200774 - DNA, 1000 bp, Homo Sapiens
gtgtgttatatatcttgtactgaacatgtagaaaagactcagaatatgcttgtgattgattgtcaggttattaagaactatccagcatgtatgaattttgtaaatatgctcacaggaagagttacttcaaatctgactgtgccagaaaccactgactcatgaccaggtgtggtggctcacacctgtaaccccagcactctgggaagctgaggcaggagcatcacgtgagcccaggtggccgagatctccctgggcaatgaagcaagaccttgtttctacaaaaaatgtaaaaattagccaagcgtggtggcatgcgcctgtaatcctagctacagaggaggctcgggtgggaggatcacttgagccccagagttcctggctgcagtgagctatgatcatgccaccgcactccagcatggatgacagagcgagaccctgtctctaaaacaaaataaaattaaggaaaaaacctacaaaccattgactcatggaaataaaaaatcatatctgctgttcaaagcttcaggcatgttctttgaaattaataattgtttactttggtggaacctcatacatccctatagatttcccccttgctgctctttttctgttggtttagcttctttctctccttctctcctctctctctttctctctttcactccttccttccttcattcattcattatttttttgagacacagtctcactctgttgtctaggctggagtgcaatggcgtgatcttggctcactgcatcctccaccctccaggttcaagcgattctcctgcctcagcctcctgagtagctgggattataggcatgtgccaccatgcccagctaatttttgtatttttgtagagatgaggtttctccatgttggtgaggctggtcttgaactcctgacctcaggtgatctgcccaccttggcctcccaaagtgctgggattacaggcgtgagccatgttgcctggccagtttagcttctttaaaacagaca

SEQ ID NO: 200775 - DNA, 1000 bp, Homo Sapiens
gagtgaaacagaggatagcgtgccatttttaatactggcccttgtttcagtgggaaaaggccaaaataagccgtgcatatcctggattctcgcatcgatcgttcaggatcggagatgttgcctccatttccagttacgcattgtatggtggaattgcagttagcacatttggtgccaaaattgtaatgctgccgaaagtggacatgttccctgaagtaagagggacagaatttgggtgtgtcttccggctgtctggcttagcaggaatgaagatcctggctctagggattttcccaacatgtcttagacggtaaggaacagggcggaattgaggcccggcgccaaggcctctaggtgtaaagaaacagccctggcttcagggcccatgaaattaggatgattttaaggaggatgatgggatgagaggactgtgacctttggccccgtttctttcccttgtcttttcatgggccaggtgtgctccatcagaaggcttcctgtgccggatgtaaagtgtcctgggggaagaaaagagcactgcttagaaagatgctccacagggagaaaggagccaccattttcaggagaatgatccccagaagcatgagcaatgcagatgccgaggcttcacacaagaccctggagggtcttattcctgcagccgggacctgggcatcggtgtgcttgaatgctcataaccgattttgaggggagcccaatcgataagctgtctgccagtcatgctcatcacactgtagttttcacacacgtcacacggagaccctgttcgtatgcacatttgggtgcttgagcagggttgcgcccaagattctgtggttctacggagccctgagttgtgccctgggcagctttcctctggggttggtcaactttgatcactgtacctgacgagaaagggaccatgaagtctaatcagcaaatagagaaaaggaaggggccatttcccacaatcatttccacggaaacaccacgtcggatc

SEQ ID NO: 200776 - DNA, 1000 bp, Homo Sapiens
agcttaatgagggaggtgccagagtaaatgagccattagaacaggtgaggtgagagccttgctaggcaagagcaggggcaataggggtttgcaggaagggcactaacacagccctggaggaagcaatgagctggagaaggcttctcagcagtggtgaaggagagacagccctgagagataagacagagcttagaagggagagactgctgcagataagagaaacaacacgtgcaaaggcccaggggcagggagagcttgatgtgttggggaactgcaagttccacttaccaagtggctctttaagaggtgagaggccttgtaatcccagcactttgggaggccgagacgggtggatcacttgaggtcaggagttcaagaccagcctggccgtcacggtgaaaaaccccgtctctaccaaaaatataaaaaattagctgggtgtggtggtgtttgcctataatcccagctacttgggaggctgaggcaggagaatcacttgaacccgggaggcagaggttgcagtgagccgaggttgtgccattgcactccagcctgggtgacagagcgagaccctgtctcaaaaaaaaaaaaaaaaaagaggtgggaggaatagggaggttgaggctggagaggcagccagggccagatggtaaaggccaaataaatgtctcgaatgagaagtgcatgtttgaagaggtagaaaaaaggtggacctcttaggggaggtacagagggagacactatttttcctttcttggtgtccatgtgtactcgacattggacagaccctacattcaaaagccagatcccccacttcctattgcatggccttgggcaagtgactaacctcatctgtattcaggaaataagaagaacacctatttcccaagggtgctgggaggatcaatgagataatatacacagggttgaggccgtgggtggaagaattgatgaaaccagggaaaatggctgaactcacattggggaaggtggagaattc

SEQ ID NO: 200777 - DNA, 1000 bp, Homo Sapiens
ctccgcagaagccaggactgtcctgtggggctctgtcttcccacaatgtgggactccagacactcagtgatccaagaacctctcccccattcttcacactgccttaagatttggaattctcgagtagactctgctccccactggctgtgggcctgggattgactggtgggtcttgattttggctgtaaattaacatcacctgggggtgctttaaaaactactgacacctgggttccacgcacggtgcttcaaattaaatgtttaaagcttccccaggtgatttcaaactgcagccaagcttgagaacgactgggctggtcgttctccctaagtccaagtctctccctgccaaagggggctaatgatgcctactttccacagttgctggaaacaatggagatcctggtgtgttcaggcacatcgaaacatgtaaatggtaatgtaataaatcttatgtccacccatgggagggcttgagcagaagtggggtaccctcaggctttcctcagccagtagagcccaggtcaagatgccagcggcagacattgagcagcgtgctgatgggcatgagcaagcctgtatactgcccccactgtggccatcctccaaagtgccccgcactgagcgggaaattcaaggtgagaacagcagatcaccccaggctcagcccccttgggcggagctgcccaagaccatgggaacccacctcttgcatcactgtgacctgaatgtgagactttgagtcaaaggagataattttggagctttaaaatttgactgccctgctggatctcagacttgcctgggccctgtaaccgctttgttttggccaatttcacccatttggaatggctgtatttacccaatgcctgtcccgcctccatatctaggaagtaactagcttgctttcgattttacaggctcatagatggaagggacttgccttgtctcagatgagactttgaattgtggacttctgggttaatgctgaaatgaattc

SEQ ID NO: 200778 - DNA, 1000 bp, Homo Sapiens
tcaattccagtgatgaagctgccagccttgttttcatatcttctgctcgtgtcctaacacaaaggggaagggtgagaaattcagacagcaattgaggaaaaacctataataaaagtcggcctgacatctgcaggttcttttttccttttttttttttttttgttggtgacagtgtcttgctctgttgcccaggccggagtgcagtagaatgatcacagctcaccgcagcctcgactccccaggctcacgccatcctccccctcagctgggccctcaggcatatgccaccatgcccagctaattttttttttattttgtagagacagggtctccctatgttgcccaggctggtcaccaactcctgggctaaagcagtcctcctgcctcagtctcccaaagtgttaggatcacatgtgtgagtcatcacaaccagtctggttctttctgtttttctgtttgttttttgagatggagtctcactcttatcgcctaggcgggagtgcagtggcacaaactcggctcactgcaacctctacctcctgggttcaagcgattctcctgtctcagcctcctgagtagctgggattacaggcatgtgccaccaccgccagctaatttttttatttttagtagagacgaggtttcaccatgttggcatactggtctcaaactcctgacctcggtgatccgtctgtctcagcctcccaaagtgctgggatacaggcatgagccaccacacctggcaagtctggttctttttgaatagccactcttttcaaaacccttccccacccctgacaaccttttattaagaagccccatcctagtgattccatggtatcaatcaaccactccaataagaagatcagagcctgtccaaaaactgaagtgattccatcaactccaagtatccatgtaaagaaaatctaaaggcttttgtggaaaatgtcaaaagataaggcacagtcacttagctccccaacccagtctgaacgaattc

SEQ ID NO: 200779 - DNA, 1000 bp, Homo Sapiens
acacacacacacacactctctctctctcacccctcttcccacatgtttggtctactttggtctgcctcctgcccaaaagtcaaaattacaatctagcaagataaccatgctgagacaatgcagaaagcattttgaacccctgtgcttttcaaggcaccagaacagggataggaaagggggaaaaaagacaaagaggagagagaaggatggggaaaagttaagagaagaaggaagagaggaaggaaaagaagaaacaggacatggagtggaagagaagagagagtgggtaagaaagggggaaagaaaaaagaggcagccagcaagaagcaaagtataattttcatcaacattcattcattcatttgacaaacatttattgaatgtttaggagggaccaagaacattcaaagcccacctccatgctattcctcccttaaaatcctctgagtcttcattgacatggatccttttgaaatagctcgttccagtgaggacatagatcttgaggtttaccttttcatccttagggttgagacttcacttgataatatttggactggattttaccaaggcaaagaaaatgttacaggaaggcagagaaaccctatgaattgggatttgcccaagacctgcccttcatggttgaggcaggcatctggcatccaggcagcagtttgtttcccttggatgcccacaggccctgcgctgtgttctcacttcaccagtgttctcatttctcttctatcctttctggtctaaatgaacattgtaagaagtgcttccctagaaaaagatctggctacccagagggatgttgtgaagaaggaacaaatggtaaggagaaacaaaagtggaaagagagtaaaaggggctgttataattgtgcatcaatttacaggaccagcccaacccttgaggactgtccaatttcacactctcaatttatagctgggcacactgtggaccagaaagaaccacaggttaaagaatgatggaattc

SEQ ID NO: 200780 - DNA, 1000 bp, Homo Sapiens
caacatcttgcgtttacagaaatcaagccatagctatgtgatgaaatattaaatatatgaaatggccacctgtgtaggttcaaaatagttcattctaatatattttatcatttgacagattccagaaaggaacatgttctcttactaacttaatacttctttccttattcttccctgttttttttctttaaaaacatcagatctgagcaaaaagatggaagatgaaatatatctattaagtaaaattaaaactcaacctttaaagttttatcttcttaaacaataaataaaatgtaattttttgcatactagatgtatggaactccgctaagtattgagactaggagacggtgtatacaaccatagcacttattttgtcagtgagaaaatatattttaaaaaggactgttcaattgctcgcatgaaataatctgaaaaaattatgagaaaccaaaacgaagcatcaccccccaacacacacaacaaaccccactctgaactatctgtaatagaactaaagatatttaattatgtgatagaggtcctagtctttgggttttattattgggtattatgccccatagaaacaaatcattggtcaattacaaatgtattgaagcataaaatactttattaaggctgtgattactcaagtgtggtttctgaagatgcctgcaccttgctgggttcattttcactggctttaacttcatcctccatggcgcttctaatctatgcaaatggttagcatatccatgtacttaataacaaattactggatctattacatacttaagtctttggctatgaccatgtaattagatccctgggtgctttaaaggagaggagcttcatataaatagagagaaaacaataaacacgcatgagttggcctgcccatatgttttacatttataacccccagtgctggtgcccagcaggcactcaaggaacacgggtgttggtgagaggggttttattggggggcattattgaattc

SEQ ID NO: 200781 - DNA, 1000 bp, Homo Sapiens
atccaaataacctcattaggaaaggaaacaactattacaactgacaacacgggaataaaaaagatcattcaaggctgctatgaacacttttatgcacataaactagaaaaactaggagatggataaattcctggaaaaacaatccttccagcttaagtcaggaagaattagataccctgaacagaccaataacaaggagtgagattgaaatggtaatttaaaaattagcaacaaaaaaaagtccaggaccagatggattcacagcagaattctaccattgaaagaagaagtggcaaaaatccttttgacactattccacaagataaagagggaaccttccctaattcattctatgaagccagcatcaccctaataccaaaaccagcaaatgacgtaaccaaaaaagaaaactatggaccaatatccctgatgaagatagatgctaaaatccttaagaaaatactagctaaccaaatccagcagcatatcaaaaagagaatccaccatgatcaagtggatttcataccagcgatgcagggatggcttaacatactcaagtcaataaatgtaatacaccacgtaaacagaatttaaaacaaaagtcatatgatcatctcaatagatgcagaaaaagcatttgacaaactgcagcatcactttatgattaaaactctcagcaaaattggcatacgagggacatgcctcaatgtaattaaagccatctatgacaaaccaacagccaacataatactgaatggggaaaagttgaaaacattctctctgagaaatgaaacaagacaaggatgcctacttccagatcactcctcatcagcatagtactagaaatcctaaacacagcaatcagacaagagaaagaaataaagggcatcaaaatcaataaagaggaagtcaaattgtcactgtttgctgatgatatgatcatttacctcgaaaaccctaaagactcctccagaaagctcctagaactgatgaaagaatt

SEQ ID NO: 200782 - DNA, 1000 bp, Homo Sapiens
atctcttcaacatttgaaaagatgttcagtataacattgggattttaagtgatgattgtatcaaaaaatgataagtttaaaacattttaaacttatcagtgcacaagaacgggatgaatgcttatccagtatttctttctgtatttattatttgagtaaatcatgagtaataggttggtcccttatttaaaattttagttatggtcaattttaagaggaacacaataatctttttttttgtcttctgtacagttatatcaattttagcagtttggtgtctagttttaccaatgctattttatgatctttgccatttgccatggtacaatgtgtttaaatggcacatcaaggtatactgatggttgccatttgcttaataacttaaaagtaatccagcaatttcttccacttttatttcttaacatatgattttgttttgtgaaacatgaaagatgagtcttatatttaggaaccatttggttgggaagctgggagagtaaaatttaattgattttttttcttctgcagctcttgaagaaatagcatgtgaatccagattaggtggcatcatgtatatttttgtaaaaggaatttttacttgcttaggctgaattcatccttataagcctccctcagccatccttaattcctccctttctctcactcctgaagtcaaggattactatgttttattcctttttctgctgcaatatcccggactcttctctgtccatcactatagccacatcagctaataagctcctcttcctgtgtccttcttccctctctactcatcctctatagtgccatcaaagtcagagtattaataaacaaatcctgacatgtcagtgtgcttactccccacattttgaacggattaagttcaaatgcctcacaggatggcatttgaggtgctgatcctaatttatctttctaaccttgtttcttgcctctttcttccattcctcacatgcaaacactgaactccagtaacaccact

SEQ ID NO: 200783 - DNA, 1000 bp, Homo Sapiens
atctgctatgtgccattcactgggccaggtgcagactaatatgtaacctgggctctcaagggccttatagtctaaaaatggggaagagcagtgcaatgaagtacagcaggcatcatgataaacccaggccacaatggggacactaaggagggtatagtcaattctgttagaccatggggcaggttaaatcagggcaggaaagtctcttgcctggaccattttttgtcccctctgtctagtactgtatgtaatctctcagtgctcacctatgaaacagtgtggcagccattgaggtgcattgctcagatcactcaagaaaatctgctatgaggagtgaggttgacttccagcctccagttgtggcaccctccgatctgctgtggtatttacactgaggcacgctcctcttgggcactggtcagccaatgaccagaaggatggcagtactggagctggaccagttcagcccagtgtggaacttctccagtggcagtctttgctcaggctcatgggcctggctgagactttcttggggctctactacagtctaaagctcttcctatcttctcctccttctgttcccctctccttcccgaggtgtcagatctgcattaccacctattcctgtgccttccccctttgtcctctgagggtgtttcccccataatctcttgcatgtctaattttgtcttggtatctgaactgacacagaggaataatgatgggacctgtcttgtagggttcttgtgagaattcaaaaagttaatatatgtgacatcttagaacagagcctgatacacagcaagtgctcggcaagggttgcaattttttttttttttttttttttttgagatgggcagaatctcgctctgtcacccaggctggaatgcaatggcatgatctcggctcactgcaacctccacctcccgggttcaagcgattctcctgcctcagcctcccaagtagctgggattacaggcgcccacaatcatgcctggct

SEQ ID NO: 200784 - DNA, 1000 bp, Homo Sapiens
cacttctggtctctagcctaggctcttgctggggattcttcttcttctttttatttttattttttgttgttaatttttattttaggttcaggggtacatgtatgggttatatagataaactgtgtgtcacaggggtttcgtatacagattatttcatcaccttggtaataagcatagtacctgataggtattttttctgattttctctgtcctcccaccttccaccctcaagtaggctccggtgtttgttattcctctctttgtgtccatgtgttttcattgtttaactctcacttataagtgagaacatgaagtatttggttttttgttcctgcgttagtttgcttaagataacagcctccacctccatccatgttgctgcaaagggcatgatcttattcttttttatggctgcatagtattccatgatgtacatgtaccacattttctttatctagtctgccattgatgggcatttaggttgattccatgtctttgctattgtgaacagtgctgcaatgaacatatgcatatgcgttggtggagattcttaagcttagaaaagccatgtttctaaaccttctcccttctgatttcccatctctgtggaatatagcactatacctgataggctggatagattataaatgtattctattgaacaactgagaaagcttcaaacaaattttcaaagtccctagcaccagggttacccctttctttctgatggaaaattttgtatgcacaaggaccaaactggaaattgctttgtcaaaattctggcatactgtgcttctaattaggcatgtttcaaattattctgtcattttggttccttgtttgtcctcttctgatcattttggtgtttcaatcccttgaccaattggttaagctagattccctaaatctcacttccctgtgtgcacatggacacagacatcccaccctacccagcctactattctagattggtagactccagattgtcttcttgggaatt

SEQ ID NO: 200785 - DNA, 1000 bp, Homo Sapiens
agatcctataaacctttttgcctgtttccagcttcttagtagcctcaccctttttcctgttctagtactagatgattgaaattcagagattaatgctcaagttttagagtagaggttgcaaatttatagctgcaaggccaaatccaaccacaggagaactttgtttggcttgctcaacatcttaaaattttgtcacgcctgtgatcccagcactttgggaggccaaggcgggcacatcacaaggtcaggagatcgagaccatcctggctaacacggtgacaccccatctctaataaaaatacaaaaaaaaaaaaaattagctgggtgtggtggcatgcgtctgtagtcccagctactcgggagctgaggcaggagaatcgcttgaacctgggaggcggaggttgcagtgagccgagattgcaccactgcactccagcctgggcgacagagtgagattctgtcacaaaacagaacaaaacaaaacaaaacaaaacaaaacaaaacaaactttgaattaattcccaacatccaaaaaatcaggagatgactcataaaaatctgaatttctgccttctcttgaaaagttgtcagctctccattccttggctttgtgttcccacgtgacctttgctggaactgagtagaatctatcccttctagatgaggcacaaattccccagggtgccacaatctcccccagcctacttcactgttgtcttgtccctgtaggcagttggatgtgctccctctgcagtcaaaggtcaaagtttttcttaccttactcacctctccagggcccaggtactgtccattactgaggctgcttgaagctgaacttcaggcctcccaagccatccccttgtggctaggtctgaacaaagcctttgagcactaagtcttccacagcacatctcccgatggtgaccatgatccaatgagtagttttccctgttactcatctgcctcctgatagatgtactacatctggagatgtggaatt

SEQ ID NO: 200786 - DNA, 1000 bp, Homo Sapiens
actaaaatgaagtcttttgtgctttctttataggtttagtctaggagttgaaaatgagtaacagggcttacattatggtgaccatgaaaaatattgtaggtttagtaaccactctgattatatttcttttcttgtatagtcttttggtttttttcactggagtttgtatttgcctttctgagcatctttgtcatcattttatccctcaagtttattcagtctccttatgtaatcagtaattctatcaaatcctcttctttgctcctgagacctcacctacttcaatttggacgtcttgctctctgggtcttcactggattaaattgcttggagtctacattttgttctttctggtcttaattccttggtttgctgaaacagatcctcaggtaacttctttagaaaggatgtataggtgatcaattttctttgacatcatatttaattatcacctttaattgatatatgagtcaaaagtgtatttttagtttgaaaattgtttttttcttgaaacatggaaaaattgttccaatgccttctagcatcaagtgttgctaagaaaagttctgataaaattcaaattttcattctgttggtaagaacattcctttcctctactctcactctcttaaaatgaatacagcatgcgctagcaatataagcatattgcttaaagatatggagatgtctaccagaagaaatgtctgaaaaggtaagaaacgattgcctttgtacagtagtactggagaagacagttcaccattgctttatttattttttcttaacaatgtgcattattattttgaaaaaaatttatattataaaacgtgggttgctaaactataaagaaaagccagtgaaagattatcacacagggtagggttgtgttatctctaggtcagggaggtggttgtgctcagaactcagaaaggaatgctaggggctcctagagaactgacattactgttatttgacttgagaagtaattgaccagttgctt

SEQ ID NO: 200787 - DNA, 1000 bp, Homo Sapiens
atttctcaggccttgggtgcaggtgcctagttgctacaccagctcaggaatgctcggagggttggaggcttggaggtttgagggcgtctctcatatgaggatggagtgcaatggtttggcaggcttaagggtgggttcacctggggcaggactattattaaactgttcctctgtctggaagtgagggcagcagaagttggtttccctgatgtgtaggaccagagtaacagctgatcttgtgcccagtctctgtgctgctggggttgtggcatacagcccctggcatgggcttggtataatgaagatggagcctcagtgctggagaggtgcagcagctactgttccccagagaagggcacacaccagaggtggctctggtttcaagatggcaccatgctgcacagcttggctcactgcaggtagatggagggtggagagtgcccaccttgtgctcctaatttggggcaatgcagctgtgtgaattcttggcagctctacaattcataagactttgaaattctcctgttgtacgtactgtaggtgtttgtggtgacaatgggagctggtgaggcaagtccctcctaactctaggcagatcacaccctgagtggaagaaacagggctacagaggcccagtgcctccatgctgtcctcctggcctttcaatcacatgtgtgtctccactcccctgctgcactctagcactttccctttgacactccagtcaaatcttagctgttaattcattgccttggtctggagactggcatgacctagcatgttacagagtctttgttcttgagagttccagattccagtgtcctagttacctagtttcttattgggaaggtgagtgtgcagtgtctcagccatcttgctgacgtcactctctacaattttttaaaaaacatatatattttcattatactttaagtcatagggtatatgtgcacgatgtgcaggtttgttacatatgtatacatgtgccatgttggtgtgc

SEQ ID NO: 200788 - DNA, 1000 bp, Homo Sapiens
gaatataagccaaattacagtgtgaatttaaattgtaatatgtcagaggcacattatctcaatggcaatattttctaaaatgtctcttcttttttttttttttttttttttgagacggagttttgctcttgtccgccaggctggagtgcaatggcttgatcttggctcactgcaacctccacccaggttcaagtgattctcctgcctcagcctcccaagtagctgggattacaggcatccgctgccacgcccagctaatttttgtatttttagtagagatgaggtttcaccatattggccaggctggtctcaaactcctgacctcaggtgatctgcctgcctcggcctcccacagtgctgggattacggctgtgagccaccgctcccagcctaaaatgtctcttcttacccagcttccacctccaagcacacatgcctctcacacatctgtgattttgttatctagtactgagccaacaacaaagcagaacatctagcaccaacaaatatttagatgatacactgttaaagcagctcccactaacaccagataggcttaggggtcattttgctctttagcatctcccctaccgaagcctgcagaaaatttctaagcttatctggtgccggtgggagctgagttcaaccccgctagacaacagagtcccagactgtatgtcccagattcaacctctggttcatgtcagatctagcaagagtttggggccaccttaacttttcaacttgccagggatagaaaatgtggatggcctttcccactgtttatttatgtgggtcaggtggcttcacctgggtaggctcccatttcctcacatccgcaggggtgcgcactttctagaccagagaatgtgtttaaaccccatgtgacccttgaggaaaaagctctaatagtaaagaagatcctctgtttgaagagaagggcaaggcagtctcacaccaaacaaagcaatccatataagacccttttcttctgcctcag

SEQ ID NO: 200789 - DNA, 1000 bp, Homo Sapiens
tttttttttttacttgcataagttttgatagccatagttattataaaaacaagtaatttagatttgaataacaaatagcatgtctatattcacactttattataaaataattcgttctagctatgctgttaatggaaatagaatatattgagatatcatacaagagtgatgacaagaagtagatattaaggttgaatagcaagaacctcagagttacttctacataggtttttctctaatactaggaagttggccaaatggactggtttaggttagtgatgtctcaaattctactatacaatgaattgcagaattttgagtagtttaagtttcatatttatcttctttctttctttctttttttttttttttttttttttttttgagacagtttctcactctcttacccaggctggagtgctgcagtggcttaatcttggctcactgcaacctccacctccaaggttaaagcgattcttatgcctcagcctcccaagtagctgggattacaggcaagtgccaccatgcccagcaaatttttgtatttctttttgtagagatagggtttcgccatgttgcccaggctagtctcaaactcctgacctcaagtgatccagctgcctcagcctcccaaagtgctgggccacatttatcttcttaagtacccatagtgcgcacctggcccacatttatcttaagtacccataatctaagtctgcttttctcgaatttgtaagattttgtttaagaaaaggtttaaagaaagtttgaaaatgatgctataacaactgttaaaaataagtttattgtatgtaaaatgcttttcgtaagtcagacactatttttacttcagctggttatgtgtgtttatggttatgtgtatatgttgggagcaggtgttattgattgatatgatcacatgatattatattacttttagtcaaatgaatttttggtgtggggaacttatttttcaggttgaagcactcaataagttaaa

SEQ ID NO: 200790 - DNA, 1000 bp, Homo Sapiens
ctggccagtttccccacccccagataagccaatgtgtctgagtctgttctcatgagcctcaggagacagagatttcacaactgccttgcaaaatccctttcctaaacctaatgaccatcacaataagaaattcatccttattataggcataaatttatcttgctgcaattttatcccattttctccaagaaatgtactagattatcaaaaaataaataagaggtaaagtgctatagaaatataacgcatttacacaactcaaataggagattttcccctggattgtaataatgcatctcttgttaatcccagctagctctcagaatctagctcttagggctgagctcggcaatcagcttccataaaagtgccacttactgtatgtcttccctgaaagacactattgacaggaccattaagagaagagattccttggggggggatgagagtaaatctttcatcaaacaatttattgcccttctgctaaaagcacatctactattcattatcactccaactaaatggtggtattaggagtcctggaagaactctgacctggccacaaaacccaccctgtcttgtaaaagcagactgagctgttctccctccagcaccacctgaaatgctgtcctcatggattcattcctttgagttaagcattgatattctaggttctgcatctaaaaggtcattgagtaattaatttttccatttgatgcattttatatatagtttatatgtagttttcagttctcaactataattatcttcttttttattttctaaaacctgaatcatagtttaaagcctccaataactggatatcctacagaccttttatattgccaattttttaaaatcttggtcatgagtcattttatttttttcttttttctatgcttgtcaattgttgttgcaggccagatattgcatatgaacaattgaagaaatcatttaaggtactggataatgctatatttctccaaaaagaatttagtct

SEQ ID NO: 200791 - DNA, 1000 bp, Homo Sapiens
tttactggtaagacagccccagctatccttgagaccccagctataacggtacttggttgacaaagaaacattgccctaaggaacacaggaagggaaagcaacattttagggcaaagtattttacagcacagaaatagcaagctcctattgattactggtccatagggaccaatgtcaccaacagaatgaagaaaataaactctggtgatgtgtgtattatttagcattcttatattggcaaagtcttttcctcagggaagaagtttgttacatggatcaatgccaactcaaccagaagaatgtggaagaaatgtaggaatacataaggcacttttctcctctagaaatgccacgactttcttttgcttgcagggtagtggtagaccttgcaatgctttgtggccgtccccaggggataggggtaagctcatttgttgacaagaaacaatttagagaaaacactgggccacctgtgggcagaatctatttaaaaaccaaaggctggcccagcagtggagatctcatggctgctgctctacgcgtgagctgttagttgatttaataatagcctcctccacctagcgctgggacgaaatgtcaccttccatttattcccactgtttgtagcatctgggatgccactccatcatccagccaatataattcttccttcctttattgctgtagacagctctcattcaaaagagttatgtagcagataaaagaaaaggcagtaagtggtcaaaaatgactaagagagaggggttataatgtatttttgctgagactgaggaagtataaagaaaaatagaattgtgcaagaataagagggctattcagatatggtgatatcagatgaaatatggttgggtcaactattcggtttgggtaaccagagaagggaagatcattttgagcccctagtaaatctccttaagaagaagcgactgtccatgtgtcccaggcctaaaagaaactatgactgtttatggaaggaatt

SEQ ID NO: 200792 - DNA, 1000 bp, Homo Sapiens
ctggttcagacaaggaaatgggcccagaggagagatgtgattcactcaaggtcacacagcagagctgggacaagaacccaagttttcccaccctactagcataccatgagcttacaaaaagtggggaaacacaggggtacagtagtcacataatgagtcatggcagctctgggagagggactttggctcagccagggcagggcaaggaaaaggaaaataaaaagctatctatgcagtctgcagctctgcctgctcagccagggagctggttacaaacatttattatttgttttgctgaagtctgctcacatggaactgggtaatagattaaatgattctttagtagccacacaaaagggtgaggaggcttgatttctctttgcacttaaaacccacatcacacacgtgtatacttcataattgtattgagcagctcagaaagataatagaatacttcaatataatatctcatgagggtgggcatgcctgcctgtagaatagggacccctcaatgtggagtatggttctttttgctgctacctgagacttgctgagattgaaaacttggaaccagaaagaggtgcttctcagaagaggatgttcacatgtttagggaggactgacgtcatcatgaccagtagtttgcaaactgagtacccggggctctacggcatggacccaccactctcctggccttccctgcatacctgatgcatttcactcatgctgagttctcacctgaaattacttctctacagtactctaccactaccactattaatattaatactaactataataataattggttagccactcctgcagcttgcagactattggcagacaggagctttcagtctataaaaggaagcttctgcaaaaacagccattttaaatactgtgtgatcagtgtcaggagaagcgagcacaggcttctgtagcacctagaagaattgaccttttagctaactcttgaagaagtgtggaagtaaaaagaatt

SEQ ID NO: 200793 - DNA, 1000 bp, Homo Sapiens
aggtggaggctgttatcttaagcaaactaacgcaggaacaaaaaaccaaatacttcatgttctcacttataagtgagagttaaacaatgaaaacacatggacacaaagagaggaataacaaacaccggagcctacttgagggtggaaggtgggaggacagagaaaatcagaaaaaatacctatcaggtactatgcttattaccaaggtgatgaaataatctgtatacgaaacccctgtgacacacagtttatctatataacccatacatgtacccctgaacctaaaataaaaattaacaacaaaaaataaaaataaaaagaagaagaagaatccccagcaagagcctaggctagagaccagaagtgtggtgacagtcagtgagccaagcatagagggccacacagggtggatgtagtccttgacctaccccctcttgcaacatgttacaggtcatcagtcatttccagcctcatgcaccaatgacttaacctttctctgatactaagtgcacatcagacttagctcagccactgggctgcccaaggaggagggagaatatccccaacataggaatcccacaggagactgaccccagtctgctatttattctgtgatttgagccagggttagataatgtgtgccacaccttgtgttttgaaaggccctgggaaaagtaacacattggactattattggccattaacactgtgtgaatttattatcagaaataagcaagcctccaggaactgagctctgctacgggtgcctggaacagaaaatgaacaggacctagtgtttggatgataggaaaggggaaagaggagtgggcaccaaaaggtaaaagtggagtccagaaagggaaggtgggaaggctcacacttcaagatttttccctcagagctaagaaaatgcagacttttgccccagttgggaggcaaggggggtcagctgggtttttgattgactggtcaatttgtttctagtcccagttatgaattc

SEQ ID NO: 200794 - DNA, 1000 bp, Homo Sapiens
gtttctcttaaagaaataaaaggcatatcaccagttgattttatgatccttaatttaaaaatatgaagttagcatgcttattttccgtattgacaagcatataccacatgtccctctgaactgtgattcccttcctcttgcagcttgctttttctccattaagcttcgtaaatctctctctcagataagaccatgctggtgcactgagagttaatccaattaaaacagtataactaaataatagaaaaatatttgctgcatatagaaggaaaatgacatttgagaactcatttattagattgacgaactgagacgtctgatgcagtgctctcctgatatgcctggctggtagtgtgggcttcagttcctgggttagttgacagattatgccatgcctcattaaggcggacttaacgctgactacatctgtagactctcttgtattttttgttttatgttcagtgtgaagaatgtaaagtgtttgtgagatttcttctgaatattctttctggatattcaaataaatgtggtcacagaatgacagtttctcatttaggcctcatgtagtagagacaaactttattaacatccattctggtggtgtgcctgcacccatcttattcttctttacacaatgtttatctttgctccttccctacacccaccctatgctgtagtcacattgattccccccaccctgcacccctctctcccacttcctgatgatgcctattcatttaagactgagtccaaacatctcctttgctgtgaaggtggctcctggagtgatggcagtggcagtgactgaaggaggcctgaggaacactagcactgccttggcaccgtgcatcatgatttattgcctatactgtcatttagcttttcaccttttatactgtgtcttcatatggcttctttgaactttatcttttgcttttatcatcccgctctttagctaaaaccatcatttttttttttttcatgaagatttagctctacc

SEQ ID NO: 200795 - DNA, 1000 bp, Homo Sapiens
agctgggtataaattgattggcttcatgtctggatgattgcagggggccaaggctcagcttagcattcctaggctgtgtgctctaaccctggggacctgggaccaggcccacagccttttttctctggccccttgaggttaagctcctgctgtgctgaaggggctgaggtgttcccagtctgctggtaacactccaatgcagtctgccagcaaaagggcttcggcaaggcagcaggggtccctgcacatgtgtgcaccagtgacagtgtggtagtgaggttagcatgcacacggcatgtacacatagtgttcactgagcaatcctgtgactcaaccctacaaagttaaaagccaggaggttaagaaagatgatacaaacagtaaattcagccatacctgttggtcttcaaattttgacttccctacccaatctgcctgctgttgcttacttttcagaatcctcagttgcattttgcattatttccagagttttgagttgtaatcagttacaactcctacagaagctctctgtgaggatggatattctaacaaaagagctatggcagtagctgccggcaagtgcctcagctgggcaaccaaggccatgctgcaagcaggtgtggccaggcagggaccctgggataggccagcaaatagggggacactcagatcagacaggccccttcccatgagcaagatatgctctgtccaggtctggcagccaaaaaggctaaagccacctagaggagtacagtgggccttgaaggatgagcacccatgactatgctccactgcagccattcccacgccagacccctggggatccatgcaagctggagttctgtctctgccagctcaaatatccataggggttatggggtctcctgcagtgaagatactagaggtctgtaacgagagtgggccactccaagcctatttcactcgcccattccccaggagctgctcagggtcaggaataagtcctggtgctcagcaactc

SEQ ID NO: 200796 - DNA, 1000 bp, Homo Sapiens
catcttcctcacccctgggtttcctaactctgtcttgcctactctgatctccaaagaccagtctctccttcatatttggcatgaaaccttcctcagctactcacacagtaattgcctcatttctcaaactctccagagtcacatcatccaatcaaagtactgtgtaatgtgagccacatatgtaattgaaaaattttcaagtaatcacattttttaagtaaaaataatcaggtaaaattaattgtactaatacattttatttgaccccgatatatttaaaatgttatcatgtcaacatgtaatcaatgtaaaaatgattaatgtatgcatttcatattcacagcacatctcaattcagactaaccatatttcaagtgctcaaaaccacaagtggctagtggtggccatattggaccacacagctctagaacttctgtagcccatggtttagcagttaattatgtgtgcacttggcatgttcgctgcttgttctctagtgaagtcattctttctagcaggccaagttctgtttctaccacaggtcctagcatggtgctttgcacattgtgggcactcaacaaatccctaagatttgcttcatagatgatccctgtacattgatagcatcttcctcattcatggaataacaagaatgacctcatctcctctcactttcattccttagctactaacactgttgcaaagatctctggaaaccggaaactttggtcacctatactttaaatggagagagaagtaaaacttgctgctgagaagcaaggactgcatagaaggtttagtttgctggtagaatcaaaataagcactgaatgaagatgtgtgtggttcccagttttataaataggttttgcaagaggagagtgtttgcttctttgtttttggtgcgaaacatttcttcttttagcatgttatctgaaagtattgctgccaaagggatgatttgccagagaaagatggtttctgtccagttccttcatatg

SEQ ID NO: 200797 - DNA, 1000 bp, Homo Sapiens
gggagaaaccagtaattgaagtgaaacagtgtaagtgactctccaatgtatcacaagctctcttcaactcaatttagaaacatctcttattaggaatgaaaactttaagcagatgccccattccaacctcccacccccaccccgccttttttctgttggactgttatgcttgtttgtggcacatttaattagcttctcagggacttgctgtgaataatagctccctcacatttagaaatgcgataggtatacacttgtttgtttagaatcagatcacgtatttccatgtaaagatatttcaaataatgcctgggttcacaggtgccattttaactcagtttgcaaccggaatgcagtactcatcctattatcttgggtttggggagtaggaggctgtataggaggggagggaaaggaagaggaagagaaaaaaattgagcacagttttgaaattgacaaagggtttcctgggtgctgcctcttgctgcctccctgtctcctacttctgtcctcaggaccttccaggaccctgacggcccatcatggcactttgtagacctccaaatcactcagtcaactctgaatccaactcccactgtggcagggctggtgttctttgctgcgttaagaatgttgttctccaattccagacatttaaaccaaagagtaaatgttaattagcgccttaacttccagaaagcaatttccagtttcccttttaatcgtgacaatgaacctaattggtagaattaggcaagaagagagggaaggggcagaaaattctggactgagaacttgcctctaggtttggtgctccctgcttgtgcctggatctcccagcttccttcatttctggatcccatagtgtttgaaagctgcaggtgctctgcggtctcccagggcaatagcgaagttgtgagatgaggttgaggaatgaggtgggagcaggtgtggatagttcacactactgacctggatgaaatgtttgtgagtcaaccct

SEQ ID NO: 200798 - DNA, 1000 bp, Homo Sapiens
cagtgctcctgctgagaccagctgtgactgtatcctaattacatgagaataagcatcttgaatgctaaagttattcttcttttgcattcccccatcttgaagtgttaacagccccttctcccttttattttcttcataatgttctttttgaaaaacctaaaaaatctcaatcatgtctagggtaaactagaggtgatttatctaattcttaaggcaaaataacttagaagaacaaacagctctcggttacatgacacgacaggaacactgacttaagatgaaaaactggtggaagcctgtgagctggaacatgcttggggctggggctaggagcagaggtgtggtcaagagggcgggaagaggcaaggactcagtccacaagagttttgacctcctattcctttccagcctagggttctatatcagaacttaattttaaaaaaaaattaatagcctaaggtattcttagttcttccaaaaaatatattatagaaaatatgggccgggcgcagtggctcatgcctgtaatcccagcactttgggaggccgaggcaggcagatcacctgaggtcgggaattcgagaccagcctgaccaacatgaagaaagcccgtttctactaaaaatacaaaattagccgggcgtggtggcacatgcctgtaatcccagctacttgggaggctgaggcaggtgaatcgcttgaacccaggaggcggagatcgcgatgagctgagatcacgccattgcactccagcctgaacaacaaaagcgaaactccgtctcaaaaaaaaaaaaaacagaaagaaaatataacaacattttggatttaccaaggcactataataaaagagtctcagtattattagcataacctagggcaaatcttaaaatacttaccttaagcaatggtataattaagcttttaaatttaattttattcatttagttagttaatatgtattgaaaagctcatgtatagggaaagttttggtgaaagagga

SEQ ID NO: 200799 - DNA, 1000 bp, Homo Sapiens
actgaatgtttgaaaacatctcctgctagtaagagcaagttgacagttaaccttaacagatgctattaatctggaaataacatttttttcctgcttgcctactgacacttaaactatttcctgggaccagacaggaaagacaatgacatctcttgttttattactataagagaatgattgactaaaaaatagtagctttgtacttcataagtccaagtgccatcatattcactggttgcttttaatcagttactctgagctgcgttcttattcaaagaatattaaagcaggaagaacctcagagatttgctaatccaatttgtgacaaagccaagactggaaaccagatctcactgttctactcattgtgacactatggtcccaccttttcatttacaaatgcataacacgcactgaagcattaaatccctcaccccaaatccccatactgcaagtcaagacagagtcagggctggaaaaccagcacatgaagttgtagttctagtaggaatcaaagaaactcagctctctgagtttttcccatgatttctatgaatagtaaatgaacacatattctgtatatggtgcccatcccatgatgaaatagacagctgtggaatctcagggttgggagggatctcagatcccattaaaccacgcccctccttggtcttggctattatatctccagtgcttggaaactcatgcacacaacctccttttctcagcacatattgaataaatctaattattggaaagttcattctttagagcaaacatacaactttccctcattggtttaatatgtatcctttgggactagagagagtaggattaagccctcttgattattctaggaccatgctatctgaacaaattgcattgcctccacaagtcatctctcctttaggatatatatctgtccactgtattcttattgccatggaaactgtatgactcaagtggtacacacataaagagtagcattcaactacctaga

SEQ ID NO: 200800 - DNA, 1000 bp, Homo Sapiens
agcaggcagccctggttgacaccttgatttcagatgtgtgagacgctgagcagagaactcagctatgccatatccagacttcagatgtgccaaaactgagataagaaatgagtattattttaggttgctgaaccagtagtaatttgtttttcagcacagaaaactaatacagtcaatctgtattgaacaactactatttttttctgcttcctgtctatccatctacccatcactttttcctctttttctagaaacaagtcatatttcctttagcaaactggtcctcacaagttccgaccacataattctcttagaggttgttagtcacagtattctcttcacactgaccctagcaaagggtctgtgacaatccacaccagttatagaacccagtgatagtggtcgggcatgctgaatggcccaggcattaccatttggctcaaacaagaccaagagaattcctctataggaaggttcttaaactatctaacagggaaactgattttcactcactaaactgaaactatgcccatggctctgttctctctttgtttgctgaatcctggaaaaagcttgacttaatataagagtatatgaaaccaataagtagaaagaagcagacaggaaagatgggaagagagagactttatcccagtaaagtccccagttctaattcttggagctgttcttgtccccactccacttttttctattacttgtgcttctaaagttaatttttattgagttctggtaaccaagagtgctgaattgggttttggtaccaaaagggagctattcattataatatctcactttcttaccccaaaatttctaatgtaacacccagaattttttctcttgcctagagaaggtaacttaacctagagaaggtaaatctttgcttttgttgtatataccaaatgctataacgtgcccttttgacttattaagtaggaggagagtagaaatgacactcaactcttaataagatgaaagaatt

SEQ ID NO: 200801 - DNA, 1000 bp, Homo Sapiens
ttcccacaaatgatgtcaaccccagattttaaaatttggccactaaattattaactgatcttttaaaaacaaaaatcattagaaaaatacatccaatcaaataaatccacaaactcttctaactttaaattaatccaatatctttataagttaatagaaatgttgcaaaagtccttagggagtgtagagggtaaggtagacatctggaacagaagaagatatggaaatacgtttaaagtaattaaacacaaaagtctttgctttttatgtatgattcctttctctggccccactacgtcatttgcatctgcataaattcaaggctttgtaggagaatttatttatggagaaaagaaagaaacagctataccaaatgaaagtacgcctccactgttcacagaactgacaatgttaacggcttgcctgtaaacagtgtttcctttataatcttcctccacccctgaacaatttatacaatgattattacttagcttaaaaaaatctgtgctttgttctcacttataagtgggagctaaacatccaatacttatggacataaagattgcaacaatagacagtggggactactagagcagggagagaggtgtgggggcaagggttgaaaaactaactgttgagtactatgcttagcacctgatagtgggagcattacctccgcatcatgcagtatacccagataacaaacttgcacatttaccctcagaatcaataaaagttgaaaaaatgtatgcttaatctctaatatttagaataaaacaaatcatcggcaagttgcattgcatcccaaatcaaatggacatctcaaagtccttttgaagagaaactgcattaggattctccttattcctaattctaaaaatgcacactgtggtgtgacatgtttataatacttctcagtgtgctgaggcaattagcttgtaagtttatatctccattatgcaattatataaattcaaactaaggaatatcaaagtttctg

SEQ ID NO: 200802 - DNA, 1000 bp, Homo Sapiens
tgaagccctatgtgcccctctaaccaaattttccataggtattaatcagatgaaatttggtatttattatttccatatataccttcatctttctgagggccaaagtcgtactttttcaggttgtacacatgcctgcacacactagtacacctgtgcaatcacgtttgtgcaccagaatatagggaccagaacaggtgattcatgcttcccttttatcctgtaaactgagcctgtggagtcagtaaagctgattgtattacccttgctttatggagggggaatatggacttcatgaggggttaggggatgggcacgaggtcacccagatggtggcagagccacactggtaccctggactcctcctcttgcctctaggacatattcttcttcccaggtctcagggtcttggctattatttcctaagtagtgttcagttacagagaaagatgaatgagtccaaacagaaagcctttcctcctcagactgaaaatatcaagcatcagttggaatttgtttttccaatttatttaatgcactcttttttccccttctctcattaattgataatgttctctgctcaatcagtttctttgattgcttctcccctttaaagcttggggccaggaactgggtgtgtggcatttaagttatgacttgtttaggaaattgatattggcattttctgcatgacttgcctttcttcagtgagttactttgctctaattctctgttagaagctccaactgtaaaggaggaacaggctaattaaaaattggaagctggtaaatttcaccttgagcagctagtatgtgcttttggcaagaattgatgcaattattgatcaaataaaattgtcatccaaaagaacagtttttattttaagagaaggcagcaagatactcactgttgaaataaacctttattccaaagatacagcaatgacatgtgaaatccaggtaggattttatcaaaataagaatttcctatattttaaaatcta

SEQ ID NO: 200803 - DNA, 1000 bp, Homo Sapiens
ttgggaaaacaaactctataaacacttaatatttagtaaatttttttaccaattcaagctgtattaaaactgtatgtttcaatatatattaatataaatgtaaatctgaagttctaagctagtctggctagtctgccctaccttgatgcaaatggaaacatttaccaagaagagtatggacttcaacttccaattcttaaaataaaccaaaattttcaatgtgtatgttaattagagctccaattcataatggactagttccatgaataggcagaataaacagttctattttaacacgaagtcacatgggaacattccctgattcttccacttttaataagcatttttttgttaatgtatgaggggtgttgtgtgtgagtctacaaatcaactgtacacagcttgatgcatttttttcagggtaaatctacctatataaccttcaccctgatcaagaatgacaaaactaacagtaaagcaagttcccttgtgtcctccctactgtcatgaaaagacacctggtatcttgacttccaactctatcgtttacctgtttttcaaccttgtataaatataattattataacagtgtatactatttgtgtctggcttcttctgtccaactgttttttaattcatctattataattgcatagagcagtagcttatgtattttcactggtgtatattattccattgtttgaatatatcacaaaaataaaatttttctattctactattgatttacatgtgggttgcttactacatgaggcagttacgatcagtgcttctatgcacagttttgttcatgtgttttaggagaaatgtacaaatttcttgtggctgtatacctagtaatggaattacaaagtgataaattatgtatgtgttcagctttcacagatacagccaaacagttttccaaagtggcttaaccaatttacaatcttcactgcactggataagagttccaattatgccacatccattttcattaaca

SEQ ID NO: 200804 - DNA, 1000 bp, Homo Sapiens
tgtccagcagcccctctagctgattgtctgccataactgaattccaaatgttttctgacatagctgatacttatttttttccctatagcaaaacttctctgggggtttatgtgcatacagagaatcttagaaaaattgggaaatgcatatacacactaatatttttgtataatttcaggggcatgcagttatgagctcctattaggtggttacagcccagtttctgatacggtgtatacaatttatgacaactaggacttaaaaattaagtagatcatctttgcatttggtaaatattaactgaggtcctatatgccctgttccagcaaggaatgtcatggtgaggaagacaaaatctctgccctaatggggcttacatcctagtgagggacacagacagactgaccacaagcaaatagaacaagagaatatacaatagaatatcaagtaagtaaaatgcagaagcaacaaagtagagtaagagaatagggagtgccagggcttgctatgaatgcatagtcaaaataaaacaagtacaaaagtaggagtttccttaagaatttttaaactatggtttctaaattttagtatttctttatagcaatataaagaagaagtattatagcaataatcttaggaagatataatttagaaatcataacaaaacttttcattaaaactatttctatagttatataaaataaatgacatataaattaacacattttctttggaaattgataagtaaaaatttttgctaaattttcttcagtaaaattttatggaaaatgcagtgagctctttctgagttctttctagaagccttgttagcttgttagcttgttgtccttctgtagagttagagatcatttaaaagttggaagagacatggtttctacaaatagaaccaaatggaaactgttgggagaagaatattatcttccctcagccattctgagagcggcaatgaagttaggttttatttaatgcagatgtgcca

SEQ ID NO: 200805 - DNA, 1000 bp, Homo Sapiens
caagaagacaaacaacctgatttaaaaatgggcaaagaaattgagcagacatttctgaaaagaagacatataagtgaccaacacatacatggaaaaaaatgctcagcatccctaatcttagggaattgcaaattaaaaccacaatgaggtatcacctcacatctgttagaatgacttttataaaatagatgaaagataagtatcggtgaagatgcagacaaaaggggactcttgtacaattgttggtaggaatgtaaagtaatgcagccattatagaaaatggtatggatgttcctcaagaaactaaaaatagaactaccttatgatctggtaatcccacttgtgggtatatatccaaaggaaccgaaatcaatatgttgaagggttatatgtactcctatgttcgttgtaggaatagtgactgatatggtttgcctgtgtccccactcaaatctcttcttgaattgtagctcccataattcccatgtgttgggggagggacccggtgggagataattgaatcataggaggggtttccttcttactgttctcatggtagtgaataagtctcacgagatcttatggttttacaaggggcaacccctttcacttaattctcatcctcttttgtcttctgcctttcgccttccaccatgattgtgaggcctccccagccacgtggaactgtgagtccattaaacctctttttctttataaattacccagtctcgggtatgtctttatcagcagcatgaaaacagactaatacagtcacaatagccaagatatggaattaacctaagtgtctatcagtggatgaacaaagaaactgtgtcatatgtaatgaaaaagtgttcagccttaaaagaagggggaaatactgtcatttatgacaacatgggtgaatctggaggatattatgctaagtgaaataagccaggcacagaaagacaaaaatgtcatgatctcccttatatgtggaatctaaaaaagttgaatt

SEQ ID NO: 200806 - DNA, 1000 bp, Homo Sapiens
ggtgtgtaggctcacactattagcattagttaaataatagtcctgaaatacggacactttcagaatgctgagaaaaaaaagaacattcagattaactatttttttactgcctggcaattgcagtatttttttactgtacaataaagttactgtaatagttcacacaagtgtccatttttaagtttgctaatgcatacggtttgtaaagtagcttatatggaaattttaaccatgacttgaattggtgcttaactgccttttcttttgtggataaaactatacccaggcttttcctcatgccactaattgagatttggctttttcaaataagtattatatgagctgacttaacatacatttcttcatgctgttctttttggcattctttcaagtgctgagctactaataatcattctcattatcagatgaagtctattcacttctcatgaaaggattcttctcttagctgccctgagctattatgttataacccagcaatggcctaggcacctcgggaaacaccaaagtataggagttactcttatacaaaagcttataacaaataaatacacgttgtgagaagaggctaagacaggtaaaacataagacaattagagatcaccaaaggttagccaggctaggatgacataatgaactgctgagtcagcagattcttaaacagaatctctttgagagctgagaggaataatatcctcctcttccataaaaaggctgcactctacaaagcaaatactatattctcaaagacatgtataagtgtatatacatatatattggaaacttaaggactcacagtaatagaaataaaagttattctaaaattagatatctataaatagaacctgtatagtactattcctcttatctagcaatcagattgcagctggacagcatcatagtatttcagaaaattatgcacaagagaaaaagagaggcagaggggaagcgagagaagagggggttgtttcttgctcccaaa

SEQ ID NO: 200807 - DNA, 1000 bp, Homo Sapiens
ccatcagataaattcccaagaaatatcctcataatgttcagctgaaatctctaatgggtacgatcaaatcaggcttaatgttagctctggtgagcagtcacgttgaaagtatgtgttgctttctcattatcattttatttctaccattagccacattcaaaaatataaatcactcctaatatctttcagaatgaaggttaactatgtcacctcagagctgaccctcatcacaagtgacaatgtgaggcattatgggaggaataggaaacacggtgccaaagggtcatgtgtggtgtgaccttgggtaagtcacttcccctctcatggcctcagtgtccttatatgtaattgtggggttgttagagtaggtagttaggcagacatgagcagggcaggacaggccccccctccacccccaggaatgtcaggtgactatcaggtgacgatgaggtggttcttaaactctcaaaaataataattgtccacagccagcaccagggaaaggcagtctcccaatagatagaaaatacctgaggctgatgaacagcagcttccggataagatctccggagttgtgtgagtgggccctagcttgcgcactaagaggcacaatggcggagtttaactggtatatgaccttcctctaggaacgcttgactggtaagggaaaaacaccttaagtgagcacacacacaacttcaataaacccactgcacatgccacccctgccaagtgctggcagacactgtgcatgtggacagcccaccccaagggaagaatcaggggagaagagatgtagcccccagaaccatgccaacgtataaaaccccaagtcaagggccaagcactgtgcttggaactttcaagtcactgacgtgactctcttccaagtgtactctacttcctttcattcctgctttaaaactttttaataaattttcactcctggtctaaaacttgtcatggtctctccctctcccttgtgccccttagatgaatt

SEQ ID NO: 200808 - DNA, 1000 bp, Homo Sapiens
tttgtaaactttcagtatattaaaactatgcaaagtatttgttgctgttaaggactagcatagtatcattttataataaatagtaattcaggacacttttttaaaatcaaaataattatttgaatatttttggaaagatgccttttctcttatttttttaaagcattttgaacagtacatctgacagtccactagctcctcttagacgtggctatctaaacacaagccctccaatgaaaatactgattattattattgttttgaggcagagtctcattctgtcacccaggctagaatgcagtggcactatctcagctcactgcaacctgtgcctccgggttcaagcgagtctcctgtctcaatctccggagtagctgggattacagtcattgcaccaccacacccggctaatttttgtatttttagtagagaaggggtttcaccatgtaggccaggctggtctcaaactcctgacttccggtgatctgcccacctcggcctccgaaagtgctggggttacagatgtgagctgccgcgtctggcccaatactgattgtttttatttcctgactaaattccaaaatgtcttttttttgctagtgcagacattctcccatactggggtaaatgatattctcccatggttgccttctcaattaactattgaaaatgtttagtgtgtactttcacatagagagttaaataccgatgcaggtgtctatcatgaggacatatttccaatcaatccatattttactaatgttacatattttcattaagtaacattatttactcatggtgttcaatattgtgaacactagggaattaaaaagaagacaaaatccttgtcctcaaaaatttcacagtgtatgttggtaggaatgtaaatcagtgcagccatggtagacaacagtgtggaagttcctcaaaaaatgaaaaatagcactaccatatgatccatcaatcccaccactgggtatatatccaaaggaaatgaatt

SEQ ID NO: 200809 - DNA, 1000 bp, Homo Sapiens
acttttatatttgaataaaaggtactttaaggagccctttaaaatatattaatatgtcctttttattaatcttaatgaatttacaagcaaaaaacaaaatatcctttttttaatatctgtatacattattgatattaaaggcaaaacatggaaatagaatcaggtttcctttcagtgttatacatcatggcaatgcgtattatgtaaacgatgtttaaagtgagctataaaggttatactgtgtttgtcttggtttatggatcctatgcctgtatttcttttgaacatttagagaatatttatgtgaaagatcctttacattattaggttatttctagtttcttaggagtaaattcctatgtttgctgtggccacggactggtgaccactctgttaaatgtgggcaagtgtatttagtgaaattcgtcagtagcctagcttcattggggagttatacaagaatgctctgagtgtcctgatcaattatggatacattgaggctatttttttgattgtcactaccaacgccccatggagtttgccccttgtagcccaggtagtattatgtaggcctaatttttctctagtgatttttatagcctaagtggatatctcacttcctgctataatcctgggcaagtcaacagagttattcctgtctttgtatacagattatgttgtattattcctagttaactgtttcatctaggaaactcagttttagttccctataatgcaacaaactctaaacctcagctttaaggtaaagtatttgcccagtgtaattagctttaattactactcttcactttggctttaagtatgtttcctcatcatttctggcacctgaaaacttctcttttttttttttttttgagacggagtctctctctgtcgcccaggctggagtgcagtggcaccatctcggctcactgcaagctccgccttccgggttcacgccattctcctgcctcagcctccagagtagctgggactacag

SEQ ID NO: 200810 - DNA, 1000 bp, Homo Sapiens
ccgtcaagtatgtccaaaatgaatgaatctgaagagtgtcatgctaaatgaaagaagccagactcaaaagacatcatactttacgtgtaagggattctagaaaaggcaaaactatagtaatggaatgcagatcagtgtttgccagggcctgggggtgaggcaagggaccaactgtaaacaggcagcagggagctattcggggcattggaaaagttcaatacaggcagtttttgctttgcatgttttccatatgcccaaatttcagtttatcatagtttggttgaaaaacatgagttcctcaacaacatagttccaaatttcagttgccacagttctcttaactgtaattgcataaagtacaaattctgctgctagctcttcagtctgcaaattgttgtgtaaataacagatgtacacatgatcagtgactggccacatcccgtctgtgactgaccaaagtctgttggtcacagcacacttgatatccatgtgacttgcagacaacaaagcatatctctctgttgactgcttgtgtcccagtgataaaatccatatgacattttacaaaaatgagctaatcgaaagagggaattggccaacagagatgaaataacagcaaataaatgaaaagtgataatgctggacatgaaattagaattgaatgtaaatgatgttctaaaagaaatagctggctgtttgagagactctagatctgcagccagaggaatttagaaaaggtgagcttattgacatcaatgaggaaagtagttgtgatgaaaaagatgatgatgtcccggaagaagtaaagttgatatttgtaaaaaacagacttcacataaaaggcattctcagagagctatttcatgaccttgaaaatacaaaagatacaatgtttggaagcagatccagacctagaaaggagtctggcaattcaccaaggcatgggaaagatgctcactttgtataataggttacaggacagtccaggtgtggtgactcg

SEQ ID NO: 200811 - DNA, 1000 bp, Homo Sapiens
tgttctgttccattgatctatatctctgttttggtaccagtaccatgctgttttggttactgtagccttgtagtatagtttgatgtcaggtagtgtgatgcctccagctttgttcttttggcttaggattgacttggcgatgcgggctctttttttggttccatatgaactttaaagtagttttttccaattctgtgaagaaagtcattggtagcttgatggggatggcattgaatctgtaaattaccttgggcagtatggccattttcacgatattgattcttcctacccatgagcacggaatgttcttccatttgtttgtgtcctcttttatttccttgagcagtggtttgtagttctccttgaagaggtccttcacatcccttgtaagttggattcctaggtattttattctctttgaagcaattgtgaatgggagttcactcatgatttggctctctgtttgtctgttgttggtgtataagaatgcttgtgatttttgtacattgattttgtatcctgagactttgctgaagttgcttatcggcttaaggagattttgggctgagacaatggggttttctagataaacaatcatgtcgtctgcaaacagggacaatttgacttcctcttttcctaattgaataccctttatttccttctcctgcctgattgccctggccagaacttccaacactatgttgaataggagcggtgagagagggcatccctgtcttgtgccagttttcaaagggaatgcttccagtttttgcccattcagtatgatattggctgtgggtttgtcatagatagctcttattattctgaaatacgtcccatcaatacctaatttattgagagtttttagcatgaagggttgttgaattttgtcaaaggctttttctgcatctattgagataatcatgtggtttttgtctttggctctgtttatatgctggattacatttattgatttgcgtatattgaaccagccttgcat

SEQ ID NO: 200812 - DNA, 1000 bp, Homo Sapiens
tttgtttgacactttttgcattgtggtataccataaaactcacactcactaatggagtgtgactggaagtgatgggtgccacttcaggaccaacatatttatgaaggaggcataccttctccgtgttctttttccccttccactagctgaattcacaggacaagaaacacgtaaaggatgaaccaggcactgtagctcatgcctataatcccagcagtttgggaggttgaagcagaagtttgctggaggccgggatttcaagaccagcttgagcaacatagcaagaccctgtctctaccaaaaaaaaaaaccaaacaatttttttaaacaactagccaggcatggtggtgcatgcctatggtcccaggtacttgggaagctgatgtgagaggatcccttaagcataggaagtcgcagcactgcattctagcctgggcaacagagcaagacccagtctcaaaaaccaataaaacccccaaaaatcccaataacaatgtatgtaaaccagtatgcatcttaaaattaacatgcacttctctacaaaaaaatttttaaaattagctggggtggagtgcgcttataggtcttgctactcagaaaacaggcaggaggatcccttgagcccaggagatcaaggttattattgtgccactgcattccagcctgggcaacaggctctaaaaagaaaaaaaaaaaaaggatgactgaacttggggatggagggaaccttggtctctgattaactgcactgcatggaggagagtgaggctggttaacaacatccctcaggacacttccatgagtaagaaataaacttttattgtgattacgccatcaaaatttttaggtcttattgactacagtagttcagactaccctaactaatacaacttctttctttgccttaaattttcccttttctcatctaactagcaaaaaagaagtacccagacagcaggagaaaatggaaaatgaatccagtggtttcatgaaacaagct

SEQ ID NO: 200813 - DNA, 1000 bp, Homo Sapiens
agctatacaaagagaaaaaatcatcaccctggagttgaaagataattctgggtcagaaaataacctaaatgtgggtatgtatcctcaacaaatctgatgagaattttattctataaaacaagacactgttttataaagtgtaaaaagggaacatccaaaaaagagaacgcatctgtctgtttcaaggggcagctgctactcaactccagctgactacgactaccaggaaactcaggcctgtccgtgccatattttttgctttctcaagaaaatccagaggcggcaggggtggatggtgagagatgacttcatgggtacaatgtacattatttgggtagcagataccctaaagagccctgacttcgccactgtgcaatctatacatgtaacaaaattacccttgcaccccataaatttatccaagtaaaaagaaaaaaaaaaagaaaatccagcaatcaagatgttaatatgaaatcttccaacttaaatagtggcattggatgggtcacaaaaaacatgcacacaggattcctatggcctgcaggccagcagtttgaaaaatctgcaacagagagactaaaaaacagtgatgtaactccaaaacaattagggatgcagtatgctgaattctcatttattttagtcactaaggaggatctattcaagacaatacaatggtatacacaggagagacatatataaggctccttaaaaagtagaaggataatcagctggcttaaactgagacctagatcagcaagtcttaaagtagaatctacgaaaccctggaggtatctgagactttttttcagggaaactgcagagtcaaactattttcatttaaaaaattaaagtaagctgggagcggtggctcacgcctgtaatcccagcactttgggaggctgaggcaggcggatcatgaggtcaggagttcgagaccagcctggccaatatggtgaaaccccgtctatactaagaatacaaaaattagccaggcgtg

SEQ ID NO: 200814 - DNA, 1000 bp, Homo Sapiens
gtgtcctaccatcattgagtctccccaaagcacccctggtactgtctacattcagatttcttgttatgcaaggaaatggacccctatttatggaagctgctgttagccatattttatgttatttacaacaacaacaaaaatggttttaaaagtatttattccttattgacttcttgtgaaaataagggagaatgtgtgtgtgtatatatacacacatgtgtacgtacacacgtttacgtacacacgtgcacacacatgtgtacatatgtgtgtgtacacgcgtacatatgtgtatatacatgtgtacgtatgtgtatatacatgtgtacgtatgtatatatacacgcgtacatatgtatatatacacgcgtacatatgtatatatacacgcgtacatgtgtacatatacacacgtacatatgtgtatatacacatgtacgtatgtatatatacacatgtacatatgtatatgtgtgtacatgtgtatatgtgtgtacacatgtatatatatgcaatgagatatatacacatgtatatatatacatatatataacatttatttttttaaattttactttaagttccagaatacttgtgcagaatgtgcaggtttgttacataggtatacatgtgccatggtggtttgctgcacctatcaacccgtcatctaggttttaagccttgcatatattaggtatttgtcctaatgctctcccttcccttgtccctgactccctgacatgccccagtgtgtgatgtttccctccctgtgtccatgtgttctcattgttcaacaagggagtatatttttaacatgtctggaacaaagtagattcgttatagtagttgctgtcatgattaccaccatcatcactgtcatccccaaggtatcaccatgggctggtcagaggtgcggaagtggcagaagagaagaaatgttgaaggcttttgtttctttctcttcttcaacacaacttgcctcttacaagaggttatacaa

SEQ ID NO: 200815 - DNA, 1000 bp, Homo Sapiens
atctaatttttaaagagaagtcagaaatgttggttttacataaaatctctggatttttagatgttggtctaaattttttttaaaaaagcactctgcaagctgagcatgtcatcaggctacatctggcccccaggccagcagtttaggacttctgttctattgcattgcccctttattttctccctagctctgggcacaatttgtatcttgtttatttatttactagttttattgtctgtgttaatcactgttgtatttccagtgtcttacacagtggctggcacaatcaattcccaataaataaataattgatgttggattagagggggagtctggcttggtgctttacttagaagctttttatatattgttaatattattgcatacatgatttatacatacgaatatataagtatgtatgggtttatatatgtgagtatatgtgcatgtagatatacacccatctatatatggcaaatattttcactcagtgtctctcttgattttaactttatgatgtcttttgatacacaattaaataattttttagtaaaaactgtcagtattttcttttaggcatctgggcttaatgtctaataaagaaagatttgcaaaaccctgctaagaatatgcaaatattctatgttttcttctaatatttctgtagtttgatttattgaactctctaattcatctgaaattgattgattgagacaaagtcttactctgtcacccaggctgggaggtgcaatctcggctccctgcaatatccgcctcctgagttcaagtgattctccggcctcagcctcccaagtagctgggctataggcatgcaccaccaagcccagctaatttttttgtatttttagtagagacggggtttcaccgtgttggtcaggctggtctcgaactcctgacctcaaatgaactgcctgcctcagcctctggaatttatttttgtgtatgatgtgaggtgaggtgggaggtgtttattatgcta

SEQ ID NO: 200816 - DNA, 1000 bp, Homo Sapiens
tgtgacgggctcagcagtgtaagagctccaggcaggcgggggtgtgggttggagaccccgggctttagtcctgtctgcaggcttccctggccgtcaggagggtgggctcggggaactggagcatgggagcagggtctttcctgcagcaggaagaggctgtaaccacttgcttgtttgcctgactgaaagtgagaccctgcgtttaatgagcctgagctcccagatcttccctggagtgctgtggaggaaagaatccaggctaggaagcatggccccaaaatttctgcttcctggtatacatgccctgtgaaatccccttctgttgagtgtgggaggacttatgaataggatgaaatttcactcttgtgattaggttatggtttttttggcaaagaagaaatttttcagatgtaattatagttgctaatcagttaattttgagttgatcaaaatagagattatcctgtgtgttcttggtttaatcagatgagctccttggaagtggtccaactcactcctggaactgagcctccaggctgtgggcaaattcaggcccttgaagaggccacaagtaggtgtctcagctaacaggcccaatgatggctgttataaaaggaaaataaaggtctagaccttccctgagtcggagattcacagccacagtctctccccattgctgggtatgaagaaggaagctgctgtgagctctacagctgcaaggaagtgaattctgccaacatcctgggaggcttgtatatgggtcttacagctgagccttcagatgagaacaaggccagacagcaccttggtttcagccttgtgagacatgaacagaggacagggttggctgggccaggactcagacctgactgaaaatgtgttgttttatgctgctaagtttgtgatgacttggacacaacagagacccttaacataggccccaaggctgtgtagaaacacaggagtacctgacctgggccccagggccgtgtaggaacac

SEQ ID NO: 200817 - DNA, 1000 bp, Homo Sapiens
catgagccaccatgctcagcctgcacaggacactttgactgcagagttgtgactgatgacataagatgcatggtgtgaagttggagacttcaggcaagtgttccaatcatgcaggggtctttctagccatagccaggcacttggatttgttctaaaaggctggaaaaacatggaagtgttttaaagaggagaatggcatgctctaattacatttcaggagtttactctggttatgttgataatggaatgtaaggaagtttccatagaagtggagggaccagtcaaaagccatcacagtaaatcaggagaggaagagcagtaatttaaactggcacagtcccaagtgaagatggggaaaagtgaatgaattcaagatgcatttgggaggtagaaccccatttggactggcaagtgaactgacaatgaaggataagggaaagggaaaggattttaactcccagacttctgacttcagtaactgagtgaataacgttgccatttataagatacaaataatgggggaaatagattggaagggcacagggaaatcaaatattctattttgactatgctaaatttgaaatgtgtgtgacagaacaaaatagagatgtcagataagcagtttgaatatagtaatctggggcttagatgaaaggtctagtcttgacatatacatgtagatgtcatcagcatgaagcattagaaagtgtatgagatccctaaagaacagagtaaatgtggagaagatagaacgatattcagaaaccaagatcaaggcactgggagtgctcatcgttactatggcattgcttctctgaggctgcctcactaactgagctagggaaatacatgtatgcatatacatatgtacatatataggtattttcacatatgcatttatatacatatatgcatacatgcatttacatctatgttaattaattaatttatttatttttgggacggagtcttgcttctttgcccaggctggagtgcaatg

SEQ ID NO: 200818 - DNA, 1000 bp, Homo Sapiens
gcagtgaacataatcacaccactgcactccagcctgggtgacagcacaagaccctgtctctaataaacaaataaataaaaaataaataaaaatgaaaataaaaaataaaaatacctagtcatgaaacagtaaactccattttgctccccttttgtattagtatcatctgcccactcaagccagtgaagtccaaagtccagtaccttgcctcaaaccccatgtccagaagtctgtctgcctcatccaacaccaggacatccagggatcgcacacagctggccagatccaagccttcggccttcctccggaacatgtcctccaagcggcctggagtggccacaatgatgttcccactttggaaagaaagttaacatttaccaaactctctggatcttgggaatgtggttgatgattaccaaaataccaagttttatatccccccaaagtcatttaagccctagtgaagagaacgaagagcatgagagtagaagagtgctgcagggtagaaagactgagggctgtggtgagacgggatctgggttctgggctatgacctaggcaaggttggcaaactccagctcccggaccaaacctgggctgctgcctgtccttgccaagtattttattggcagaaaaccacgcccatttattcacatgttgtctatcgctgccttcacactacaacagcagttgagtaagtgcgatggagaccatatggttcacaaagccgaaaacatttaccatctgctcctttataaaaaaaaagcttaccaacctctgacttacgcaagttactcaaccattgtaggtcccaggtaactcacttgtaaaatggaaatgttgacagaattagagaatcctatgtaaagatcacaaactggcagactcagggccagatgtggctccctcagactggctcacctacaagatatgtttttcaaatgtggattacacgccaacagttaaaaaatcaggagattacacacacaaatctggaatt

SEQ ID NO: 200819 - DNA, 1000 bp, Homo Sapiens
agtaatttgcccaaagttttacagctaataaatataaaatctggatttaaatccggatttactccaaaatatgtgaatacctccagagataacattgaagacaaatagagacaatgatgcaagttcataaaccatggaaatttctggtagaaaatggtagatgggccccagaggaatacagagaatgtgtactatgggattttaggaagggacaagatcatacattatgaattacttcatatcataattcgttaactacgtgtttatctggctccttaagaaagaataaaaaaagctagataatcatatgaaacacattatgcataactcagtttttttcttgttcttcaaacttctgtcaggttagtgctctcaatatcttcatttggtaagtgagatgaggagatgaagagtagttagggtcatagtgccctgatcatactgagttttcacctaaataggaatttcagtgctttgggtcatctattttgttcccctcctcccggcctacccccccattatattgagcttgagacttttaacagagataacttctgaccacgcacagatcagcacaaatgcagatgtgagcagctagaatttggatgctgccaaattgtgatgactgccacatgtgtgaagctaaagcttagcacctgatgacccactgtgagtgtgtgggggggccagaagagtgaaaggcaggtcagagatggaagacgcctcggagtttctcaatggcagtaccttcaccttgcagatgcagaaatggaggtggttagaaggggtaagacttactaaaattcacacagcaggttaatggctctctgagaataatggcaaaacaagaacaaggctttataccagcaatctacagtagtatctacttttatttcctacctttccgttggcatatactcacactgataggcttgacaggcagataaacctgtatttgaaggtcagcaggattagttgtgtggccttggataagttactt

SEQ ID NO: 200820 - DNA, 1000 bp, Homo Sapiens
taaagctcaaataagactaacttgattttatataatttatactagaaggttattattaaactagttttccaagaaagcacttagtctaataattgactcattaaaaagcaacaattcagaaaaccaatatattctttgaaggacaaagagacagaatatttatgaatagtgccaattctggtgtaaacacaattcagactagaacactgcatccttttttgcttcgtaatcttctttataactttgagactagggcagctttagaaaccaaattcacattgtgggtcgggtttcctcagaaatcataaataatccactaccatggtggaatcaactcaactggccaatccatcagttactagccttgtttccttacaaccttctactgtcgtttatatcattcttattttgttccctgtactccataaagtacaatatttattagtcctaaaagaagatccataggtacaccaccactttaaataaaacttctttcttttctcattatcaaaacataaagcccattttgaagcataaatgaaattagtgcattagaactgaacgatgatctgtctttacagcatatgcccattttactttataaaacatattgaacaacaaatataaggaatgatatgccaaacaaatggtccattattggcaattaataggataataggatcaaatctgttccaaaaactgtgcttggtgctcgtcattacaaatgtaaagacctgggtaaaaaactcccaaggtagctggaggcaaactgtgttttcagatacttaaaatgcagcacctggcgcaccacagcaaggcggcggccatagagtcaggaaaagcttttcagtggtggtgccatttgaatggggagaggtttgacaaggtctgagcggtgggaagaaaagcgtaggtaaagggaaaagcctgccaagcgtgtccaacctgtcttattttgttgttgttgttctgttctgttctgttttgttttaggctttta

SEQ ID NO: 200821 - DNA, 1000 bp, Homo Sapiens
aaagagaggtaataagagacacagccacattcttggttaaatcttattttctaacccaaaagattatccaattaactaatgaaacaaaggtggtaaatttaattgtctacctttaaaagtactccttctgatctttgtgtatgtgtgtgtgtatgtatatatgtgctactgcctgatctgcaattttatgttttatatattgagaaatcttgctttccaattctctgtttagaaaacagaattcaacatcccttcaaatattcatccctgtaacactgaggtgaggtggggggggtgggtgtggatgggtcactgagaattataaaggtatagtgacatctacaggcagcaaggatattgttaaataggatatggttactatcagctgaggaatggactaacagaccttcctgctttacgtttaaatgtgtctttctcacagaaaccaacaggaaaggttagaccaattaagctggaacaaatgacacaagagatcttgctaaaattaaaatccatgtaataaatggggctttgtttcacctcgttgatcttcatttttgaaatgggaatagcagtttggcagctcattttgaaaatcaatgtaagtcatacatatatacttgatgaaagcggtcacttcaaattcatggaaatcacagagaaagaatatgccaattagaaattcagaaagtcatttttggcttttagtgataaaatggactcaaaataaaacctttctggaggtctgattcagtatttacaactcatgctaacatgtcagaagttattcttgcattttcttaatagtaggagtgagaagaacagtaacagcaatcagggggtggataataacacataatgagattaggctcattggtgtctgtgatacttaattttatgtgtcagcttgactggggtcagggaaacccacatagctgagaagacattacttctgggtgcatctgtgagggtacttctagaagagattagcatttgaatt

SEQ ID NO: 200822 - DNA, 1000 bp, Homo Sapiens
gcatatcgcattttggagaccatgaacaaatcatttgttgaaatagaagaaatcaaggctagaaagatagattggaaccaggtcacagtgggccttatattccacagaaaggactattcccttgatgtcttgggctttgagcacagtgacagggtgaacaacttttctgaaatttgaattataaaaccataacaattgaagaaacatcagagggtgacaggggcataggtactattataggcagccaaaactaaagtgaggggaaaagtagatagttgcagcctgtcaggcacaagggaagaagcaatgtagttagaaaaatacggtactttaaatgaagttttctttttataattctctttcctttcaaaatccacaacctcccgcacctatcttttattttatgaaaaaggaagagttgatctaaagactatcagtggtaaataagggaatgtagagcatctagaagtttgtaaaaaatccacctgagaagatatgggtaacaagatatcatattacattatttatcagaatcttgagggaatgagtagcaagtgttggtgtttgtcagaattgcctgtagaggtgggtatagatacatgaacctaagccctacgcatcatgtacctattccagaatgcctggtaatgacgttcgggtatctctatttgtaatcagctctatagatgatttgaatgatttgaaaatgatgactatcatgtgttctttctatttttctctcttcacttgttattaaggcaattaatcacatggacaattacggaaagaaatgagggctgcaacatccacacttgaggattgatatcagtattgctcggtattgttatcaatcagtattgttaatgatatctttgataatttccctctaatatctctatattttcctcaaaataatcccttaaatattattggggtgaaaatagtttatctaagtaactttaccaagtttaactgagggcttagtacagtgatagaattc

SEQ ID NO: 200823 - DNA, 1000 bp, Homo Sapiens
taaccctcatacaccgattgccagacagtaaactagtatagccattgtggagaggaattgagcatcgtatagggaagttggtaatcctcttactttaagatccagcaattcaacctctggtcacggacctcaaagaaactctccaaatgagaacaagcaaacatgacaagaatattcacagtagtactcattcattcatttatttattcatttcacaaatatccattgagttcactgctgtatttgcttgggatatctctgggactgaaacaattctccgtcttcattggtatgttccaggacactgcttttgggtactgaaaagtttaaaatcaccttaaccaccaatgaggcaacaaagtagtgtgtaatcatataatgaagccatgtaactcaaactgtgtgcctactaagcacacaccagaaactccaggaaatcacgacagctgtacactctaattttggacttgtttttgcatcagttttctgaaagattgtcatggatgcaagcatgttattattagtcattgataaaagagcacagaaagaggatgtgaggagagcccttttttccttagggataaaaccctttcatcttggctttcatgaaacccattaccaggcaaaactgatgcgaattcctgactagaagaaaatgttctcctgcctttattctctctcagatgactcccattaattgatcccaggagattttctcattttgctgccttccctgcatccagccttcatttaccatgaccatcaggcatctgcagggccttgacctggaaaagctgccaccattcctagtagaggatgaacataaattctcactctcagaaatgcaaatatttcccttgctgtggggatgcataacttcagagaaaagctaagcatatggagcaccccatgtaaattaccatctcatacaacaactcactgtaaccttatctttatttcttataaatactgtttgtaaagaatataaaaaattgaattc

SEQ ID NO: 200824 - DNA, 1000 bp, Homo Sapiens
acatattttcaatgtagaccaaacatccttctattggaggaaaatgccatctaggaatttaatagctaaagatgaaaaatcaatgcctgtttaaatcttcaaagaacagtctgactctctttttaggagctaatgtagctggtgactttaagttgaagccaatgttcattgactatcctgaaaattctaaggtccttattctcagcaaactatcgcaaggacaaaaaaccaaacaccacatgttctcactcataattgggaactgaacaatgaaacacatggacacaggaaggggaacatcacacaccagggactgttgtggtgggggcggggagggatagcattaggagatgtacctaatgctaaatgacgagttaatgggtgcagcacaccaacatggcacatgtatgcatatgtaacaaacctgcacgttgcgcacatgtaccctaaaacttaaagtataataaaaaaaaggaaataagctcaatctactctgcctgtgctctataaataaaataacaaagcttggatgtcagcacatttgtttacaacatagtttaccaaatactttaagcccactcttgagacctactgctcagaaaaaaagatttctttcaaaatatcactgctcattgacaatgcaccaagtcactcacataagagctctgatgaagatgtacaaggagattaatttaatgctgttttcatgactgctaacacagcatccattctgcagcccatgcttcaaagagtattttcaactttcaagtgttatgatttaagaaatatatttttatatatttatgaagtatagctgccatagatggtgattcctctgataaatctgggcaaaataaattgtaaacctaggattcaccatcctagatgtcattaagaacactgttgattgatgggaggaggtcaaaatataaacattaaaagaaatttggaagaagttgattctaaccaccatggatgaccttgccggattcaagaattc

SEQ ID NO: 200825 - DNA, 1000 bp, Homo Sapiens
catcatgaccctcactgtccagagcctaggccacatggaacaactgagaccctggcatgtgacccatgtggcacatcacccaccggggaacaattaaacctgcacagtggaaaagtcattgaatagctggctggccaccttgccttcacatacccatgcgacactgtttgccaattctctcacccacactgaccacagtggccttatagccagtcctgtggtggccctactgcccagacagaccactattgagccacctggcctcactgcatatgcaagcatctgtaccaaacttgacagctggtctggcagcaggcccactccccccggacaatctgccacagggccacctggccctgttgtaaccacattcacccatgcaaggcccaaaagctggtctgatggtggccactatctccctggagagcatgccagtcagactgtaaggcttctgcacccacatgttccccgcctgacaaccaactggtgtctgccctgcccttcctacccacacccccacttccatgacagaaaaactgcacactttgattaaaaactcccacagcctaggctactgagggaattgtagacattgctaacaaggattatagctgaaaaaattgcacagagaccatgctagtgagcctagaagcaaagccaatgcaccatacacaaccaacaccctaggacccatctacagaaaaaaaaatgtctccaacaaaagccatttaataaaattggaaaaggcaaggattgcacaagatgcacagatatcagtgtagaaatgcaaaaatcatgaaaaaacaaggaaacatgacactaccctctcccaaagaacacaataagtctccagaaacagaccagaaataaaataattttatgaaatgtctgaaaaggaattcaaaataatgattataaggaaactcagagaataaaaggaaactcagacaaacaagtcactaaaatcagaacaacaatccattatcagaatgaggaattc

SEQ ID NO: 200826 - DNA, 1000 bp, Homo Sapiens
tgttacagcatgcatcagaacatttttccttttatgtttttatttttttattttttttgagatggagtctcactctgtcgtccagactggggtgtaatggcgtgatctcggctcactgcaacccctgcctcccgggttcaagcgattctcctgcctcagcctctcaagtagctggtactacaggcacgtgccaccacactcggctaattttttgtttttagtagagatggggtttcaccatgttggccaggctggtctcgaactcctgacctcaggtgatttgcctgcctcagcctcccatgggattacaggcgtgcccggccaactttcttactttttaaagttcagtagtattccattttgtgtgtgtgtgtgtatatatatatatatgtcattttttttaatgcatctatcgatggacacttggattttgttttcaccttttagttattgtgaaaaacactgctatgaacatgggtatacaaatatacatctctatattttaatatatttaaactattttgtaatataacacttttaaaatagcattaaatactgaagtgattgttttctaaggtggttcttttccactgctattaactttttttcctcttcattatcttgatgacattcaaaatttacttatttaaatgatcatacataataatatttttaacaacagaattgactaaactgcatccagacttttcatataccatttaattagtagctcactttaatggtaataaaagcttactctgttagtgcttaaatgctgaaagtattcctgccctgtgtctactttatcttaggcatctttcaacctcatgtgcgacacctcctggttttggcgacccctgtagacatagtaattcttggactcagctatgctaatttgcaaacaggtatggcaacccacatgttaacgttttttaaaataatagtattttggccaattgatattacagttaaaagctaatctgggtgaaatgttgaattc

SEQ ID NO: 200827 - DNA, 1000 bp, Homo Sapiens
acttgaacgcaggaggcggaggttgcagtgagccgagattgcgccattgcattctagcccgggcaataagagtgaaactccgcctcaggaaaaaaaaaaaaaaaaaaaaaaaagccttcatttttcttttgcccttcactatttttcattctttaatccttgtgattgaacatttaattttttcactgtaccacaccattactatttcaataatgaagcccataaactacatccattacttaattctttaaaatattcacaagaaagcattaatacaagatggtttaccaaatagagcagtccagagggttatactggttgcatctaacgtaaaggaatattaagtatagtaacactgagatgacttgagggacggtagaagaaaactaagacaggaaaaaaatggcatcttctattttaaaaatatatatgtttagtcaattccttgaattacaatgataggattctgaaaggcaactgaaacaaatgcacatagggagccctgacataattaattctccttttcatattcattctctcccttattctttttctcacacacataaaaacacacccatatactgcaaacaaaaagaacaaaactgaatttttaatcatgagcatttgtagtaaaggcacaaagattatgcttacatttgtccttcataggaaaaatacatcctaggaccattttgtattttttaattcacttttattctgttttagctatggaccacctaggtctgtaattatagaaaacaaagttgctctacaaatggcaaatgacatttaattgcttacttggaatgctgcatcttcagtaaagaggaaggagacagagaaatttcgccacagtaatggttaacaacatttaatctctaagtatttaaaacaaatgatcattttacagcaatcaatatttcttccttttcatgattaatgtagatattatgaaatgaaatgaacaatgagattatcatttcattgcaacaatgaattc

SEQ ID NO: 200828 - DNA, 1000 bp, Homo Sapiens
caaagaaatacattattaatgtttctggttaaattaactgattaaaaccaccctaggtaaaaatgtacgtatcagcgctttgcccacagcaaatgaggaattaatggaatatggctgtgtctttgtaatgaaacacagaggctctctggaaaggttcgctctcttcagaggcagcagcagggggtagaggggtgggaggcctaatccatctgttaaagggacctctactgattggaacagggaaagggcagggaagagacacccaagggggcatccccaggtctgactggagaccctagaaatctgacattttgacccctaatttgctggagccaaattttgcagtgggggcttaaggcagaagcagcaggccacaaatggggtgggtgggtgaggtggacaccactgcatgggaatgaggatcatggaatgctggccctagctctatccttgcagactttatgcaagctgacttcctggcagggcctcagtttcctcactagtaaattggagaggtgaatgaaacactcttccgtgctctctcccaactccttgtctcacatcataggcttctaggataaatcctagtgtttaccctgtccttattctcatcccataacctagtgagaagctgaaccccatcgggggtgtatccagagatcacctccattgcatggcttttgggaaacacctgttctaactcaagtcccaaaggcactctcctatgtgtctatctggttggctgtaaacacatgcatgtacacacacatgcactggctgacccacacatgcacacacctgcattcaagggcccacacatacaagcaagcttgcaccaagacacatacatcccagagctctacacatgagtgcacacatgtgtacacacagctgcatagaaagtgaagtcctgttgtgcaagggcaggaggatgtcagacacatttcagagacagcggtggggctaaggggcagggagggcactgccagggcagaggatc

SEQ ID NO: 200829 - DNA, 1000 bp, Homo Sapiens
aggttgcaccactacactgcagcctgggcaacaaagcaagtctcaaaaaataaaaaaattaaaaaaaagtgttgtccacccatgatcttttgaatggattaagcagatatacaataggcatcatatctgctcggtgattttctagagaaaagcagattctccacgtgagtgttctgtggaagtcagtcagatgtcagcgaatggtccctgagacttggtgatgtgattgaaaccacttttgcaaaatcgtgacagtgagagatatctaacatagttgactccatcctacttctgacctccacgctgtctttggttattcctgggtatagactcagctatgtttcacaatttatagtttaacttgaaagcaaggatgataatagtccctttctaaaactaaccccctccttgcttggggaccaaaaccacctttgtaaaccaacgaaagaccacaagaataggattatgagaggggcctgaactctgctaaaaagtagtcagtttctataatcctttactgctcaggagtcatgtggccagaggtctcagatttatgacttccccagttgctcctatagataacatcactgttgtaaagatttttttttgagatatctttcatactgatccgatctgaactcgtgactcatggctctactggtcctgtggccctacctagaggcagactcagcacacgaggaatgtcttccacacccctatggtttcatccccaaccaatcagtagcactcattccctatccccctgcttaccaaattgttcataaaaaccctaagctctgagccttcagggagactggtttgagtgataactctaattcttccctgttgcccacctcctgtcaattaaacactttctctgctgcaatgccacggtctcagtggattgattttgtctgtacagtggacaggaagaacccactgggtgatccaacactttgttgcatttttttctcttaaagaaatttttttttaagaattc

SEQ ID NO: 200830 - DNA, 1000 bp, Homo Sapiens
cataattacaactgatttcaccggaatttggatatatctattaaaagatctgtgggaattcattttctccacacaccctatttaatcatttcaatgtgtaaatgtggagacactgtaagtcaatgtaaataatgttttcttttgcttaacataacctgaatttttccttctcctcttactactaattcagttgttttctctaaagaaaagtgttaatttaactccctcttcctcttaaaaaattctaagtagttgatgttttgaggtttaaagatattcaaaagaaatagaaaacagttttgcagttcctcaaaaaggtaaacatagaactaccatacgacccagtgatgccactccttctgaaagaattgaaatcatatattcacatgaatacacatatacaaatgttaacaatgttaaaaactgaaaacaactcaaaatgtccatcaactgatgaatggataaacaaattgtggtacatataatgcaatgtaatattattcatctatgaaaaagaagaaagtactgacattcaatggatgaactctgaaaacattctgttaagtgaataaaccataaacagaaaggccacatattatatgatatgtatatgtatatgtatatgaaatgtccggaccaggcaaagtcatagtaacaaagtagatgaggggttgccaggggctaagtggaggcagtaattgagaatgactgctaacagataccgggtttctgtttggagtgatggaattagacagtggtgatagttgtacaacatagtgaatataccaaaaaccactgattgaaggctaattttactttatacagaaggcaaatccaagtgaaattttaccaagtgaaatttatatatatataaaaatacaataaatattatatataaattatatatataaaatatatatataaattattatataataataatatacatattatatctctgaacattgtaatttcacatgtagtgatgacaggggaattc

SEQ ID NO: 200831 - DNA, 1000 bp, Homo Sapiens
cctcccgagtagctgggattacaggtgcccgccaccatgcctggctaatttttttgtatttttagtagagacagggtttcatcatgttggccaggctggtcttgaactcctgaccacagacgatccactcgcctcagcctcccaaagtgctgggattacaggtgtgagccaccgcgtccggccatagctaacttcttgcaaggaccatcttccctcaccttctccattctccctctctccatctccctcactttcttccccccacccccaagacggagtcttgctctgtcccccagactggagtgcaatggcgcgatctcggctcactgcaacctctgcctcccgagttcaagcaattatcctgcctcagcctcccaagtagctgggattataggcgccaccaccatgcctggctaatttttgtatttttagtagaggcagggtttcaccctcttggccaggctggtctcaaactcctgacctcgtgatccacccccctctgcctcccaaagtgctgggattctaggcatgagccaccgtgcccggccatgtctctcactttctcgatcttctcctcacctcccttgagcactcggcatcatggatgctgagggccactcccagttcctgagaccacacacgctctgctgtgatcatgccactcatggttttcttttttctccaccgctcctgccctacggcctttgcaggttcttcaacttccacaacagtggcattctgccagagctcaatcctgggccccttctcactccctcgactagctcatcacacgcatggcttccaactccacggccgtccacacgctgagggcccccgcgtctccatttccagttctcgcctctccctcgagctccagatgcgcatgtccagctgcctcctggacatcttcctttgaatgtagcaaggcgggtccattcctgcgttcgctccctccctgatcagcaccacagtcgatccaggtgggcgtggctggaagctt

SEQ ID NO: 200832 - DNA, 1000 bp, Homo Sapiens
aagtaggaagcttaagtaccattttataaccctctgtcctttcccttaacatatcaccatccagagatgaataccgtcaacattttggtagtaattatttgagacatttttcttcaaatacacacaatacttcgaatgaaaaatgaaatcatgctatgcctttatttttaagaaaacttttaattaacatatacatacataaaatgtacaagtcttaagtgtacagcttgatgagtttttacaaaatgaacacactggtcattcagcatcaagatcaagagacagggtatcaacaaaactccacaagccctcatcacatcccctttacatcactatctttcatgctgacggatatccactattctcctgttctaaattctaaataatgtctagttttgctgttttgaaatttctgtaattggaatcacgtagtacttgtatttttgtgtttggcttgtttccctaggaactatgcttgtgaaatacattagtagtgtgctagtaaatcagctctaaagaagggggaaagccttggtttgcagcatttactgatttctgtgatgcaaatattcccaaccatggcagatatcaaggaaacaacaagaagttactgaatgtgcagtctgaaagggaaggccacaattgccttttgtaagctggcagaagcaggctgcagcacaccactggacactccctgtctttccatgtagcaatagttcattcattttcagtgttgtagatttatcagttgtataaatgtttcacaatttatttatctattctctccttagtagatttttagattttctccagttcttggctattagaaattgtacttcagtgaactttcttgtgcatatcttttggaggtcatatgtatgtatttttgtgggtatttatctagaagtcataggtatgtatatgttcagctttagtagaaacttttagagttttctaaggtttttatgtactattcataccagaagagtatgtggaattc

SEQ ID NO: 200833 - DNA, 1000 bp, Homo Sapiens
ttgccctggccagaacttccaatactgtgttgaatcggagtggtgagagagggcatccctgtcttgtgccagttttcaaagggaatgcttcccttttttgcccattctgtatgatattggctgtgggtttgtcatagatagctcttattattttaagatatgtcccatcaatacctaatttattgagagtttttagtatgaaggttgttgaatgttttcaaaggccttttctgcatctattgagataatcatatggtttttgtcattggttctgtttagatgctggattacgtttattgattttcatatgttgaaacagccttgcatcccagggatgaagcccacttgatcatggtggataagcttcttgatgtgctgctggattcggtttgccagtattttattgaggattttcacattgatgttcatcagggatattggtctaaaattctctttttttgttgtgtctctgccaggctttggtatcaggatgatgctggcctcataaaatttagttagggaggattccctctttttctattgattggaatagtttcagaaggaatggtaccagatcctccttgtacctctggtagagttcggctgtgaatccatctggtgctggacttttttttggttggtaagctattaattattgcctcaatttcagagcctgttattggtctattcagatattcaactttttcctagtttagtcttgggagggtgtctgtgttgaggaatttatccatttcttctagattttctagtttatttgcgtagagttgtttatagtattctctgatggtagtttgtatttctgtgggatcggtggtgatatcccctttatcattttttattgcatctatttgattcttctctcttttcttctttattagtcttgctagtggtctatcaattttgttgatcttttcaaaaaaccagctcctggattcattgattttttgaagggctttttgtgtctctatctccttcaatt

SEQ ID NO: 200834 - DNA, 1000 bp, Homo Sapiens
atctgttagttttgttttataagccaggatatggtttctctggagagttccatgtgtacatgacaagaacgtgtgtcctgctgctgttggatggcagatgctgtaaatgtcatttagaaattgttggctgatggtattgttctcctgtatcctccctccttatctacctaattgttctgttgatactgagaggactgttgaggccccagctagagttgtgagtctgttacttttcctttcagttaaaggtctgttatgagggcaatacacgtttaggtttttatgtcttcttggtgaattgaccctttcgtcattatgtaatgtctgtttacccctaataatttttctcgttctgaagttgactttatcagatattgtagccattccagctttcttttgatgaacatttccctggtatatctcttttatcctttaacttttaatttacaaatatagtcatatataaagtgggttctgtgtagccagcatgtagtgggatggatattttttaaaattcactgtaacaatctctgccttttaattgggtatgtttagattactgacatttaacataactgtgtttgagtttaattttgtgggtacagagtatgtgtgtatatttatggggtacatgagatactttgatacaggcgcgcaaagcataaaaatcacatcatggagaatgggacatccgtcccctcaagcatttatcctttgtgttacaaacaatccgattatactcttttaggtatctttattttatttatttattttttttgaggcagagtctcactgtcgcccgggctggagtgcagaggcgcgatctcggctcactgcaagctccaccccctggggttcatgccattctcctgcctcagcctcccgagtagctgggactacaggcgcccaccaccacgcccggctaattttttgtatttttagtagagacggggcttcaccgtgttagccaggatggtcacgatctcctgacctcgtgatc

SEQ ID NO: 200835 - DNA, 1000 bp, Homo Sapiens
cccgccaccacgccaggtaccgccacgctgcgggtctggctgagaaggcacctggaattctgtcccagatgctgtgtttcacgccagatgacagcaaagctctcccctgacatgcgggcacactccagactcccccagaggccctcctggaagaaccactcaaggacccaagggcccaaaaggcatcagaaggtcctatgtcccggcccacgtggtcaggggtcacaccaggtgatcagaagcccccacgtcccggcccacgtggtcagggtcacgccaagtgatcagaagcccccacgtcccggcccacgtggtcaggggtcacaccaggtgatcagaaggccccacgtcccagcccacgtggtcagggtcacgccaggtgatcagaaggccccacgtcccggcccacgtggtcagggtcacgccaggtgatcagaagcccccacgtcccgacccacgtggtcaggggtcacaccaggtgatcagaaggccccacgtcccggcccacgtggtcaggggtcacaccaggtgatcagaaggccccacgtcccagcccacgtggtcagggtcacgccaggtgatcagaaggccccacgtcccgacccacgtggtcaggggtcacaccaggtgatcagaaggccccacgtcccggcccacgtggtcaggggtcacaccaggtgatcagaaggccccacgtcccggcccacgtggtcagggtcacgccaggtgatcagaagcccccacgtcccgacccacgtggtcagggtcacgccaggtgatcagaaggccccacgtcccggcccacgtggtcagggtcacaccaggtgatcagaaggccccacgtcccggcccacgtggtcaggggtcacaccaggtgatcagaaggccccacgtcccggcccacgtggtcagggtcacgccaggtgatcagaagcccccatgtcccgacccacgtggtcagggtcacgccaggtgatcagaaggccccacgtcccgaccc

SEQ ID NO: 200836 - DNA, 1000 bp, Homo Sapiens
aaggacacatgacattgctttgtaccttgatttttttttcacttaaatttattggagataatctctctgaatacctagaaatcttttcaggggttctttgttttggttttggtttggggtttttttttcctggctacatgtttctttgttatttattaagttgctgcaaaagtaattgcaggttttgccatcgaaagtaatggcaaaaaccgcaatcacttttgcaccaaccttaaagctatcacatagtttattcacccaatcccctactgatggtcacttgtggtgttttcaatcctctgcgattatatgaagtgccacagcgaatcatcttacacgtgtctttcagtatttgtgtacctttgagatagatttctagaagtgggttctaggaaagaacaaatgttttttgcagctttgcttgacatcagcacgtttccttccctaggggttacccccagcagtgtgtgagaatgaagagtgtgggccactgtgtctctgttgacctgccagataggaaatagcgccagagttgctgcaatccacgtctccctggtgagtaaggtcattgtcgattccatcaagggtattgtccttgggatgatagcagggaagccagattgcaccgtgtgaggactcaggaaaggggacagagtgaagagctgtggctgggatgggggatacagacggggcagtaaccggaaagaaagctgtaccccaaggatgggctcatcgcactacagaagatgccacatcaggcttgaggggcatgaggaagggtctagcagcacgggagagctagaagggaaagggcggaggagagagcttcgagcacagacagctcctcaaaagcaggagggtggaccccaggccagaactgcccagcaagccctgcggagaaggcaggcagctccttgtctgcgatgggaggaggcagaagggtggggcacaggttgcagtgctggcagcaacacaggaaagtagattcctcctcatgatc

SEQ ID NO: 200837 - DNA, 1000 bp, Homo Sapiens
cgtgcatgactgtgactgcccggagccgcgaacgcagcctggaccttatccctgaggcaggacggcccctcggaccccccgaccgagatgtacgctgggaactgtagtccgcgcggggacctggcgctgcagggggcggcccccaaacagcgggctgcgggcgtcggcgggtggttggagcaagttaggggtcgggccggtggcgggactctgcggggaagatggggctgggaggatgtgtttagtgtccctggggatgtcacagccacgtctgctttccccaccagctctgggttcctctgctgaagtcagaactcctgctcttgagaatccccgattcctattttataggagtttcaatttcggggagcttaatgtgcatgttgtattcagtgctttgtacacgtggtatcgttaagtcttcacaaagagccccattttacagatgactcatagagaagtgaagtcatttgtgcaaggctacagagctataaatggcaaagcaaaaatgaaaggcagttttaaaaattaacaaccaggccgggcgcggtggctcacgcctgtaatctcagcgctatgggaggccaaggcgggcggatcacgaggccaggagttcgtgaccagcctggccagcatggtgaaacccccgtctctactatttaaaaaaaaaaaaaaaaattagccgggcgtggtggtgtgcgcctgtaatctatcccagctactcgggaggctgaggcaggagaatcgcttgaacctgggaggtggaggttgcagtgagccaagatcacgccacagcactccagcctggacgacagggcaagactccgtctcaaaataaataaataaataaataaccatcgccacgattaacaaaaacaacaacaacaaaaaaaaaaacaacaaaaaacaaacaaacaaaaaacccactgcctttctatttaaagaatgaggaaagtaggtcccgcagaggttcagtgacttcttcaagatctctaagctt

SEQ ID NO: 200838 - DNA, 1000 bp, Homo Sapiens
atttcatcctaagttcttcgcttacaccagcagcagcatcttccaggcttccaggccagcagtggaggagtcatttttagctcttccttctccttcaccctggcatcccatttgtgggcacagagcccggccctagagggctgggagaaaccgcagagggcatccagttcagctgcccacgtaacacttggattttctgtaaacatttgtggtgaagctgctgcccaggctcagcctaaacacggcccccacctctgtgcgagggagctcgccactccctgacatgactgttgcatcttgaaacggttatgatgttcaaaagtctgcctcagtttgagattaaatctgcctccctgttgcctcctctcctcgctccctgcacgcacgtccgctggttctagttttttgcgggggtggtatagaaccgatctgacctcttctctgtcttagccctttgaatgagaaagccgtgatcaagcccccagcgggtaaatattccccattgctccagctggtcctcatatgactagtttcaaatcactagacagtctagtcccttctccaatcatgcgtcagttcatctaaactgggtgttgcaaactcaatgcctaagggggccaagcaagcggcatcggtgagtgagacgggtggagcgtagcaatacggagtggtggggactgcagccaagaggtgtttcagccaattgctgccatgcagaagtgaggccctgcatccccagatcctctcgttttcgaataggaatcagtataatttgggtttggatttgaaatgttgattttttgagttggttattagtttttctttttttttttttttttcttttttttgagacagagtctcactctgtcacccaggctggagtgcaagtggtgcgatctcggctcactgcaacctccacctcccaggttcaagcgattctcctgcctcagcctcccacgtagctgggactacaggcacgtgccaccatgcccacctaatt

SEQ ID NO: 200839 - DNA, 1000 bp, Homo Sapiens
aacactgcaggagctcagctcccaggagccagccaagggcccctcctgggaacgtgcagggtttgagcaatccacacccgctgagttaaccccttcccacataggcagatcaaatctgctccatcaccaggggcaataaataccatcacccacatccctgggcccatgtgagagaaggacagtgatgggactggacatgtactttacagggcactgtactgcttctgaggtctgatttttctcagttctctttaatatgtgatctccaagagagcctcaactgtatttgataaaaaaataaaaaaaaaaataccagctgggcgcggtggctggcgcctgtaatcccagcactttgggaggccaaggcgggcggatcaccaggtgaggagatcgagaccatcctggctaatatggtgaaaccccatctctactaaaaatacaaaaaattagccaggcatggcggcgtgtgcctgtagtcccagctactcggggggctgaggcaggagaatggcgtgaacccgggaggtggagcttgcagtgagctgagattgcaccactggactccagcctgggcgacaaagtgagactctgtcttaaagaaaaaaaaaaaaccttcaaaagaacgtaagaattatttcttaaaagtacagcttcagaagcacagagacttgaaaaaagttaatttcttataattccaagatgttttgggaacgagagatcagcacagaaattgggctaggaggataatggatgaaaccgatgggctgatcacggttccagcatggtctcgccagggaggtgacggggtttgagtgctgcagtgcaggactggggatgccacaggaacgggtgccccaggtagggcgtcatccaggaaggatgagaaacctgagaacagctgggggggaacagctgggggggagcagcggagggggaacagctggggggagcagctggggggaacagcttgtggggagcaactgggtgagaacagctgggg

SEQ ID NO: 200840 - DNA, 1000 bp, Homo Sapiens
cactagaattcttcactttattaattgactatgggctgagccagccttcttgcacaaatgtatcttgggttcccttgaaagtagagactgagacaagtgcttctgtgcagttaagcagtttatgctttggggacaagattccagggagcagcaataaaggacaggaggagaacagggaaggagggaggctgaatacaaagatgcattttcaggttgactagcaccaaaggcagggatgctccatccagcaaggacttcagaagaagcttatgaaatgcatctcaacaccatctgtaccttgagtaaaagggggaagcatttctctgttggcatccatttgtaaaggcagcccacaggtgtcagctccacatgtttccaggctgcacatgcatgagtcccaaataagttctgtcccgtgggtagaaagcaagagagaatacattgcagggctgaagtaggggttgccagagcccatcagaactggtcactgcaacagtggctggagtaagtggtgggctgagaggattgggggttgagtgtggtgcacaagaggtgtcttaatctatatacaatttgcacagggcattttgggctagaaggtgtggatggacctgggtaaaaagctccagtgttggatagaaactcaagggcatgttgcataacaaaacaagcagcatcaaacttgggggagaaggaaggcagcacgtcttctggaacactgttggcttctccactctcctcaaacatggttctgtgctggactactgattaactgtcttcccaggggctctagaatctgaattgcagttctgtctacccattgtcctgtagcaggagtgaatagtttctgcattttctctcttattctccatgccactgattccagtcatttgtggccttctgagggcaaaaaccataattacctgaatgcttagagctcttcatgtggtgaggcaagagcccaagtcacttccagggttgagccaagcatgtggaattc

SEQ ID NO: 200841 - DNA, 1000 bp, Homo Sapiens
tcaacaaatgcaaacatgatggctatattaaatattcaaatgcataaataatatttatattatatgtgttaggctgtacataacagactaggcaactagcagtggcttaaataaaaaatatttattattaaatatatattattataatatgttattattaaatatatattttataaatatttattattaggttgtagcatgtgcctatattcccagctatgtatgccagaggaggctgaggcaggaggatcccttgagcccaggacaggagtttgtgaccagcctgggcaacatagcaagaccccatctctgaaaaataaaaataaaaataaagacatacaattgagtcatacaataaagatagttccagaattgttcagcagcaaagtgtaggcttacccctgatgggcacacattggctatagaagcaccaaatgttttgttctcaccacacaacatacagaaaagcaggaaggtggggaaggaaaaaggcatgcttctcactttctacttttcttttatcaggaagaaaaatctttctaggaagttaccaagcaaacttcctattatacatcaatggccagaagtgggccacattgcaaacccctagtttcaagggtggatggcgaagtgaaaaattaggttttttagccttagaaaaagaagtgcatgaaaggaggggctggaaatggctgttggataggcaaccaaactgtctgctgtattattcattgggaaaaaggataataaaaccaagaaatatttgcttgaggaacgtcagatatgaacagatttcatttaaactcacaaagctgagaagctgagaacaaagatttgagatgtgagtagcacacttgaatagcaagcaaaacttcaaaaaccaaaacatgaacctggttatgaaaataaatctgattaaggtagctctgtgttttagattctactgagtttgggaggactgcagattttttgtagtagtggctaactcttcctggaattc

SEQ ID NO: 200842 - DNA, 1000 bp, Homo Sapiens
agttaatgggtgcagcacaccagcatgtcacatgtatacatatgtaactaacctgcacattgtgcacatgtaccctaaaacttaaagtataataataataaaattaaaaaaagaacaataactaccctgtattaaaatacatcaaaatgtttaaattaatgagtttattatgatactcattatgttgaaaagtgacaaagggaaaaaaatgtctttaattctttctcttttttgggtttcatttggaaagtcttgagtccccacttatgtccttacttgttggagtgttttacttcataaccatgttccttacttcctggtgtttatcctgtgattcttgttttctcctcccctgggaactgtttctctgacttctttttggttcactgttatgaattctaatctctttctgacttaaagtattctaaagtagacctgggtttctcacattcattatgtctttttattgtttttcttaacatagcctttctataatcaacaaatgttcttcagttctttgcagcctctaattattttctactcatctggcttacttgaaaataaagatttctttctcttggaaagaggcataataaaacagacttggcccctcaaataaatctttcctactttatgattcatttgccttttgggttacatttgtaaccaaataataaaaacttctttggaataagagattttataccattttccattataaactccccagtacagacatatttatctgtctagatattattctgggaagtatgtagactggagagatcctaagaggtaacagcttgcaggttaccatgtggggattaaaatagtactttgtccaaggtgggcggattgcttgagctcaggagtttgaggccagcctgggcaacatggcaaaaccccgtctctgtgaaaaatacaaaaaaattagctaggtgtggtggtgcacacctttggtcctggttacgcaggcggctgaggtgggaggatcgcttgt

SEQ ID NO: 200843 - DNA, 1000 bp, Homo Sapiens
atgtacaacactgagttaactttccctcagatcagtcctgtcttgtttacagtttcaactagtggccccactgtgtccggaattgatgggttcttggtctcactgacttcaagaatgaagccgcggaccctcgcggtgagtgttacagctcttaaggtggcgcatctggagtttgttccttctgatgttcggatgtgttcggagtttcttccttctggtgggttcgtggtctcgctggctcaggagtgaagctacagaccttcgcggtgagtgttacagctcttaaggtggcgcatctggagttgttcgttcctcccggtgggctcatgggctcactggcttcaggagtgaagctgcagaccttcgcggtgagtgttacagctcataaaagcagtgtggacccaaagagtgagcagtaacaagattaattgcaaagagcaaaagaacaaagcttccacagtgtggaaggggacctgagcaggttgccactgctggctccggcagcctgcttttattctcttatctggccccacccacatcctgctgattggtagagctgagtggtctgttttgacagggcgctgattggtgcgtttacaatccctgagctagagacaaaggttctccacgtccccaccagattagctagatgcagtgtccacacaaaggttctccaaggccccaccagaatagctagatacagtgttgattggtgcattcacaaaccctgagctaggcacagggtgctgattggtgtatttacaaaccttgagctagatacagagtgccgattggtgtatttacaatccctgagctagacataaaggttctccaaggccccaccagagtagctagatagtgtcgattggtgcattcacaaacactgagctagacacagggtgctgattggtgtgtttacaaaccttgagctagatacagagtgccgattggtgtatttacaatccctgagctagacataaagcttctccaaggccccacc

SEQ ID NO: 200844 - DNA, 1000 bp, Homo Sapiens
ctgctgtcaagtcaagtcggggaggacatggggcttacttcttgtagagcaggatagcaatgacaatgcagattatgaagaccacggccagcacaggcccgatcacccagataagcccctcctcgccatccacgatgggctgggggtccgggttatccagctggaaggggtctgagaagggactggctgcaaaggtctgcagggaaaggaggggggtctccatcagtgtccaccctccttgtagtggccagatgggtctttctcaaacatgaacctacgtttctcccccgctctagatcctcctatattcctagaaccttgaccctggtggcctatgtgacctggtccctgccaatctttgctctccccattcccttctctgctccagccactctcctttctgtacctccagacctttgcacatgcaaatcctgggatgctttttctttgttgaactcctactcacccctcaacgccccagctccaaggtctcttcctctaagaaaccttcgtttcaggatccctccgctcccaagtcttcccctctgcccagctctgaccacagggagctgcctgtgactgaccacagaggtcagggccctggggaatggggtctgcctcattcagaggtgtgtctggatgtgggcggacaccattcaggacttacaggctcgctcttctgaagcacggcaagcacgaagaggacatagcggtggccgggctccaggccccggttatcgaagccgccatactgcttctggtcgccgggatggaacgtgggtggcagcacagagaagcgagctgcaatatagggccggggcacctccagctgacgcgagtgccgcaggctgcgcctctgtagccgtgagatgtcctggatgagctgcgggaacagagtcatgggtggctcagagctcagctgggagcaacagagcacgtgaaaactggaatgcatctgggccctgcgggttgggccccaggccctcacctcttccagatc

SEQ ID NO: 200845 - DNA, 1000 bp, Homo Sapiens
gcagtgtttcttaaaagcctgatacactgaaaaagaaacttcaatcaattacttctaactaaaccccacatggccttaattaagattacattatttcttaccttttaaaaagcgttttgcctagtatttgatccccatgcgtctgtatttatctgtcatcactgttaattgtccatgttacactgagacttcaggtattatttatttatatggttgtactagaataacttgatatctgtgaagagaaaccataatatagtcactatagatgtgttaccgtttacaaatttgtgaataaaattggtaatatttccaaacacttatatagcacacttcattttctactaaacttcacaagtaattccttacatttagctgtgaaatatgtgtcttcaacaaactaagatgattggctaacacttccaagttcttctcagggagtacccacatacaaacattctaaatttaattccatacttaaacccttacaaattgaagagctcctcaggttccttttcttaccaccaatatagacatatgtcattttccttaagtctacaattactctccattaatagaaaaagtacttttttgtgtgttttatattttagggaataaatctataattaaaaatgaagtaaaaaaaagataatgacggtcctttaaatgtcactttaaacatctgatatctttcttaagtaattttggaagtaaacagaaaataaatgttatttaaaataaactgacatgtaggtatacaaacattccttaaaggtaagcttcttaaaaacagacttggttgacggttacaagttggagaaatagatctacacacttacattgatgaccaaaagcaccgtacagaattttaagtcattttaaccagtttatcagtgaaaaaaaggagctacaaaagaatgttcattcatacatatcaaagaaagcagcgtatgaatggcattccaaaatgtttcatcatgctgtaccactccattacaca

SEQ ID NO: 200846 - DNA, 1000 bp, Homo Sapiens
atccagtctatagtatttttattatagcagcctgtactgactcagacaccagctcttaccagcaaaggtacccagtagtaatttaaagatgctggtccttgtgcaatcactggcagtctttgtgtgaagaataggaaggccagaacacctacattgaaaaggtagaacatgtatattatacttttgcaaaagaatatagttttttgtagtaaagcagtttttccaagcatcttttaaacttttttttttattattttcatcatgattacttacctatacttccagcaactagaagtttccccaggaataatacaaagtatgtaacttcatctgtaactgcaactctgagtatcagaaaaaaagaaagtataattctgtgtttaaaatatacttggtacttgaaatttatggcagtaaattttcatgagtttattttggtgtgtctttgctgaaattgtatttggcaattgttttgcaagaaatgatggtggaactcatggatgatgttctgacttatttttaatgtaaacagaagatggcattgtagggctgtcaggagccctgcagtggtggtgtcagcctctctgatttgaagcctatagacaccctgagtcctgaggatgctgtattgttctctgattttgttcactcaggctccaccaattctgggagggggaaagatgataatgtggttcatctgggggaatttcttgagcagaggggataataaaaatgaaaaaatgccaatggacctaaagacacaggtgggtaatggaagcaacaattctcagatatgaaaataaattaatggtatgagagagaatatttaaatctatcaagttaaaagataatattcatatccaataatgccaccaacactttaaataacaacatgtaaaggatgtaatgctcaaggttcactacattgttaaattacattgtgcagcctgattacttacttcaaaacatttctcatcagcagattgaaagcatcttttgc

SEQ ID NO: 200847 - DNA, 1000 bp, Homo Sapiens
aatgctttgtatttgattgtctcctttggtcttgaagtccccttcctgcaccaccacctgcccctcaatggcttttttataccaagagactgaaaatgctacctctaatgacttttctccccatgatagtactctttgaaggaccaaagttactttgctcctattatgtggtttgatttgttccctttattcctttcatgtcctttgaactggaagtcaagtctataggtttgattaccttcaggttaaatgtattgggtaaaaatatttcacagattttatattgtatcatattaaaaggcacagataatctcattattaatgttggtaattatttggttaagatgatgactaccccattgtaaaggttattgtaaagttctccctgtggtaaaggtcatttgttcacccttagtaatctatggagtaatgttttagcaccaggagaatattctgtttcccaatgcctttagcatcaattgatgattcttgactgaatcatttattacactggggtgcaaaatggtgataaattttttttagtgctctaaatttcttctacatttattagtttatattcttttttaaaataaaaaagtatatttccctcctgtttctctaatatccctctttaaaaaaaagaccatgtcttcatgaatttaaaaaaaattactcaatatattatagccaatcggtcacagttctttttgatgctcatatatattgtgagcctctagcccatgtaagtcacagcaagctagctcttgggttttttttgagatggagtttcactctgtcacccaagctggagtgcagtggcacgatctcggctcactgcaacctccaccctccgggttcaaatgattctccttcctcagcctcctgagtagctgggactataggtgcctgccaccgcgcctggctaattttttgtatttttagtagagatggggtttcaccatcttggccaggctggtcttgaactcctgacctcgtgatc

SEQ ID NO: 200848 - DNA, 1000 bp, Homo Sapiens
aaaaaacaccacagattcaaaattaaataaatgtaacatatcaaaccaataactgttacattataggctagaaaccacagagtacctgctgctacattataaaattatgtggccaggtgcagtggctcatgcctgtagccccagcactttgggaggccaaggcaggtggatcacttgaggttgggagttcgagaccagcctggacaacatggtgaagccccatccctactaaaaatacaaaaattagctggacatggtggcacgtgcctgtaatcccagctactcgggaggctggggcactagaatctcttgaacccaggaggtggaggttgcagtgagccaagatcgcagtactttactctagctggtgtgaaagagtgagactccatctcaaaaataataataaaataaaataatgcatgtgaacaaaaaactgagctatagatattgaatgaggaattcttgacatggcacttttctcctatttaaagctcacacaaaaaccctaggaaacgtggtcttgtcttctcggcacatgtgagaatggtcctgacttctgtgttttccttgtgggaatgtaagacctgtttctgttgattcctttcaaatatggagcatgctcttttgtagcagaagagtgaaaacagcgcctaccagaaatgtcagtacagtagagtgcttttcttgatgtgaattaagatttctcagaacttcgctttctcagtcatttgcccaaagtgtgccccaggaccttgtagtgtatcctttctcttgtatgtgtggcaggaatgggtgggtgacagacatgtatatgataattgaggatcagaacatatgtgatggagtcgattttccttctgccttttccctgctttgctgtttcctcaagggaaatgatgcctgtgcatagactattgtgtggggaggggcgtgggtatggggagagtagcacttggtgaaactgcatttacacaaatctcaatgttttcctccatgcatt

SEQ ID NO: 200849 - DNA, 1000 bp, Homo Sapiens
ctgcctctgcctcccgagtagctggactacaggcacatcccaccacactcagctaatttttgtatttttagtagagacgggggttaaccatgcaggccaggctggtctcaaactcctgaccacaagtgatctgcctgccttggcctctcaaaatgctgggattataggcatgagccaccgcacctggccagatttatccatgtttatatgcgtacaaacaaatagctccaagtttagctctttttttttttaacatgaaatgggtgttgaatattgtcaaatgctttttcttatttactatactaatatggggatgtacagtgatggattataagctgttaaacaagctgtacatccccatattagtatagtaaatgagaaaaagcatttgacaatattcaacacccatttcatgttaaaaaaaaaaaagagctaaacttagagcaaagtaggaatataaggcagctttgtaaacttgatagagggcattgctgaagaacctacaatagttgataatgaaatactaaatactaagtatttccctcctacgatcaagagcagtgctagggccattcagcactattcagcatttctatttgtttgattgtttgtttgttttgagatggagtctcactttgtggcccatgctggagtgcagcagcatgatctcggcttactgtaacctctgcctcctccgcctcccaggttcaagcaattctcctgcctcagcctcccatgtagctgggactacaggcacgtgccaccacgcctgacaaatttttgtatttttagtagaaacagggtttcaccacgttggccagactggtcttgaactcctgacctcatgatccacccacctcagcctcccaaagtgctgggattacaggcgtgagccactgcacccagcctactatgtttttgtaaacaagccacatggcctacttggctatgatgtatactataaacgtatttatacattttattatattttactgaattc

SEQ ID NO: 200850 - DNA, 1000 bp, Homo Sapiens
aatttatttagggtctaggatggtgggggcaggaggtggggaaaggaaggatgcattttctgggaacaccttatacaccataagggaacgatctccttccccctagacacctggctaatctatatccctctctacccactcaagccaccaggacagctagaattagaaagacctgtcccagttacgcctgcaggctgagggtcctcaatgaatgctccttttcagtaatgactcccctgcccctgcatcttgagcaagacaaaccggggacatttaggaacaatggtgagaagaaaggagtagatgaccctcaactggctttgaatttactacttttcctgcctttggccgctggtgggagatgcagggtgcccagtggccttcgcagactcgcagatcccatcccaggaaatgcacgggccggtgtggccaggacagaacagagggaccactctcagtccagccctccctgcaggcggctcgccagctattccttctggtcttcggtttgcaggagggcagagggtttcccgcgccctggaccatccgggcgtagtcccggcagcaaggccttctttccttgctagcctgggcctgccgcagacagaccccagagggagccgcgcccagcccgctgggcggccccggcttcccgcgaccccctccagaccctgggcagaaagagcgccctgctgtcccgacagagccactgtgcttttgagggatcctgacacctagtggctcccgctcccttctccgaagagcaccgggtcctatctgagcattcccgcgactcccagcccctgatcgcagctaagacacccattcgcgcacccggcttctcccacatcctcgtcccaggggttcagctgacactggtagtcgcctgagctgtactctttggggcccaggcgccttggcgggagctcaccctccctgtctccccagctgaccctgccgcgcccccttcatctccgcacgctcccacccggccccctcc

SEQ ID NO: 200851 - DNA, 1000 bp, Homo Sapiens
tgggtgtgtattgattctgatgttttgctcctagctacatttgccgtttttttttgactgcagaattaggaaccagcttcatttttttttttttttttggatggaatctcgctctgtcgtccaggctggagtgtggtggcgcaatcttggctcactgcaagctccacctcccgggttcacgccattctcctgcctcagcctccccagcagctgggactacaggcgtccgctgccacactaatttttgtatttttagtagagatggggtttcaccgtgttagccaggatggtcttgatctcctgaccttgtgatccgcccacctcggcctcccaaagtgctgggattaaaggcgtgagccaccgcgcccggcaggaacccagcttcatttcttgtaaagagagtttgacaagcgctccactggggatagcagcacagcttcctccttttctgtccctgtctccctcctgactctgcatctgcctccgtttgaagcatcctcctccagtaagtgggtcatttggattccaaggcccttttgaggccatggtgatggatcatttgcgttatcaatgtgaactgtggatgtcccttcgcccttcagtctcttccttcttcaaggagggggaggtaattgggggtcatgtggcctggggaagagcctggtcacgagcatgagggatgtgagtgggactatgtttccagccaaaatttagggcacaggatctgaaaaacacttagattaagtatctgcaacacaaattagggtattttaaattgaatgtggagaaccctgagaacctgtgccctttgtgcgtggatggctgcttgcaaggatgagcatccccagctggagcggcccatggctgccagaacaggagaaggcttcagtcaggtgggaagccagctgcagtgtgttgcctgatgcaggatggtgcgagaaggagctgctctcttgctctgctccctggatcgcacaaggtcttcctgagaccagaattc

SEQ ID NO: 200852 - DNA, 1000 bp, Homo Sapiens
tggtccctggcacccaaactgagaggcccctgagggcaggtgggtctccctcaggcctaggacatggggccgggcacccacaggggcaggaatcaggaagtcgctggcaggcaggtctcaggcggggcccgggcagctgcggatccacattccagcctagcagggtctgccagctgcctcctggggccacatgaaagcccagcccgactcacacccatctccctctgactttttccgggcacctgcacctggccctccaggcctctccccccttcacattgccagcgtctgcctctgtgacctctgtgcagcccaggcacgctgtcccccaaccagctccccgttttgctctccccggccaccccacacccataggacatgctgaaatacaccctttccttcctccagctgggacagggtggatcccggccccaaaatagagcccatcagagggaggctgcagctacaatggggcctttcaggctgaagaagccgcccgacgatgccaggtctcctcagacacacctggaggccggcaccgcaccaacaaatcctcgtctccacttggcagctttgaggggcaaagggctcagctgcggagaggccaccttctaatcctgtaattacagtctcccggggcagcggccaccagggctgactcagctccaggaggggctccacagccaaggggtgtgacctcctggggtggacgggcgcagccccaccctgccttgctgagcgggcctggggtggtccccgcctctgggccttggtttccccaacggtacgacgccagggtgccccagatgctccaccagggcccttcagcaccagcagcccctgcttgttaagatggtaaccccgctttgcactggggctcctcacaggccagtgcatgctgggtcctagcgttcagtggcttccatgagcagttcaaacccgggctccacaactcaaaagcaaagaaaacacacaaaaagggccctggtttgtagaattc

SEQ ID NO: 200853 - DNA, 1000 bp, Homo Sapiens
aagcgtgagccactgcacctggctgaatttagtaattttttaaaaagatattcaaaatacaaatatgactgtgcttatctacctccttcccccagaaaggaatgggagtgatagtaacatccaagagttactagtaaatattgtgatatgattgtggagtgagggaacagttgcattcccagaagctaaataagcatttcctaactatgaaagttttttttaaccctttcatacactctgaagccccttcatctcctttatcattcccaaagatgtatactcaactgcaaaagaaggagactttgctactggtatcacaggatagtttcttgttgtgccctttatgaagccattgtctctcaaccccaaacatggccttctgtgccctcctgtgtgatgctggagctcggcctctgcaagccacatttctgtcttgccagctgcctctctattcggctctgccagtagcgagttctagatgctgcaaagctgcagcatccttctagatgccaaaaaaacttatttgatgtgtttttgaagaatgtggtagaaagcaacagatttcagctcaactcttctgtgcttaagagccagcatattggccaggcgtggtggttcactcctgtaatccgagcacttcgggaggctgaggcaggtggatcacaaggtcaggagatggagaccatcctggctgatatggtgaaaccccatctctactgaaaatacaaaaaattagctggacgtcgtggtgggtgcctgtagtcccagctactcgggaggttaaagcaggagaatggagtgaacctgggagacagagcttgcagtgagccgagatcatgccactgcactccagcctggacgacagagcgaggctccatacaaggaagtgatgtgtatttcccatttgcttcctgtgagcttcccgtctgtggtacacaagatacgcttcttcaccctggcagcagcagttctttccctgaggcagcagctggctgaattc

SEQ ID NO: 200854 - DNA, 1000 bp, Homo Sapiens
tagaaggatttcagtgactaagctgggtgtgatggttatggaataacttttagaaggagagaaattttaaccatacttagaggaaagaatgtgtcatgtgtgaaagctagacaacagcacatacttagctgtaacaaagagctatgcctagggaacaagacatgacagcagttagaggaattaagcacattaccaggagttggagaaggacttacaccacccccaaagtcttctaaataagcaacataattgttatgtgtttatatatttgatgcagaggaaataagaaagttaaggcagatgaatcaatgaggaaatggctgttgtatttcagacataagatggtagatgcctggctgaggctgtagctgtgagagaggatgaggtaattcaggaagcattacagaggaatacatttgttgggggtgaaagaaagggcatggtaccctacatcatcacctaatgatgacaacgcctcatgcagaaaatgatgagcattcccaaaactcatctcaggcagaaacatgaccccacattggacatggcatgattaatggaaatgcaaatgagattccttcagcactgatttcaaaccaaacaatacagtggtatcatgacctatgatggttgtttttcctcccagtctgagtaacttcctaaataagagatgatgaatcaccttatattctaccaagaatgtcaaatctcctgttttaagaaacattttccaaatcactaggatgttttttaagtagtttgcatcatcatttgaaataatttgctctatatgaacacaaatcataaacaattcagttataaccttagaagtaacaactaaaagaagcacctcaaaagaaaaaatatataaagcactcaggctgcctcttaacagactgattttataggcagtgctgaagaatggacgtttagggggcatttgaaatgcacttttgaaaaactgatttttcttgattagtgtgacaaagcagtgaatttgtgc

SEQ ID NO: 200855 - DNA, 1000 bp, Homo Sapiens
gaattcttcttcaagtcaatgccaaaagcttattgactaaggctgtttatacccggattagagccacatcagctgaaactaacactccaccctcttcccttagttcccttgcatctcagatggcctattaaattctttactaaaatgtcctttagggacttcatattatgtcttcctcctcctagacataataggacattagaagagtctcttattgcattcagactactataacaaaattccaaaaactgagtggcttataaacaacagaaatctatttctcacagtttgcaggctgggaagtccaagagcaagtcaccagcagatttggtgtctatgttcctcatagacagccgtcttctcactctaacctcaggtagtggaagaagccaaggacctttctcaagcctcttttataaagacactaatcccattcacgagggctttgcccccatgacctaatcacctcccaaagacctcccctcctaataccataaccttgggagtaaggattttaatgtataaatttgggtagacataaacaattcacaccatggcagaaagatatcagaactgttacataactaacttctggatcagtctttcccatttttgtgagctttttctatccaaagaagaaaattgatggctaaatgtgatgtcttatgtctgttgcatgttaaacttcacctttgatagaaaaataatggtctgtcacatggacactctttgcattgtgatttcttaacctcgttttatgacaattaatattaggcagaaaatgatatattagttaaattttaagttgatgactcaattcaagtgatttttttcatcttcattagtgatctaagaattaaaataaatacttgctgattaattacattattttacatacttcttaagactcataagataaaagataacccctttgtcagggcgtggaaaatttcttaagtacattaactcatatactcttaattagttaagagtagaattc

SEQ ID NO: 200856 - DNA, 1000 bp, Homo Sapiens
tgaaacatgacctgacttcttgagtacacactgggtgactgtgattgggtgaaatttcctcctccagcactttcttctagatcttcaaatatgtgacaccgacagaaatgaagctggcaaatcaatgcatagagaattgtctcacatatgtagctctacccaggtcatacatatgcatattgttttctcattagcatgtactgaaaggaaaagagcatacaataatagaggcacattggcaatctgcaaagaaatggaaataatgagggtcttatcgcttttaaatttctttaaatatatttttagaaggcaatttttgatgatctgtatattcactggtgtttgtaaaatagctctcctggatttgtttttgttttgccatagacatgacatacattttccttaagtctgagaaattagatgcaggccccacatgattttctcatcctgaaacttacaagcccttgatttatgggtcttttaaaagtgcagaacacccacagatctgccaactgacttttatttattatcaattttctctagtgtggattgaagtaactccatcagttattctccaccattaccatattcactatcatctacatatattctttttcattatgcaaagtattaatgttcctttcaaatccctttccgctcagtgcttctcttcattttctttccccatctttgcctttcatttcctacgctaaatttgtacttacctggtgattgctttcaaacccttttgtattaaccttagattttgaactttgtcgtaaatgttttatagacccattttcattacccaaaaaaagcatacttgggtttccagatccatttgattattgaacccagccatttgacttcaatggggatatgcataacaaaggatatatttcaaatgtacaatatgtcacacaaaatatctggattttggcgggatcagttttctcattatcccataggctctaacaactgagtcaattttaactgaatt

SEQ ID NO: 200857 - DNA, 1000 bp, Homo Sapiens
atgacgttttactctgatatcattgtgcactttagccagatccagaaaacactcaaatttattttgcaacaagtgagagcccaggagacctccttattatcctgtctctgctttgaggcaatcaagtaccctctctgaacctaggttccctcatctgtaaaacaaaggtttcagaccagatggtgtttaaggtttctccccatactggaatgaatgatttcttggtggtattagcatcatcacagacctatacttgctttctgaaactctaccacatactgaaggaatacaggaatgggattaagatgactagcatagcagtgtacagcttgaagagatgttccacatcatcactccagctccttctcttttctcagggacaaatgaggcccagagagaatacgacctgtgtaaggtcaaacagtggcagggaaagaaggagagctggggtttagcattctccctggtgaagattggaggtccaaagaaatgactcctttttaagggatgggcataaaaaagtgatcaaaacattgcaaaggagaatcaaagattgattgtcctggggctaagaaagaagataatttttaaagaatgggagtgggcaacagtgaaaaatattgcagataagtagataaggatagaagatcaaccactgactggtagtaatggttttctgtgaacaaatcagaataataatagtaataacgataatcagggatgcatggtgagagctccctaagtgccatgtggggctttcagtggcagactgggcagcgggaagttaaggaacaagtagccaggaggtgtccttttagggaacagtatgtagatccgctgctcggtagcattgaaaagtccctattggatggtgttaaaaattactgtccctgccccttaaacaccaacctcaccctttggacaatatccttcagagccaaagatgttacaagcaagcattttattctgcttactgccattaaaataattaggaagaatt

SEQ ID NO: 200858 - DNA, 1000 bp, Homo Sapiens
gaatcttctccttgtatcctttaccatgtatgtttttttctcccctaattattttgtgaatttttgttaaagttcactggttaaaaagtggttaaataagattggagtttcatcctctcacacacaaaagatgagacagactaatgttactggacatctgtcttccagagtcttcctggaacccacctcctccaatgcactattccatggtgacctgacactatctcaacatggcatgagcaaaagcacctcatgcttggatgctgtggagccacaaaaagctcaacgcagaaagtcaaagacctctcagatttaccctaccaattttaaggtgactgcttccttggcctgaagaattttatcaccatagtgaagattctgctaattttcctatagaacactactcacagtatttggtttcaattgtattttcagttttgaaattagagaattctccagatgtaaagatatgccctcttaagctaattattgtctttcatctcattccctgcttccttgtgtataccaatcttgctttcttaagatgctatttttgaagtaatttttgacaatggcctaagatttcaagttctcaataatttatctattattgtaacacagattcagatgcaccttcaagtacatctgcccctgcacacatatagaaacacacattcacacagaaaccatgctgaactctagctccaacctctcccatggaaaactccctgctctagtcaacctgtcctggatcatatgttgtcatcgtaagggtaactttgtaagggtaacttcattttcctggtgtgaaacttgcactaaccacagacagggcagaagtcttcattctataggtcttgcttacagaaatttttgctcttgaacacaggaccattttgctaaggcacagagctacaggtccaggtttcttttttcaaatcttattgcatctgctccatgtttgaagaccgaaggtgaaaagacaaagaggtacatcttc

SEQ ID NO: 200859 - DNA, 1000 bp, Homo Sapiens
agacaccagtcataggctctagggcccaccctaaatcgaaatttcatcccgagatccttaactaatgacctctgccccaggctctctttccaaagaagtccatattccagggttcttagtggacgtgaattttggtgggacactgttcagcccacttcaggaacctcctatttctagcgatttgtaaacaacaaatttgttttgttttagtttttgtttttgaaacagggtcttgctctgttgcccaggctggagtgcagtggtgcgatcatagctcactgcaacctctacctgccaggctcaagcaatcctcccgcctcagcctcctgagtagctgggaccacaggcatgcaccaccacgcctggctaattgttggtttttgtaatgctgttttgtagagatggggttccaccatattgcccaggctggtcttaaactcttgggctcaagggatcctgcttcagcctcccaaaacaccgggattccaggtgggagtcaccattcccagcctagaacaagtttacaagctattggcactcatttcttaggctctttacaacacagtgattttccagtattttgaagttgaagtaaatgtagaaggtctcactctttagaaccagttaattgcagagaggaaagaggaggtcttcaggagaacaccagattctttttgttgttgttgttattgagacggagtttcgctctgtcacctaggctggagtgcgttggcgctatctcggctcactgcaacctccaccatccgcttgggttcaagcgattctcctgcctcagcctcccaggtagctgggattacaggcgcgtgccaccacgcttggctaatttttgtatttttagtagagacagggtttcaccatgttggccaggctggtctcgaacccctgacctcaggtgatccacccacctcggcctcccaaagtgctgggattacaagcgtgagccaccacacctggcctccagattctttttgaaaagctt

SEQ ID NO: 200860 - DNA, 1000 bp, Homo Sapiens
ctggtagtgctgaaattcagatgaaggtcaatttgacatccaaaccatattcttataccttaaactgtattttgccctggtattaacctttagaagaacaagggtagtttctctcatcttctttttagttgtaaagaacccattattctaaaaaatgaggctcaggttacctcatttagggtgtgtaagactaagtgatcaacatttaataaaaacagtggcatctcaaagtgatggattctctctatttatagtaaattatttttattttcttatgcatatcgtttttcatagtcccaccttgaacactcaaactttcacaggaatctggacgctgctcagccggctgttgactgggaggaacgattggtgggctcaacatatttaaccagtccctaaaaagaaaacaaagtgaatgagcatgtctggaattccatatatagattttaggtttcccatggattttcagttccttggggcttccaaaaagaaacactttttttcctccttcatatttcagaaagacagatgtccagatatcaatatccagttttgtaaattggttaatatggagtcaatcacttaactagccagtttgagaaatacttcaactaaatgaatattccactcaaaagtttattattgttgttattaaattacagcagagttcttttcacataagaaattatttcaataactcagaggaaacgtagctgagatgaagctccttatgagctttgggtaagaaagcgtgacaaagtcacatgccacatgtcatggatggtcacactccacaaggtgactcagaactgaagtcagtcttggagctgccatggaccccagcagtggtgggagtcagtctctcttaactcggggcttttgagcagtgaaggcaaaggaagggggagtgagggcatttccccatctctttactttccttcctactgcactcttccccagtctcttgcttcctctcgtagatacctggggggtagaattc

SEQ ID NO: 200861 - DNA, 1000 bp, Homo Sapiens
ttgcaagtagcaagtgatgcccagaataaattttaaataatattctgtgtagttctcatgttgatttctaatgttctaagtacagcaactggtgccaactttagtcaatagaggataaaggaaacatctctgtccttgttcagtttagattcttttctttcatcatcctgattttcacaagcttcagcagttattaattctagctatccttcctccttgttggtccacagcagacctatgcaaggctgcaaatttcagggcatgatcagccttgaactaattctgagacaatatcttttctctctgtgatgaaagtgactggagattatgaggctcagcacatagaagtctctcaataaatacttattaaatgaatgaatgattgctttggttttagtgaaagagaataatacacgtggtctataaaaactctctgaattgcacaggaatcactaagcctaaactgttgtgtttcttgtgtcacactattaaacatcatcctgagtctttcagccaggacttgtattgtttggtgcatgcacggaatcatatatgcacgaggctatatattcacaaattgtgtaatacttgttttggtaggtaagaggtctttttgcttggtttacctggatgggtaacattgtgggatagtggattgcagataggaaaacagtgaatatcattgttaaacatgttaaaattcatttaagttaaaattttttattttgctttaattccattgcctatggtcaatcttttttaggttccttttgtctcagaaaactttgtttacaagcattcaatgcactaatagtagcattgtttttattacattttctgtattagagattataatatgcttctaaacacctgataaagaataagaaaagggagcagttaaataagtgacctaaaatcaggactaaattaaaaacaagcttaaaggtttgctgtgaacaaaaaaaatttaaaatttagttgctccacctagtggtgaacc

SEQ ID NO: 200862 - DNA, 1000 bp, Homo Sapiens
gttctgaggtaggcactattacttaccctactatacccacgaggaaacagactcacagtggctcagcaataacccagggtcccacagcaaggatgacgcagagctgagagctgcacccagctctctggtgccaaagtccgtgctcctgcacacagtaagtgttcagtaaatgggggccatcgctatgactttaatgttctcatcttcagccaacactgtggttcccacagggaacttggaatggaccaatgttgtgaccccaaagctctgtataattcatcccaacattaaacacagtaaatgggctgagcatggtggctcaggcctgtaatcccagcactttgggaggctgacacaggcagatggcttgggctcaggagtttgagaccagactgggcaacatggcaaaagccccgtctctacaaagaatacagaagttagccgggtgtggtggtgcaagcctgtgctcctggctactcgggaggctgaggtgggaggattgcttgagcccagcaggaggtcaaggctactatgagccgagatcacatgccactccagcctgggtgacagagtgagaccctgtctcaaacaaaacaaaaaaaaacgtaagtgatggtttgaatgactgattcttgatgtacctattgtaagaggtttggctgtgtaataacaaataatattagccactctttttagcacggggacaccatgagaggaggctcttcttcccctccaggaaggcctgggtggggctagagatggggtgagtggaagtgaaggagaggcagggcagagggaagaggctgagggtcttgtgagtccctgcaggtcccagcactgggcaggtgggggtacatctctcaccctctgcaccctccacacacctccccatgccccgacccccccccccccacacccgccaccctctgccaaacctgttgcttcacttctctcttgaactacttgctccttgagctcagcattgccacaccctgaattc

SEQ ID NO: 200863 - DNA, 1000 bp, Homo Sapiens
ttgacaatgcgtttccgcagacccctgcgcgcggcggagagagagggggctgcctgccagggtgatgtgcctgcggctcccactgcgcctggcgcgcgggcgcggggactccctatgggctgtatctgagcagatctctgactatgggtcgcgtgtgcgggtgagtgcgtctgaatggagggtatacccaggtcgtgtgacactttaagtaggtgcctggtctcgccgtgccaccgagcggcccgacatccacggaacccctgccatcgtgccctccctttggatggagtgtgcctgaagcccccggggtctccataatcgccccctttcctcctccccagcgggtccttccgggtggcccggactgcatggtggggagtggggccgagtccgctgatccagctcacgctccctccccctcgcagggccggccaaggagtgcgaaaaggaccaattccagtgccggaacgagcgctgcatcccctctgtgtggagatgcgacgaggacgatgactgcttagaccacagcgacgaggacgactgccgtgagtggcgggccagggagctcagacccggggagagaaaaggaacggtggggggcaccatgcttggcgcgcacgtggctgcagccgccgcgctgccacctgcgcgggacttgccgccggagcctgcgaccgggaaaccgcctgggcaccgcctccctcggggccgggtggctcttagcgacccggagcgggcaggaaagctggcgtgtcctggtggggccggggcggagccccgggcagtgtgccggaggaggaaggcgcaccatgctggggagactgaaccggagctgtgggcggggacgcggcagtccctgcaaaggtctagcttcccgaaacacggccctctcggactcttgcctcggccccgcgggacgcgcgcgtgtttcaaagttccacgcagctccgggccgcactgcgctccttttcctgctcagtttttgtgaatgaatgggctc

SEQ ID NO: 200864 - DNA, 1000 bp, Homo Sapiens
cacagcaggcagtactgtgtagatctttgtagcacagttcccatttccttacttcctggggagccaccaaagaaggtcctcatgggagttaggggccctttaccctcaggaacagttggtctattgcttggaaggtctagtttaaatttaagaagtgtcactgtacatacaggaataattgattctgattatacctgagagattcagttagttattagttcctcaattccatggtctgcttccccaggggaaagaattgctcagttgttactgttaccttatacaaagctaggaagtactacagtaaaaggaacaggaggctttggtagtactaacccagcaggaaaagctatatattgggttaatcaagtgtctgacaaaagacctatttgtacagtaaccattcaaggaaaagattttgaggggctagtacatactggagctgatgtttctattattggtttaaatcaatggccccaacattgaccaaaacaaaaggcatccattggtattgttggagtaggggctgcctcagaaatttttcaaagttctttaattttgccatgccaggggccagatggccaagaagggacaattcaacctattattacacctattcctgtaaatctatggggtagaaacttattacaacaatggggtgctgaaatatctattcctatggatcagtatagtgataacagtaatcaaatgatgagaaaaatgggatatctcccagggaagggactgggaaaaaatgaaaatggccaaacagaacctttagaactaaaagggcaaacagatacaactggattagggtatcatttttaggggtggccattgctgagcctccgggtcccattcctcttgtttggttaactgccaaactggtttgggtggagcaatggccgctgaaacaggaaaaactggaggctttaaaagaattgatacaagaacaattgcaaaagggacacatagagcctgctctctccccttggaattc

SEQ ID NO: 200865 - DNA, 1000 bp, Homo Sapiens
ctctatcctctttctgggacttttattctacctgctattgcttttaacctgtctttcatattgtccatttgcttgtctctgtgctgaaaattgtgtaatgtcttcagattaatcttccagctcactctgtctcatcaactgtgtctaatatgctgtttaacccatttgttgaatttttggtttcaacaagttatttcatttctaaaagttctctgctgttcttttccagatctatttttaaaaattatctcttgtgatttgatcacttttgtgatttcattttttatttctttaaaatcttcaattatagttatttcatttactgtaattatgataattacaatttctgttatccttagggatctatatctactgtatgttatttctgctaacaattgcctcttgtgtgtttggtgattttttttttaattgtggatttatatgtatagttggtcctctgtatctgtgggttctgcatcttggatttaacccatcgaggatggaaaatacttggaaaaaaaattccgctaagttccaaaaagcaaaacttgaacttgctgtgtgccaagtactattttcctgtgtgccaagtactattttgaatccattagaacaaagtgatgtgtatgcattgtattaggtattataagtaacctagagataatttaaagtatatgagagggtgtgtgtatgttatatgcaaatactatggtgttttgttctgttttgagacagactctcactctgtctcccatgctggagtgcagtgacacaatacagttgctcactgtagcctccacctcccaggctcaagtgatcctcccacatcagcctcccaagtagctgggactacaggggcacaggtgcacaccaccacatccagctaattttaaatttcttcttatgtatgtatgtatgtatttatttattttgtatttttagtagagacggggtttcaccatgttagccaggatggtcttgatctcctgacctcctgatc

SEQ ID NO: 200866 - DNA, 1000 bp, Homo Sapiens
gcttcaaaaggtgacatgtttgctggggaaatgggactggctgtgaagtcctctctcttctttgcttggcacaggaagaaagagcattggggacttgctcccctccccatttcaacttcccagtcacattccttccaataagaagaatctaaggcacttaaatgctatttatttatgcctatgagcatggggtgcaagagcttctgtccagggaagctatgcatggggatggcaggtcccaattgggcttcggtggctcctgactcaaggcacttgtttctaggctgctgtaacctatgagtggtctggtgtggggagacacatggcatggggcaatggcacttagctaagccaaactgcccaggtctgcagcagacactgttggagcttggccccttcccctgtctcttgtcatttccttgcactccagcctgacctcttggcctcaattttgcatgcacagaggactggaagttcttgggaattaatggctgccactatcactatctcagccgtgggccagccctcaggtaacggctgctgggtgcagggtataaatgccctggttccctcgcaggtgcacagagtagagaatgagcaagtcaggagggccagcatgtgacctggtgtaacagcatcacccccggctcgaggatccatgggtcagggagcatgaaatcaccctggggtcctacaaagtgggcactatgactcccattttgcagatgaggaaactgaggattcccacctgtgagaggcagcagcaggataggaattcaggcctgtcagatttaaaggccaaacacctgctgcaggagagaggcaggggagagggtaagaagctaagtgccaataggcagacctcagggctaggaagaagggcagtgagggtgaggggtggtacgctgggccagcacaggcattttattctgagaacatgttggggctggtcagtacctagagaggagtgctgcaggacacccccagctcccaactgatc

SEQ ID NO: 200867 - DNA, 1000 bp, Homo Sapiens
aggacacattttttttttttaatggaaaagatgtcacaaatggagacccagtttagtacaaaggagatgggggtggggcgttttggtagggttcagggcactgtggattctcagcagtcactgactcttaccagtcctggaagtgcgtcaagcagctggacagaaatcacagtgtggacactggttggcacttagggaactcattcattcgttgactttacaaatatctatttatctgtcaatgttctagggctcaaggagctaattccttagcttctaactggaggagacagacaacaaacacgtgagtgcgtaatttaacatcagatcaactgctgtaaaggaaaagaaagtcaaatcaagggttaaaaagtgctgggaagagctccatgatttgagtggtcaaggcctctctgaaggacagacatctgatttccaataaaacaattaagaaattacatatttccttttgttacctttaaatttatatattaaatagctgacaaaaaatatttaaagcttaatagagcataaaataaaggccataaaaatgaacaatgaaaccagtagaaatcaacagaaaatcgatggaagaaaatggtaacaaaagaatttcagatcattccaaaagcagtaactcagtaagaggaaaagataaatttgcaaagcaggtataaatagccttctggagtctttggtaatccaattactaaaaaggaataggtgggtacagttgttcatgcctgtaagcttagcactttgggaggccaaggtgagaggattgcttgagcccaagggttcgagaccagcctgtgcaacatagcaaggacccccaaatctattttattttatttttaaataaaatttttttctagcccataagatatggcagaaagaccccatagcaaaaaaaaaaaaaaaaaaaaaaaaaaattagccaggcatggtggcatgcagtgcagtcccagttagctactctgggggctgaggcagaaggatc

SEQ ID NO: 200868 - DNA, 1000 bp, Homo Sapiens
tagaaaaaacaattataatatttgaagggaaccataaaagagcccaaacagccaatccaatcctgaacaaaaagaagaaacctggagacattacagcacctgacttcaaagtatattacaagcatatagtaaacgaaacaatacggtattggtataaaaacagaaacactacagttcaaccttcaaggcacaagtgatcctcccacctcagcctccaagtagctgggaccaaagggatgtgccaccatgcctggctaatatttttattatttgtagagacaaggtctcactatgttgcccagtctagtctcaacttcctgggctctagcagtcctcctgccttcgcctcccaaaatgctgagattgtagttgtgagtcaccacacctggctgtgattttgatttttttctaaatttgttgagacgtgtgttgtgccttaacatatagtctttcatggaaaattttctacatgctgatgagaagaatgtgttttctgtagctgtcggatgaaatgttctgtcaatgtctgttaggtcggcttgttgcaaagagcaatttaactccaatgtttgttcattttctgtctagattatctgttttttgagagtgaggtgttgaagtccccaactattattgtactggagtctatttctccgtttagatctaataatgcatgctttatatagctgggcactctggtattgggtgcatatatgtttacaattgttacattttcttggtgaattgacccatttatcaatatgtaataatatatccctttactttcattctatatgtgtctttacatgtcaattcttgggttttcaggcttgcttgggtgctagcagtagcattggtgggttggacatgtagcccccaggcagtgggcatggtgtggacaatggcagtagcagtggcaggataaacctctctttgtgctggtactagtggtagcttcaatgggccagtcctctggcctgcagatgttgtgtacaggtag

SEQ ID NO: 200869 - DNA, 1000 bp, Homo Sapiens
tatagtcaatggacacagtgaaatagagcaaacacctttagtttcatcagatcctgctttgaaaattgatacaaacagaatcaggacagaaaatggttccattttgcccagtgttgtaccacaagaacacaacaccttgccagtatctcaggcaccttccaaaccaaatctgacaagtgaacatacttcatatggcttaattttaacaaaaccatacgtcagaccattgcctcccagttaccttgatgaacggtatcttagtatgccaaaacgcagaaaatttctgactgatagagtagatgcctgttctgatcaagataacgtgtataaaaaatcagtgaaaagattaagatgtggcaaatgcctgaccacctactgtaatgcagaagcacttgaggctcatcttgcacaaaagaaatgtcagacactctttggatttgattcagatgatgaaagtaagtcttctgtcttcttagtagaggtatctgtagaaagagaaaatggcataaataaaactattatagatctttgagatttaaaaaattgatatttgtgtagcacaggtagtgaagcattactccatacattatttcctttaatacatacaaccactatgaggtgatactaatattcctgttttatagatcaagcaactgaaattcacaagtaatttgcatagggctttgcctatgaacttgtgcaaggcagaacctgaacacaggtttttcatattctttgattatacttcttcactgtatcaaaggttattcttcattccaagtttcatataataaaagttgtaattttgatgggaattatttttcatatgcattccagaatataaatcaagtgaatctgtgtctctgttacaaaaatagaaggagaaaaagaacagaaaataattgagaaacaaaatcagaaaaagagcttgtctgtctactaatatcaatatcctttaaaatgacagggtataaattaaacaggaatctgacttggaatt

SEQ ID NO: 200870 - DNA, 1000 bp, Homo Sapiens
attccatttactcacagaaactgtacaattatatattacttcataaatgcaatgaacacattacagtctacaaaatcagaaattacagaagtttaaaaattctgagtatcaaataatacagatgaagaaatagacataaatatggcagcccataattttgacaaagaaattgtagcctccctgactttaaatatgtgaatttgaaaatactgagtttggagtaatcattgtgctttgtgttggtctaaaaaatataacactggctgtcaaatcagcatgtctgaaaatatttaattcacttccaaatgtcatacaaattattgtggcttctatgtaccctaaggcttcagtcatttagctcaggtacattactaaaagtaatatatcaattcttccagtacagtgatgtttcacatcattcacatttgcatactctggaataaaatagaaagtaatgtgttatattcaaaatattcagaaaagcaagcaaaaggtcaaggaaactgctggttattctgaaataatcttgtgttgaggtgagaaattaaagaaaaataaaattaaaaagagaaaaaagttttcctgttttaggctaacttgtccaagaggcagcaacaggcacagcccagacctaggaaaagtcttgataatattatctaatgtgctctggagactctcccagcaccccctcaacacagggagaagaaaaacaaattttcctttgctttatggaatgagtttatagattcttgttgtctgtaactagtgattttaagtattctgttttatctaagaagtacaaaaaaagtcatgagaagcctgagtaggcctgaactacagctgcctgggccccacagtgaaggttataggataagcccctgcacaggcaaacctagataaggaacatctgggttgcttggcaacggtcatatgcaatcctgtctttgtcctgcctctggatccctcctttcatgccactgtaagcttgcttcaagctagc

SEQ ID NO: 200871 - DNA, 1000 bp, Homo Sapiens
gtttctcaaggcttacttttgggttctttttttcttttcattctacaatttctccctaaataacttcctccatgtttctgttgcagtcaatacttatgtgtaggtaacttgcaaatttatatctctgattcaaacctctaggctttagacacatgtttaacatcatctcccatcatctcatcaccttcaaatttactttgtccaaaaccaactcataatcaatctttggctcactgtgttacctcttagtgaaggtagcatacatctaattatgcaaatcataagtctaattattttcaatggctgaagttcttcctctttacagtgtagccactccttcatcaagtcctatttgttttgcctcctctatatttctcaaagtcatctgcttctctgcatctccaccactatcacagtagttcaacctattatttcttgccttacctactacaatgacctaactggttcacccctttatgtagtcaagcccatttttgatccattatgtacactgtagccatattgatttttttcacaattctaatacaatttgtcatctcttctgctttatactttttaatagcttgtaatttcttttaatatagaggcaaaacaccttaacataatcgtcttgatttttcttttctaacaacatgtgctttctttttgccactatattcaaatactttcactcacatcaggacccttatacatgctgtccattcagccagaaacactttcttcttttcacataattttttctcctttagattatagttcaaagttacttcctctagaaagtcttcacctttctgaagctaagaagcttcaccacaagctcctatcttttacagacctttagaatatcagatatgtcttctttatatcaattgtttgacagttgtaaatttacattaatttgtgtgatttgctctctttctctagagtataatgttccatgagaacaaggaccttgtttgtttttgcttatcattgaatt

SEQ ID NO: 200872 - DNA, 1000 bp, Homo Sapiens
tgatgtaggatttctactaaatgcgtagtgtttttgaaccaccataaagtcaaaaaatagaaaggtgaaccattacaagttgggggacatctgtatgttaaaaatataagtatgattgccattcagtaaaagactttcttactatcaatgcggtctttttcattttaaaaagtagcctttttttctgcaactaaaaattatcataaacaagtaccttacctatttaaacaaactattgaagacagaaaaatgcaaaggtccactttgtatttccccatgatctaaagtgaagaggtatatttgatattattatacaactctactttcagatacatggcctgagatgaatagaataactatagtgctttccatgttatcagcactgggataagtactctccatatgtcacctagtttaatcaacagacatacctatcaggcagaaactattattactccctctttacaaatgagaaccagtgagttccagcgctagcccaagatcataccatgaataaactcattgttttattaaaaattgatttgtaatacaaatgatcagttatgggtctgtatgatcttgaatgaattatttattccttagtaaaataataggatatactaaaatcctttcttatatattctacaaatgaaaatatacggattgctcttgattggttatgttcctttgctccatctaccaataaagaagaacaaatatttctcacctatttttgaatgcatttctcccctaccttagtaatggtttcatgaaggttgaaagagcgatccatttcttcaatttttgttgctcgtgtagaaaaacgggcctcggagagaaaacttggaccctgcggcaaatcaaaaaagaaacatttaaaactctttatcgattttgtttttcaagtgtttattggattttccttaaagattaaaaaggactctaaattgccttaaggtttctgttgattgctggatttcattctcctgatctaactacc

SEQ ID NO: 200873 - DNA, 1000 bp, Homo Sapiens
ttttctatttgttttccttgctatttttctatttgttttcttttgttgctatttttgtcttcctctcttttcctgcctttcgtggttttaactgaggattttatatgatctattttttcttctttcttagcattatacattgtgattcttttattttttttagtggttgctctagaatttgcaatatacacttacaactaacccaactccattttcaaataacactacatcacttcacaggtagtgtgagtaccttataatacaaaataattataattcctctgccccattttttgtatcattgctgtcattcatttcattaaaatataagcacatataagcacatatatatgatatgtaaaaagatatatgttatatctacatatgtagatagatatagcatacatctatctatataaatgatatataatatatacccataagcatacataatctaatctattgttactattacttttgaacaactgaaaataagataaataaaagtttttatcttcacttattcctcctttagtgctcttcttttctttataaagatctgagtttctgacctatattatttcctcttctctaaagaactttttaaaacattttttgcaaggcaggactgctggcaataaatttccttaatttttgtttgagaaactcttgattactccctcatttttgaagaataatttcacagggtacagaactctgagttgatgggggttttttttgtctcaaccctttaaatattttatttcactctcttcttgattacatggcttctgaggaaagtcaaacgtaattttttgtttataggtaaaatcctcactgagaatttttttaatctttaattttttgtagtttaaaaatgataagcctaggtgtaatttttttaacatttatcccacttggtgttctctgagcttcctggatccatacattaatttgggaaaattctcagtctttattgtgtcaaatatgacttctattc

SEQ ID NO: 200874 - DNA, 1000 bp, Homo Sapiens
tagtttgttataatttctgttcttttacatttgctgaggagagctttacttccaactatgtggtcaattttggaataggtgtggtgtggtgctgaaaaaaatgtatattctgttgatttgggttggagagttctgtagatgtctattaggtccgcttggtgcagagctgagttcaattcctgggtatccttgttgactttctatctcgttgatctgtctaatgttgacagtggggtgttaaagtctcccattattaatgcgtgggagtctaagtctctttgtaggtcactcaggacttgctttatgaatctgggtgctcctgtattgggtgcatatatatttaggatagttagctcttcttgttgaattgatccctttaccattatgtaatggccttctttgtctcttttgatctttgttggtttaaagtctgttttatcagagactaggattgcaacccctgcctttttttgttttccatttgcttggtagatcttcctccatccttttattttgagcctatgtgtgtctctgcacatgagatgggtttcctgaatacagcacactgatgggtcttgactctttatccaatttgccagtctgtgtcttttcattggagcatttagtccatttacatttaaagttaatattgttatgtgtgcatttgatcctgtcattatgatgttagctggtgattttgctcgttagttgatgcagtttcttcctagtctcgatggtctttacattttggcatgattttgcagcggctggtaccggttgttcctttccatgtttagtgcttccttcaggagctcttttagggcaggcctggtggtgacaaaatctctcagcatttgcttgtctgtaaaggattttatttctccttcacctatgaagcttagtttggctggatatgaaattctgggttgaaaattcttttctttaagaatgttgaatattggcccccactctcttctggcttgtagggtttctgatgaga

SEQ ID NO: 200875 - DNA, 1000 bp, Homo Sapiens
aaaagaagtatggttattcatacttgaagtagctctgtagtcaccaagattcctggatattttctcaaaaacgtctttcctccacaactctagcccaggatccgccacacctaagtacattacatcctttccataggaacttagttaaatccactgtgtctgggatctgttcactacagactcaggcctggcttctcccttctgccatctgctggtgtgtggcctccctccatgactgcatgcagcgcagcatcgctggcgtgcaccaaaagacaagggcctgatccagatgagtactcgctggggattagtattcctacattttaaaaaggcaaccattttaagtgacaatacgtatcaggctagtagaaaaaagttgaaacaaagccctctcttctcatcttacaaaaccatgcagatgagagaaggaatgtctgacttgttccaattaggcttcttggaattaacaaaatttcttttctggcaaagatgaatttggctcatcatagaaagttctttgaaggctgctgctaaattcgtttccctttgaaaaagcaagtttcaaggcatgatagtgcagaggtaagtttctgacgtacagactatttatagactaattgtgctcagtctctgatctgatttatcttaagaacagactacactgaggggtcactctgcctaaattcactagtacatccatgaatcgcaccagaattaggacaatttgattatcgtaatgattttgttgtgaacctgtgcactgtacccagaggtgaggaccagcggacagaggattctgggagttctgtgcacaggatgctccactcaggagccgcggcatctgagaaagcaggtctccccacagattaagtcctcaacaacactcaataagccattaagaaaagtagtgccaagtggagagtgtcatttgtttacttaaatctgggaggtctgagtgttcctggggtcctcgtcaggatgtgtcgagggccgtgaattc

SEQ ID NO: 200876 - DNA, 1000 bp, Homo Sapiens
gtatatgtctgtctgtctttctgcctctgtgtgtgtgtgtctctgtctctctgtgtgcatgtgtctgtctgtcttgtctgtgtgggtttctctaccttattgcctgtggcggtgtccaccaggaagcccagcacctggagaaccacgctgcccatgcccatgggaccgcagctctggctcgtgtgtttcagcgtcacctgaggtgactccacattccggcttgcacattccgatgttggcaaagaatccagagggtggaaaagggcctggtctggctgggtgaggaactggtcatctgacagcaggtcctggaggctccccaggtcctcctcttcctcctcttctatgcatgactccaggatgtgaatcacatattccaagagcagcagatgaaacagatgccaggcacctacatttaaatgacatccaaggtgaacacgtgtgacaagtggcaggaagcgagacaaaggtcaatctttagggaacggtggctttgaactcacttggtaccagagagtggcctcaatggctgctgcggttggtgggaagggacttgaactttgacccctgcagctatctactactcagggagccctgcgagtcagccagactgacagagagggccagaagctagggctgactcggtaagagagaagttgacacccatctggtgtgagacgggaggcaagtgcactacataggagaccggcgtagtcccttctgctctaccggagagaggtctgcccttgatgtttgcccaggaaacagaataggagacgtagccggtgcaatctttaaagatacttttaaaacaaagcaaaactgtggctcttgtgtgacctttgtaagttattaatgagaaaggggctgggggagatgctgtaaaaggatagaagaattggagttactaaacacaggcagcagtggggagcagtggccacgtgttttacaaatcgacacagagtgagggtgcgcggcagcctgtggggggaggctgatc

SEQ ID NO: 200877 - DNA, 1000 bp, Homo Sapiens
agtctccattagttcagatgaccttttccgagaaggaatggagagtaccctggaggagcctggtctgtgattctgggaccttttcaaaaatgcttgttgctcctccacccaaggtactgacagcttcccactggtgtcagaactgctgcagataccctataagcagagaggggctgctccagtctggccagctgtgccccactccacctccagggaagagcaggtgctgaacttctggatacctgcctttccttctggcttcatttctaaatgacagctgacctttgctcccaattttagacttgcagcagattcctctctggctgggccctgattgcaggagcagcagtggccacttctgctcatcttatttaacactgggagataattgttggtccttggagcttgtcatcctcagaagacagtccagctgtgggggtcagaggtcaaagcacacagcctgctggcagtggaggcaaagatctggatgggaggacaaacatgtgagaagatgtcaaatctggagagcatccggggacttctcaggcatttgtgtcattctgtcctcatgattctctgaggacctcagctgaagagggtggcgcgcattggtttgcatgttagagagagtgcactgttgtgtgctcatacacatatgtgtgagcatgtatagcctctgggatgatagatattgcatacaatctgatagagccctggcttaagaagcaagaattttagtctctctccctaaccacctgtgtttcctcacctgcctcttgttctcagaggtcacctcttgaaatgaaggccatgaagcagaagacactgaagtcctttccaactctgatattccaggacatcaccatagaaatacctattcctataactaactaagtattcacatgaacatgattatgtacatgtaaacaaattttatcgaatcaacagtatagttttctcaatagccgctgctgtaggtatccaacatatatatttgaga

SEQ ID NO: 200878 - DNA, 1000 bp, Homo Sapiens
tcctgtaggcaatatgtagctgagtgttttagggttttttttaatccattccgttacttgatgtcttttaattagaaatgtattctatttaccttcaatgttattgataggtaaagctttactagtgccattttgttattctttttcttgttgttttgtaactccactcttccactattactgtcttcctttgtggctaagtgagtctcttgggtagtatgttttcattccttgctttttatttttaatgtatgtattctaggtttttgctttctgttacaatgaggcttataaaaaaccatcttatagttacaacaaatcattttaaatttataacaccttggctttgattataaaggaaggaaaagaaagaagacaaagcaaaaactaaataactctatactttatcctcccactttttgattttgtgttgtctcaatttataactttttcatatttcctacctgtatatctggggtggatctggaagtgccatgtgggggtaatggtctggaatctgatgcttcaggattctgccttgttctgtgttttaccagagcagggctggcactaggttgcaaggcccctgtaccctttccactccttcccccaagcagaaggggtgtctcctctctcctgcactttctggagccaagggagtagtaacctgggcacccttgtggctgcaataggtagtgttgcactgggtcacaccctgaatttacagcctcttaaaacagtgcagcaccagggctttcccaagtaccccatttgtttgatgtggctggctggcattgaaatgtgtttgggtccctgaggctactttagtcagtcaatggtgaagcagtctgggacttgagttccccccaagaagggaatgcattctcctctgcctggagcaggtcttaaatgcactctctgcaggaactggcctggaatcaaaggctgcaatattctgccaggtgctatgttccactgtgatggagccagcactgaattc

SEQ ID NO: 200879 - DNA, 1000 bp, Homo Sapiens
ggataagtactggctagtcagatgagtgtgggaagcagggattggaagagggtactctaggcagagggaacagtatgggtggaggttcaggggtgtgaagggacaaggtacgctcgtgtgatggcaggaatattggtgatgctggaggcaagggtatatggggccatcataggacataaatctgccagcagcaatggggacaagccatgaaggacttgatcaggtgtgatgagatttgaactctctccttaaggaaatgggagtgtccttagatatcactcattcaaccaacatttagaataggttcttaaggagaggcttgagtaatatgcgggggtgccctgggaggtcatgctgactagcagcacctccgacatttggtgggggacagaaattgtgctaaatgtactgcagtgcatggaacaattcaacacaacatgccgtgagaaccccagttgagaaacaccgcataaaaactctaactaaaagcttgaaagaaaacccccaaatatttacagggtccaagaagtgaatacttttatatatttaccaaatcttattaataagggaagaaaatattttctcttgaccctctctaagcgtcagacttacagggaataatttatttaagggttgattccacagaaacctaaaacggtagcattttaacttttgtatcttaatcaaggatattttaattgtctagttcttcacacaatttattcatttattctcatggtcattcatttggtcagcaaatattgattgaacactttttgtgggcaaagcactgctctaggcttaggagacacaacatgaacaagataagccaagattctgtcctcatacaagagggagtttacaaccccaaggttccaaaaggatataaaacatgagacagatgacttaattgttttttcttttttgcaggccagaattatttatgtgagatatctgaaaatgtaactagggccacatttcttcataactagacaagctt

SEQ ID NO: 200880 - DNA, 1000 bp, Homo Sapiens
tgtattgctgaattcttaattagaatttggaatttaacctgtctcctcttatgttacatagctttgtaaatgaattggccattcttatcagaaatgccaacaacttactgtatatttactggctgattcttggattcttggcattgttaaacgaactctgggaattttacaaaacagacacagctggacaatgtctagataagtcatatcaaacatacacataagaccattcatctttgtccatcaacaaacctacctctccttcaagaatgaatttaaatattatcttctctttgaacacttacaaatatcctagaaagaaatggctacatttcatgaatttttaaattctatcatactttttattgtatccttttaatggtatttggtatcgtgtagtgtttttgtttttctgatcttcattgagtgcaatattaagacctacactggtataattcacttcatagatgatgtgtatcatttagattataagcacttggaggatacatcaagggcaaaagcaagagatgctgtttaatgaatctttgcatgactattcacagtaattattaccttttaataaagtggctagcagagggagtaataaatgcttcctttgttcaaaaagtaacaatttaaaagtattatttaggggaaaattattcttccatgtgtgaacatgtacatactcaaagtagtcagcacactccatggtatatacttgatactcaataatatttgaatttttttttttagtatagaataggttatactctgaaaaataaacaatgaagaaaagaaagaggcagggtaagtgcccaagataacatggtcaggaacggtaaagcatataggtaggtctagatcaatagaaggaaagaatgtatcttaatacaacatatgaagatccattagagattttcacagaaccaagtgtgctctaagcagcatggaatggctgtattaatgaggtggaggagaggtcgagaacatctaagat

SEQ ID NO: 200881 - DNA, 1000 bp, Homo Sapiens
ggtccacgagaaaggtgcagatcggggtgcacagaagagcggagtccaaaacaccactcccagccccagtggacagagtcctcaagtggcagccctgcaactctgagcggatgccgagtcctcaccgggaacccgggcgcggctggtctgtgctattggcgcgggtaggggacgcacagcccaaaaatgcccgcgacaagcttctggggcagttctcgccagtctctctggagggagcctacgggttctgcgacgtttctcgcacttgctccctggcctcgctcccgtttccacccctcccacggaggttttcctttctggtggctccttccttgggtgtccctttggtacgcccccaccctggcggtgagctgcgaggctggcgcccgcgtggccactgcgcatgcggacccggccgcggggcggggccgcgcgaggaggagggtcggggacggaagcgcagagcacggaccccgccccctcgcggccccgctcgtgacgtcgcggggggcgccggcctccgcccggccccgaggggtaagagcgagcggctggcggatccgacgcgcgagaccgggaggggacgagggcgttgcaatcgttcggggcgggggctttccggggagggggtgctcaggtgcaccagcggcggcggaccctcagactctgccctcccctccctttaacccccttccagccggacgggaggcggggcagggctgagcatttgtgacacctacatttccgtggctcccttcttttcccccgacccctgtttatctcttcgccttccagaagttcttttccatcaggccgtcgcaccttgcgtgggaaggagcaccccacttggaagcaggaggcggggttcagatcttggccctacccctcctgtgttaaagtccgcgagcctcagtttccctcacagtattttttgcctcgccttacccggttttgaggatctgtacgagaaagagaaaggaagtggacatttgttgaattc

SEQ ID NO: 200882 - DNA, 1000 bp, Homo Sapiens
tctgaagagaatagagcccaacttgtgttttacttttaaacttactgtcttctatacctatgttttacacaattataagattattcttatttttaaagagatctagaaatgaaacccctgaaagagacttctccctctacttgcccataaagatcctccagttttccgcacaggctttttcctagacatggaggaagtgcccagaaaaatactggacggatatacaaaaacataatgccacaaaaattttcctaacaagtaaggcagctgcggaaagtcggccagcgtcccgaccccagggacctgcagcctgggacttgtgaaggcccactgtgtagctcgaggtttccagggcctcggccccgaatgggcgattttctttaaaacgccgaagcgcgctatccctttaaatccaggctgcaaggcaggcgggtggggagcagccaataaccttaaaagatgcgaaagtgtcaaaggagatacagtttatctccaacaatgggagcggatcagcaccactgtttacagtaaaaacagaaggtggggctgggaggaagcctgtctccgacgcggtaattaagtctgcggcttggaagcagatttgaccgagctctgtggagcgcgaacaatgtccgcagggctccaggttcagagagggactcgcttctccgccttcgcccgcgtccaggcaccagcgagctgcactctgcactcgctctccctggtccacccctacactgcccggacccgaggggactggccctgcgggcgccgccaaggcgactgagagcgcggcgcgcgtcccgagcgcctggactccgcgcagccgggcgccgcgcacccgggtgccggggtgggagccgggccgcagacccaagtgcgcccgaagccgccgtccgccgcctggcacgccgtctgccgcctgctgggcgatgtgtgcgcgagcccgtggggcttgcgcgcgccctgcggcgtgtgtactcacaaaggtgtgtctgct

SEQ ID NO: 200883 - DNA, 1000 bp, Homo Sapiens
gtgtaaacaaacctactgcattgccagttgtatgaaagtatagcacatacaattatgtacggtacacaatgcttgataataataaaaaacaactatgttactggtttatgtattcactatattatactttttgttgttattttatagtgtactcttattgatatatttaaaaagttaactgtaaaatagcttaggtgagtctttcaggacatattccagaagaaggcattgttatcagaggaggcggcagctgtatgtatgtaattgcccctaaagaccttcagtgggacaagatatggaggtgaagacaatgatagtgatggtcctgattttgtgtaggtttaggctaatgtgtgtggtttttgtcttagcttttaacaaaaaaagtttgaaaagtaaaaataaattaaaaaacagaaaaaagcttacagaatagagatataaagaaaaaatatttttgtacagctatagaatgtgtttgattttaaactgatgtctaaaaaaatcaaaagtttaaaaatttttaaagtttataaagtaaaaatgttacagtacgctaaggttaatttattattcaataaataaaaatatacttgtgtaaatatagtgtagccaagtatagagtgtttacaaagtccaccgtagggtacagtaatgtcctaggcctttatgttcactcaccattcattctttgactcgtccagagaaacctccaggcctacaagctccattcatggtaagttccctaaggaagtgtaccaggttttttttttttgtcatttataccattttttattgtactttttctatgtttgcatacacaaaaagcattatgttacaattgcctacaatattcagtatagtaacatgctctacaggtttgcagcctaggaacaataggctataccatatggtttaactgtgttgtaggttataacatttaggtttgtgtacgtatgctttatgatgtttgcacaaagaagaaatcacctaagaattc

SEQ ID NO: 200884 - DNA, 1000 bp, Homo Sapiens
gatttaatttatactggttgactacggatatgctgtgtatcttaagagtagaaaagaactgatgaatattttgttctcataagatacacagtaaaattccaacataaaataattcctaatatgagcacgaaatataccaaaaaagaaaaagaattacaatccttagatatctcacagttttacccacatcttatggtctggtaaaggatgtctgcagtgaaagatgaatgaatattgcataaaaccttatcatttaaaaactcagctaatctaagcaatagttgaacagacaaaaaatattgaatagaagatgtataagtttgagttctccacaatcacattctgaggccaaaatatgcattcaaaagcaagtttatttgggagatgatcctagaagctgggtgaggttttaaaagcatgatgctggctgggcgcggtggctcatgcctataatcccagcactttgggagtccgaggagggcggatcacccgaggttgggattcgagatcagcctgaccaacatggagaaaccccatctctactaaaaatacaaaattagacgggcatggtggtgcatgcctgtaatcccagctactcgggaggctgaggcaggagaatcgcttgaacctcggaggcagaggttgcaatgagccaagattgcgccattgcactctaggccaggcaacaagagcgaaactttgtctcaaaatataaataaaataaaataaaataaaataaaataaaataaaataaaataaaataaaataaaataaaataaaataaaataaaataaataaaataaaataaaataaaataaaataaaataaaataaaataaaataaaataaaataaaataaaatataaaataaaataaataaaataaaataaaataaaataaataataaaagcatgatgcaaaggaaaaaggaaagccaataatgatgtgttaccgagctagtaaactttatggacaaaagggaataaatactattggggtta

SEQ ID NO: 200885 - DNA, 1000 bp, Homo Sapiens
tagttgtgtggtagttctgaatagcaggaacctgacagaatatggcactcaacccaggtgagccatctctaagcacccacactgcagagcactctatgagtagctggcatctatcttgggtttgacagggcagatcttcgcatcggtgcctgacccctgcagtagccttgaggggacctctgcaatcagtccaaaccaatggccactgttcatggggccctgttccagccatactggcttccctcagccacatctcttctcgcctacctcccagccattgtgaaatggctgttccctctgcctgaagctctgttcctttccttcttctccactgacttcctcctaccctcctctagtcttaacctaacatcgcttcctcaaataaacctttcttgtctccttttctgttcttcagatcccctcttatatacctccagaatgtcataatgttatattccttcttgcctgtgtcccaactgtgaagaattatgggtatatttattagattgattttcctcactcacttgtaagccagtgaccatgtctgtcttggccactgtcgttattcctagtgctagaacagggcctgccatctagcgaacaaccaaggaatacatgaacgaccctgaaatgttgagaaaagcctgttgagctctgttgagcgcctgctcttaaagaagacagagctgtgtacaacccatttagaaagaggttcagtcaggagaagtttaaatggcaaccatttagatgtttcatgggaatcttggcttatcccgagaatgtcttcaccaataactcctcattctctggctgtgcaagattgaggcagcatcaggctgtggctttgggaaaaggaaagtcaccctcgtgtatgttaggtcatcccatgtaagtgtaccacatggatggtttgccatttatgagtgtgagttgagcatgcatccactcaattcactggaaatctgattgatggatgatcctgcaaagcactccagaattc

SEQ ID NO: 200886 - DNA, 1000 bp, Homo Sapiens
tggaagtcggcctgttcctgcggggattggagtcctctccaaagaggcccgtggctgtggccgtggcgccctggtccgggcgatccatggagctgggagggagtgagatcacagatttggaggtcggctttgatccctgatccccgcctcaggctgcagatgcgagtctgtttccagctccacgggtgggcggtgcacgtaatagacttagtctctcatcccagctaattggctgggaagctccagagtcctttgcagggagaggctgtgagatccaggctggagctcctgggctaggagtgcctggaccctcagtgattgttggcgatgaagacaggatttggtgcccacaagaccccagccctggatgggatggacgtgcagaagcgccaccactccgagtctcactggagggtttatcttgccccacctcactgctcttcctgtgggctctcgcagtctctcccacccggggctgcgtctgcagccgggcaggcatagagcaggggagcagcagagaaggcgcgagaagaaagggctgaggccaggttcgactttgagcctacagctaagttagtgatctcagtcagttcagcaaaactcaggagagggaggagagggccgccacgtccctgccgtcccatagctggaaatcggcaggccctttctgtggtgagttccacgcattaacacgtgcccagcacctagacagcgcctggccacggtgaggcgagagtgctgtgtaaaagcttccactgcaattgtcactcaagacacacaagtgttttccacagtggcagtgaccagaggagcttgaggactgctgacagcaccagctggtcgagacttgcttcatttttggattgtcctttgctgtttgattttttttttaaaccatgagcaggtattacttaagatgacttattttaattaagaaaaatataagaatgagacacagtagctgctttcattgattctgttcaaccgttgattggaattc

SEQ ID NO: 200887 - DNA, 1000 bp, Homo Sapiens
ttttattttttcatatgcttctaattcctggaaggcttatgttatcactgattttattgtgtctgacaatatttcaaagatataggttacattttgctttactatatacattgaaagatacaatcactttgggaaacaaaccaaaaaaagtgtttcattataattttaaatttacacatgcataatatatcagaaaaatactggatactctctttcaagaaattccaacatacacaacttggtgtacatttacttaatcctcttagtcattaatttaagatctacagacaggcttggtttctatacaagaaacagtcaatggtatgtaactacaataaagtattcaggagaaatgcgtttcagggaaagataattaagatttaaggtttttgtcttttctgtttttttgtgtaatttacaagatctgaagggcttaaccacagatgtgaatataaataaggaaaagttatcatatggaaaaaatataaattctcaaatgctgatgccaaaagtagtgttaaaattttgtcttatgaaatttatgtcatgggagaagggccagggccagggcccacatatacctaaatggtccaagcactaaaaaagtgtgcattttctttagataattctatagctggtattcacttgcttggaagaagtacagttctaagatgatagcttcacaaataacactgtcatttataagtcacaaaaatgtaataaaccagtcagactctatatagcatggccatatgaataaagataacaaactgccttcttgaaatcactacaactcaatactaatgaaactgtctagggtcaatggtcttgtagtctgaggtgttatctgagctcattgtctcacaaccaagaaaattaaggagcctggacacaagggtgaggttggagcaaaacttttataagcaaaagaaagaaagctctccacagtggagaagggacccgagtgggctgctgtttttacagttgaatccaaaagctt

SEQ ID NO: 200888 - DNA, 1000 bp, Homo Sapiens
agcaattctcctgcctcatcctcccaagtagctgagattacaggcatccaccatcatgcccggctaatttttgtatttttagtagagatggggtttcacagtgttggccaggctggtctcgaactcgtgacctcaagtgatctgtctgcctggcctcccaaagtgttgggattacaggcgtaagccacagcatctagcctatatcagtattttaaatagctttgtaatacaattagccttccatatcagtgggttccacatctgcagattcaaccaacctcaggtagaatgtatttagaaaaaatgctccaaataacaatataacaataaaaaacaatacacataaaaatacagtagcattttttacataacattttgtacatatttacatagcatttatattgcatcaggtattataagtaatctagagatgatttaaagtatacaggaggatgtgcatagattatatgcaaatactacactattttatataagggacttgaatatccatggattttggtatctttaagaagtcctggaaccaatctttggtggaggtatccacaggggcaacttcattttatttatggttagttcttatttatttagctaattgttagactttcaggttgcattaaaaaagtgcctcaatgtatgcctttatacatatactgttgggtacttgtctcatttactcaggctaaattcccagaggtggaatttctgggtcaaagaatataaatactttaaaagcttttgatacagatagccaaattgccctctcaagagtatgtaccaacttatattctcaactacaacaaatgagggtatcccttaccttgtatctttccagtatcgtaaatggtgataagtctttatacttcttgacatgtgatgaatcaacatggtctgattgtttttaatgtatatttctttaattatgactgagaataaacttttccccatacatttaatttttcttttgtgaattccgcggatc

SEQ ID NO: 200889 - DNA, 1000 bp, Homo Sapiens
atgccagcctggattcccctcccggcctcagtgtctctcctgggcggcaagaaggaccctgggactgtgcccactctgccgtccagggggccgagggaggtgcccagggagggggaggtgcgtggtggtgacgggcggctcccgcacagagcctcagacctgggcaggtgaggcaggcaggtgggtctggcccggcgcggcccgatgcgggggcagggatgggatggagccacttcctgtttctccacattctggaaagtccctgtgttcccaggcagagggggcacctcctccctgccagccctcctgggcgccgggctcctcaccacttctccttcctccacccacttccccagcggacgggcctgggacccgccccttcccctcctgcctctctcctcttttctttcccaatcaggcccttcctggtgtgcagaagggaaagctgattccacagcagctgggcctgcccgacccaggaggctacatctgtcacccctctgtctgtctctgtctctgtctctatctgtctctctgtctctctctgtctctttctctgtctccttgtctgtctgtctctctgtctccatgtctctctgtctctctgtcttcgtctctctgtttctggctctctttgtctctctgtgtctcagtttatttctgtctctttctgtgtctctttgtctgtgtctctgtgtccctctgtctctgtttctctggctctggctctgtgtccctgtctgtttcttttttttttttttttttttttttttgagagagtctcgctctgtcccccaggctggggtgcaatggcgcgatctcggctcactgcaagctccgcctcccgggttcacgccattctcctgcctcagcctcccaagtagctgggagtacaggtgcccgccaccacgcccggctaatttttttttttgcattttttagtagggacggggtttcaccgtgttagccaggatggtctcgatctcctgacctcgtgatc

SEQ ID NO: 200890 - DNA, 1000 bp, Homo Sapiens
ccacaaggtatttttttactctagcaactaaacaagcactggcctcaagataagcaatagtaaagcaattgtagctcactgccagatgctggctgagcccctgtttcacaagccatcactacagctttgattggacaagagactgattttagtaactttctcctgattcaaaaaccaccaactgtggactggttctggccagtttacagaggctgtacacttgaatgccttcatgttctgaaaagatctttgacatacaaggccaattgtaagacatttaaatgttaaatctccaccctgaagtgaacatgggtcatatgtaacatgcatatttgttcaatacacatgcatcaggaccccctttgtaaatattcatggctcctactgcaacctgttgaatatctacaagtttagccaacctgctcctgctcagcttaaatttctgtcttacccctccctccttccaagtccatgcttctgagcttccaccagaggctgcacttcccagccagtcacaatgggcaccctgtaggctgtaaccctttataagaaataaagtctcctttccaaaattataaattgtataatttttcagttaacaaactaaatgtggacttaaataaatttacttgagtaatgaaaaaacaaagaaatctacatttttgacatcgttatatgcagactaaaatgtattcatgacagaggtttatttgttcctttattttttattttttgccctctaaagagatttttgagagtttgaggggttgtttttaaggacctctccctaaataattaactattaaactagattattgcttcaatgattagaaagggtactgataaacaaaaaaagaaaaccctgaagttttagttactaccatattcccataaattttaatgacaaattacaggaatagagcatcaaatgactccatagaatggctccataatcaccctataaggagtgcagtgtaacacagaggactagataaagctt

SEQ ID NO: 200891 - DNA, 1000 bp, Homo Sapiens
cttcctcccctccttcttttcttccttcctgcccttttccctcctctccttcctttcttcctctctgccttcctcctttcttcccttccctcttccctccctctcttcctccctccctcccatgccattctgacaggtattattatcagcattgaggatataacttcgaaccagatggaaaagtttccttgccctcaagaaactgacattttggtgcagataaacagataatacatactaaataagaacttcagaaatattaagtgctatgaataaaactaaacaaggtaatgtgatagaggggctgataaatgtggatgaggggggccttctactcttaattgggtgctctaggcaagcttctctgtggagctggcccttcagctgagacctgaatgttgagaaactatgggaaatactgtcagccagacctgagggcttccattttccgtgtgtcagtggtggcaggtggggcaggatggtaatacctacctcacaggatgattgggattaactgaggtaacatgccaaaatgcccagaatagtgctttggtacttaatagccttgaattataatagtagaacttaaaaaggttcccacccccatttttcatgcctgttgaagtattcatcatatcatctgtataaaaatctgccagatatagaggtcagaataaaagatctatcagagccatgccttggattcagggtgtaggaccagacaagatgatgccagaatatagccctgcctcttgagattaccagtggggttaattatgttcctttatttgccaactttatttcaggagttggctggagcttggttatttgatggatgagttggacataggacttcccaatatgaaccacgccttaggttgacttaacccgattcctcctccccaaggaggtgagatgcagggacctctgaaggcagggccaacgtgctggcctccggaggcccttgagatatgctcacatgcttggcaggtcctccact

SEQ ID NO: 200892 - DNA, 1000 bp, Homo Sapiens
atggcatgaacacaagaggtggagcttgcagtgagccgagatcgcgccactgcactccagcctgggcgacagagcgagaccccagctcaaaaaaaaaaaaaaaaaaactaaatggagaggccaggagcagtggctcacatgtgtaatcccagcactttgggagaccgaggcgggtggatcactaggtcaggagatccagaccatcctggctaacatggtgaaaccctgtctctactaaaaatacaaaaattacctgggtgtggtgggacgtgcctgtagtcccagctatttgggaggctgaggcaggagaattgcttgaacccaggaggcagaggttgcagtgagccaaggtcacacgactgcactccagcctggggcgacagagtgagaccccatctcaaaaaaaaaaaaaaaaagccgggcgcagtggctcacgcctgtaatccctgcactttgggaagcagaggcaggtggatcatttgaggtcaggagtttgagaacagcctggccaacatgaagaaaccctgtctctactaaaaatacaaaaaaattagctgggtgtggtggcgggtgcctgtaatcccagctactcaggaggttgaggaggagaatcactggaaccggggaggcagaggttgcagtgagccaagatcgtgccactgcactccagcctgggcgatcgagtgagactctgcctcaaaaaaaaaaaattagcagggtgtggtggcacaagcctatagtcccacctacttgggaggctgagatgggaggatcacttgagcccaagaggtcaaggctgtagtgagctaagattgtgccactatactccagcttgggcgacgaagaaaaaaaaaatctcaaaaaattatctctcaaactatgtcaaaaaattaaaaataaaaaatttaaataaataaacaagctaggcatggcaacatacacctgtagtctcagctacttgggaggctgaggcggcaggatcacttgagcccaggaattc

SEQ ID NO: 200893 - DNA, 1000 bp, Homo Sapiens
gcaatgcttcattaagtggggcccccaagggttaaccaggaaggtggaggggacagaacagagcaggggaaaataaatcttgaggaggaggaagaaggggaagaaactcgggctggaatcactttgttttatgaatagtttatgaggcgtatcaggagtcaccctaacgggcaagggctggaatgttttctaactttaaagtgaaagccgcccaccaggctgcgagagtgggagcggcaaaatatgaaaaacacggaggcccctctctgcactgcccatctatcttgtaaaccatggatctccaaggcgcatatactagcaaatgtgtctcacttgggatgctaaaaccaccttggagttttacacagccactgtgcccagctaaatgttttcaggcgacttctctcttgcctggaaaagtatcatgggtggaccctgcggctgaggagacatttggaggggaggaccacagagccgggtgtggcacggggtggtgggggggcagtgcttacatctacaccaactgcatatacactggtcaccatggagcaaggaggaagtacagccaggactaggtggtcttgctgtggagctaaagaacacacaagaagcctcagaaagaaatctttatttgtccaaatgagcttgatgcctttagcagttctctctccacccacaggcaaagccacaggcgccccataaactgaccccactatccaaggccttggggaaacatttcctccatgccttccccaacccctggactccaggtctcaggatggagccccacacctccgtggttgacctgcctttgtctaggctgctcctatgcccttgcccatccctacaacttatcccagcaacatcccttgggttcttgaggccaatgtccaagattcccctttgccccactgtccaggcagtgtctgtgctcacactcacttctggattcaagccacggtctgaccctgagcctcctgcttgcttggaatgtgaattc

SEQ ID NO: 200894 - DNA, 1000 bp, Homo Sapiens
ttttatggagtcagagtaccacttgctagaaatctggttgggttgccactgctgcagaaggtgtactcagttctcaccaggctaatagaatctgggtaagcaaatagaaaaaaaaaaccattatttatatgcatacacatacatatatacacattatatatatacatacaagcgtacctcagagatattgtaggttgagtttcagaccaccacagtaaagcaaaaatcacaagaattttcagcttcccagtgcatgtaaaagttatgttactattctttagtctgttaggtgtacaatagcattatgcctaaaaagaacaatatacatgccttaatttgaaaatactttattgctaaaaaactgctaacaatcactgagccttcaataagtcataatctttttgctggtggagggtcttgtctggatgttgatggctgctgaatgatcagactggttgttgctgaaggttggggtggctctggcagtttcttaaaataagacaacaatgaagtttgccacatcactggactcttcctttcgtgaaagactcctctgtggcatgcaatgctgtttgatggcattttacccacagtagaacttctttcaaaattggagttaatcttgcccaaccatgctgctgctttatcaactcagtgtatgtaatatttcaaatactttgttgtcattacaactagtgtttacatcatcttcaccaggagttgattcatttcaagaaaccactttctttgcttaccataagaagcagttcctcatctattcaggtttgatcatgagattacagcaattcagccacatcttcgagctttatttctaactctagttctcttgctatttccaccacatctgtagttctgtctgccactgaaagtcatccatgatggttggaactgatttctcccaaacttctggtcatgttgatattttgacctcctcccatgaatgctgcatgtttttagtggcatctggaatggtgaattc

SEQ ID NO: 200895 - DNA, 1000 bp, Homo Sapiens
aagttttcaggaaacatatgaaggtgagaaatttgtctgcagttagtgtcagaatgtaccaccacaggctgacatcaggatgaagccttagtcctaacctcacatgattctttcacttacctaacactgcctaactgcagatttactctgctcaactctgggaatagtttctgaaatagcatgaaatatttgtctatttcacaacaaagatttgttacgtgtgactctttattgccctgtagccctgtaggttactgtctggcttaaactcttgatcatctaaattcaatgggtatataccataatgttccctgactctcttcctgggttctgatttgccgctttctcctgaccctgagtaaggtccagactgcttgtctgacttgctgtaccagtagcagtttaggtttaactgagcatcaggtctactctgctactcagtgcatcctcttctttttccaagcccagctttctatacaattaattgcaaaactcatcagatctgtatttctagctttaatgaagtaatcaattcaatcagttgatagctggcagcctcctgtgtaaaacaagaaatggcaggatctaacaaaattcagaaagtcttagatgatttacgtaagagatataattttcctcaatgcatttagagagaggtatgtacgaactgcatagactgctttatatgctcagtaaatacacatgaatcgtagcatagttcttctcctttaataactgttatagaaaaaggaggaatgacagtattgctcatgcaatacaggttttatagatcagagattttagtatctacggagactgtgacagtaatttataatttaaacttttccagcacagtaggtataaactggtcagccacaatccagggcatgaaacaaacaaacaaaaaaaagtaactgtattttctaaacttgtttctagttacaagtcgctatttcaaatcatcacaggaaaaaaatcaaccgtgtcatttaaaaaggca

SEQ ID NO: 200896 - DNA, 1000 bp, Homo Sapiens
cagggtaagggtgtggcagatactgccactaacacttctcagcctttccttctcctgccttttccaccccaccctgtgtttgtctactcccagccaggtgtacctttccaggggaagacctggccaacctgtccagctcaattatccagcagttctttgacctcactgagatctcgagtccattgttcatcacctcagctattgacctgtgtcattagccttatagagttcagtgccacggaaactccctgccctgttctttttctttttctttttttttttttttttgagacagagccttgctctgtcgcccaggctggagtgcagtggcgcgatctcggctcactgcaagctctgcctcccaggttcacaccattctcctgactcagcctcccgagtagctgggactacaggcgtccaccaccatgcccagctaatttttttttttgtatttttagtagagacggcgtttcaccgtgttagccaggctggtctcgatctcctgaccttgtgatgctcccgcctcggcctcccaaagtgctgggattacaggcatgagccattgtgcccggcctgccctgttcttcttagacaaacttgctgggctaaaatctaaccccgttaaaatagactatttacgtattgtttgcctctagcgcagcagaacattgctggagaaaaacaaacaaccgtgctaattggtctcattttatattcatgaccacaagcctcagtattatatcggagggcctatccagtgcagtagggcaagaaaaataataagttatgaagattggaagggaaaaaaaactaattcacaagcagtaggattgtatatgtaaaaatttcaaaggaacctataggtaagttgttagaatgagttcagcaaagttgttggacacaagatcaatatataaaaatcagttgcaatttctatatgtcaccaacagttagaaaataaatttcttgcctgggcatgttggctcaagcctgtaatccc

SEQ ID NO: 200897 - DNA, 1000 bp, Homo Sapiens
tttcaaaatattcaggcttaatgacccagttctggctcatgtctataaaattcagggaaccttagctaagccagttgaaatccatggagaaatggggtctcagagctgcagaggggaggagaaaaggacccagaacacagctgcctctgctctggcagacccaggagtctgagctaatgcagcaaggagggacccagggagccagaccttagtgatgggtgagccacactgtctccatgggcagagaaagtagcatttactggatggagcaggaactcatttcctttccaaagaaagggcaacctgttcaagtggaaagaagaagagaattattagcatgtgaagccttcagcttcttgaggcagaatggcaggaaatggttgcctggggaacccctgcagctcaggctcatctgaggtgggccagagaattgagttcaaactctgggctggccattttgtggctttatgaccttgggcggccatgtaatctctctgaattcagttgccttttctttaaagtggggagtaagaacacctctttatgggttattgtgaggacttcagggtgatatttttgaagtaccatgtacaagacaggcacttggtaaatgctgatcttcctctttccatcctcaatgaacatcatttctgtggtagctggtctctaaagatggccttcagtgagccaggcctcccaacattcataccctggaacctgggctagctctcaccaacagaatgcagtgcaaatgatactgtgtaatttcaaggcttggttactaggagctgaagcattgcagcttctcctgagcctcttggaaggcttgcccttggaatgcccctttcagaagccagctgccatcatcttatgaagaggacacgtataggcactatggttgagagctccagctgagtgcctaggcacctgccagcatcaactgtcagtcatgtgagtgagtcatcttgcatatccagtccggtcaagccttcagatggct

SEQ ID NO: 200898 - DNA, 1000 bp, Homo Sapiens
gaattatataccctaaagagaagcagggtaagtagggctaggacatcagggtgggtagttctactgttttgacagggctctcagggaaggcactatgctgggcagagaaagaaaacactctgcagatacctgaagactttggcacttgcttggaaagtgccacagtctgagggagaagactgctggggagagaagcctgctggagagagaagcctgctggagggagaagcctgctggagagagaagcctgctgggcaggcaagaacagtgagggtcatcagtgacgacaatggagggagccaggaagacagcaagggcaggccaggccaggccagagagttgtgtgttggacgtggccagaatgtgtaggactctgcagggcgtggtttttattctaaatgatgtgagaagccacggcagagtgttgaacagaaagtggtgtgatctggcctcatttgaaaagggtcagtgtggctgctctgctttgcagggagaggcaggggttggggctgatgctgggacaccagttaggaggcatctgtaataatcctggggtggctggagcaggtgtaagaggtagaagtggtgtaaggaagtgggaatctgggtacatcgtgaaggagcacagacaggataaatgacaaatctttccagcctccattatactctgtctcttaggttaatgcctctgttggttttttttttttccccagagactttattcccataggcctgaaacagtgtatttaaaaactgatctattatatttaaaacatgctacagtattttttaaaaggtttggagaagttgtaaatactgctgacagcgctccttaaaaacaaaaatccattccgcttaaataatctgctaattaaaatggcaaaggtaagtgaagggagttggaggaggggcacttcctcagtaacttaggtatcaatgaaaccagatctgagtgggcaagtcagagttgaggttttaaataaataatctagaaagggag

SEQ ID NO: 200899 - DNA, 1000 bp, Homo Sapiens
ttgtttccatcttgggaggttgtgtgtttccaggaatttctccatttcctctagattttctagtttatgtgcatagagatgttcatagtgtctccaaggatcttttgtatttctatggaatcagtgatgatgtcacctttctcatttctaattgtgcttatttggatcttctctcttttttgagtctagttagcagtctatcaatcttgtttaacctttcaaaaaaccaatttttcatttcattgatcctttgtactttttcttgggtttcaattttgtttagttctgttctagttttagttatttcttttcttctgctaagctttgggattagtttgctcttgtttttctagttcctttagatgcaagtttaggttgttaattgagatctttgtatcttcttgatgtaatcatttagtgttgtaaactttcctcttaccactgcttttgccatatgccagaggttttggtatgttgtgtctattttcattgtctcaaagaatttttttatttctgctttaacttcattgaagtcattcaggagcaagttatttaatttccatgtatttgtgtagttttgagtgttcctcttggtattgatttctatttttattccactgagatctaagaagatacttggcttgattttcaggtttttaaaaaaatttattgagacttgctttatgaccaagcatgtggtcaatcttagagtatgttctatctgcagattagaagaatgcattctgtggttgttgggtagcgtgttctgtagatgtatatatcaggtccaattggtcaagtgttgaatttaagtccagaatttgttagttttctgccccaatgagtgtctaatgctgtcggtggggtgttgaagtccaccactactattatgtggctgtcaaagtcttttcttaggtctagaagtaattgttttataaatctgggtgctccaatgttgggtgcctatttatttagagtacttaagtcttcttgttgaatt

SEQ ID NO: 200900 - DNA, 1000 bp, Homo Sapiens
gttggtgaaatgtgcaaaatgctagcttctcaatcatctttggatgcggaattgcttaagcgaaatgaagaaaaatattccctcattgttaagctacaactgtttcatcattggagtgttccacgaaacagcctatttcataccagttaagggcctagctagaatttcaaatgaatgcaaataagaacgtttgtaatgcaagttgcaaggtgggaggaacaactgtttatgtaattttcctctcttttcaactttcacagagcattgcataatgttagaatcagactgcttgtattttaatcctggcttcatcactaagagatgtaggcttttgaccagttaatctaggtttcagtttcccattaaaaaatagaagtagtacaggacctacttgtaggtttattataaggagcataaataattgatcacttgggtaaagtgttaagcaattccccaatgtataaataataaatttaagatggtaataaaattaaaaaatcacaaaagcattaaataaatattatctctttagcagcttggcataatcagtagaaatttgagttctacaaaacttattgctgaatgaggtatagatttggatattagacaagaattttttaatggtccttatattcattggttttaatttagtgggtttccttaagcttaatgtatctctagtatgatcatctccacaagaatagataatactttttattaaatgctagcttagtccacaaaactttgttttattaaagtagataaattaagcaatgaaactattgatacaagatgtctttatatctttcactccaatcagttacatagctttaaaactcagaattatttttgtgtacatccactgtgtagtacctgaagtgagatgaacttttatgctatgctttttttctatttggtattcattgagtagcttttaaccaatctccttcttctattatacgagttgctctactgggcttttgggatgcagaaatgagtg

SEQ ID NO: 200901 - DNA, 1000 bp, Homo Sapiens
tttctgattttttcattcatttatttattgcaatattttattcaacatggatatatagtgccaaccatgcacctgacatggatataacaatggacaagacagatagggtccttgcccacttagagtggacacagggtctggatgccaggcctgaccccccactgtggtatgaaaaccaaacaatgaaaccttttttacccaccacttatagactagtggaagtacacacacacacacacacacacacacacggagaaaaagagaaagagagctaattgtgatattaggatgcgagaggtgtggtgatggggaaggacaggcagccacaggaatgccagggaagtacacctaacccaggcttaggaaatcaggaaagacttcccagaggaggtgatataaatgctggaatctggatgataagtaggagtctgatgggaggggagggcagtgcttgctgagatggtgcaggtaggagagcgtggcacattccaggaacatggagtgggcagggtgtggggagttagtgagggaaagagatgaagctggagagatctgaggggccagctgtcagggtgggtgacctgttgaggatttgggtgttctcccaagaataatgggtaaccatggcagggctttccacaggggagtggcacaggtcagtctggcatttggaaagcctatttgaccacagtgtggagaggccatgaatggggcaggactgaggctggagaccagagaggaagctcctgcagcagtccagccagcaatgacttcaacacggtgatctgaaagacagcccgagtggggatgggggaaactgcagtgattcaagagagatttcagaggtggagctgctgggatatggggattgcctggaagggggttgctttcccagatttctagtttgcacagtagtgtgcctggatggtgggttcctctcccagttgggacgaagctgaggctgggaggaggatgctttagttcggtgtcggatggtggt

SEQ ID NO: 200902 - DNA, 1000 bp, Homo Sapiens
ttggttcacttttgccctttagcttcctctaggcagcactgcctatagtttgcttctgttgaggctgttctggaaaagaatgggcctcttgtagcatggtcccaattttctcctctgactgctcatgattcctgtcatggttccaacctggggattttaggcacttagtcttgcctaccaaaactttcatctcttctctctgcaccataataccaaatggaggagttacatgtccaatcttgttccctctagttaattcaaattagaactaattgtaataactgtctgatactctagagtttgtggtgtaaaaatgtgtacatgtatgtacaccaatatatgtgtgtccatttctctagattcatggtagatactctttttgataggcttagagaaggggcagtgtataaatatatgttctaatgctattgttcttggaaatctaattcatctatttaaaacaattgtgcttcataaatgttacaataaaagtactatagattatagaaaggactgtttctgtggtaggtaaaaaatgtgtttagccagctcccaaaatggtccccagtgattctcattctggcattcacacccttgtgtatccaacactgaatcatgactggcctgtgatgatagtatattgaggaaatgacagagtgtgacttccaaagctaggacataaatgatattgccacttctgccttgacctcttgggttactcacctgagatggaagtggaagtctgctcctgtgttgtgaggatactcagccatgtacagatacgcggtgtgcgaagggaggcttctttttcttttcttttcttttttttttgagacagtcttgctctatatcctgggctggagtgcagtggcgggatcttggctcactgcaacctccgcctcctgggttcaagtgattctcctacctcagcctcccaagtagctggggttacaggtgcccgccaccacgcccagctaatttttgtatttttagtagagac

SEQ ID NO: 200903 - DNA, 1000 bp, Homo Sapiens
tttacaaaaggagatagttctagtcaaggagttttgggtatgttacttttttttcttctttttcttttcatctgcctccatcttaagtgcaatttcttcagctgtaagagctcccagtttcttattctttgctttcttaaccttttccttgatgctggccacatcaattttagtttcagtagaagctagacaaattaaaagcacaacacatgtaatactttagattttaccaagtaaaacaaagaatatatgtttaacaaagaatatatgtttaaggcagttaacttcagagtattcttataattgaataattgaaaggtgatcacagtataaaatataaaaacacttgcctaaagcagttagaaatttcttcagattaagataaaacaaatcataaaatactttatatattagtacaagtatacataaaaatggcataaatggcataattgaaccaattactggattcaactatattaagactatttccttaaatcctacttcagactaaattattttacctacattcttttccatattttggaacttctgagtcattattttccatcttgcacattaaaataatttaaaattacatgtatcccttctcaataagtttaatcagctaaccctaagctagaggtcaaaatctacttcctctaatatcaaaacgaaaatttaaagttttccaaatattaattcaatattaattgaatattcaatgaattaattcatttaatgttagattaattcattgaatattaattcaatgaatgactaattaatagtattttaacaagattttggtatatttaacaacattttggtaataaagacaataatttgagagtgtgtggaagtccccctaatagaagccaactatctaatcaatgccaaaagtgtgaacaaaatagagaaaggaagcagtgaaaaagaatgcaactttttcttaccattcaaagtacaggatcacagcataaaagaatcataagataaaaca

SEQ ID NO: 200904 - DNA, 1000 bp, Homo Sapiens
ttattaatgacaacaatatatcaggcagccatacccaacaatagcatctgtgagagggaaggatgaagtagagaaagtcacatttgtgacaaaggcagaaggagccatgcaaaatattaaaattaaaatataaaacccagatgtgtgagtagtggacaggtgagccttgaaaacttgtcaaactaatgtggccatgtaatggatggacacttagagaactgcgtgccctggggactgagagctgagctatttttagttccacaagtagaggcattgtgtctcagaacagatagtcttttcttccagaactttaataagaccgcacctggcatagggtgttcagttctggaacagcaccacatgatgcacaaaaaaaaaaaaagaatccttatatgtaagatttcaggctttctttttctagaaagtaatgcagccacttttttttttttagtaattcctagcagtaaattggctgtttttactaatttggttcatccttgagagtatgaaaaaaattggatgcctattaagcaccccagaatgaacacatttaaatctaaactctggtcccttccctgatacctccactgaaacctgccctttcctcagtcttcctggccttggttcttggaattccatccctccagttaccccggctttagaataatcctagacttccttgttttcctcaaaccccaaatcccatatatcagcaaatcttggtagttctagtttcagaatagatccagaatctgaccatgtctcacaatctccactgctaccacactgatcaccaggatccctctgatcacgtcacttctcaaaagtctccagtggcttccaaatcagggtgtccaggccggtatgatgcagtgtggcacttcatacctcttagatcacatcttctacacctgccttgcccactcagctcaaccacactaacacgccgggcagaatctggttatgtctttataaatgcgattccctggtcttagaattc

SEQ ID NO: 200905 - DNA, 1000 bp, Homo Sapiens
taccatgtctattcacagaaaatgctcaaataagggcaccattttcaggattagcaagtaaatgccagtaaaaagcaaatttgtccaatgtcttgcttatgtggctaacagtttaaatgtgcagtttcttttaatacatatatagtaacaatataggtggccattccttcactgtataggtaaaaatattaacagcaggatagagtttaacagtaataatgatgagtggttagatattaagttacttagtttataagtcttttcaggcaggcaggtaggtccctgagtgcaaggccaacctggtctacatagcaagtttcaggcatagctgcaggaagagattcattgcatgtatgtatgtataaataaataaataaataaataaataaataaataaataaatgtatttttgtataaatgtggtaatagcaggtaggtctctgagtgcaaggccaacctggtctacatagcaagtttcaggcatagctgcaggaagagattcattgtataaataaataaataaataaataaataaataaataaataaataaatgttatttttgtataaatgtgctaattcaaatttgcaaaactaaacattgagttttagacaaatagaccttcaactagtgtggaatatatatttaatttctctacagaggaacttttcaataagttaaaggaatccaacacttcaaaccaatttttaagaaatggattcttaaatatcaacgatgggagtgttttcttatgcagacagccaaaatcccaaccagtggtttgtagtagtaaaacagtttacatttatcacctgaaaattttttgggattcatctgtgtcaggttcatgaaaagctctctctcagagatgccagaaatgaacaacagatcagacacagagtatatatttccctttctggcagatacataggtctggttttccattcctttaaatgttagatatatccaattagtagcaatcccagatgcatgctttgatc

SEQ ID NO: 200906 - DNA, 1000 bp, Homo Sapiens
tgtttctctggacaacactaaccaatacactgggtaaacaatatatcattagtaggatgaaatgtaccaaccacttaagagaacaaactattttccaaaagataactttccagacaattaatatgctatgcgtgattcctatctatttatgagaacaggtctggtagaatctcagcttggcaacattttgtgaactatcaagttgagttcttcacgcctattgttttctttctttctttgtttctttttttttttttgagacagagtctccctctgttgcccagactggagtgcaatggcaggatctcggctcaccgcaatctccgcctcccgggttcaaccaattctcctgcctcagcctcccaagtagctgggattacaggtgtgcaccaccatgccaggctaatttttgtatttttagcagaaacgtggtttcgccatgtttgccaggctggtcttgaactcatgacgtcaggtgatccacctgcctcagcctcccaaagtgctgggattacaggcctgagccaccacgcctggccagttttctaagtttaaaataatgatggtactgagcccctttggtggaataagtaccaataagtaccatcatctctgactgagatgatggttatgaatacctccctgaaaaaaacactctgccttagaaagacaaagagacccaaatctctgctatgcactgcacttgccacagactgccaggggtggctcttcagaactttcttcctccttagttttagtgaagagtaagaaatggcagggtgaattctcaggtcaaatgcagggaaaagtcatttgagttaggaaaatcatctcagaatttcgtctcttgaagtagcaattggtagtgagagattagatttgacttgctagaacactcgctgaaatgcactcttttcgcttccaatgcaagtgtagcaagagacgagagtgcaagcagaatgctgcttcagggagaaaagctgtaccaggagccaagctt

SEQ ID NO: 200907 - DNA, 1000 bp, Homo Sapiens
actggccgagagtgatgggtgagcacaaaagcaagtatttatctctctccccgggggaaaagcttcagagaggaggatcaaagtcatgtcaaaggaaacacaaagtttcaagaagctgcagcagattagatagtgtggagttggaaaccaggagaagagacagaagcatgtgtcaagagccaagatggagcagaaagaaaggatcaggaagaatcagtggcctgtgttgagatggcatcaagccctagcagctttcaggggaaaggtcaggctcctcaggcagtgctcacagcctcgtgatttggcctctgggccatgatcaggctcctcaaagtctccctggaccctagacttataagaactcttccctgatccccaaacaagcctcctgtcatccctccagccacagcctttgtatctttgtccttcagcttcaggactactctctggaaaagctttctcctcatcacccccaaggaggacatggctgcccctcttctgtcaccctgaacatgccctccccattattatcttgctctattgcatgtcttcagttcctcctctgtgccctctccagcttagaagatagaacacaaagattctatgagctgaggagggtccagagatggccatgtaaatgacccaggtcaggggttcctcatgagagctgcacatcagagtcacctgtagtgccattcccaaatccacaagctgtgccttgattgtgtaggtctgaggtgaggcctggaaaacagagtctaaaacagtcccagctgggtgctctggctcacgcctgtaatcccagcactttagaagcccaaggcaggtgggaggtcaggagttcaagaccagcctggccaacatggtgaaaccctgtctctactaaaaatacaaaattagccgggcgtggtggtacacacctataatcccagctactcaggaggctgaggcaggagaattgcttgagcctgggaggcggtggttgtggtgagctgagatc

SEQ ID NO: 200908 - DNA, 1000 bp, Homo Sapiens
attaggagaaatcttgaaaggttgctcccgcttaaaagttgaccccatttgataatgtagtggagtatgagacaactgctaagtgtggtgtatctttagccatattatttccctaaggtaatcttgtttcttactactctaggaaaactggtcattcccaaacttctaaatgtattaccaagataacttctagattttcttcagctaattctcataagcatatatactttgaagttggacaaaagaatttttttcttccagagaagaaacaactggtttggaagatatagtagaaatacctatatattgcattccatatttttttccctcagaattatttgattattttaaaaatagagagaatggtgatgactttaccaaaatcttgtatttaaatggaaatagttaatggcagagaacattaaaatcttagattactgattctacctgattggaaaaaaataatcttttgtttatacaggcttctgtggaaatgagctaaaaattgtagctgaattcaactgttagtaatattctccaaaaatacatcaaagtagataaagaggctaaaaagccttgcattcatgaattaaaaaattggaatttctaaggagaaaagtcagttttagttttcttccccttcccctttgttttcctttcccattcatctccacactcattctttctttgtttaattgtaactatggaggcaaaaactaagtgtatgtgcttcttatgtcgtccaagtggagaaatttttaagcaaattaagaatggccaggaactaaatgataaaaatagagatgacttataacactatgtttacatttatgttatgatatggcctatcagtgaactaaacaattttatttttgtcttgaaaaattggctggatattttgttaccatggagaggtaggctaaattcagccataagattccaagtatattcagtgaaaaagaaaagtttgccaactaaatgatttactgttatcaggatc

SEQ ID NO: 200909 - DNA, 1000 bp, Homo Sapiens
ttcattgtgtgcttatctttttaatgtcaatgtcttccactatgctgtaatatccacagagcagacactaggtgtgtctttctggtttacctcagtttccttagcacctagcacaatatctaacacatagtaggtgctcaatacctatttgcggaatctgtgaatgaatagatgagcagaaatcatggcttagggataccttttgctatacagacagttttcatttaaaaggcactagtatttaattccactttttaaagattaaatacagataaatattacactattgagttaaacgggcttatattcaaatactattgaaccacttagtgactgtgtaacttgggaatgtttcttccttctctgcatcttgggtttctaagctgtataataaggataatagagcttatcttatagttaaaagtgctcactatttttccttacaactttattgtactttccaattttcctactgttataatcaggaaagagcaataaatattattttagaaaatgcctgcctcaaagttgtcatgaagattcttattatctactaatttgcaattcagataccatattaattatctatgctgggtaagaagctccaaaacttggtaacttaaaacaacaatcttcatgatttctctgtggctctggaattcaggagtggcacagcaggtcgtcctggctcaagtctctcatgaggttgcagtcagatgccaccagggctgcagtcacctgcaatctactgactggagatagaggatccacttccaaggcagctcactcacatggctggcaagctggtctggctgttggttgggtgcctcagcttctcttctttgtggaggttcttaagtatcctcccagatgtggctggttttcccctgggcaagaatccaagagaccaaagcagaagctgcaagcctcttaggacccagccttggaagtcacagagtgtttgttacttccaccctattttattggtcacagagagtca

SEQ ID NO: 200910 - DNA, 1000 bp, Homo Sapiens
ttgttacataattgcttatgtctgatgtttttattatttgcttttttgtttccgttttctttccctccatcttgatctagttctgtataatgttgttgcgtgtatctctttgtatagtcttaaagtgtttgctctggatgttacaatatgtgtattgtaatatagtagtctactggtaccagtatttaccacttcaaagtgtggaaacctgccttgcatttatgtctctttaccttttccacttgtataaatcactggcttgagtagtacgtggtggtatagtttttgtttcagtcgtcaaatgtgattttaagaactgtggattgtctcgtgtatgtatccacatttctggtctttcctttgtccctcctcccatagtcccatattcatcccttctgcataagaactttctgtagccatttttttgatttttttgttttaattttttgtattgtggaaatgacagaacatatttctgtagccactttttagcatttctaaatcgaccagtgacaaattcctatattctcttcctctgagaatgtctttatttctctcttcatttctgaagggtagtttcatgggatatagaatttgcagctgacagtttttttgtttggttggtttttttgtttggttggtttttttaagcacttgaaaatgttgtgccacttccttctggcctccatggcatttgagttggcatgtccctacaggcattctgccatttttgctctttgtttttagttttgaaagtttaatcagtgttgctttcttttgggatactttgaggtttgctcagcttcttgaatctgtaagtttatatctttcaccaaacgtgggaagcctcaggaattagttatttgcatgctttggcagctctggtctcctgtgggactcagataacataaatgcggggtcttttgttatcgtcccacaggtccgtgcagctctgttcgtttgttttcaggctattttctctctgttgtttagactgggt

SEQ ID NO: 200911 - DNA, 1000 bp, Homo Sapiens
tcccacccacactcccaatttccctaccctagctctatacacagctcttaccactttccaaaaatatacatgacttactaactttgtatctgctataagcacgtaactccaaatacgtgtttcttcaatgactgatgccagcatctagcacaaaggagctcaaatacttgctaaatcaatgaactgattgctgcattaataatcaaccaattagtattaagattgaaaactaggtctccagacaagattataatttctactatgttgaaagtcctaaaaccttgatggtttttgtaatcccataaatggaaacagacttttgagtactaaagacagaatgttaaacggaactaaaagtagggtgtttctttatttttttttttttaagacagggtctggctctgtctcccaggctggagtgcagtggcatgatcatggctcactacagcctcaacctcccacctcaacctcccaagtagctagtattacaggcttgtaccaccatgcctggctaatgtttgtatttttagtagagtggggtttccccatgttggccaggctgattttgaactcctggcctcaagtgatccacccacctcggcctcctaaagtgctgggattacaggcatgagccactgcaccaggcccaaatgatgcattttagaaggcaaaactgaaagatctacatgttggtaaattttaatgtagcttagcaccaaaaatcaggatgctaaaaaagacttggaaatcacaacaagcttgatcaaatgaagtataaaaatctactaggacatctaaaaatccagcaatgtaagctgccttcagggaggacaaatgaatgactgcaagaccctagtgtgaggcagagactgcactgtacaccctctcatagcctttgaaaataattatgtgaatgtactgattttcaaaaacagtgaaaatttgaatttttcttaaggacaagatagataaaacatatatggaagctaaatgagaattc

SEQ ID NO: 200912 - DNA, 1000 bp, Homo Sapiens
caaatggtcactttttgaaaaatgtgtcatacaacatgtaactgtagcatgtatgaaatataggaatgtgaaacaaagctaataatgcgtatatcctatgacctagcaatttcatttttgagcatcttgtcattgagaaatatttacatatgtgtcaaaagagtcacattaaggaaagataatggcaatatttgagacttgcaaaagagttaaagctaagtgttcattcagagaaagattggttaaatgaattaattaaatgaataatttattaaaataagtgaacaaataataacatccataaataatcctatagtttcactttttttgttttgataaactttattgagcataaaatgcacagacagcaaaatgcacccattttaagtgaataatgtttagacaaatacagacaaatgtctacaatatcatttctaatggctgcatagaactgcttcttaccaagcagtaatttctgttttcctggtcataaagactagtttagggatgggtccataagccaagtcagcccaaactgagccattcctggaatttctggtgaaaataccatatttgattgccagttccaaagagatggatgtttaagatgtttcaaatgttgtactgttataaataatgctgagataatgaatatttttgtagccaagtcattgcacacatttttgaaagaactgtggactctccagggccattttaaagtaattacttttacaaaaaatcatgtaacatgtaattatgttattttcttagtccaagtgcctagaaggagaaattctgggtggaagaatagaaaagatctattgctaaatttcccctcaagaaagaatatgccaatttatactctcccatgctccaaacctctacctattattttatctcctctacttattattattgccactttggtaagtacaatcacacatatatttgagcaaagcttactgctatttgaccaagtagatacaagagtttggaattc

SEQ ID NO: 200913 - DNA, 1000 bp, Homo Sapiens
aattggttacaacagggaagttttatacagaaactataatggctatgcctacatgcacaagacctgcacaaaatcagggcacacaaaatcccagcactgatgggtaagggaaccgtgactcctcaccctagcctgaggagctactgataggatgtgggtcttgagagacccccagactcctgttgtgaatggctatgcatgggcagcaccatgtggactctgagttttagaaacagagcacgagaagcctggagcagcctgtgtgagggtgaggcactggggaaagggaaaaggtgggtttgatcaaaacactacatgcatctgtgaattctcaaagacaaaaagattcaggaggaactgcactggaagttcagtaaggactacgttagctggaactatacaaggcactcttcctcttttacatttttctgtgttttctaaattacactgaaaattattattttattgtttcctcctaaaatgaatcacttatgcctactgttcattacaggttcatgtgcagtattggaaaggagcttatgacaggccttctaacacactgtcatttgaatagctatggtggttaacactatcaatgtgacaatctctgggcatgcctgtgggtagcatcttaccatgggctgggatcccaattgaataaaagaatacagtgagctgagcagtaacattcgccactgcttctccactgtggatatcatgtgaccagctgccttcagtttccgccatcgtcacttccttgccatggcagagtctatccttgatagtgagctcacgtaacccctctctccctcacacaatgcgatggctgagaatgtgccataagcttccagttgttgtttttacattaagaacaattttgagatgtgtgtgtgtgtgtgtgtgtgtgtgtctgtgtctgtatacacctgtgtggaggtcagagaacaactttcaggaattttcttctttggccaatgaatggctcccagggattgaattc

SEQ ID NO: 200914 - DNA, 1000 bp, Homo Sapiens
agctggccagttgggccggggtcaggaataggaatgaagggaaagaggaatagcaatatttttagggaaaacaaatttgcctaagaatttttccttccattaaaaaaaaattcagatggagcatttctttgggcatgaagacaattattcaacatcaacaaaaaagggttgctgctttgtttttattgccctcaaatgatttaaaaaatctacatactaggaaaaattgcatgtacaatttatatgtattttctgctaatcacacatcccttttccgctagctcaggtaaaaatcaagttttttttgttttgttttgtttttaatccaagtatatttccaatttcaagtgcaaaagagagccaagtcaaggactttatgaagaaaccagaagtaagaatttgctctcagctaatccattcagtttctcagagccttgttggctcattggatcacattagaaaatgggcagtctacttaggatttgctgtgaaatttctaggtgcttagacccagggccacttgagcttctagtaaactgatggaccttagaattctgccagacatgtttttcctgcgacacaacagcaataattttataccacatactctctaacttcctcctttctcacagactcctaattctgtcatcttctgcatgctataaaagaatcagctcatcttttgatccacatacataagggtacaattgtggagaaatacaatgaatcctgaagaaaacatgagttttgtagttatcagttccccatcccattccctcagaatttattaatatttttaaagacaaagactgctactgtgacatttgtgaatcgccttgagagctttttatctgtctctgagcacacagcctgcatacaaggcaagccagaaaacagatgttctggaagcaactctcaaccaatcactgaaaggagggcctcggatttttcactccttaataagtctgcagtatgttgtcctacaccggctcccagaatt

SEQ ID NO: 200915 - DNA, 1000 bp, Homo Sapiens
ttgggctgagcttgagttatcacttttgacccctgagataaactaatttttcacatagctattcttctgttcttttacaagctgtgaacctggcattgcatatgtttcatatttgtaggctgtctctaagctgaattacaatttctgtgaaagcatctctgaatgtcatatggcaatctcaaatgtagaaatccaaagtccatgaattatataaaggacaaatttagcatacattttctgaaatttcaaagtccctggtatagtacagaagctctgtactatcttggttcttaccattggctctaagttcctggtcattctaccacagggctccataagaagtcactgagatagagatggtggtttccgacttttgcccattgtattttgccctgcaggataggagaggagggatgtcttaagattgaggagtccttttggatctactgtttatatgtatacttgttcttgtcagtgcttataaatagatacatgtagatgtctacatctgttaaatatatatgaatataagtgtatgtgtgtatctatgtatctgtatatatgtgtatgtgtttatatatatatatgcgtgtgtgtatatatatgtatatattccttcctgattttctcataaggcattgatattcaactgatatagaaactttaaacaatgtttacacaaaaattctgactgatttgcgtatcaatattgtatttcataaaaattatgtttcaaaatataatggggttcagttaaggccttaggagtacacttctaaagctttgacttcttgatttttaaaataccttaaggcaaaatacatggctgatgagactgagtcagagaaaatttcagttatcataaatgaacctcctctaaggtattattactaatagaattcaatatagttttacatgattactttcatgattgaagtgtcccaaagcagattcaacaataaaattgacaaacagtgatggaaggaatggtttcttttat

SEQ ID NO: 200916 - DNA, 1000 bp, Homo Sapiens
acctcccatgtaacacaagctgacaggcaggtgctctgaaaactgccatgcctgagaagctggcgtgcctgaggagctcctagcagtgctaagaaaggtgtaggtcagaggttctttctcacggtggaaagaacggcacctgtcccctcctgaaaactggccccgggcaggagagggtgaattcggggaggatcccatctcttgccgttgaaccatttggctggagaatttgctgttccctgtggggctgggcctgcctgctctggtgtgtgacaccctgacccactttgtgtggatggagacacaggagccctaaggggaataatatgggctgaactctgtcccccaaaaggcttatgtggaagccctaaaccctaggacctcagaatgggactgtatttggagacagggtctttacagaggtgattaagctgaaatgagatatttacggtgggccctaatccgatgcgactggtgtccttatgcaagtaggagagcaggacccagataaacagaggaaagaccactcgaagacacagggagagggcggccatctgcaagccaagacgaggggcctcaggagaaagcaaccctggcacctcgagctcagatttccagcctccagaatgggagaaaatgtatgtctgctgtttaggcgactgggctgcagtgcacacaaacacaggagcttacagcgaagcccaaagcctggaggcagttccagcagaaatccggtgaaaatgcaagcctgaatcttatcgggcctctagatcttttttttttttttaaacagtcttgctctgtcacccaggctgaagtgcagtggcgcgatctcggctcactgcaacctccgctccccaccccacgggttcaagcaattctcatgcctcagcctcccgagtagctgggattacaggcgtaaggcaccatgtctggctaattttttgtatttttagtagagatggggtttcaaccatgttggccaaactggtcttgaatt

SEQ ID NO: 200917 - DNA, 1000 bp, Homo Sapiens
aatctcactctaggcacagaaatactggctaggcaagaaatcctggatgttagagctgttttggaagcagcatttttctaaaaaagcattaagtacataaaatttctcatttgtgccacaagttttgctcaagtcctaccctgtttacctaggcctcattattaccccattatagtattaatcagtgccatttgccaaaggaaagctttagctctcctccttcttagtaagattgtttcacctacttctttgaggttggatgtggccatgtgacttgctttagccaatgaaggatgagcaaaagtggtatgtggcacttctaggtgaaaactttggagccagtatacaatttactatattctcctttgtgacacgtgtcagaatgaagcctccatcagtccagatccaagaacaattacaactaacagagcacccctggtgacaccccttagacatgtagcgtaggggagaaagaaacatttgttatatgagccattgagatttgggagatgtttattgtcatggcataacccagcttatcctgaccttccagtttcacctttttacaactgctgctctggctccaaaacaagagcacctgtctgtaattgacaagcttaggagaatccccatggaatagtaatttaaaaaaaaaaaaaaacataatggaaggaaaagacaagggcacagtaaacctatgttcaattgaccatagattttcattaagtgctcctgcctgactcatttaagatgcttcacacacagtactatgctttttaacatgaatagtctagtaccatgtttaattatcatcacctttgtcttgttcgggaaacagcagatgttacagtgggcaacaagtaccttgtgttatgaactgattgtttgtacccaaatttcatatgctgaagccctaacccccagtggggctgtatttggagacgggggctctaaggaagtgattaaggttaaacaagttcatgagggtggagctctgatc

SEQ ID NO: 200918 - DNA, 1000 bp, Homo Sapiens
ttcatctaactgactgaaaacattctgttggtgtagcagtttggaaccactgttattgcagaatctgcaaaaagatacttgggagcactttgaggcctatggtgaaaaaggaaatatcttcagacaaaaagtaggtggaagctttctgagaaactgttttgtgatgtggccattcatctcacagagttaaaacttcgttttgacttagcagctggaaacactgtttttgcagaatctgcaaagggatatttgggagcactttgaggcctgtggccaaaaaggaaatatctttagataaaaactagaaagaagctttctgagaaactgatttgtgatgtgtgcattcatctcacagtgttaaacttttattttatggggcagtttggaaacacagttttttagcaatctgtgaagggatatttaggagtgcattgaggattattgtggaaaaggaactatcttaagagaacaaccagaaagaagatttctgagaaactgatctgttatgtgtgcattcatctgaaagaggtaaacatttctttagaaggagtagtttggaaatatggcttttgtagattctgtgaaaggatatttgggagatcattgaagcctatggtggaaaaagttatatcttcggagaaaaattaggaagaagctttgtgagaaactgctttctgatgtgtgcgttcatctcacagagttaaacctttcttttgatggagcagtttggaaacgcaattttgtagaatctgcaaactgatttttgggagcacattgggaccagtggtgaaaaagaaaatatcttcagataaaaagttcaatggagctttctgagaaactgctttatgatatgtgcattcatctcacagagttaaacctttcttttgatagagctgtttggaatcactgtttttgtagaatctgtgaagggatatttgggagcacattgaggcctattgtcaaaaaggaaatatatttacataaaactagaaagaagctt

SEQ ID NO: 200919 - DNA, 1000 bp, Homo Sapiens
cagttgtttcctataactgatgtttatattagaaggcaacctctctgattatcgtttaattcacttatgatttaattcaatggtccatagggataagggtcagggaagaacagagaggaaaaacctagaaagtgaggcttcacaaccattcagtttcttcttgcccattgttaggggcaataagctagagtagtttgcaaaacaggtgtcagtgttcccctcctagtagtcatgctcctttctaacataattttgaggcttctccaatcaagaggatgctatttcacttctttttgaatttgggctggccttgtgattttctttggccaatagtgaaaatgtacaaattctgagtcccagccccaagaagtattcatgcttccaaggttttacttcagaacttgcttccatcatgcaaacaagactgagttgcttgttagatgatgatggcacatggtgcagtcactgctgtggctccagttgaacatccaggttaccacggatacatgaagaagctcaaccaagatgaatcgtggccagattagcaaagacactcagctgacacttagacttgtgagatatgataaatgattattaagtcacaagtatttgggatggcttgttatgtatcaataaaaaaaatacagttggtctggctaattaggggaaaaaaaacaaaagccagggtttttgtttaacagataagaatgaggtatactaacatcccaggagtgtcaggaatacatcagaaatgcaacccaattctgttcaattttatagagctgagattgacaaaaatgtagctgtttgaataaaaaggaagagaggattgcaaagattgtctttgtgtcatattacagaaaaaaatggagaaataattttgcaatatatagcctctatattgtttttctcattaacgttacagataaaaatagatagaaaccagacctctaggaatcttcttttcattgcatgtcccaatgtactctgtgaaaagctt

SEQ ID NO: 200920 - DNA, 1000 bp, Homo Sapiens
tgcatttcatcaacacatacacatggcttggctgtcacttgaaactgcttcatgtataagaccatagtctctggatctacttttcttcaataaatcctgttactcttatacttctgtgctttcacttattctgaacttgatgcggtttcctcattctgatctctagttttacacctttccattttcttcctcctgcatccttccaaaggttgttttgaagataacatgagatgatgaagggacagcatggcctggagtccaggtgtgaggcagcactgggatacaaaccactttctagctttgctcatctcttcttcagtcagtcccttattcatctttcatccatgctgtcattggcaaggaattgaccttctgttgccattctcattttcccttggtgaattcagtcaatccttttgctctctgttcgtattatgcaaatataaaaataaaaataatcctgataatgtgtcctgctgaaagaagaaaaaaactatctgatctcactgggatccaatgcagtatgactctcccttatccatttttaaacaagttctaattctgaacactttccccttgctaaagtccctaaacagatctctttgctacacatcccaccagaatgtcaaatagcatctgtccagcttgcttgcaaagtcctcctctccagctcccagtataccagggtctgtgcatagtcttctttcctttctcctcactgtcttagaggcaaggtctgttcttttctctgaggctaacccctttgccacctttctctgggcctccctgtggcagcaatcagtctttctctgtcctttgcaagtcctttctcttaacaacaagatactagtatcttctttattacaaagaaattctgtagtctgctatacttacctcccttcttactcacgttctccaaagcttgaaatcatgctctgcctccaggtcctcacttcttatactaaaatctggctttgtttcctccacactattggaattc

SEQ ID NO: 200921 - DNA, 1000 bp, Homo Sapiens
tgctctatgggtttgaaaattctcaggatgaaagtggaaagaatagaattgtttattaaagtagccagactcaagcagtgtggaaacagaagttcctgttaaagaataacagtgggggaagtttctcaagaaaatagttggaagcagggatcacagatgggctttcactggattgccatctctgacagttagtactggcggccagacgtggaagtgcgtgggagcgtggccgcatccgtgacttactagcagtgtttgcccagggcctgggacatgggagtggtggggcatgtcccaaatgtgctttgatatttacagcgttacagtctaattattcttcactcttttcagtcactgcctcctctgaccggccctttattgtgaagcctacatttcctttggcgtgaaactgggccagagctcctcagatccttaaaagtcaagtgtctgaggcagctttaggtcagggtctttgagccctatcaggctttaggggtggagtatggggagaaggccctttctcctaggaggggactcctatataactttcgccagattctgtaaaagatttaagacctaaaactccagtcctttgcaagttggtggcgggctttcgttctgctgtcctcctgcccgatcggcagggtcgggctcctctgcccggctcttctctgtgctggtgtaatgacgccaccgcgagcggcttctcttcctagtccaaaaggttccccctttgctcctgagggcgtgtggatttttgcatcaagagcaggtaattttctactctctttaagaggtgaaaggagcctgatcatagtatgtgctcaataaatattgttgaatggatggttgaaataattacacacttcttttcccaaacagctttcccgttgaaattagttggtgttcttatttagtgttctttgaatagaatcacatggattggtttccttggctacctgttcagctttcctttccctactcctttccctactccttt

SEQ ID NO: 200922 - DNA, 1000 bp, Homo Sapiens
atggccaataagcacatgaaaagattctaagtatcactaaccattagggaaatgcaaataaaaactacaacgagatatcacttcatacttaactagagtggttactaccaaaaacggaaaataaatgttagtaagaatgtgaaattggaacccttctgcattgcttttgggaaatctaaaatggagctgttgctttgggaaaaagtatgacaggctcctcagaaaattaaaaataaaattaccatatggtttagcaaactccttgctgggcatatacccagaataattgaaatcaaggacttgaacaaatacttgcacacctgtgttcattacaacattatttataatatccaacaggtggaaacaacacaaatatttatcaacagatgaacaaataaacaaaaatgtggtatactcatccaatgaaatattactcagccttcaaaagccttcctgtcacattctactacatagattaatcatgaggaccttatgtgaagtgaaatgttgcggaagtcagggaccccaaacggaggcaccggctgaagccatggcagaagaacataaattgtgaagatttcatggacatttgttagttccccaaattaatacttttataatttcttacgcctgtctttactgcaatctctgaacataaatcgtgacgatttcatggacacttatcacttccccaatcaataaccttgtgatttcctatgcctgcctttactttaatctcttaatcctgtcatctttgtaagctgaggaggatgtatatcgcctcagaaccctgtgatgattgcgttaactgcacaaattgtttgtagagcatgtgtgtttgagcaatatgaaatctgagcaccttgaaaaaagaacaggataacagcaatgttcagggaacaagggagataaccttaaactctggctgcctgtgagctgggcggaacacagccagacttctcttctttcaaaagcaaataggagaaatatcgctgaattc

SEQ ID NO: 200923 - DNA, 1000 bp, Homo Sapiens
atattacctcatacaattatcacttttgtgttttgtggtgagaacactttacgtccactctctctctctttttttttttttttgtgccagggtcttactctgtcacctagtttgggttacagcggcgtgatcttggctcactgcagcctggacctcctgggctcaagtgatcctccacctcaacctcccaagtagctgtgactacaggcatgtgccaccatgcctagctaatttttgtatttttttgtagagatggggttttgccatgttgtccaggctggtctcaaactcctgggctcaagcagtccacttgccttgacctcccaaagtgctgggattacaggtgtaagccaccacacccagccacttttactctcttagcatttttcaagaataaccatgccttttttttttttaaattattattagaagggagtcaccaaagtccagtccacacactgggaggagagattaaactccacctacaggaggaggagtatcaaataatttgtatatatatgctaaaatcaccacagttattaataaaatattgggggggggaagatactttgaggctatgcagatattctgtttttctttaaagcttcacccactaattttatcattcatcagtgaatcttctttgcagcattattactatgttattctaatgattagttttatttccctcattccttctacatttattaattgaaattcttctgtaaggaagttgtgtcccttcccccatttatttattcaatactttatttatatcagtatggtccataaatgcttattttattctttgagttgtaatctaacattgtcactattgattttgttgctcaaatacctgcagcctgtttgttggcagctctttcagattgggagagttccctaaattttattttattttattttattttattttattttattttattttattttattttatttttgagacgagtcctcactcttgcctaggctggaattc

SEQ ID NO: 200924 - DNA, 1000 bp, Homo Sapiens
gaaggttagacagcagaaatcatcccctatagttctggaggccagaagtctgtggtcaggaccacaaacaaggccctggtgcagctgtagccccccacagactgtggagaacattctccgtgcctcctcaagcttctaatccttgagctaccagccctccttgacttggggccatctcactccagccctcagacctctgtgccttgcttcacatcatcttcctctctatgtatggaactctctctctctgcctggcctcctataaggagaaacttgatgtgcaggggtagtgccccacttcaagattcttaatcaaatttatagagaccttttttccaaataagtgcatgtactcagaggtcagtctgctctgagcagcaagggctctgctgataggaaaggtcaggctcagaatatactgaggcgcctcggaacaccagatgtcatagagataagtcaaagtcagctcacaaaagggagtctctcttggacccaaagacaaatcacagctgtctacatatttttcttgatgttttaatgaaatggttaacgatgtaagacaatataattagcttcatgcattaaagttttacttaagtttaattctacatcttaagtaaattagatgtaagttgcatctaatttaatttatgctgtagatttggtcaattcttaataattccttctcgtgtttatcgaattctcaggaaaagtgtcaatctgatcagactcatgcaggacacaaaatgctcagattggtgtaggaagaatcctcaaaccaaggagatgatgagaagaaggagcccagccacacccctacctgtggtcactgtcccgcaagtatctgcacataacacagaaaagcatttgctacacacacacacacacacacacacacacacacacacacacacacactaaaaacaacgacagaagcatttggagttgtgtctgatttgcctctaagtaatgacacctctctctcttccctctttagatc

SEQ ID NO: 200925 - DNA, 1000 bp, Homo Sapiens
ccttattatttcgcttaacttttcacgtaagaagaggtcttggtgatgactagggatgatgcactgtcaagattggggaaacattctgtcctaggctattttgatttgtttcaaccaatatttataagatgtgataaaaaatgataatggtgaaggtaaaaggttggtacaagaagataagacctggctgtgttttagctaattctggttacttcttttcaaaataaagtaagtttcttttcttatccctctgagtgtgcacgtgtgcatgtctgtgccttgggttttgattacaaaatttgcaatcataactaaaccactgaatgcctactcagtgccaggaactgtgcaaatcactgatcacatttactcttcacagcaacctttaaatgtagtaacattattgttccagctctatagatggggacattgaatctcggaaaaattaaagagatttgctgaagttcccaaagttaataaatggcagagcccagattcaaatctaggcagtctggctccagagtcttagttgtaaacaaatgtactttactctcaaattttatatttgctctgaaaaaaaggtacataacctctcgtaaaaatttcagaaaataaatttattttcatcttcagctttttcatatcatgtagagagtaaaggatttatgtagcgtattaaaactttaattaatgtagacagaatatgtacatagcctggatttctgagggaaaatgtgataaaatttcctctttcctttctaagagcacataacctgaaaacatcagagcttccacgtatgcatttaaatgagtagtatttgtcttgagattatttattcattgagtggaatgttcctggttgtataatttagcacgaagaggtaaaagttttttccccacttttctccccaagttgatttttcagacatgaattgccttttactccttctctacaggcaaatttctattcgtttgacaagattcacatcaaactgaattc

SEQ ID NO: 200926 - DNA, 1000 bp, Homo Sapiens
gagagaggacttgggcaaaaaaaaataaaaaaaaaaagagagttttctatgtgtgtactttcaagagctacagggttaatgccaatatatattctaattctcaaactgtgttccattttgtgcctgtttgctattctatccttctctactgccagagtgtccaatactcgtctcagcctcctgcatattttaatattttttctgctgtctatcatcatcttgtttctgttcatctttcccttttgattttctgtgtttccgtgcctctcaagtgtttcttaatttatcatatgctaatcactagcaagtgccattgaattatccttcaactaatcaagtccagccctaggactctgactgtcattagtcctgcagcaaaggacttctatggaggaggcctagaattctgaataataagggccttctgggaaaggaaaaaaaagagaacagatgctcagttggtaaccaccattttacactgtacctttcttagatttcttgcactccactccataaatcagttcttcagttagagattctcagctcataattaaaaatttttataacattatgttatatatagttatttaactttggtctctcaaattagaatataaactccgcaagtttttggttcactatcctctccctagtgtttggcacataacaaatgcccagtgtaattttgttcgaaaccctgcccagtcagaacctacctttatttctgtcatcaattaagttaattattctatttaaggataaaatctttagatcttgctttctttacattatctttggatatagaggtttggctttaaagaaatactttatacaccatggaatactatgcagccataaaaaatgatgagttcatgtcctttgtagggacatggatgacattggaaatcatcattatcagtaaactatcgcaagaacaaaaaaccaaacacctcatattctcactcataggtgggaattgaacaatgggaacacatggaca

SEQ ID NO: 200927 - DNA, 1000 bp, Homo Sapiens
ggaaaaaaagtagagaagaaaaaaatcacttttaatattcttatttaagatcaagtgagaggtggctatattagtttgctagggtggacataaagtgccacagcgtttgtggcttaaacaacagaaatttctttctccccggttctggaggctgaaatcatggtgttggtaagattggtttctcctgaggcccttacaccttggcttgtagatggtcatcttctctctatgtcttcacgtggtcttccctctgtatctctgtcctaatctccccaattttttttttttttttttttttttttgtgacagtctcactctgtcacccaggctggagtgcagtggcgcaatcttggctcactgcaacctccgcctcccagattcaagtgattctcctgcctcagcctctctagtagctgggataatctcccctttttataaggacatcggtcatgttggattagggcccaccccaatgacttcgtttaaccttccttacctctttaaccacccacgtctctaaatacagtcccattctgaggcactgggagttagggcttcaacatacattttatggggacacattttttggggacacagttcagtccataatagtaagataaggagaactgaaatttcaaaaccaaggctctagcatgacatcccccactctaggaccaattccattctccatataaaaggagacattgatgtggcatgccccatgtgcctggtgtgttcatctattgactaggttaatcctcacaacaaatttatgagatctgctatggcttgtcccttttgcaaatgagggaactgggggaggaaaagggttcaaacaactcaccccagcctcccagacagctggtactaggaggttgggctctgagccacagcagtatcctgctttgctataaagtaagaggctccctactgttctgtcacctgcgacattctgagcctgtgtgtcttggctgctccttggtcactgtgccttgagcaa

SEQ ID NO: 200928 - DNA, 1000 bp, Homo Sapiens
aattttctatcttttttcctttcatttagaatagataatttctattcctgatcacctttaaatgcacacactgaggttttgttttcactgactaaaccctagggatatgactaattctcatcataaattttcattcaagaaatttctgagtccatattacatattgaacctaataatagagttcagatttatgatgctcaaaatgtcatgtaagagtattatggtaatgtacaaaatgaaatactgagaatcaccacacttttcaggaagtcccactgtaaggcaaaagattaaaataaaaaaccctcaataaaaggtgtgaaggtctttgccagtttcaggatgtggcctgtttgggagtatgttgaatgatctgccccatcacgatagccttcattacaaaaagaaacacatatgtacctgtgcatttggtagcctcaagtctttcctataaggcggcctaaaagtttgacttagtaaactggtggttctccaacttttggtttcagcatccatttataatcttgaaaattactgaggacacccagggagcttttgtttatatggattatatctatcaatatttatcatattggaaactgaaactgagaaaattaaaaaatatttattaatttgcttaaaaaacaatctgtttaaattgttacatgtgaacataaatatttttataggaagttgtaccattatatgtgtatattttatatatgtgtgtgtgtgtgtgtgtgtgtgtgtgtgtgtgtgtgtatgtatgtatatatttaaaagaagggtctcactctgacacccaggctggagtgcagtggtgtgatcacggctcaatgtagccttgaactcctgggctcaaggaaccctcctgcctcaacctcccaagaagctgggactacaggtatgtgccaccacccccagataattctttatattttgtagagatggggtctcgctttgttgcccaggctggtctcaaactcctggactcaagcag

SEQ ID NO: 200929 - DNA, 1000 bp, Homo Sapiens
ttatggtaccaatgcttccatggcctgaatgcatgaatttagcaattaaggggcagaactggaatgacacctctcataaaatcacatagtggctgaatcacagaagcttgcatcacactccagtccccctgggctctgctggtttagggggtcttagaggccaaaggagggttgcttccacagggtaccaagtaaacactggcttaattgcattggaaactgagtttgccactttttcgtttccaattctaaaaccacaggatgaaaagtcaaaagaagactatgatatgacagaaatgatgattctagctataatggggaaacagtgttgctattatgcaataggatcaagaagggtgttggtagaaatccagcaatcctctggggtgcttcttaatactgccatgtccagcatcaaaagttaaaggaaatccacagcaacccagtatgggaagaatgatcaagggacagctttctcaggatcaaggtataggtaaatccttggttgaggggaaaagaaacttgaaattgataatagaggagttgagtcatcagtgcaaatacagcaccaagacgaattatagaaataagactgtaacacctacccatattttctttcatgtatatatgtataaatcttaactgtttttcctaccttgtatctccgttctattatttctttattaatagtggcttttacaaattagtccatagtttacagaatattgagacaataccatggcacaattccagaataattggatatcttccagaatgcctgaattttgatctggatgaaacttcaactggtcccttttatatgaggaagaatagttactttaagttaagtaggaacatttttttttcctggaactttaagcatggggagaagcttgtaagttggtgttgagctgccggaagtttggcttatagtggacattcgtgattcattttgactgtatggcaaccaagtcccattctatactctatttgagaattc

SEQ ID NO: 200930 - DNA, 1000 bp, Homo Sapiens
tcctgcctgtatcttcccgccctggcccttcccaggtatagtgacgctgtgttcccctgcctgctgtgggcttttcctctctcccactctcgggcagccccgcccagcagcagccttgtcctcttgcccagctgcctcgaggcgtgggcctctcggtgcttccagtgagcacctgagcgtatccaggttctgtggctcctgacacttgcacgatgtgcggggctgtgcttaaaaaaaaagatcacacacttggctgggtgtagtagctcacacctgtaatcccagcactttggaaggccaaagcaggcagataaccagaggttaggagttcgagaccagcctggccaacatggtgaaaccctgtctctactaaaaaatacaaaaattagccaggtatggtggcatgcacttgtaatcccagctacttgggaggctgaagcaggaggatcacttgaacccaggaggtggaggttgcagtgagccaagatcgcgccactgtactccagcctgggttacagagtgagactctgtctcaaaaaaaagaaaaaaaagaaaaagaaaagaaaaagaccacacattaatccaggactgtggggctcctcccaggaggaggtggccctgacccctgacctgtatgcttcctgggaaatgtgcttctggggaggacagagggaggaggaaggagagggaggaagaggaaggcaggggagagaagggaggcattacaggaggctttgagcccaggggaagaggggttttccctctggtctggtgggtccggcacggaggcggggggagagcatgatgggagcacagtgggaaggggacccaggtttacctccgggtcaggagcctggctgtggtctggcatggaggcagggggagggcatgatgggagcacagtgggaaggggacccaggtttacctccgggtcaggagcctggctgtggtctggcatggaggcagggggagggcatgatgggagcacagtgggaagggg

SEQ ID NO: 200931 - DNA, 1000 bp, Homo Sapiens
ggtattatccccattttacagatggtagaactgagatgcattcaacacactgagatacgttcaacacaccattgggaatcatcagcaaaatccagcatgaagagtctctacaggataagtagcctagatttttccaacaaataaatgataggagggaaaaatggtggggtactatcatagattttaaaaggcttaagagacatacgagccaaatataatgtgtgtgggtcttatttgcatcctgactcaaagaaaagcattgatcagacagtcagggaagtttgagtagtaactgaatattttggtatgattcaagtgttacacagtattatattatggctatttttttaaaagagcccttatatcttagggataaatattgaattatttacagatgatatgatgtcttggatttctttaaaataatccagtggtagtgatgaggtggagggccaggagggaatggggatatagataatcaagactggccatacactgataactgttgaagctgggtcaagggtacttgggagttcattgtacttcttatatctttttttttgttgcttttttttttgtttttgagacagagtcttgatgtatcacccaggctggagtgcactggtgtgatctcagctcaccgcaacctccacctcctgggttcaagcgattctcctgcctcagcctccggaatagctgggattacaggtatccaccaccacaccctctaattttcgtatttttagtagcgacttggtgtcatcatgttggccaggctgctctcaaaactcctgacctcaagtgatccgcccaccccggcctcccaaagtgctgggattacaggcatgagccctcgcatctggcttgcacttcttatttctatgtttgtatgtatttgaaaaattcaacaatagaaccacagttaatggttaaaaagtaagagtagatcatggtaagaactggcctggagtccaggtgtggtgcctcatgcctgtaatcc

SEQ ID NO: 200932 - DNA, 1000 bp, Homo Sapiens
ttctgtctttgcaccataggtttagggctgggagagggctctcctggggtgtgagaatctgaagggagcttgaatggctttgtggaaggcaggtgatcagaggaagatgtgaaattttggtgtctctcatctacctgcatcagtgttgcctgccgcaggacacagaggccaggcttctggtctgctagaaaggtcacttggcacagtcattatctggggactcatgggttgaaggggagcgtggttgatgcatggaatactgaggtaaggagtctctcgaccaccctacctgaaacagatgcttgccccattcacagcctcactccgacccagtatcctcactccgtctcccatagggacttggtaggagggcaagcaggagtgtagatgctgtagtcaggtcctgggggttactggatgggcaaggaaggactggtgaagatggggtcaggacagggagggctggataaaaagatgtgctgtatgggctggagagatggctcagcggttaagagcactgactgctcttccaaaggttctgagttcaaatcccagcaaccacatggtggctcacaaccattcgtaatgagatctgacgccctcttctggagtgtctgaagacagctacagtgtacttacatataataaataagataaatctttaaaaaaaaaaagattaaaaaaaagatgtgctgttggggactctgggcttctttgcctgtaggactgtgtgggataacactgactgagagcacagccgagaacagagatctctatgtcaagaccacctgagggagcttgtggtgtgcatcgtgttccttgtggacgtctgtctgtgtgagtagccgctgcctgtgagcatctgcctgtgagaggcacgagtgtgtgaaacgtctgtacctcccaggcagtattcatctgtgtgaggcaagggggatcctgggaatttcgtgtatataacaacatgcaacatccgaggcttctcggtttaagagaattc

SEQ ID NO: 200933 - DNA, 1000 bp, Homo Sapiens
gaagacggtccatttcatgtggacaatgtgatgagctgatcagacatttggtccagtgtcccaattcccccacttcccccactgccttcaagcaactactattatgaaatcaaaatgtggcccaagaaagacagtgatggaaaaatggggcgaaaggggaagcttcagttagagacccaaaaaagtgaagactagttctaagtaaatgtggcaaaagagatcagtacagggcagactgctgctcccaggtatctgatccacggagccctcgccgaccaagggctagagcagacgtgcaggcaggacaagcgggcagtcacagcgggcctgcagggcgggtcctgctcaccagcaaagaatgcagaccacacctacgcgcctggtcaggccgggacggggcggctccgcccaggttacaggattgaaggaaggggggagacgggaagaggagcggcgagcgacggctggcagacaacctacccactcccagccccgcgcccacctcaggagcgtctcgagcgcgccctcgtgcttgtccagcggacgaccgactgcggcgcggcgcagcttgctgagctcctccgccgcgcggcagtactgggcctgctcttccccgccgcttgggtaagtctgctggatgaacttcaccagcggcttggccaggtccacctctgaggtctttttcagctgcaccgagatgaatgtcgccatgatcagcgcctccgccgccgttcgggccaaacagaccgcggacagcttacgagggccgaggagagagaggtactgggctggcggactggcggactgactggctgacagacttgcgctccgcctgcgttccgggtccggcaacttccgggagctccagcgcaggcgcactggatgcggggtccttaagctgtccgcggtcacgtgaaggtgtcgcggcggctacgcccacctggacccagtttaccctgtactgtgctgcaaaatattactttctccccatctggaattc

SEQ ID NO: 200934 - DNA, 1000 bp, Homo Sapiens
aggagagtaagggtagttaatcaggcctttcagtttattgcattaagacttaaaactcctattactgcagtgtgttccctgcttgcttccttcccaggcctgcccactcccaaaatgcatgcaataaagtatatatattttaaaaagacttacaaggcaattgtactagtatgggatggagaaaatgtaaattaactgcagcaggtttggaaaaacagtgttccaataggctgaatgtgagccagtgcacgtagaatgaggcaggtgatagataattccacttttcactggtcaaagtacaaaattagagtttggtgttcagcacttaggaccttgttcttcataggtagcaatcagattggtgaactgacttgaaattatttcctatgaagaacttttgaaagagctgtcttagattaacctgctgaagagaagattcagggaactttcggaatttgtccctaaggtatagaagcagcctgagaagccacagggattgatttcatctgaaccatcattgtctatgaggtgttttttaaactaatgcgtgttcattgtaaaaatcccaacaaacaaaaacataaattagagttgccctccatgcttccaagaaagctactgcgggcaatgtcatgttttaatcctagaccagagtttatcaacctgaacattcttgaaatttcatctggataattcttcgctgtgtctgagggagggagctgtcctatgcatcacaggttctttggcatcatccctggcttctaccaactagatgtagtagcatctccccagttgtgacaactaaaaatgtctccagacattttcaaatgtcccctcaagggcaaaattgccgctggttgagaaccgctgttctatacctcttgctgtttgtgtacctgacttaacatatttttttgctataaatggagccatagtattcactgttttgtgtcttgctttgtcaaatttttaaataaacattccctttagcccagaattc

SEQ ID NO: 200935 - DNA, 1000 bp, Homo Sapiens
agtgacgctccgtggaaccacggcgcaggaggtagcagctaggggcaagaagggcttcctgtgccatctcagccgcctctcctgaccttctctgcccaaacccccacagactgtcacctccctgccacccggacttgcaaatgggagccccacctgtgacccttcttgcttggcgctccatcctccccgggtacctccctgcccctccaggcactcaggttccttcctgtctgcggccttccctgcactccattactctctcaacactgcccgtagtccccaggctacccttcgtgctttccgttatcccaaacacagcacccagaaaggctgagtaataggacagtgagtcagcctgggtaagactttcgaaggcagagtctgggtggggcagagctcaaagcagctatgcccaacattcctggaggttcagggaagacatgggatcttcagaacacctagggctgtgtcagggtgggctgcttgggatgtgcatatgggaagtgagccaagggaccccttgctgaagatggggagatacccaggtaagctggcactttctttgggtcctggactttttttttcccacccgctttgctccacgggtcccctagtgaaaatgcatccctcctttttctacttccagcctacgtgcctgcccagatgcagtcctgcctgcttccctctgcccaggtgtaaaggcggaggggctgtgtgagcagacgctctacctaccgtgagaaccatatcccagtaactatggagaccaccaccctgacgggagagtcccaggatgtctgtttaaacactgccttcctcccaaggcctccagtgggtgaggagctctgggtctctgggactctcaggcacagtttggaaaattgcctcttattgcagaagtaatttagcacagagctcagctgacctcagggcagccattttaccagcaggatgtgcaaatggttttgagctcctcagaaagctggcactgagagaattc

SEQ ID NO: 200936 - DNA, 1000 bp, Homo Sapiens
aggaaattaagaaggcttggcaaggtctttaagctttccaacatgttagccttgcccaggattgtaaagggtagaatgtctgggaagctattgacttggggaaattaaacacatccaacatagtagccatatccctcgagtcttccatgccaatatcttgagactaagagccattaccataaaagaaaaagacttaggacatgttcttttttttttttttttggttttaaatagcaaatttatttcctatttcttgcctaaaataataagggctatgacaagcaaagagaacttaagacatttattttagtacctagcctgtgtcacttagtagatgtttgaagttttttttttttctcatgtattatcaaaattaatccttacaatgacccgaagggcacagaaactactagtatcccagttttatatttaaagaaactaaagtatatataaattgtataatttttctttttttttttttatagtttcgggatatatagctacatttctttttttttttcttttccattttttattaggtgttgagatcatttacatttccaatgctataccaaaagtcccccatacccacccatccccactcccctacccacccactccccctttttggccctggcgttcccctgtactggggcatataaagtttgcatgtccaatgggcctctctttccagtgatggccaactaggccatcttttgatacatatgcagctagagtcaagagctccagggtactggttagttcataatgttgttccacctatagggttgcagatccctttagctccttgggtactttctctagctcctccattgggagccctgtgatccatccattagctgactgtgagcatccacttctgtgtttgctaggccccggcatagtctcacaagagacagctacatctgggtcctttcgataaaatcttgctagtgtatgcaatggtgtcagcgtttggatgctgattatggagtggatc

SEQ ID NO: 200937 - DNA, 1000 bp, Homo Sapiens
acagataaccagaatcaaaactaaaactggcactggcccacatgcatcttacttagaaatttcctctccttaatcatctattgctctctgctacttagaccactgattttgcaagtcttgtatctttgtctattggacctcttttcctggactttactgatacagagtatactataaggcatattttcaaaagatataaatgaatttgttataactttgatttgaacattttatagcactctgagatcattatagatattgaagaattaatcacaaaatgaatacaggaatcatcatatctaggagccaggggagttatggggcagtgaatttatctcctcacacaaagtcatccagagtttttcttgctctataccagaagaatatttgaactacaaaagattttagatagagatagatagatagatagacagacagacagacagacagacagacagatcgatcgatcaatcgatcatttggtccattccatgatatttaaaaatatatatcaaacaataaatgagccacagagatgggtctctaatttaggtatcatgactctcctctaagtgtgttttcacaacacacaaatgcttttcaaaaaacaaacaaaataaaaatataaaggtaaaatctataaaagtttatttagatctacaataacagtccccaagaatttatgtatttcctatggttaattgctcttggctaggcaccatgaatgattatatagtctctgctccacagaagttcataccgtaaagtacacataccttaaacaattacagaactatgatggggaagagtgagccaaagaaagagaaggtacagaagattgtcggatgtgtcaaggaagtcttcaagtgcatgtatactacattaaggagattgtgtcattaaagctatgggactgcagtgggaagcaggcagaatccataatggatatacatttgctggaacattaaatagaatattctagaatgccttactgaagtat

SEQ ID NO: 200938 - DNA, 1000 bp, Homo Sapiens
gtttgcggcaaaaggaggcggtggggtgccagcacgcccaccgcccgcccagggccagaacacaccgccagtcacgcgctgtgcgcagcccgggaagggggcagttttccaagcccggtagcgcccccacgcggcaggacgcccaggcgcgcggagacgcgacgggcgctgatcgcggtccctcttgtgttcgctctctccacactcaggagcaccagcatgtttgacatgcggtgtgaggaggaggccgcggtgcagccgcacagcagggcccgccaggagcagctgcagctgataaataaccagctgagggaagaggacgacaaatggcaagatgtgagttgtggccaaggcgcgcgggcagcggggaggcttctggcagcagaaaatccagccgggtgggtagacgtggacttgaaagccatgcggggaaagggagcccctagagggtttcaaaaggtgacacggtaaatgtgggactcaaaggaaggtgagtagcagcgtgaaggtatggagtgatggcccagacatgtaatcagcaaacaccctggccagaagcttggtcacaaaagaggggaggggaggcaggaaactgggatgggttgtagaattgaggctgcactatcttctgaggttatatatttcaaattgatcatgatgatgatggtagtaacgataacaatgaccaacatcaaatgtgtaccagtaccaggcattgttctaagtactttgcatgcattcatttaatcctcttagtaactcaatgaactagcaactcttattgtcctcgattccacagacgaatcccagcacagctgtcacttgctgaacgtcacatagctagcgagtgggggagccaggattagaaccagggaaggaaggctaaagaggctgatgagggctttgagattgtgtgctgagagccaaagcggggagagaggagggagagtggattatttcatttaattctcacaaagcactctggaggtagctattgcaa

SEQ ID NO: 200939 - DNA, 1000 bp, Homo Sapiens
tcacttgaggattacagaaggcttcctggaagagatcttgtctgatcccagcttttcggaatgattgggattttgatattggaagcagaggattgggggtgtaagaagggcattcaagacagaacaaatgtgaatgaaatctgttgtatgtcagaaccagaagtccaacagcaatagccctgtttgtctgggaaagagtactcaaggggaaaaaaataggagataaattcagaaatgtagactgaggataggaggagtttgaacaggtggatagggaggcatccaggagtcttaggaggtgagggggagggggtgatgcaatgagaactctggagacagtgaagggggccatgccatccaggcagaagagaggctttacccacagcaaggatgctgacactaaccagcagaagtcaggagaggagagaagcagagaagagaggactggactctgccactaggacgcaggctccaagagcagggattttttgtatttatttaatgccatatcctcagtgtcaaaaagagtacctggaacatattagatgctcaataaatatttgttgcataacatctttttaagataattaaatctattgtgctttgacgagaggtaaggaggtgaaacccagtctcagagcctatatgagccattactgagaaaagggaaaatgggcagaggattggaggaggggaacttggctttgtgtaagcatgggtgggacagccgggtccccatggatggccaatgcatttgggagtcatgaggcataggctactataatgggagctgtgacaggtacatgtcgcctcaggaaagaggtggagggtaggggatggttctggggagcgtggggagaggagaagcaggaggaattaggcaaaggaaataagaggggcttttccagataggaaaactcattggggacagcatctcagaattgtttttttaattcaaaagaagaggcccacaaataggttcaacaaagccaatgcaata

SEQ ID NO: 200940 - DNA, 1000 bp, Homo Sapiens
gggtgggaagggatggaagttgacgctaaaaatcaccgaagggcaggtaagccggggcggggtgtgacggtgcgggcctcgccacccggcaggtgtgcacccggtcgcttccgcaggtgagcgcagcctttctgctccgtcgggcctggtgtggcagcggcagcgatttaatggtccttaaagcttccgatctcaaaatggaaagactgaagtgtcaagatgacttttcaggtggccctggtgtcgggcaatcaaggttcctcttcgccccttcccactcttgctgttagtggccaaactgcacagtgtattattttactctgttaggcgctgtggtccatagcgctgattttttgagctataggacacgtctagattccgttcactttcctcagaaaaccacagaagcttgaagctcttatccagagcattccttctaggatgtcactgtgaaccagcacttgtctgcacctcagcttgcaacttagcggattccttctttattctttgtctgttagaataagcaaatatgaaatgttactttaatttttgaaagaattcctcgggccttgtctttttatttggctccctgaggtttaagaattcattgcagatacaagtacttcttagaggtgcttgcatgcacaataatagtcgagatatacaaagtatattaccaagtaggaaaaatccatcttccaagaaactgagcagcttgggttttaaattctattttagtttccatttttaaaaaaaattatctgtgaataaggcttttttttttttttctttgagagtctcactctgttcccaggctggagtggagtggagtggtgcaatcacagctcactgcagcctctacctccttgggcttaaggcatcctcctgccccagcctctcgagtagttgggactgaagggagagccaccatgcctggctaatttttgtattttttgtagagacggggtttcgccatattgcccaggctagtctggaattc

SEQ ID NO: 200941 - DNA, 1000 bp, Homo Sapiens
ccctgtctctactaaaaatacaaaaattagctgggcatggtggtgggcgcctgtagtcccagctactcaggaggctgaggcaggaaaatcacttgagcccgggaagcggatgtcacagtgagccgagatcatgtcactacacttcagcctgggcgacagagtgagagtctgtcaaaaaaaaaaaaaaaaaaagaaagaaagaaagaaaaagaaaagggaaaaaaaaaaacccaaaaattaacacccagcctgcgcaacacggtgagaccacgtctctactaaaaatccaaaaaattagccaggcatagtggtacttgcctgtagtcttagctacttgggaggctgaggtgggaggattgcctgaacccaggaggttgaagctgcagtgagccatgaccatgccactgcactccagtctgggcgacagagcaagaccctgtctcaaaaaaataaaaagtaaaaaagaattaacaccaatccttctcaaattctttcaaaaaaattgaaggaatttttgttttctgtttttttttttcggacacggagtctcactctgtcgcccaggctggagtgcagtggtgcaatctcggctcactgcaacctctaccagctataccactcttagttatatatcaaaagtattgaaaacacatattgtatgcccatgtttgtagcagcattattcatgatagccaaaaagtgggattctcaacaaaagactggataagcaagtatccaacaacaaatgattagataaacacatacaatggaatataaatattcaaccacaaaaaggaatgaaattttgatttatgctgctacatggatgagctttgaaaacattatgcttaatgaaacaaggttgacacagaaggataaatattatacgatcccacttatatggagtacctagaatagtcaaatttatagacagaaagtagaatagaggttactagggctgtagggaggggtagaggggtagtttttatttaacaggtac

SEQ ID NO: 200942 - DNA, 1000 bp, Homo Sapiens
ggatgaaggagccttggctactgtactctgagaggaatgtttccagaaatggaggtgggagcttagggaatgcagagcctacttgaggtgggcatctgggaatacagggtagaaagaaattcctgcttttcagataaagcctacacattgccactgtctccccatgtgactcttacagcttgaggaggcatttgttagcacttctgttcactttactacatcctgccccacattctgacttgtcacccattttcgttggctggcaggttgagatgtttttcttaaacactgcctgtcagtgtgaagtggcacagctctgatgtagtgctaagtctagcctccagatttgaggcagccctgaccatgctaccatgggggaggctcccaacctgtggaagtggtcctgtgaaaaggagacagaaacaagtaagagccaaaaaaaaaaaaaaaaaaaatccatatccattcattaaaaaaatgagatataaagcaacaactgggctgacctctatagatctgccagtaaagaaggctttctttcattatcagggtgaaggtctttcctgattcttccaagctttgaggtgactcagagctaagaatgaaataggagaccaagttagaattcatgatactggtttatggggaggcagtcatacctgttcagagaaccaggaagactcaatatctatctcagaggaaatatggttacccaggaaagaaatggtctgctagagtgataagactcagaacaggaagcctgcatgtgactgagcaagtcacctacataaccctgcctgtactaaggtgtacacctgtctattgtaagtttgcctaggctgttggtgtacagagaccagaggagagagacacactaggactaacaatgtcctaacaaaatggtacttagtttgttggtctttaggagaaagcattagtaatgaaagaagaaagaattttcacttggttggacattggggctcttaagaaagttgacatt

SEQ ID NO: 200943 - DNA, 1000 bp, Homo Sapiens
cctgggcctcacagagccgtcagcaccaccagccgccctgccttggtggtcatctagtgggcagccgggaagctggagagctgggtctggcctggagggagggtgtgggtgtcagatggccccaaggcgggtgcaggcacaagagccaccaggaccacagcaccctccttcctccagacccagtgaagggcctgggacaaagacgttcagggtcaggaagccaaaccccatgggttctgcccctccctgagacaccttcgcagaaacaacagaaaagacatgtgaagtgggaagaaacgcctcggagccttggctgatgccactgcactccacatcggacccactcgttcgactgtatgcttttctagcaaggcctgaaagcaatgagtttctgggtccctgccccccaaaacaagataggccacgggtctttcccctggccacaagtcagcccatcccacactgcaccctcagctctgttctaccatgagtgtgaatccatgtccatcctggggcgtgttataagttggctctcaggtgtcttatttgtgtgctttaaaattatttaaaaaaccaaagttcctaacaactcaatttttaaaaaataggcaaagggcttggacagtcatttctgtgaagaagatacacagatggccaagaggcacacggagaggtgcccagtgtcactaatcatcagggaaatgcaaatcaagaccacaacgagatgccacctctcatccattagggtggctgccaccccaaacagagtgacaagtgctcccaaggatccggagaagttgggaccttgtgtgctgctgggggatgtagaatgccacagctcctttaaagcgtgaaatgaccagccgctcgattttgctgtgaacctaaaactgctctaacaaatagtctgtttaaataacatgccagaaaaaaaacagaattactgtatgacccagcaattccactttggagtctgtccccggtctctttaaaggagatc

SEQ ID NO: 200944 - DNA, 1000 bp, Homo Sapiens
ccaagcctttcatttttctttcatataatttcagatgtcttgtatctcaaaactttttaaatttgtttttataaagtcaaatcaaacttttaggctggagttcaagggagtcccaaaatcacatccttctctttcttccaagttctaagccagacagatggagattagttgtgaggcaaggagtaagggtggaagcagggagatgggttgaaaggctattgaaggggtccagctgagatacagtcatgggtgtggtgtagagtggagatgaggagtcacttctcggccttttggctaagatcaagtgtagagtggagatgaggagaatggaggactaacagagcacatgcttggcagatggagtcactaggatcagctgatggcaggatagaggggtggtaagggaaaaggggtcaagaatgactcctaggcttttttggcaattgggtaggttgcagttccacttacaaagatgaggactgggaagaagaagagcaggcttttcaaggaggagaaaatcaagtttgttttggacttgttagatttgagatgcctcctagctatccaaatgaagatgtcatgtaggcattaaatggaagtctaaaattcagaaagaggccacagatataaatgtagaggccactggcataatgatcatatataaagatagtacataggccgggtggggtggttcatgcccgtaatcccagcactttgggaggctgaggtgggaggattggttgagcccagaagttcgagaccagactaggcaacaaagtgagaccttgtctctacaaaaaattttaaaaagttaggaggggcatggtagtcccaggtgctctggaggctgaggtgggaagatcacttgagcccaggagtttgaggctgcagttagccatgattatgccactacaccccaacctgggtgacagagctagtccctgtctcaaaaaatatatattatatattttatatatataaaatatataatatatattta

SEQ ID NO: 200945 - DNA, 1000 bp, Homo Sapiens
ccctccctagtggcccctgcgcggcttcccctccgcctcctgcgctccagggccccacgcggacgacccacccttccgcagcgccccacagtcgacgcccgagcccccaaaaaacccccaatcccgagcgccacacaaaccctggcaaattaatacccgaacgcgcgcactctaatccccttcaggccactccaccccgtacacactcacggcccccccacactcacggccgggcagcacgcgcagaccccgccccgtcaagcagaaactcacgctccggcctgccggtttcactcaaaaaccttgttcagtaggagagactggaagggggccagggcctgccgggcgctggtagggttgggttcttaggctacaagtgtgttcactttatgaagatgcgcggaagtacactttggatttgtgcgcttttccgtgcgtgtatttcacgtcaataaaatatactcaaaaacggagaagtctctaggcttctttaggctgctcaaggggttacctaagggcacgaatggcaaggggttacctaaatggcacgaaaacggaaacccttgactggcgggcacccacaaagcacctcctctgtgccaagccctgtgctgggcacagaaatgagacagccccaaatgcctcgaatgagagtcccggaactggaggggccagaactggaggctgcacctcaaagctgactaacctgctccaatcagggtgggagtcagcagagacttctcacagcaggggcgcggagcatgagtcagggcttgctaggtgggcagagggcaccatccctgttgcctgggtgacatcaacactctgcctagccttggcttcagggaagctgtggccagaagtcttcctctgccctaactcactgagggaccttaaacaagtcactgtacttctctgagcctcagattcctcctccctgtacaggaaccaggggatgaaagtatcccttaaggttctaacaacccaggatctggaattc

SEQ ID NO: 200946 - DNA, 1000 bp, Homo Sapiens
tccaggacctgcctggagcttggtaataaccggcacttgctagctgccaggtgctgttctaagggctcacatatgtcacttaagtgaatcctcacatcgacccttggatagaggtaccgttatcccctttcacccatgaggaaactaaggcacagagaggcgaagcagcttgcctaaagccctatagctggtcattggtagagctgggatttgaattcatggaaaccaggatctcagcaactgcactacacggcaaatactggctttatgatgctagcagaggatccctactgcacaactgtgtgccaggcgctgcacgtgcacactgatgtggcctcctacatcactgctgctgactaagtaaggggccctcaggtgacagcctgctcctccagagtccctctcgtgtgcttacttcctggtgactttcatggtcttctctcaggtttgccaagcccaactccagcaatttctgccacagacagaaaatatcaccactcttcctttatcaacagctaccacttgcaaatgaaccaggctgaacgctttagagcaccattttatttaatcatttcaatgaccccataaagtaggtgctgttattattcattttacagatgagagaagatagactccagtaagaagtgtgaagtaagaagtgtgaagcatggtggctaatgcctgcaatcccagcactttgggaggccaaggcaggaaaatagcttgaggcaggagttcaagaccaacctggccaacacagcaagacccccatttctaaaaaagataaagaattttttttaaaactggctgggtgtggcagtatgtacctgtattcccagctactcaggaggctgagatgggaggatcacttgagcccagcagttccagtctagcctgggcaatatagcaagaccttcatctctaaaaaaaattaaaaataaataaaacttataaaaagaaaaaaatgagaatgtgaccttgtgacctatgtgtggaattc

SEQ ID NO: 200947 - DNA, 1000 bp, Homo Sapiens
gagccaagatcgtgccattgcactccaacctgggcgaagagagtgaaattctgtctcaaaacaaacaaacaaacacacacacgcccttaagaacgcaatgaggataacatgttggcccttgtatttgagaaggcaacctggcttgactctgagctacagctccaagaaataaagacgatttgctcactggtcctagctctgacaataagcacctgcccagtgaagtctctggctgtgaaggtgagtgaggtgttctctccattccatccattctggagttggaattttccaaacactgctaaaggtgggggtgtgccaggaaaacaaaggaacacaacatggaccagccaagttccctctcttgccctcataagcagaacaaagtctcagcactccaggactggccgctatttgcctttcttagatgggagtgtaggaagagggagcataccaggccttagaatctgtcctcactagacatggaggaggagatgatgtaattttttttttaaataaaaagatatgcaatgcgcatgctgttgtgctatgagaagaatgtggaaattcacaagttgggcattgtttagctttgtatccctgtggctactgtgttcaactcagcctgaggctccatgaagacggtccttgagtctgacttccaagggcctgacagcctattggtgacagcctttacaatcactggtatctgaagctcaagcaagacagacaccaactaagtacccccagcagtaatttctcaaaaaacaattcagtaacatgcagactccatccttaacggcaatctgaggctctgctgtggtcaacaaataccactgacagtggcccggaccaccactccaattcccaaagacctatgggccccgatgacatgaaggtcactcagagcttaaaggcagagatgaatgcaatgaagatttccactgaaagatggcagagaaatgttctacccacactcacccaattgagatttgtggaattc

SEQ ID NO: 200948 - DNA, 1000 bp, Homo Sapiens
atttttactgataattatttccctttaacttttgctgcagttttgtttgtttgtttgttttggtaatagccaaatgtaacttcgatgttagtttattagtcagggttctctacagggacagaactaatggaatatatatatgggaatttattaagttattaactcacatgatcacaacttcccacaataggctatctgcaggctgaggagcaaggagagccaatctgagttccaaagctgaagaatttgaagtccaatatttgagggcaggaagcatccagcacgggagaaagatgtaggctgggtggctaggccagtctctcttttcacatttttctacctgcttatattctagctgcactggcagttgattagattttgcctacccagattaagggtggatctgcctttcccaatccactgactcaaatgttaatctcctttggcaacatcctggcagacacacccgggatcaatactttgtatccttcaatccaatcaagttgacactcagtattaacaatcacagctagcttctatttagattttcccaatcttgattgggagatcttacggaatttctgaagaagtctgtatggcatggaataaaagagaattagctgctgcatttggacccaaaatggtatgtttttaaaacatcaattatcttctccccatgttattgttttccactttggagtaatgtttctctcaattttgttgttgtgaaagctattgggcttcacagtgaaggctcaggattaaatgcctatgcctctctctgtagaaatagtctggctgctttctccttctccttcatttctatctcactttggggcatcttcctgggcaaaaagtttaaggaatataaagtaacaagagcatgcatgtgtggttctttccctgtcaggtccaattatcctatagatctgatatgtgggtccggggccttagggaatatcctttgtttttgctgtagcccgtccaaacttgtgaattc

SEQ ID NO: 200949 - DNA, 1000 bp, Homo Sapiens
tcctcctcctgcttatcccttggacattaaaggcaactaagaagaattaaaggcagttggtcagctatgtgccacactcaggtcctcaagggtcaggaaacatcagcctagtccaacactgttcctgcacctccaggtatctctgcacctctctggccaagcccatgaccaaggtagcacctagtttagtgtggctcttgtcttctccaaggtgaacccactcttagtagcatatagctgcctcctggcctggctctctcttggcctcgagcaaatacatgcctagcaggccagacctggatatccacagctggagacaattcccagacccaatttaccagagagtaatagcctggagtctgaacctgaaatgagatcagagcgtctacactccagcaccccagagactggagctaggaaggaaggagctctaaaatgaagctgccagggggctcagggctcaagcccactcctgataagctacgtaaaattcacatcaatgtcaggctcttagactaaattttgcactggtcatgtctgtcacagtgctgcatactgtggctaccacatggcattaaaaaatttcaaacggtaagaagagaatggaatcaacagtttctgagtgcctactaagtcaagaactttgcatgttatccttaccaataccaataccttaggtattattataaagggtatacttatcttgccaatagaactagagactcggaaaaatctaagaatcctctgttcctccactactatactacctgaccacaaagtcttaaatgatcttggaaagacaaagaaaaactagagtgtaaagcactatttacaggctctcagcaccttaactcactaagcagacaatactagtttaaatactgcattcccttattcactactggtagagccaacttctgccaaacacaatctaaagaaatatatcaaaagtcataaagatgctccggacctttgcccttgtcattgcatccccaagatc

SEQ ID NO: 200950 - DNA, 1000 bp, Homo Sapiens
ccaggctggaatgcagtggcacaatcatggctcactgcagcctcaacatcctgggtgcaagcagtcctctcacctcagccttctgagttgctggggctacaggaatgcaccaccatgcgctgcttctttttatttttttgtagagacaaggtctcatcattttgcccaggcgggtctcgaactcctagggtcaagtgatcctcccacctcagcttcccaaagtgttgggattacaggcatgtgccactacacgtagcttttgtttttcattcaacagtatggagctctttgcatgtgactgtttataatttttctcatcttttttaagtgctttgaaggattccaaagtatatcgatggacatttagtttgttttcagagctttgtagttataagtaatgctgcagtgaacatcatatgtttacatatctaacagtttatataatagataacagatacacaataaagaatagatgtggtaggtgcacatttattttgtaagatactactgaagtgctttccaaaatgtctgaatcactgcacactcccagcagtggggagaatgcctttttccccagacactcagaaacagtaattaccatagctaatgaatctatgacatcagtgaacacacttggaagagtgagaggattactctattcccatcaccgcgttcattttcacagattcctagggcaccctgcaaaagacattcctggggagatggggccgacagggctccaaccctaatctgacaaagggtccattgtgactactgatgcacaggtgcctgtgtcagggcaagtgaaaggagaaggcacatcagaacagagaaccctctaacctgggaaatctgatctgaaagggtagcaaaaaagaatgtgattgtgactcccatgttaaatacaaaagactcttagcagttgccctgtgttccaagccactatttttgaccaagatcaaatcaatagcctgtaacccacatacttcatgttgaattc

SEQ ID NO: 200951 - DNA, 1000 bp, Homo Sapiens
tgatattttcattcttaaatcaattttatgtatacaatttttttgaatactcacttatataatgcattcctaaattcaggagtcataaaaagtgtttgcaaaaggctattcaaatagcaagtcattgcttggtttactagtcccacatatcctttaaagagaaaatacaaatgtacattaatcagcatttacattaaaaataacaaaaacataataagaatttaattcacagtaaagattcagaggttaaagttactactcatttggaaattatttcaacttgttcaacagcacctaagaaaagatcccttttctaatatgtgctctaagtaagctttgttttgtagaaaatgtcaggataccttgttatagatatgtccagaggtacacatggagattatatgacattaacattttaagagtaatatgttcagtaaagtatgtgttactggcatagacataaactttttcccccaaaatctaaacgtttaaacatattaaacttttaaacatattaaactagattataatggaaaagcataaacatattcactttaaacagcaccacacacatccagtgtagaaagactatacagaaccagttacccctgtcatcaagccctataagccaatttctgtaagaatgaataacatacgagataaattcactacatgcaaactcacaaaagctgagactctaagtaatgcagagtgacttcatctgtttcaacaagcctgtcaatgaaattctatagatcagcatgctgtgcaaagggtgatatgtatccacaccatctgtacttataggattccaagaaaagaccaagcatggtagctatctgcttttcactttgtactaaggttcaagcttttatttttttcacctttattttaagaaccgtgtatgcatgggtggtttatatcttaatctacatcattgcattattttaaactgcttctattccagactattccccacttgagttgttctcataggatc

SEQ ID NO: 200952 - DNA, 1000 bp, Homo Sapiens
cctggctgggcacagtgactcacacctgtaatcccagcactttgggaggctggggtgggtggatcatgaggtcaggagttcaagaccagcctgaccaacatggcaaaaacctgtctctgctaaaaatacaaaaattagccgggcgtggtggcagacggacacctgtaatcccagctacttgggaggctaaggcaggagaatcgcttgaacccggaaggcagaggttgcagtgagcagagatcgggccattgcactccagcctcggcgagagacagactccgtctcaaaaaaaaaaattaataaataaagaaggtattctcttactttggaaaaagggtctctgcagatttgataaagaggccctgagacaggaagactgtcccgaattgtctggatgtccccaagtgccatcacatgcttcttcaggcagaggaaggattgaccaacagaaaacaccacatggggacggagacggagactgcagtgatgtggccacaggccaaggaatgcccggggcccccagaagctggaagaggccggaaggaccctgccagagcctccagagggtaccacgccttgatctcagcccagtgatgctgattttggacttggactccagaacagtgacggaacacacttctgttgtttcaggcccccgggctgtggtagtttattacagcaacagtaacagaccttgaaacccgcgccgagggcttggcaggtaagactctactccttctgcttcagctgctgtgtgttgggcacacaggtgttgatattcgtagcagtactactgttcattcaaacagacacacatgaactgttacatgaaggatccatttcacaaatagaaccattagaggaccttttaagaaacccatctcccttatcccctttctgtagtggaacgtggagcaatgttaagattgctggacactctggaacctttaatcctcacgcctggaatcccagcactttgggaggctgaggtgggaggatc

SEQ ID NO: 200953 - DNA, 1000 bp, Homo Sapiens
gagccgcatggggtttttctgtgtatcatgtatggtgtagaagagcaaaatgctctgcaccgtgttttatagggaatgaaaaagaaccccaccaaacttaggatgcatctttccagccgggcccttcctcaagcccctcactgtcacctctggccccagggcaggcctggggctcaccccttggacaacactgaggcccagcccagagaagggacttgtaccctacgccatacccacagctcacagccactcagcccagcatgggttgccccagccagatctccttccaaaacagttagaagagtattgatgaagagtccttcagaattttgattcttcttcctctcctggtttatcttctggtggaaagaaaaacacgtttggaatgtttaagactgagaggtgatgggatttctttttgaggtagaaaatgtggtatgagaatgggagggagaaatagaaaagtattgaagcttttaaaactgtaaggtggccgggcgtggtggctcaggcctgtcatctcagcactgtaaggtggccgggcgtggtggctcagacccgtaatctcagcactgtaaggtggccgggcgtggtggctcaggcccgtaatctcagcactgtaaggtggccgggcgtggtggctcagacccctaatctcagcactgtaaggtggccgggcgtggtggctcaggcccgtaatctcagcactgtaaggtggccgggcgtggtggctcagacctgtaatctcagcactgtaaggtggctgggcgtggtggctcaggcctgtagtctcaacactttgggaagctgatgcgggaggatcagttgaggacaggagttcgagaccagcctggacaacatagatggaccctgtctctacaaaaaaaatgaaacaattagctctgtatggtggcacatgcctgtgattccagctactttggaggctgaggtgggaggattgcttgaacccaggaagtcaaggctgtagtgagccatgatc

SEQ ID NO: 200954 - DNA, 1000 bp, Homo Sapiens
ttagccgagtgtggtggtgcacacttgtagtcctagctacttgggaggctgagatgggagaatcactgggtgacagattgagacctggctgtcaaaaaaaaaaagtgtgtgtgtgtgtgtgtgtgtgtgtgtgcatgcgtataggtttacctgtttttgaactttatggaaacagcatcatgcttgtgcattctttgtgttttgctttttattttattttatttatttattttttgagacggagtctctctctgttgcccaggctggagtgcagtggtgcaatcttggctcactgcaagccccgcctcctggattcacaccattcttagtctccctagtagctgggactacaggcgcccgccaccatgcccggctaagtttttgtatgttcagtagagacgggcttttactgtgttagtcaggatggtctcgatctcctgacctcgagatccgcccgcctcggcctcccaaagtgctgggattacaggcgtgagccaccacgcccggccgtgttttgctttttttgctcactagagatgccgcggccccagctgcacacaaaaggaccctggtgtgggggacccttacaaaagaggacggaaacaacatagttttaaaccaataaaccttgtaagtttcttctgtctattgcaggtagctccggtttattcgttttcattccattttatgcatttaccatagtctctttgttcatgcagttgttctaggcatttccgaccactgctggcagcggcaggagcccttgctgtgtatcccctagggcacaggtgtgcacatcgtgggggtggggtgttcctcaccttcaatggatagtgctaaactgtcttccaggagcggagttcagcctccatttctgttagcatagtagagttcctgctgctctgctgtctttccattatttggtacacttaggtgtctttttcattatcttttttctggcctgcatttttttcaaactggtagatctgtagtggaattc

SEQ ID NO: 200955 - DNA, 1000 bp, Homo Sapiens
actccctcctcatgtttgcctggcatggtcccagtgctggacctcagctcacagaagtggcacagaaatgatttggtcactcattttgttcagattccgatgagatccattttttttatagtcatcatcgatccaggcacatttataaaagggaccttgagtctgagatatgtggcagacactgagcacatctgtcactctgggacacactgacccacactattcaatcatggagaccaggatcacagtcaatgaccagcccatggcggactagcatagccagagtctcacggttagcagagtgttatgattccctaagaggaaatgctggtattttcaggacaaaaggcttaccaatattagagttcccactggcccttgaggatgggagggcagcattattcccaatactttctttccttcttgtcttgcctcaaagggaagaataaattcatccatatgaaacctagatcttggtctatgctgtcctgtaggaagagagtatgtatacaaatctgagaagtatacacggacaatttttagccttgcataagacaggatgtttcactattaacatatatggaatatacactaacttagaactgctgttggacatttcatatgttattcaaagtagagaaaagaacaaaacctttatcaaaaggagattgatgcctcagctcatcagaacattaatgtctgaaactgttagtattaaccaattccttgtgaacataaattcttgattacttaaaagaataaaaataactcacaaaaataaattcactaaaaattgaatgttaccttagaagtgtattggtgtgtttcttcacagctacgttagctggtacaaatgtcaaaattagcacttcactggtttggcaatgaaattccatggaattctatctcacccaatctacagagtacaggggaaattaggaaagttgtgaaacaaaatttgcttcatggactactttgttataaacagttataagaattc

SEQ ID NO: 200956 - DNA, 1000 bp, Homo Sapiens
tcccatactattccaactggtttggaagttatacattctacttatattctttaagaagttattcttaagtgttcaacatgattctttaacatggttgaaatctgatagatcactttgttctggccctgtagaatatgagactctcagacttagatccttgtaaattcttatcttctgtatttattgttttctaatcttttagtttcactgccttttaaaaacccatctagatcagttatcaatgttattatttataagaaatactaatttggatttgtcaacatgttcacggacttctttcttcattgttttctgtatcccagtctctgcttttgaattcgtttccatttttcctgaagatcaagctttagtttttttttaatattcaaatgagggcctgggactcgtgtttacactttcagaatccctgtgtgtgcctgaaaaaatatcctttgtgctcagcagttagttagcctcagcactttaaggtatcattccatgtttctctggaatctctggttgctgatcagctatagtgcttggaagaccaccagctgcccgcctgcttcctttcctcaatctgtcatttatctcagtgacttttaagattttctcattgtttttgaagttcagaaaattcactgcaatatatcgaggtatgaatttgttttcatttattctgcccagaactaagtgtgtttcaaccatcagagggatggtatgccttatttttgggaggtttctctagatgatctctctcctctccttccaaggtctcttttagagcttcagtctgggccttgggatgcaaactcccttttgtgttttctgctcagagttgttttccctgggagctcgtcttcagtggaggctgtggtctgtgaaagtccatactctggagcacagaggatgcagatgagggccttgggtttgctctggcacagccttacaggtttcacctccaccacccacaccactacccctgctggtcacccaacga

SEQ ID NO: 200957 - DNA, 1000 bp, Homo Sapiens
gaaccttcatcacttgtatttggctcagaatgaatcccttcaaatattttacagagtttgacttattttgtcgacatttttcttattcagtattatgttctagcctctttgatcaagtaactcagaatccagtcccatgtgtggacatgctaggtggatctccttggtgtgtagtcccttttctcttttgctgggcccagcacatctgcagctgggttaagctgcaacttattcctaattagaagacacagttagaggcccagtggcctggaggggagatagaggcctgtgcattgtcttcaagtaggagtggtcctagctcttaacagagagaggtggttcactttcttcttcagatggaaaagatttagaggaatctgggaactcaagagtgtagggaaaatcaacccatatattccatttcacctcacaggtcaggattcatttttccccaaccacattcctaactttgacataacagacctgccttgattaagagttttagccctccctggagttctggcaaaaatcaccactaagacatgggtctgtacctgggcctcaacttttcctgccctctctcttcaggtgaggaaagcctctttaccttcctaaagaccctctgactttaacgctggctttcaatagcctattaattgctctcagccttttgttgagctaaattctttctgtaaagcttcaatggagtatagcaacaccgtcctatctcacttccctaagattactctttcccctatattattctaacactgagtacatagcaccagctattgtactcccttttccctatgcaccattctaattcaccacagaggaagttttagtcattggaacaggggctgtctgtgctcctctgcctccagtgatggggtcttcattgctagccaggtgatgagtgagcctgctcctaagcatcatttcattgcctgctttcttggaccactcttggcactgttgggatgcttcagaggctgaattc

SEQ ID NO: 200958 - DNA, 1000 bp, Homo Sapiens
attctatttaagtcaatagataaaataatcatatgattgtgtacttactgtgttcatagtccaatagagagtttatactagctaatagaatttggagttaagtagatggaaaaatcaccacagctgaatcagaggccaaaccttctgtcagacatgcagacatttatcatcccagttttcacgtggctgggtgtaaggttctattctgccaagcataagctcaacaagacctggctgtggacaagggtattcttttctttcttcctgcctgcacatttcccaagagggctgaaggagttcaggaaatgccacccctagcctgggcatggtaactcatgcctgtaatcccagctgtttgggagacagagataggaggatcacttgaggtcaggaattggagaccagcctaggcaacatggtgagactctgtctctgcaagaaataaaaaaaaaaaaagtagccgggcatgatggtgcatgcctctggtcctagctacttgagagactgaggcgggaggatctccaccccaaaatatgatgctttggtgtgctgattactttcaactgaggttatgtggggagcagctcatacaggcagaggttttctctgagcttccttatctaaagacagattatctaaaaggaacttaattgtcatgaatcccctccccaggaaactcactaaccagggaagattggctcctatcacaggagaggagagtagaccttgataacacacgcagactttgtcaccggctgttacctgttcttctgacagtccatttatctttcccccaaactgtttactctcccctaagttacctaatcacctataccctctgtcctaagaagagggtacataagcttctgaatctcactgggttctgggatattcgcttttctttcatgtgatgtccctgtgtccatatctaatttgtataccttttctcccattaatctgactactgtcaatttctttcaaggactcaattattgaattc

SEQ ID NO: 200959 - DNA, 1000 bp, Homo Sapiens
cggcttgtcctgctacactctggtgggaaagacaccgcagcaggggagcagggtgcgcagggtgcagtgggtgacgctcattcgctgaaaactgaccctgctttcaaagccttgtcagttcccaaagctgtatgaagcctttcctgagcctcaacctctagagtctaatttcatcctctgtattttcccctttgttagtccaaactgcgtcattttgtaagcccctttccattttgtagaccttggtcaaagtgaaacattccacgggggttcgagccatgagaaacagcctgcctcttaacatattctgctgggacaaagcgccaggaacaccacattctgccggaaccacctcatcctgggaacacgttaacatcttcccggacagcaagccatactgcctagatccctcctgcccaggcctatgagtaccccagcctgtaatcgctggtgggctctggcattaagctggcccccgacaggtgtttgcaatacacctgtgttgctgtagagccgcccgcgcgccggcaatctcactgtgcgtcattctttaaccttcaccttcccttcaaaacctaacacccttgacgtttatattcaggctattatatatacatacacacatacacccttctgaatcctcccaggagaatataaaaccatgggttaaactgctacacttcagcttcagtggctgcctttcagtgcttcaaatacaccaacctctttcccaccccgggacctgcacgagaaagctgctccactcacccgccgtgctctttcactcacccttcaggtgtcttcaatatcgcctctcaggcctttcccaaccaccggtttaaagtcggctccccacaaataaatacatattctccctcacagtacttcgcacaacacctggcacagcgagagcactgaaccaacactcattcaatgaggaacacgaggtaagaaccaagaccccccaaggtcgccgtactttgtctggtaggagaagctt

SEQ ID NO: 200960 - DNA, 1000 bp, Homo Sapiens
tcatgatcaccctatcgcgtgcaatgaggaaacctcagcgatgtgcaagggctgatcaatgattgttgagtctctctcatcccagtgcaatggatccataaatccatggggtgcaagagcagagaactcagatgatgactaattcttgagcatagataaccaaacttcaggggaggcgttgttttcaatagctaaaagtacctgagttataatcaccttgtcacgtttttgttgggttctgaatttgtatactaaccagagcatgaacaccagtccacagcatatggcagtaccaaataaaatcactcccacccattccttaaagtaagaaaaagcagaggtaagccaagaggtaaagtctccaagggtcactggttccactctggttccattaaggttcaggatctgtatctgcagcctcatctgcaacctttccagctcctgcgaccagttccccttcagataattcaataggtctgtacttctaataaaagaatcattaatatacctaatgggagtaatgcacacatgcggagtggatgccacacaactcatttgtatgacatccatcatctgttccatgttattttgtaaaatatccactctctgattcactaacattaaccctgaggcgatatgagaatctgccctttgcagggttagcaatgcctcagacgatttttctgctatctgacttatggtgtcagcagtattaatttgatgtgcccaattagagataatctttttttgtaaaaggtttatccacattatgcacaaagcatagtgtattttaaatgaaaactcgtactcttatacacccgttgctcttggggagtttgtcgtgcacaaggcacatccaaaaaacattcctttgcaaaaaaacaaaggctaggtagaagaattggaatgtaccggtaaaggtactggccatgatcttactatggcccacaaaggtatacttatcccggtctcaatcatcaggagtaagaatagcaggatc

SEQ ID NO: 200961 - DNA, 1000 bp, Homo Sapiens
tcttagctctgttaccttgggctggttatttattgttcttgagattccattttctcatctgtaatatgggaatataaacagaatctatttttattatttatatatatatatatattttgagacagagtctcactctgtcatccaggctggagtgcagtggcacagtcttggctcactgcaacctccgccctctgagttcaagcaattctcctgcctcggcatcccaagtagctggtattacaggcatgcaccaccatgccctgctaatttttgtatttttagtagagataggatttcaccatgttggccaggctggtctcgaactcctgacctcaggtggtctgcctaccttggcccttcaaagtgctgagatttcaggcattagccaccatgcctggccaacagaatctattttaaagaagagttcacttcctgatttcaggagtaatctactgagcacctcgtgtgtgccaggcaccgatccaggcagaggcgcatggcctgggaagtaccaatatgacgcttgagctagggacactcatatgttctgcaaggggaacagggtgttatgtggattgcataagaaagcatatatgcattgcttaaccccatgcctgatacatacaaagcacttgataaacagtagttgctattgtgactatattcaacactagaaatatgatataaatgtggtcagtgagccagaagaggagtttcatttgataaaatcttcagtttcttcctcaaaggcgtaactgtcttttaattaaagggagtgtattagtccaagttccccagagaaacagaacagacaagatgtagagatgtctataaagagatttattataaggaattggcacacaggagtatggagactggctagtcccaagatctgcagtcggcaggctcaagacccaggaagagttaatgtttcagtttgattctgaaggcaagaagaagctggtgtcccagttggagggtcctcaggcaggaggaattc

SEQ ID NO: 200962 - DNA, 1000 bp, Homo Sapiens
ttacttcactacattgatatatagtttcattatgcactactagagaaccaatatattactaagagtttatataaggcttgtatatttaagtggaattatttatgattaaaaaaattagttcttgattttttgtcccaaagaaaatagcttctaatcaagaatgtatgatcttttcttccaaagaaaacttttttatctctggcccattttgccactttgatggcagcaatgatgaggattcctgtagaaatgtatgctgacatctaagtagatcagcagcccttcaacatagcacttccttggttcaaagaaacagtacatgacaagtagggagatttcagttacaaaagttggtaaatgaaatgaaaggttttttatattcctaattcaaaatttaagctttttgagacttttcttaatgttcccaaggtgacaaccatttgagctggaagttgcattcaccaggagagcagcagccttttcactgaggcagatttaagaagaccagttttatccctgtcaaccatagcattgctactgaagttaaaagcaatgcgagtttagggagttgttcttttaaatctttcttttaaatcttcagacttaacctcctaaatctaatattactgtctaagtacattcacatttttaatttctctggggccattttcctttctgtcttctcttctttctctccagttttcttcctccttcattttccatctgcatttgcatttttctcttttttcttcctctagtcataaagatcctccagggaaggattggccactagaaaagaaattcttttttcagctctgctttgactatcttgcttatgaaattttgctttcctaacacagaaatctcaatgatattgctgaagcaacttctgtatcctataccctggcaaggttcctagaactggtcccagtgggatttctgttttagaagctgccttaagctttgtagcatcatttagtttggtttcctaaaagaattc

SEQ ID NO: 200963 - DNA, 1000 bp, Homo Sapiens
tcttaaaaaaaaaatcaaatataatattactcactcatatctctggttttagttcttaatctaatacagaatgaacaatacaagataaaaggataaaagcaaaaggggcagacaaaaatataatttccacagaagactttgtatcagccaactccagatacacaggaataggcaaaggcactttcctggggccaagagaacatgaccccctttgatttcctatggttgccttctgccagtcctaaaagagctggcaggctggtatcaagcagtgaacattacagaaacagcatagtaagaggtagataattcagaaatcccagcggtatattcaaatataggttgctggtatgaggaaaaacaacctacaatcttcacaaacccaaaagtcaataacaactaatttctcctctctcttccttatctccctctgatgctatcctctcccttttcttggactccttctatcgagattatactataaactactccaagtaagaactattcaattaattttaacatcctccaaatttcccttgcagtgagagaaaattgagtcaacactggtctatcccacatgtatttataaagtaaaagaataataatgtacttctaaggtcacttctaagattgtactaaggctgcaacaacagttccaagagagtttaagcatgctgcctcaccccagcgcttgcggctctcctagccctacctcggtctgccttggtttctgtaacctggctgttctgtgcaatcacttgtacattataggtgtgaaaacagtgagagagggaaatcaactccatgacggtggggcacagaaagcgtgaaccatgattcagagccttacagtcaactgtcatgtgtatgtgtcatactcaaggcaatatcctgcttcttgaggctccttcctctttgcagcctgctgcctgtgctgtatgctatcagccctttgtgactcaactgagacagactagagtcagaaaagcggatggaattc

SEQ ID NO: 200964 - DNA, 1000 bp, Homo Sapiens
aaactttcagcaagatcttaagacagctaaacccaagtttctcagcaagaatttacaattgagctctctttttcttaggctacagaaaaatgaatagaaatttagccaaactgtaacactgaaggcagacatacaacttcaatatccttgtaccaaacaggacaggaaaaacttcaaagattactctaaaatatatcagagaaaacataaaagtctgaatatatttgcccaggtcaatcacgagcaagatgaaagatgaaaagaaatggcataacaactatgctagtgtacttaaaaacaaaacaaaaataataaaccagaaaaaatgtgcacagcattcacaaagcaaataacccagtatggaaagcagccgcaaatttggacaaagacaaattaagaacaaaggcaaattaaccaaagatgcttcataattaaattaaaatataaatcctataaaagcttaaacataagatcataaaacaattagaaccagatgaaaagcgtgattctagaaaaaaaacagactgagatcaaacaaaaaccattatacaatatatgaactaaaaatttataaagatgaacacaaggaggataaaaacactgacaatcagtaaatgagggaaaaaagaaaactcaaaacaataattagagacaaaaactggacatggtggcatgcacctataattccagctactcaggaggctaaagccagaagatcacttaagcccagcagttcaagaccagcctggccaacatagtgagacctccatctcaaaaaataataataatgataataataaagagtagagacaaaagtatgaacacagatgacaaagataattcaacacatggatagttttatcccagaattaataaatacatcaaacagaattcagagatcctaacagaaaatttcagataaaagaaaaccttcatttttataaattacatatagtatacaaatataacctccattttaaatactgcatcctgaaaagac

SEQ ID NO: 200965 - DNA, 1000 bp, Homo Sapiens
cccagcactttgggaggccaaggtgggctgatcacaaggtcaggagttcgagactggcctggccaatatggtgaaaccctgtctttactaaaaatacaaaaattagctgggcgtggtggcaggcgcccgtagtcccagctactcaggagactgaggcaggaaaattgtttgaacccaagaggcagaggttgtagtaagtcaagatcgcgccactgcaatccagcctgggcgaaagagtgagactccgtctcaaaaaaaaaaataaaataaaaagtaattacaaagacaacagagcagtgcttttattattcattcactcattcattcattcattcactgagacagggtctcactctgtcacccaggctagagtacagtgacgccatcagggctcactgcagccttgacctctgggactcatgcaatcctcccacttcagactcccaagtaactggaactgcaggtgtgcactaccacgcttggctaattttcacttttttttagtttttgtagagacaaggtctcactgtgttgcccagctggtattcaactcctgctcaagtgatcctcctgcctcagcctcccaaagtgttgagattacaggcatgacccaccatgcccagactctgagcagtacttttaattgaggaaaaaattatttctatcacagaattaaatacctgggcaaattataaatgaagtgggagaataaaatatttctttttagacttgcaagatcttatttatccaccatgcagcctttctcaggcagctgctagaaaatgtgctccaccaaagtaatgaaatagactatgaaaacataaagacataggatccaagcaacagggaatacaacgtaagagggaggcaatcagcctgaccaacatggtgaaaccccatttctactaaaaatacaaaaattagctgggcgtggtggcgcacacctgtaatcccagctactcaggagactgaggcaggagaatcgcttgaacccgggagg

SEQ ID NO: 200966 - DNA, 1000 bp, Homo Sapiens
ggtagagtgaacacgtgcaaagacacagagaagcgatggagcatggcaggccaaggaaaccagagaggttgatgtggcagaagcagaggaagtcatttggcaagaactggggctggagaaatggtctgggggccagaggatgtagaactttggatgccaggctgaggggcacatgaaatcagactccgtacatcgtttctttctcatccacttgaagcagtatagcactgtggttaatgacatggattcctggagcagccctgcctggtctatactacttactatctatttaacctcaggtatgttacttaatgccttggtgcctcagtttccctaatgaagataacagcattggctacctcataggattccacgtaatgattaaatgagtgaccacacatttagagttcagcacagtgcttgacaagtagtaaacacctagtagttcgtaacaatcttattcctacgaaggccagtggcaggctcctgggctgcaaacaccaggccccagaaagacaattgcagccctctaccctctccctgcgtcaggcagcccacctgccttccccagggggctgctcctgctcacagagggatggccagcctggcctccagagagctggaattgtcattgcagtgacaggagagaacagggctctcagctctggaaacagattcttatcctcatcttggtcttgggaattaggctggaactgggtgagaacaagcttcccagccacacaggcccaaagagagtcacagaagtacagaggccataaactcagccctttcccctctgactcccagatacggaggcgagaggctcaaagccagctcggcaaaccctggggactagctgtggaaagcaacttcaatgagatgcgtagaatgccaaaagttcagagtcaaagggcatccttggattcccaggctttttaggtttgtgtttccactgggtggtgcagagaaagggcacctctgccaccaacttagggggatc

SEQ ID NO: 200967 - DNA, 1000 bp, Homo Sapiens
tgttcatatcaaatagatacaatttgtagatggtgatttaaatgtaaaatacacatctcctttaactaagtcatcctatttctaggtagctatggaaggctgaatagtggtcctccaaagatgtacaagtcctaatttctggatcttgcgaatatttatattacattacatggtaaaagggactctgcagacgtgattaaggatcttgagataagaggattatcctgggtcatccaggtgggcccggtgtaatcacaagcgtccttatataagagaggcagccaggtcagagtcagagagaggagacgggatgacagaagcgaggttggagtgatgtactttgaagttagtgtaaggggccactggtcaagaaatccaggcagcctctggaagctggaaaatcaaggaactggattctctcctagagcccccagaaggaacacaggctggctggccccttgattttagcttagtgaagctgatttcatacttctgacctctacaactgtaagagaataaatgtgtgtgttttaagccactaaatgtgtggcaatttgttacaggagcaataggaaacagatagcatcaaaagaaagaattcctgcagaggcatgcgccaggatgtttattgcggcattgtcctgagtgttaaaaattagtaacaactgcaaatgcctgtcagtagggaaggattaagcaacctggtacagccacactcgtgaatattatgtagcccttttgggtactgacatgctgagctctccaggatatgttaaatgatgacaggaaattgtgggttgtttcacacagaatgatccctcctttatgcacctgtgtgggtaatacacacacacatacaacacaacacaacacacacacacacacacacacacgtctcattcccttgaagagttttcaagattgaggaaggtccttcctggctgttgagccaccaactagttcagtggcaactttggtcctagaatagccttttcagatc

SEQ ID NO: 200968 - DNA, 1000 bp, Homo Sapiens
caggcctgtgtgcgcagggcgattggctgtgtcagcctgtgggccaagggtgattggctgtgtcaggcctgtgggcggagggcgattggctgtgtcaggcctgtgagcgaggagcgttggctgtgtcaggcctgtgggaggagtgcgattggctgtgtcaggcttgtgggccaagggcgattggctgtttcaggcctgtgggaggagcgcgaatggctgtttcaggcccgtgggccgagggcgattggctgtgtcaggcctgtgggcggagggcgattggagcgtgaaaggcaggtcaagtcctgggggaagcacagaggttggctgtggcctggaaaagagcgtggcccaaaacacttactggctgcgtggtccgaccatggtgcaggtgattgcatagtcagtatgtcagctcctgaagtcaaatgaattagtccttaggaacatcccaggcatatatgttgtgtgacttgattttgtgttagctcaggcatacgcattagaacggtcacacatgaggttcgtgacacacacacgaggcagtcggggagcagaatcaccaaatgccaaggtcacacaccaggttcccacgactgtctactactcagttatttttaacagctgttaaatatctcagactcaccccagcctgaagctaggtttctgacaataacatgcatttaactctaagtttacttctgttctccctacacttccccacgtatattattcgagttaatttttgtcttgtttccaatttatttcaaaggatgcgaagtacaaaactgcttcggctcattgacttagatttttcatttactttctctctcttggatctaccaccagtaaatgaatatgacatgtatatcagaaactttgggaaaaaaaataccaagcaggtaagtatgagatgtgttaactaagtgataaaatgcaagtaaagtctagtaggataactttgtgtcttcctgaataatgttctgcaatattagaacttggg

SEQ ID NO: 200969 - DNA, 1000 bp, Homo Sapiens
ttataaaatttgcaaaactgcaagctctttatatccatactttatttttaactcctttaagcccactcataattaaaaccagaccttttcctatacccgcacaaaagaaaactataaatttcagaactgtgtaatgtactagagaggataacacagtatttgagtgtaatggtgatcatccctctccctttcagaattttgtgacaataaacagagagttttgcattactttaaatgtgaaagattacctgtcttctcatattttattcattaattcattcagcaaatatttattaagttatactatgtgctaagcattgtcctaggtttggaagatctatcactgaacaaaacagacaagcacctctgccctcaggaagctttaattatataaatgccaccagagagatgaaagatcaaaactacatttttatttgtaaatccaggacaataaaaatgtctggtttacaatatgtgctagagatcctgaataaatcttttctacacagaattatacttatcctcctacatattaggtgttattggcagctccataatttatatatgaatgaatatggactttttttctgcatcactttcattgtgttacatatttagaaaagtttctaacaaatgttgtccatagattatgtcaaattcataaataaataatgactaaatattgccatatctgaaacaaaatacatgaaaatgtacaaatatgtattttttatacatgtgcatatgtaataagtgcattatggaaaatatttaacacttttaaaataagaattatttctaagaactaattatagaatattattccatgcaacattcattacaaataaaaaaattcatgaccttcaatacatttctagttggtcacagaacttctccaacaggacagcttttaaaatctgctcatttttactcatttcatttattcaagaaatacaatttaaattttattctgtttaacaaaaaaaaattctaaaagctt

SEQ ID NO: 200970 - DNA, 1000 bp, Homo Sapiens
tttatctacatttatgaagtttaagttatgaagactgagtttagcacaaataaccctgttcccaccacttgtaaatacctgtacctgtcaacatcttttcaagcccatttccaggaggcctctcctgatttccccaactggatgtcatctctcctaccacccctaagtcctagaactttaatgttagcgctcttaaaagtatgtattttactactcttaaaaatatgtattttacttcacttaaaaaatatattttcacataagattttaaatttatacccaggtcgcaagatgcaatagatataaaataccaaagtgagataccaggcagaaatatggattcttcaaacaaaatgacctagaactatttagtgtttctctgttggtggcgcctttttaggtgtaatagaattatcccatgtcttttcagagcatttagactcagattcctagggaaatgagtaactgtaacaccattaactctttgtaataactaaaatacgctcctgtccatttactgtcacttcttcagaaccattgtgtagggtgactctgatatccacaagaaagatttaaaagggttgggagaaaatttgtgagtaacatttttatagagaactactgaagtggcgtgagtctcatcctttcaagtacgaaggggtaaggggtaactgccccttttaacaagaatacattgagagcttaatcaatgatatctgtggggtggcatagtggactgggctctgactgccctcctccttaagacatctagagattgaatgatgggctgctttggggtgaaagcaggcatcaggagagttatgatatgggtatgtcaggcctcaggagaaggtgttaggaaacagaagctctctgtgttcccctgccccacttctacctgcccctaggtggggctctaatcttccccctcttttctgattgtggattttaagaccctctggagagagggttccatcctgtgccctgagggaaggaattc

SEQ ID NO: 200971 - DNA, 1000 bp, Homo Sapiens
ttcattgaggattgccctcaacagcttaactactttcctcacattggtgtccagctaagtacctcaagttaaaggtaagatccctttaccagcagatcatcagtgcgatgaattaggttgttgtaaattatggcaagtgtctgtgttgcaagagacacgtatttgggtcatgtgaccagaagcatctaatggtctaattctctttaatgcaaaagtcggtttatgaaagacttggtttaacctgtgtggtataaacttactgaaaatcagatgtagtgagagtagtttgaatgcttgtagtctcagtatctgaaataagtgttttgaaattgttcctgggcctaaagtatttgaatgtttttatgctgaagagctgataagattgcatgtttaacaatgttagataagatatcgtatattttaagtattaatatttatgatgtgatacactggaagcaagaaatcctttcatggtttagtgtagtatgttaaaaattgatatatgtatcgagtcctaatgtcagaatttttaaaatcaagtctgttttgttttgacactaaattggtgagaattgaatgctgtcaacgttaaatatgaacataatttcatatcttctaggaaagtgctttaagtcctttttgtaagcttgggaatgtatccacggaaaggatttttcatagacggaatttccagaagtgaatcataactactgttagagcataagcatgcatgattgtgctgtgtagatcagttttgttgaaagtttagattgttgtgtttgtcaattataatttaatgtttcagtttttatatgaaatgttgtaaatgtatacctttttaaaaacttgaagttccaataacttaaagcattgaaatataaaatgaggtaaaaggtgttttgaatttagtaaaactgttatttaatgcttaaaacttaattgaattgtataattctcaacattaagttgcatagatatgtgttcttaagttgttgaattc

SEQ ID NO: 200972 - DNA, 1000 bp, Homo Sapiens
tctgcatgtacatatccgactttccaagcgccatttgctaaagaggctccttttgctattgtatattcttggtccccttgtcaaagattagttggctgcatatgtgtgagtttatttctggactctatattctgtttcattgtatctgtttttatgactgtatcatattgttttgattactacagctttgtaatatactttaaaacaggatgtgtgatatatccagatttgttgttcttttgcaagattgctttagctgtttagagtattttgtgattccacacaaattttaagattgtttttgctatttctgtaaaaaaaaatgccattggaattttgatagacattgcattgagtttgtaaactgctttgggtagtatggacattttaacagtattcttccaatccatgaacataaaatgtcttccatttgtttgtaccttaatttctctcatcaatattttatagtttgcagtatatattctatattttatagtatttatatatttatggtattcagtatatattctaaaagttccaccaaaaaacctgttagacgtaataatgaattcattaaagttgcaagatacaatatcagcatacaaaaattagttgtgtttttatgcactaacaatgaactatctgaaaaagaaattaagaaaacaatgccatttacaatagcataaaaataataaaataattagcaataaatttaagtgaggatcctttacctcccttaaatttattgctaagtattttatttaagtatttaagcaaggttcttttacctcgcttaaatttattgctaagtattttatttaagtatttaagcaaggatcttttaccttgcttaaatttattgctaagtattttgttatttttatgctattgtaaatgggattgttttcttaatttccttttcagatagttcattgttagtgcataaaaacacaactaatttttgtatgttgatattgtatcttgcaactttaatgaattc

SEQ ID NO: 200973 - DNA, 1000 bp, Homo Sapiens
gaaatgctgttgtctgcaagtcccgtggctgaaactgcctgttgtaaccagagaccactttcatctgtagcaggtgagataacaactgcaaatcaaggactagttttgcccaccacagtcacccaccaatcagaccttaccagcccccaaaactttgctaatatcaaagaactttctcacaggaccacaaaggaacagtcctctttttccaccttcggaccaccctgtctgcctctatattgtgaattgcaattctttcttcctaaatattaaatttagagattcagctctacatttttaatttgctttagagaaggtcaagcagacacttgccaaaccctgtggtttctttgtcactgtgtggctgggttcgttcctcttcattttgtcctcactcacagcttcctttgtctgaagcttccttctcactgacccgcttacctcaggtggcttctcttctgttgtatcttaagaggtagctgctgcaagtctttcttaattcactggggaataatggcagcctctccaggccttctgtgtcaagacctcagtcctggtttgctgcaaagctcctcacccagccttgccagatagtcttgttttgctttcttcttctagtcttcaaatcccactctgattttgagattcttttgttaaagcccagcagcaaggatggtggagcgtgcattgggtgtttgggtggcaggacagctggtttctagtcttgggttggaaaataccaagtgatttggctttggggaaatgactcccctttttggtgtgagggattatttctagtaaattgtaatgaagagatttcatatcagtcaacagaagtggttctgagcatgatcactaagtgggagcgggagtcacaggtcctcaaggcttatctcctccagggcagttttatctctgccccaggaaggaagtacgtggtaatatatttcctgttctggctgctggttggaagttgtgagggtgattgccaaatgaattc

SEQ ID NO: 200974 - DNA, 1000 bp, Homo Sapiens
gaactgcttatactccttccatcttctccaggaaccacttaatctgggggaaactccagcaacctttccaccccaaagagtggggatgctgttcaacttcactacctttcttctgccagctgaatggctctgtaactttcagactagatacgatcacagatctcagatttaggtcagctgggagattataaactcttcgttccacgaaaagatgacctctattattcctggtccttccttaaaactcttaaacgtggccgggtgcagtggcgcacgcctataatcccagcactttgggaggctgaggcgggtggatcacctgaggtcaggagttcacgaccagcctgactaacatgatgaaacatgtctctactaaatacaaaaaattagctgggtgtggtggcacatgcctgtaatctgagctacttcggaggctgagacaggagaatcacttgtatctgggaggcggaggttgcactgagccgagatcaagccattgcactccagcctgggcaataagagcaaaactccgtctcaaaaagaaaaaaaaaactctcaatggtaaaagttatcaaaccagttcagcctgtattgcccttgtgggaaccagagtctcaggccaagaattgggccttatttgaacttagctttagagaattgagcgttcttaacagggcaatattcctactaaaatctctgaaatatttgttatcttctaagagcaggaactcaattatgctcccatatcattgtgtaatatttttcctcttaaaaattcagttcataaatgtccaaaaaaagagatctattgtaactaagtagaattttatctgagtaaaacaaggaaggtcaatattggaaatctatcaatataatctcaccacatagacagattaaaggagaaaagccacagggtcatttctaggtgcataaaaaagcagtgtataaaactgaacactgattcatacttttttataagctcaaaaaaccaggaatagaa

SEQ ID NO: 200975 - DNA, 1000 bp, Homo Sapiens
ataaataaaagtggaggtaattttaaaaagcattcacatccaaaataataatattctgagttataatatttagaaactgtaaaccatattcctagttattctgcagtgttaacaggtgtttcatgaatacaaagttccatggttaaatatgcttgggaaatgctgagtttaaagctaaattgatttttttcttgatgcagacttctctgagcctttactatgctaatttataatgtaaatctccaagaatgatttaagatataaagtgtttctcaaagttacttggctgcgcaaaataatgttcacctaatatctataaaactctggtgattactaatgcatgtggaaaataatactattctgagttatattcttgagaccagcctgggcaacacagtgaaaccccgtctctacaaaaaatttaaaaattagcagatttgtcatctgccacagcaaatgttctgtaaatggcagaaatgactgtagtttctctggaagggatggatatgacttattctgagtgtaaccaagaagttataactgactgatcaaacaacaatttttaaatgtgtcttatcttgaaatagctttaactagtctaacactaccaccaggaatcatatgcttgctacctttcaagaagctgtaaattcaaaattttcaagatttagcctgtatctcctaaactgttcagaaaccaatcaacatggtttgtcttctgtatagcagcagtccattgcttgaagatttatctgcacagtacttatataagtactcttctcattaaggaaaacattgaatttaagtggggttttatccagtgaaatttatacttaaaacaccagatatcttgtaggaatcaggatgttttccatagtgatttagcaaactatttgttaattaacctttgagttatgaaattattgttgatgcagcaaatgtgtggttgttttggtagggactgtttagatttgttgaatttcagaatcttagatgctta

SEQ ID NO: 200976 - DNA, 1000 bp, Homo Sapiens
tgtcgtattcttctgttccctgtcttcttataattcacttatattagactcctaaaagatgtttgttatttgaataaatggaaggagggcctgcgtagccctatttaggcacttggaagagtctgggtgaatggtggaccttcccctagtacccacacattgcttgctgacagccccttcctcctgaggttttctagcagggcataggtgcagttgggctaagactaccaaagctggccagccataaatcacctgaaagcatctaatatacatgaattctttagcccctctcccagagagtctgattccattttcctgagacaaaatccaggaatctgcatttgtataaattctctgagtggttccagtaatcagtaaagtttggggaccaagacactagggcactaacaatctaattttatttttctagatattcatacagctattttaaagtgattgctgtaatgatttcaggatcctgaatgtttttaaaaatacttacacatctgcaaatgtttcttaaatatgccacaagacatccggaaagtatggattagaaggagaagacacaaccacaaatatcatatttgtgaggttcaaatctgatctgtttcttttctgtcttctataagcttcaagtgccatcccagaggaaactgtcctaaatagatggactggagagtgttgaccagtgaagaaagcagacaggaggagaaaaatagaacttaaaataattctagtctctacggaacataacttcctcattggagaatgaattctataaataattgagatagctgatggaacaaatagctgaaagaaaaacatacgcacttagcgtgagcctcaagctgctcctcaatccttcggtgacgtttagatctgagaagcatgtcttaggcattttgaaataatggatgtcatggaggcgttctgttcagacattaaaaataatccactcccttagaaataaacatttaacctaagccatgaggaattc

SEQ ID NO: 200977 - DNA, 1000 bp, Homo Sapiens
aagccggatcttagctgattgtttaatacaatcccagagattaatgacaaggaagatgcctagtcctgaaatgtgtccaaggaatttctctttaatgataattccatattttctgcacttagcaagacacatctacacatcaaactggggattattatgacccaggaaagggacctgggattctttgactgtttcctcttgagggcattagtgtcactgattgggagacagtcctctaaattcagctaaatattggtcaccctctataaggacagtgggacagcgggaagcagactaagtgcaaggattgtgtcttagttgttgtatccgtttttttcccttagtgtatcccaacttctaatgtagtacccatgagctcacagtaagagctcagtacatatttggtaaagagtgaataaaatcaagggatgcattttcaagctctttcggaagacagtgttggagtcatgctggaaagacatcatacattctgcctgtttccttcctaagaaggacacactagaactagaggagattgaaaaggctgaaaagtggcgtgaaggccagacctagtggtaatgtcttatttgcataactcatttagttattatctttacttacatatggggaaatgaggtcagagctagtaagtggcagaaccaggtagtttgactccaggggttgtatttttaactccaagagtgtgttacgtacagagaaggataactagcagttacagaaacagaagtatgaaaaaaaatcattcactaaatagctgaatggattctgttagtggcattagtgactgatgatcttttctggtgaaaaatcatttctttcacatggaacaggtttcagatggagagaaaagtctactccgtaactcacacttctctggcttttttgtggactcctccaagactttgccatgtttcatttcttgagactttatatcagattttctaaaagccattggggaagcccttcataacaggaattc

SEQ ID NO: 200978 - DNA, 1000 bp, Homo Sapiens
aaaaaagcagtaatggctaatattacagtgatttctatgccaacacagtactaagtactttctgtgcattaactttttaaccatcaaatacaacctgattgtcccgattttacaggtgagaaaactagaccttgcaggttaaggaatgtgcccaaaatattgaagtaaaacaggacaactccagagtgagagctctttaaccaccatctatgctgttttccctttaaaacaaagctccaggcaagcaaccctgagaagctatttcgggggaaaaccaggcatcagtacagctttgccctggtaaaaagcactagaggctgatacactgttccaagcactcaaggctggaactcatttccatattctttctcatgacacttcccaggttgataaagaaatcatcaggagagttcatggaggcagtgggtttcacactaaacctgaagattgtaaggacaaggattatgaactgtggcatttcagcaggaatggaaaaggggagaaagtaaatatatagaaatacagtagagagaaggctgaaaaaattacaactgttttggatgcctactctgtgcaatgtctaaaagaacaaaaaagccaggctcattcagggtagataaccagaaattcaccttccaagccaccatttcagttactctgagattccctagaacttgttgaccccgttcttacaaatactgccaaagagccttttcctaagcttacaattcatttcagggtcagagcaaagaggcaaggacagcctgggcagagccttccagacaaacactatttgtacatgtaattactcctgtgagctacaatctgagcaactcccgcctgtcaggcaccattttcaatacttcatacataatcttacttattgccacaacatccctaaaaggtattactactcctattttacaaaagagcaaagattaaaaagagaagaatttgccaacatcacacagctagtaagcaggatccaaacccagaattc

SEQ ID NO: 200979 - DNA, 1000 bp, Homo Sapiens
tctaaaaaaaaaaaaaaaaaatttgttaaaagagtaaatctgccaggcgcggtggctcatgcctgtaatcccagcactttgggaggccgaggctagtggatcacgaggtcaggagttcaagaccatgctgaccaacatggtgaaaccccgtctctactaaaaacacaataattagctgggcgtggtggcaggcgcttgtagtcccagctatgtgggaggctgaggcaggaaaattgcttgaacctgggaggcagaggttgcagtgatccgagatcgtgccactgcactccagcctgggtgacagagtgagactctgtctcaaaaaaaggagagtagatctcatgttaagtgttcttgccacaaaacatgttttaaatataaaagggaggatagtgcctaaatcaagaaacttgaattgacacaacttattccaaaatccctgggagatttctacttctttaaaaagaaatgtgctatctgtaaggtcactcttagctgcaagagagacaggatatttttaagtttacgttgtcatccaaacttgaattggatttctgttactaaggaagaagcagaaaatggatattaagcaggtaatttgtcatagtccattcattggactgtgaatggcttaacacaccatattgtaaatatattttttgaaatctgtttctttccctagactgtaagatcaggactgatttttttaaatgtctgtatcccctcatttggcaaagtattttgcacatagtatatgctaagtatttatacatgatttgctattgaatgtttcctgtggattagtttattatgagtaaaaattaggaaaactttattaccagcaaaaagtagggaggaagttaggaaaaattatcactaaaaatgttagcatatgtgacttcttcttgatacttttaatttttgtactaattaattgatttttagtatatcataaaaaccctatttcttatataattataaggtaacttcagaacataaa

SEQ ID NO: 200980 - DNA, 1000 bp, Homo Sapiens
cctcctcagaatggctcccagtaactacctcctggggttgggaccgaacagtatccgtgccaacacctagaaacatcggaacatcgcagtcacttctgccgtaactcttgtttcagaaacgctaatttgttccaacatgattgacatagtagggtacaatttgaggtaagtgtgaatttttcagttatttatgagcggtctcatttcgggccctgtgctggccacggagacgtggggggacggggctagacggcacccgcggtgaaacctaaggcagcggaaaagccagcaccctgcgcccgttggcctgggcttcctctgggtctcggatgtcggagacaatttttcactggttccccacgtttctgcaagtctcaggagcagatgcgccgacggccttttgctctggactctcgtcaaggacgtgtatatagtgaaagtctcggcgcgcagggacagcgtctccctctggggcagaagcgagatttgctcgctgtccagtgtaacaaagacgacgtccacccccgggaaaggttgggcaggtttgcttcgcagcccctcatgacagtccggcgtttcctaagcacggggatccccggcggtgaggcaaacccagctgtgccacagaatccacctgggcctctgcgtagcccccgtggggtttggggagcaaaggaaacgggagtgaagaggaagctcgttcacactgagcaacgtgccgtgccgtgagtgacagagtcctctgccctgggccagggtctctggtcttctgccagcgtccttcaaccatggcaggctcgcccgtgagcttgcaggccggtgaaagctcaggccttcccagatcttcatacgaggaggtcttctcagctcagtaagtggactgtgaaacgatggtgttcggcctggcccaggagggagctgcaggggaggcgaggctggggcactggcacccgtactggcactggcacccgtaggtctgtctggggaaaaacccggggca

SEQ ID NO: 200981 - DNA, 1000 bp, Homo Sapiens
tacgatttaactgcccggatttttcattactgcaacacccacaagcagcagcggcccgctccgttcttggggagggccagtcagtcttgctcccacaagccgaggaggggagcgcagagtcccggccgagaaccaggagcctgaggccggcgaaggacagagggactgcagcggaggaagtatgaaagaggggccacaggccaggcccaggcccggctcctaacgtgtggcctggtccagaaactccagaaacccacggttcagttcaggccatctctagagggagccccagaggtcaaagacgctggtaaaaagaagatggtgttgggctagccagccaccttggagctgaccccaggccatgctggctagaagaccagcgagccacaggacaccaccagggtctccccaccctcgggtgcgtccttcccacccgcccccgaagaaacagagaggctaagtcgtagctaggtgtccacactgagtctggatgacatcgggactaccctctaccccagtgtccagacctgaacctctggcctataagtctggaaaccctgcttgtaagtgcaacatggctgaagataggtaagcctgtttggtcgcaaagtggaaactgaggccccactgttcccagtctagctttctttagtcccttcctcagatgagactaggagcctcagataagcctggtgaggtcgaaatggagtccctaagatcttccctgcattacagatttactacagagggtcagagcacaggaggtaaggctccccaccccggaactggccctggtcccaaattcgacactccccccccccacacacacaccccaactcgacccgcggctcccggcctgacccggttgagtagtgacttgggctgggtccagaggcgtggatctctcataatctttgtttaatgttgcatttctaagctccgtattaagcagcggtatggacggctggatatttagttgtatataatttacaccctgatc

SEQ ID NO: 200982 - DNA, 1000 bp, Homo Sapiens; identical to SEQ ID NO: 114858

SEQ ID NO: 200983 - DNA, 1000 bp, Homo Sapiens
atgctgtatgactactggaaagctgctgctgatgaactcagagtcccaggccaccccttctcctgctcatctgagattaaccctttctctccagatgggctgtttcatcagattgtcctttcctcttttcagcttttctttgactgccctccaccacagtttcttgctctctttactcctgcaagaaactcccactctcttgctcagtcaccaggactgagcctttttgttctcccctttccagtgctcctgcctcccccgtacttccacttctgcagtttttccagtttcacagccaactctgaaaccctttcagaaatgagagagcagagaaaacccttttggtttcctagttcagccatgttgtgttgctcaggcctttctatgtccacctgcagtttttccagctgctcagccgttctctcagccttttttgaaacagaatattagaagaagaaaaattaaaaacagaaaattctctctgggaggagagtggggaatatcccggtggtagaagtagcaataaattttttgctggtatcttcaaaaactatatccatccctttgtcttctgctgttttctctacagcatttgaaataaaatttcccatcctgcctagccccacatctgggcaccacttatagctgatctgtgctactctgtgggttcttttctttctacccttctccaccccttttcttccaccctttcaaccccttaacactaaataagagagaaaaaaaggatagagaggaaagaaaaaatattcctgaataaagtcaggggtcagaaaatggagcaatgttatcattagacttcctgatgattagtggcatcaagttccttggggcaagtttgatcttcaccatcaggatctccaatttcttgttgtttcttctttgtaaacaactagctacttaagaaacttcaaccaacaaccctccccaaccctgcctcttggggctgggtttatatactctctgaaagtctgtagaattc

SEQ ID NO: 200984 - DNA, 1000 bp, Homo Sapiens
ttgttttttagtcatggtgtttcatcacagcaatagaaaccctaactaagacatatattgagtattgtaagtaatctgcaaatgatttaaaacatataggtggccatacattggctatatttaaacagtatcccattttacacaagggactccaaaccatcagttaggccatctacctgcagagtcttactgttagattcccagtagtaccaaggaagggctaaacttctgaactcaaactaatccttccatctagtactcattgaccttgggcttggagtccccactcctccatggtcccactctttctatagagtctccatatgttaaggaaacagttttctctagttttgtttgtgttttgtgagccgactgcttctctagctccagttttggcataatgcttccgaacatctgatggtattttcttgtcttcccatggactgataaattagtttcatgcaaggtggggtaatggcaatagaacccttgttctaaaccagtctcctagggaactctcttgcacttggcaaatggagcatgctccctggctcactggagatgctctgctaggtatctgcagaatgagatgaagagacagacagtagggaagagagctttagactctgcagagcttgatagcttatgtaatacggggcttgggaggatgggtgtcgaaacagacggtgctgactccggctcagttgtgtactcacttggtgactctgagcaacttactttccctccctcagcttcactttcctcattcagaaaatggagatgataattcctggctggtggcaggcactgccctgaggatcgacgacacagtgaacaccaagtgcttagcacagcacctggtgcacatatcagaaaagattaaacttggttcaaattgcacaaaatattttggatccagagccgtgtctgaggcatgtggtcttgttacttgtgttctcaccagctgtccctccctcccacccgctgtgctcccgaattc

SEQ ID NO: 200985 - DNA, 1000 bp, Homo Sapiens
atgcacgccaaaaagatttgtatgagaaatagtaatatgggaccaaagtatccaatcaggaaatcttattattttgtctttaataatttttactttgggaattaataaacaaaacaattttcaatagaattaacaatccatgagatgcaacatagtgagtgaaaaaagcctggagtcatttagagtcacctgatatttgctgaattgtctattatatgtcaggcttgtgctaagctttggtaatattgaaatgagttagacagatatggtccctgtcctcatagagctgacattttagaggaggaaataggcaaaagccaaccaactaaacaatatcttaagtggttcacaggaaagaaacatggtgctgagatggggcagggcagtggaggagggagttccagagggaacctcctaggacctgactaggtaacaaaggctgagatcagaagggatcccagactctggagaggaatattccagaaccatgaacttacagaagcaaacgttttgagatgggaaagaatttgcatgttagatctaggtctcaatataaacatggtcatttatgagcataagctggcaatttcctttatctaagactcttagtttcacatttgtaaattcaaaataataatgcctatgttgaaagttgatgtgaaagttaaagctttctgtggcaaagtgcccaagacattgtagaccttcagaaaatgttgtttctcttttctgccaatattttataacttcagatgaattccttacaaaagtcatagcaataacagcaacaataaaatgttaacacttcccaaagatgtgtcattttttttccaagtagcacttactgtaaaaaaaaaaaatccaactcttggaggctttaaacaggattcagctgtaccctaacaactgtgaaggtcacagattaccatgcctattttttaatccaagtatatttcagtgactgcaaaaaatcaaaaaggaaatataacagattgaattc

SEQ ID NO: 200986 - DNA, 1000 bp, Homo Sapiens
tctcctgcctcaagcctcccaagttgctgggattacagaaaggcaccaccatgcccggctaatttttgtatttttagtagagacggggattcaccatgttaaccaggctggtctcgaactcctggtctcaagtcatcaaactcctggtctcaagtgatctacctgcctcggcctccccaaagtactaggactacaggtgtgagccaccgcacctggcacaaacttttatattaacttctaaactcatttttatatcatatatgttgcacatattttatatagatttttacatagattgaccaacttactctgattttggatgccacacttcataccaaggttgctgtttgacccaaaaaaaacccaaagattgaaatccaatgcagatgataatctgagacaaaacggagaagagaagggccccagatataagacccgaaggtggtctttgtgccacaagttctttccaggcaggatttaaactcactatattgaaaagaaaaagaggaaaggtttgtatttacattaatctatcactatataaggcataactagattcatttaggaactttaaaaatttgtttttgcctaacaattctttaatacaaaaaatcttcaaaaaccaagccacatatcgtacatatttaaataatctgtaaaagtaaacagtgtaggctttttgaaaaacgcctcaggaataatttttacatttctattgaaattcagcagtaatattaacaaataaaactaggccaggcacggtggctcacacttggaatcccagcaatttgggaggccacagtgggagaatcacttgagcccagaagtttgagaccagcatgggcaacatagtgaaaccccatctctacaataaataaataaataaataaataaataaataaataaataaataaataattttaaattaaaaaatagtaaaactaaatataaacacaataactataaagttaatcatctcatatatttaagaggccattat

SEQ ID NO: 200987 - DNA, 1000 bp, Homo Sapiens
tttcttgagcgtttcacaatcttcgcatctttaatttatcgcacaacaaattggagaggatttagcatgtatttaattaatttgacgaaaatagttcaacaactgtaaacaaggctgaggaaacgcagttgctgggaagcagcgcctggctcctccgggccttcgcaagggtcgcggcctgaggttgagtttgggggagctgattggactctgcaggacggggagacgcggtacagcctcagtgccagggcctggcgtggtggggggtcggggagagctgggtgggaggtggggggtctggtcaggggtgggtcacaggcccactgcaagccttggcttgttcatgctcaagaagggatgggaagcccggccctgcttccagcccagggccctcctgctgggtgagtgaagtgcattttgcctctggaaatccctggacatattcaaggtgcttgtgtcccttcctgttctgtccctcaagtcctacttatccttccaggtgaagctcagacaccacctcttccaaaaaatgtttttgtttgtttgtttgtttgtttgtttgagacgcccaggctggagtgcagtgggtcgatctcagctcactgcagcctccagctcccgggttcaagagattctcctgcctcagcctcccaagcagctggcatcatgggtagacaccaccacatctggctacttgtttgtatttttaatagagacagggatctcaacatgttgcccaggctggtctcgaacgcctgacctcaagtggtccacccgccttggtgttccaaagtgctgggattacaggtgtgagccaccgtgcccggcctgacatttgtagaattaatgaaaggggaattacagggccagcaccccccatttgtcccttcatggaggtgacatcctgcagaggatgtcggggtgtttctgagtttgacggagtggccccctccatccagaccgggccagtaattccctcattcctgctaggctggaattc

SEQ ID NO: 200988 - DNA, 1000 bp, Homo Sapiens
taaatgtgcagaacatgcaggtttgttacacaggtatacatgtgtcatggtggtttgctgcaaaatgggtgtaggttttgcaggtaattattatattattaaaagataacagaatacctagctaaaaaaaaaacacgaggaggaattgatgggcacatgtttactgagcacatcctgactccagaattaaaaatccaatttatgcctctgcaatccaataaaatttttccttaagaatccagagatcagactttcatttcagcaaccgctccaatatggtttctcacctattcactccaacgaagctgttcctatcaaaacataagtgctatccatattgttaaattataaattgaatcataactcctcagccttcattttaatttatatatcagcagcatttcacacagttgatctccaccttctctttgtaaaactttttttatagaattccataacacttaacctaatttccccccaccacatttttgataattacccctagtccttttttgcaggtttcatctttactattttttaaatgttagaggaccattaggctcaggattttgacttcttatctttttgtctttgctttcttactaatttttgtgtcattaatttcctgatatttcatgttacatctaaacactggacactacacccaacactccctgacttatccacgtggatgtcagttagaaatctcaaaattaatatgtctatatggagccactgaaactccccaaatttgctcttccccattctgtttaatggcaactcccattttatagtttctcagctcaatattcttggtgtccccttttaattctgtctttgtagctctgtcactctctttctgtatctgtctgattctctccctctctctcctctctctcttgctcactctcactctctcttcctgcttcacacacacacaaacacacacaggcccacacacacacacacacacacacaattttcagatctgatgtgtatg

SEQ ID NO: 200989 - DNA, 1000 bp, Homo Sapiens
tttcctgtaattgtgccctgatctgtaattcacagtgaattgtttaggctcacacagggccaggtcagagagtccctgggactctccgttaagggtcccattgtcgttctcttcctgttatgatgtaggaactaatccggaggtaagtatctggggactccataggttcccagagtcagtcactgtgcctctgttcaggaatggtaacagtaaagaggaagtgccactgcaaggtactagtggctcctttgcaattgtcaccgtgaagagactttcctttccatgtgatggcaatgacacagagggaatgaatgctctggtcacaggggcaggacagatggctgcctatggccatttaataaagtccccgaggtatgtcctttgcttttgttttactctcctttgctttagagtccctctcttccttgtccccaaagttttgcagctcacaaataaaatctcaaagaaagttaggctcttttgtatgcagatacacaactgattttaaaagttttccatgccaaagagttgataatttttgtcctttttcagaaacattttgactcctcaaagagaatatttcaattcctcattctactaaagccaaactttaggcattgtaacagaagacactttacttagagtgggcatttgttaatgtcctttctcactgctgtggcaaaatacctgacataaaaaagcaattgattttgtctcgtggattgagtcatccacgagcatgggtgccaaggcaacagatgcacgaggttgctggttacaggtatccttgggttggaaacagagaggaattcatgttactcctttttctccttttgattggggccagaaccccagaccatgggatagggctgccaacaatcacagtggcttttcttatctcacttaagcgttaccataaacatcctcacagacatacccagaggtccaactctacgatgattctcaaacttatcaggttgccagttagtcttacatgatc

SEQ ID NO: 200990 - DNA, 1000 bp, Homo Sapiens
atcagagagcagtggttctcaactggtgtgatttttgtactcaggtgacatttggtaatgtccagagacacttttgcttgacaaaactgtggttgtgctcctggcatctggtgggcagaggccagagatgctgctaaacatcctgcaaagtataagacaaacccccacggcaaagagttatatagtccaaaatgtcgatggtactgaagttgtgaaatcctgttctagagaaatgaagatcacttaacacaggtatttactgagcgttcactgttttgtagctaatgcaccacatgtgcaatattaaagtataaaccataagccagtatcttccacagtgagattgccttagtgcacagagaaaggattgaggtgatgctccatcctatgtaaattagactcacagcaaatgataaatgttctgaaataattttttttccctttggcttatgtctttttttatagaaatctgggctgcaatttaattacagaactgagccttggaacatttcaggcctggcacggaatgcagtttttacacaacttgtaagtgaaatagaagatgaatacgtgtaaacaactattttgtataaaaactcatacaattattggttagctgggtataagcccattatgaactctgaaaagtgtgtcttaagatccattcgtttttctcaaatggggaaactaaggtacaaagcggccaagagacttacacagcttatatatgacctgctctgcttgtcctagttctgacctatggcatgggcaagaaaaggcatcaaacaagtgaccctcaaattagccttgttgctgggcgggtggctcaggcctgtaatcccagaactttaggagctgagtggggcggatcacctgaggtcaggagttcaacaccagcttggccaacatagtgaatccccatccctactgaaaatacaaaaaaattagctgggcgtagtgatgcagttttttgctccctggaggactttgtgttaagctt

SEQ ID NO: 200991 - DNA, 1000 bp, Homo Sapiens
ctctctctcagagtttctgagtggtggtgtctggaggggctggacacgcaagggagctggcctcgtgtgtgtctgtctgtgccgggatgtatctgtggcttctgtctctgaacgtgccaggggttttgtgtcctgtgtgtgtctctctgtgggtgctcctgtgtgcaggaacttggggccatggccagagagggatgggcctattcctacaatcttgggaggcctccacaggctgagctggtggggagggtcctgaagggtagagtgaagatggggactttactcccagcggagaagaagaaaccagaagataggcttggggcatggatgggaaaggtcttggaactaggatggggcaagggaaacaaagccccaaatggagtatgggtccctggaagttgacacactcttagccctcatgggggcccagcccagtgggtaaccccggggaagtggtcacatgacgtgacacttctcagctgattgcttgagatcccccagtgtggcctgggccttgtccttgagtgagcccaggttcaagccaggaaggctggccagctgcccaaggactgaggccttctcctcctcctcctctgtgtcctcctcgatcatcttggccagctcccggggcagctccacgtctccacctgccatctggatctggctctcatctgtctcgttctgaagggaagaggggaagagggggtggggtggagtggaagtctgtgaggacccagagttgaaaggacagggaggaggcttggactgggttccaggcccctagattctattttttctttttttttttttttgtagagacgaggtctccctatgttgcccacgctggtctcaaactcctgggctcaagtgatatgcccaccttggcctcccaaagtgccgggggaatacaggaatgagccactgtgcccggccccttagattcttgagccccatgttccagtgagctcagctcccacccccacatcccaggatcaagctt

SEQ ID NO: 200992 - DNA, 1000 bp, Homo Sapiens
cttaaaaaaaaaaaaaggcttttcaattgtgaaacatcacagcaaaataagtttcatttttacaactagtaaaatattagactatcataattatcaaagttttatgattcatagaaaattgtgtatagactcagaatgagaaatctagtattaaaaaaaactgtgttgcttctactaagaaacactaatattttcccaataatcagacagtagacatctgttcttaacattagtatctttcagtgctaacacttaactattgtaagattgcaaatggctctgggcagggccaatagtcacactgctggcaaaagcaaagaaaaactaataatggacatggataaacaaaacaataatgctcaatgtcattcattcttcattcaactgcaaagataagttgaatgacaccactatcacttaaaacacaaaaaagggaaataccaatttaacaaataccttattttcacccagatatcaacaatgcgaaggaaaaatcagtatctcacatgactttgtagaaaacagactgaacaagtaactgcgttcccagtgaactatgagctactatgtgtggcacacgtcattttgtttacttaatgacatatgaaaaccgtaacatcttcatcctcgatgataataaaggcaatgtgctattgaatttcttaatcttccttaaccatatgctatggtttggatgtgtgtcccctgcaaatttcatgttgaaatgtgatccccaatgtcagaggtggggcctagtgggagatactgaatcatggggtagggggtggtcctctcatgagtccccatggtgattgataagtgtgttctcactcagttcacgtgagatctggttgtttataaaagtctgggacctcccattctctctcttgctccctttcgtcatgtgacatgctggctctccaataccttccaccatgattgtgtacttcctgaggcctcaccagaagcagatgccagcaccatgcttccttaaaagctt

SEQ ID NO: 200993 - DNA, 1000 bp, Homo Sapiens
tgacatatttatgagcccttccaaatattagtaaacatctatagtctcaatgtcctgggacattaccattcttccaatattaaaacatttggggccgggtgcggtggcttacgcctgtaatcccagcactttgggaggcagaggcgggtgagtctcctgagataaggagtttgagatcagcctggcccatatggtgaaaccctgtctctgctaaaaatacaaaaattagtcgggtgtggtggcgcatgccagtaatcccagctactcaggaggctgatgcaggagaatcgcttgaacctgggaggtggaggttgcagtgagctgaaatcacactactgcactccagcctgggcaacacagtgagacttggtctcaaaaaaaaataaataaaataaaataaaacatctgggagaccgggtgccgtggctcatgtctgtaatcccagtactttgggaggccgaggcgggcagatcacttgagatcagaacttcgagaccagcctggccaacatggtgaaaccacatctctactaaaaatgcaaaaattagccagatgtggtggcgcacacctgtagtcccagctacttgggagactgaggcacgagaatcccttgaacccacgaggcagaggttgaggtgagccaagatcgtgccactgcacaccagcctgggcaacagagcgtgactccgtctcaaaacaaaaaaacgtgtttggagcaatatctaggatggacaaacaggaaaaaaagaagtaatggaaaatgaaagaagttgcaatgatgagccaaataggatgggcagcctggctgcagtggctcacacctggaatcccaacactttgggaggctgaggcaggtggatcatttgaccaggagttcaagaccagcctgggcaatatagtgagacctcatctctagaaataatttttttaaaaaaattatcagggtgtagtggcatgtgcctgtggtcccagctactccagaggctgaaatgggagatcc

SEQ ID NO: 200994 - DNA, 1000 bp, Homo Sapiens
tggtctcgatctcctgacctcgtgatccacctgcctcggcctcccaaagtgctgggattataggcgtgagccaccgcgcccggcctggtctcccatttcttttcctctttccattctgtgcacaccttgccttcccagagcctggccacagatggcagtggggccagggtgggttgagtttagacatgcctgttcattttttccctcctcaaaccatgccagaaccaaagccagctctttaggtcccagagtcttctggacgttgcatgactctctctgtagccatctgctcacttgtccctgccaagaggggacatttgtgcttggggtttccatgtcactagggactcggtttccaccattcattcccttttgccccaatctactttatatctaagatcacagaaatcagaattttgtgtgtatttatttattgtgcctcttcttttagtactaagtgcacagtgttcagtagggcatacagaattaaattacctttgctttctccaattccatgttgactcatgtggctgttaccaaggataaaatatattagtggacaaaatggccttacctcatcccattacctgaaattatataccaatgcttatatttctgtaatactgagagttcttactgccttgtttaatataactcttatttctgctgtcagaagagaagaaacattgtgaataaatgttatgataaattattttcctttcagcccctcatgaataagtctttatgttaaaaaaattaataaaaaagccttttcttattgttgtacttggagtataatttgaaatgtgaatagtcttatttaaaataagagaagtgccatagaaatctgaatccagcaagatatatcatcatttttactatagagtcttttagtattaagaaatactttaagaatgaaaaaagaagagagaattatttggaagatgagggtggggagataaaaggaaaagcctggacttatctgatggtaatggatagg

SEQ ID NO: 200995 - DNA, 1000 bp, Homo Sapiens
gaaatgagggtaaaaaggcaggcaggtcttggtatacaaagaaagatgcttagagtttatcctgtgactgagagaagccaaggaaaacttttaaacagggaagagaacacaattaggtttgtgtttcagaatgatcaatcagtgacagggtagagaaagacctactgaagggagaagagaccgagacaggctgatgagttaggagactacctcattagtctaagcaagaaataagtgcctgaactaacactggaatgatatggagaacaggaagtagaaacaacaagactcagtgatccattagaatatggatcactgggcaaggtggctcacacctgtaatctcagcactttgggaggtcaagacgggtggatcaccttagcccaggagtgagatcagcctgggaaacaatgcaaaaccccatctctatttaatttaaaaaaaaaaatctaattaaaacaaattttttggtcgggtgcggtggctcacgcctgtaatcccagcactttgggaggccaaggcaggtggatcacgaggtcagaagatcgagaccatcctggctaacacggtgaaaccccatctctactaaaaaaatacaaaaaaattagccgggcgtggtggcgggcacctgtagtcccagctactcaggaggctaaggcaggagaatggcgtgaacccgggaggcggattttgagacagagtcttgctctgtcgcccaggctggagtgcagtggcacgatcttggctcactgtgatccctgctcactgcaacctccgtctcctgggctcaagcaattctcctaactcagcctagcctcctgagtagctgggattacaggcacccgccaccacacccagctaatttttgcatttttagtactgatagggtttcgccatgttggccaggctggtctcgaactcctgacctcaggtgatccgcccaccttggcctcccaaagtgctgggattataagcatgagccaccgtgtccggccaaaac

SEQ ID NO: 200996 - DNA, 1000 bp, Homo Sapiens
cctacagaatgggagaaaatttttgcaatctactcatctgacaaagggctaatatccagaatctacactgaactcaaacaaatttacaggaaaaaaacaaacaaccccatcaacaagtgggtgaaggatatgaacagacacttctcaaaagaagacatttatgcagccaaaagacacatgaatcttttcttaatctttgcattgttacattggttgacctgtgctttctactattgcatattctccagttttagattattttattgaaataaatagtgcttaaatcaaggagtaatgcttaaaaattatcaaatgtttctaatgttatttacagttatacatgaaaaaaatcatctcagtactgtggtttttgcaatagctccattagctacttgggaattttggcattgtattagccagtgtagttcaataatgctgcttaataaacagcccccaaaatcttaaaagcttacaacaatagcaacaataagtaatacttatttttcttgatttgtatagtttcattcaacttctgtatatatttttgtttggtttgtttgcttttttttaaattttcatctcccttaggttttttggggtttgtttgattatttgtttttctttctttcataattattcatacttgagaaattatgtattaataataacatattggcaaattggtgaagcatttgtggatacttgttgaaatatttcaggttcacaagaggagagaataaagagctctcctgagattttctacagctctactctaccaattcaggaatatagaaaatggcaatattaagaataaataaaacgcagtaaaagaaaatattattcttccattctgaaagagcttcattctcactatgtttctgtagcaattgctggtgccctggtagttgcttttcagacacagcccccatagctgcttgtttgcagatacaaactcatgggctggatttaatcattccttttataatatattaactgaatt

SEQ ID NO: 200997 - DNA, 1000 bp, Homo Sapiens
agggctccccgtccctgattttattaatactagtcctatccacctgtgccccagttctgtattcctgctcacagtctctgggatcttgcttcataatttaaccctttttcttgacccttcactttcttttgtttagacaaattgggactgaactctagtttcagtaccagtttgagttactgttcaaataaaattataggccactttgggaggcagaagcaggaagatcgcttgagtccaggaattcaagaccagcttggacgacatagtgagaccctgtccctacaaaaaaatttaaaattagcatggtgtggtggtacatgcctgtagtcccagctactggggaggctgaggtgggaggatcgcttgagcccaagagctcaagttagccatgttggtgccactgcactccagcctgggcaagagtgaaaccctctctcaaaaataaaatgagtatcccctccccacgccccctcccttcatgatttcaattttaagcatcccaccgtccaaccacaacctcccactttttagctctacgaaaccagtacccacaacccttctacctaactgggacttacaagacattgacacgcccacgtgtgcactgtcctctattccgctacatcctcaggtctccttccatagcttccaccgtagcttacacctaccaactctcatgctttattttcttgtttgtgctcacttagcaaaaccgaataacctgattaaatctaactctgcctactccatgcctgcaggcatggctgtggtatgccgagagttccatttaaagttcatgactactaacctccagcgggtttatattgctcagcagtcatccggaatttcccttaatttttcactttcccactctcctgaaagtctttttttttttttttttttttaagatagggtctggctctgctacccaggctggagtgcagtggtgctgcaatcttggctcactgcaacctccacctcccgggttcaaggaatt

SEQ ID NO: 200998 - DNA, 1000 bp, Homo Sapiens
cagtggctgtactatttgatatttgcagtagtaatgcatgagagttccagtttctcctcatccttgctaattctttttttcctcctttttattacatttattctaataagttgaagtggtatttcattgtagtttttatttgcatttacctaatgcttagtgatgtggaacatcttttcatacttttttggctatttgtttatttgctttggataaacctttatccaaaggtttattcaagtactttgtccattttaaaaatagggttgcttgtctttttgtcatcgagtttaaaaattctttatgtattttggctgttacacctttatgaggtatttgatttgtaattattttctcctgttctttgggttctctttcactttctttggtgtccttttgttgcacaaaagttttattttattttatttttattgttattattttctgagacggagccttgctctgttgtccacactggagtgcagtggtgcaatctcggctcactgctacctctgcctcctgggttcaagcgattctcctgactcagcctcccaagtagctgggattataggcatgtgccaccatgcccagctaatttttacgtttttagtagagatggggtttcaccatgttggccaggctggtctcgaactcctgaccttgtgatccgcccatttcagcctcccaaagtgctgggattacaggtgtgagccaccacgcacagccaaaagtttttaatttaacgacatctattttatctcgtttgttgcctgtgcttttggtgatttaagaaagtattgtcacgtttcaaaggtcataaatatttgctcttatattttcctttaagagtttattatatttttagctgtcagatttagagctttgatccatttaaatttttatgtgtgatacaaagtaagggtccgactttattttgcatatgaatatcaatttttttttccagcaccatttgttgaaaagactgtcctttccccattaa

SEQ ID NO: 200999 - DNA, 1000 bp, Homo Sapiens
ggcatatttttaacattctgtttgacaaaatgggaaatctgcataaagcacttgtgtatattgaagtcagatggctatctcaaggaaagcactggtgcaatttttgagtcacgagcagacttcataataaaaccagtgatggtattaaccaatgtggtttaatttttaaatacggcataataaaatgtattaatatgtggaagatttgaagtgaacagatattttccaaatgtgtctaacatgtaatacttcaaaatcatcggtatataaaagatccattctaagtgccaaataaactaacggtgttaaaatacagtgtataggaatttcaggccaaaagtggtggcttacacctataatcccaacactttgggaggctgaggcaggaggataccttgaggctagtagttcaagacctaggcaacatagcaagaccctgtctctacaatttttttttttttaattagcagttgtggtggcatgtgcctgtggtccaagctctaaaatagaaatttaaaaaaaaataaaaattttgttgatattgtttcaaactccactttgaaactaacctttaaaaaccatgtttgtaaagtttcggtggtgtatcaataaataatagacataattatctgaagtggctattaaaatattcctctttttccacccacatttgtatgaggttagtttttaaaaaatagacttcaaaataacatatcacaatagatgaattgcaaagcaggtatgcacatttaactgtcttctgttataccacatattacagagatttgaaaaaacgtaaaataatgccacttttctcaagaaacaattatagttattttaaaatatatagtatttatgttaacatgaaatgggtttttaaattgtaattttaaaataaaatgttaactgttttagaagtttctcagttttaatttttaatatgataactattgctaaacataacccacatagacaaaagctctttgaggtcttcagtaat

SEQ ID NO: 201000 - DNA, 1000 bp, Homo Sapiens
tataatattcacttgttaactattctattcctgaggcctagtccttggtgggcattcagtaatgtctgttaagcgaatgaacctcattggtcttgccttcagtctccttccagcccacctgacaatgtattttttgcattgcatttttgaagcatcatttcaaaaacacagttctgggccgggcgcggtggctcacgcctgtcatcccagcactttgggaggccaaggtgggtggatcacttgaggtcaggagttttgagaccagcctggccaacctggtgaaaaactgtctctactaaaaatacaaaagaaaaattagctgggcatggtggcgggcacctataatcccagctactcgggaggctgaggcaggagaattgcttgaacctgggaggcggaggttggaccacttcactccagcctaggtgacagagtgagactccatctcaaaaacaaaaagcaaaaaccaaaaaaaaccacagttctgcttgcattttgcattgcattttgaagcatcatttcaaaaacacagttctgcttgcatcctacacaagctcacaaaaccttcaagcattctccattgccaataaaataaagtacaaactgctgaatgtcacactcaagatctttcatggtctagttccaaaccacccttctaggcccatttcccagccctcattttccctcccccttcaatcgccaaatgattcccaagcacgccatgcaggttcacactcccaaccctgacttaatctatgtcccctgcctggcatgaccttcctttggccctccttattcatctgatggaatttcacttattcttcaaaaagcagctcaaatgtgacatcctctaatgctttctctagctccccttagggttctcccatataacttagctcataatccccttattacacgtttcccattatagtttagttggttttctcccctgaccctctgcctttttttttttttgagacagggtttggctcttttgccc

SEQ ID NO: 201001 - DNA, 1000 bp, Homo Sapiens
cgtcatggcctcccaaagtgctgggattataggtgtgagccaccacgcctgtcccatcctcatcatttttattactgcatcttattctgtttggggtttttgtttgggtgattgatttgaggtgtttgcttgtgtgtctgatttggggaagacgttcccaggtaattagtgtaaaatttttaataagcctcataagctttacaattatttccctggaggacaggttttatttaggatttaagaacagtaggcagtagttgtgacattttgaacattttatttctttacccaaaaaataactaacttttgtaaaaccaatgaaaagaaatgaaaagaaaatgaaggaccacaatgctttatgggtttgtgtttctgacagcttaagtcctgctcttgaaagtagttacacagttggcaatatacaatgaatcactgaagctgtttgaaaactttttcgtttttttgtgaaaatccaaacttggaggagaaagagcttactgatgtcaacacttagaaagcagtgttctctttatatagtcacttactgtcttgggtttcattttcggttcagggggaaattaaattcccttgcaattgcactctctgtctaccgagaaattttatctccacattgtttttacttgctgtttgtcctctgggtaaaatattgtgtccgtagggttagaagtgcattttagaggtcttttggttcatcaggctgttccttgcaggtcagtatttatactatttctgacccagatgtctcctgtattctaagatcctagtaaaaaagctgggggaagggagaccattgtaagtacacagcagccttactttgtgagctcatgccttagttaaaagattaaccgaagaattttatttcaccctattgtgttaccaaacattagatcttattgcttctaactatatttttatgtcctttattcatccctctttatcccctcctccccaaaaaagaattattttagcatctgaattc

SEQ ID NO: 201002 - DNA, 1000 bp, Homo Sapiens
actggccactggctcctttgcaggttgtggctcagtcacaggacctgtctgagtttcatcttgtggaatgagaaggttggggtgggtcttcctgaagtcccttccaactctgcatagttaatagtcaccatttatcaagtgctttctgtgtgtcaggcggtgtgaaatgcttgacagacctaatcccatctcattctcccagagcgaggctcttttatttgccctcattttgcagatctcaggcttagagctgaggttgcaatccagtggcctctaggtctgatccaggccacagatgcgttttgtttgggcgcagctgacatactggagagatttttcaaaacaggggatgttggctttttttttttttttttttttttttgagacaggttcttgctctgttgcccaggccagagtgcagtggtgtgatcacagctcattacagcctcgacctcccaaactcaagtgatcctcccacctcagcctcctgagtagctgggaccacaggcacatgccaccatatctggctaattaaaactttttttttttttttttttttttttgtagagacaaggcctcactatgttttccaggctggtctcaaactcctgagctcaagtgatcctcctgccttggcctcccaaagtgctagggttatagatatgagccactgcacctggctgatgttggctttttaaagttggaaggtctagttacactgagcctgtgctgcccggtggcaacaattggctggatctggctctcaggcaccacctccacatggggctgtgctttcctgacccctcagtcttgacacagtactgggacttgcccttgtacacagtaacttcatgaatttatgttttccaccttgtaggtacttgagtttgcaaaccttgactgaaggctgtgatgttatactgtatcagtcacacagctactgttagggacagtgttccagcttgagtctgtctgactttaaactgtgaaccatcctgct

SEQ ID NO: 201003 - DNA, 1000 bp, Homo Sapiens
tcccttccagtagctcctagattcactgaaccaattaccttgctacagtaatttgttaaaggatagagagttaccttcccatcctttaacaaattactgtagcaaggaaaactcttgtgctatgattagccaaatttgagtcatatgctttacctctggtccacccaaagatcatggactataggagaggagtggttcccggaagaacaaaatggagtactgtcaccaaaatatagaaatggatactgatggtgaaaacacaatgcttactacaccaactaactcaaaggcctatgcattgtttcttccttaagcttttgaaagaagttagtcactgccatggcactcactttgaatctcttccaattccacacacaatactgcattttttcccctgaatcatcaggcagtcatatattcagttgccattgaaaagtaaatgcatgattatgaaagttaaccagctggaagggtcagtatttcagtacatcacttttcaggacactcccaactggtattgcaggtagtttcttgtccttaaaattctttcctgttgtcaagctacctgaaacgtatttgtcctcgataccctaggggcagggtggctgataactaaggtgcctgggaaacacttcagaagcaagtgacaatgaattggcttaagaagccaattcatcttttagatggatatttatactgtagaatcttgaaaggaaaatttatctacagatatgtctgttttcagtttcttttcctttttgcactaacaagttattttccccacatgacgtttaatctaccttacaaaacatttttaacattttagttcaaaatttgcttcagaaaatggatgactttggtgtgaaacgattgttgactctattattctagaatttgggatggcgcctctagtttgctgcttccttggacaccaaacataacattctctgttctaggacgtgcttcaagtcggtcatgagactggcagaaaatcaaacca

SEQ ID NO: 201004 - DNA, 1000 bp, Homo Sapiens
gctgggcgggtgggcgcgcgtcctggggatgctctcccggggtggcgctgggagtttcggtccttggggtgtgctggggtggagctggggcagtaatgctgcttacgaaacttaaatctttaaagcaggaaaagtagttcgggccgtaagcgggagccccgccgcggctaacatggagggagagcggggaggaggagaggggacgggctgggccgacggggacgagacggcgactggagcagcagcgagttcaaaaaggcgcctcagttccgtccttcacttcagaggagactgagagtagttggggacttttccctcccaagtctgtctcctgggggcgggggcagaggaatcgggattcttcttttggggcaaaattaattttcctttctctcttttaaagtgagatcatgattctctgaaatgtattttcttctttgtgaagtgtcctcgggttttgtgttaacatctgggcaatgtaacggccttttcccaagtgttccctgtaacgttgcgcaagtgtaagagaagatccattgctctgctctttgggggctcgagtttccagttaaagcatttcagcgcttgttttttttgtaccaattttttcaactctaacgaccttcctgagacactacaaacaaaccaacaaactctttgctcagaagccgctccattaactcaaaggtttatggacagaaaataaacaattctaaattccccgggctccagtctccaggaaagtgaggtcagaaactaaacatttgataattatggcaggaaatatggaaggaattaaaaagcatgagggagaagaaatggaatgcacattacaaaagaaatagctccctggtgggtggtttatgctccctgtttgaattttttccttcatattacagtttaaccacacccttagcatcgcagcttgactctgcccaaaaaagtcataaatgcatacaaggtcttcacaatttttaaaaaatacgcattgtactgaatt

SEQ ID NO: 201005 - DNA, 1000 bp, Homo Sapiens
cacctgaaaaaaacttatttcagctacagacctttacaaaaaataattacaagtaattttgtttgctattatattctattaatccaagtttttcaaacctccatgacatgttctaatgggtttcaactttcttcccctccttagtataaatgtacactgccatatttggtcactgttagggactgaatggtgtcccctaaaaagatatgtttaaattctaacctcaatcctacctgtcaatatgaccttgtttcaaaatagcatctttgcagctgtaatgaagtcaagatggggtcacaagggtaggctctgatccaaaatcactggtgtttttgtaagagggaaatttggacacacacgtacatacacagagaacactgtgtgatgacagagcagagaacagacttacgctgccataagctaaggaattcctggagctaccagaaactgagacagacaaagaaattacctattctagagggttctgaggggcaaggccctgctggctgacaccctgatttcagatttcttgcctccagaaatgtgagagaataaatttctctcgtttaagccacccagtatgtggtacttcgttaccgcagcccgaagaaacaaatacagtcacacatttgtgattatatgtgaaagtggtatattataatcacatgatcagatgttcaaagtaatacatttcaatagaacatctaaattatctttcagtttaatttgttcttcaatgtttccactgaacaacagagcctcaatctctctttattattttaatctataaagggcactttttgtaatgatctcatgtgtcttgctgtttacagcacatctatgaaccattgatgtatacatatatcctcaaacaaaaactcatgctcaaacaataaatctgaagagacaaaagattaatatttttaaaagatttagaaaacggaatggttatgaagtacttcacatcaaaacaatcagacatgaatactattttacaccc

SEQ ID NO: 201006 - DNA, 1000 bp, Homo Sapiens
ctggctgtcctggaactcactctgtagaccaggctggccttgaactcagaaatccacctgcctctgcctcccaagtgctaggattggacagccagggctacacagagaaaccctgtctcaaaaaaaaaaaaaaaaaaaaaaaaccctaaataaataaataagtaacatttaaaatatttggttttggtccctaacacagagaaaccctgcctcaaaaaaaaccctaaataaataaataaataaataaataacatttaaaatatttggttttggtccctaacactacaacaacaggtaggtagatagctaaatagactcttgaaatgaatgtggtatctttgttaccctgtctttgttattcaatgttatactaagtataattttgacatcttgctctgtagaaaccctatactttggtattgaaacgtggcattgctattgtaggcgaacccatccctccacggactttgactgaagcaggcacaatggcactttgctacagtgctgcttgggatgcacgtgttatcactagtgcttggtgggtgtaccatcatcaggtaataagggctgtggtccactttcctgatctcttaagagctaaacctcattataaatgctaagctatagaaggtaggcaaagtacctaccttgttaaagcttatgtttaagcagtagagaaaaatgtatgcatactagtaggaagtgctgtgaagaagaaaacgaaacaatttttgttgttgtttttagcaaggtctcactatgtaactttgactggcttggaacttgctgtgtagaccaggctggtcacagagatttgcttgtctctcttttatgagtgcttagattaaaggtgtgtgtgccacattcctgctgctgggggggggggggggggagaggcttgtttatttatttatttggtttttcaagacaaagtttttctttgtatccttggctgtttttgaattcactttgtagaccaggttggcctcaaactcagatc

SEQ ID NO: 201007 - DNA, 1000 bp, Homo Sapiens
caaccccttgtcagtttataagtgaagaaactaaactgtatggagaccaaatgacttgtcctagatcatataattgtgttgatgtagtaactaagttcataaagatgctagatcttttagcgtacaaactagactttcttctatgatagcatgctgagatacttattttatttatttatttattttgagacagagtctcactttgtcagccaggctggagtgcagtggcacaatctcggctcactgcaacctccatctcccgggctcaagcaattctcctgcctcagcctcccaaggagctgggattacaggcgtgtgccaccatgcccagctagtttttgtatttttagtagagatggggtttcatcatgttggccaggctggtctcgaactcctgacctcaggtaatccacgcacctcggcctcccaaagtgctgggattacaggcgtgagccaccgcacccggccaatactttcttaatgagtagaaactgctaccattctggtataaagtagtactgaaatctgtgatataaaatagagatgaaaagtaagagatatccctagaggatttcaaagattccatgaggtcttttcctgaagttatagaaaggacataacactaccactacattgcagctttatgctgcttacgtgtgtatacattatgagctggtttttcaaatccactgatttaatgtcatatgtttcactaaagggttattttattgtaattatttactaaatttatagtgtgctataatttagatgatactttgcaaaacttcttattgttcatttttcataattcagatgagtatctcataggagataagtctttttccaggctaaaatgaatctaaattctcagattcctcatactttaaatttacacatgggacagtgttgtcttccttccttccttccttccttccttccttccttccttccttccttccttccttccttccttccttccttccttccttccttctttctt

SEQ ID NO: 201008 - DNA, 1000 bp, Homo Sapiens
tgaagtcattcaagaagcattcgccgagcacctaataatcgtctgacccatcaacaaatacaattaacaggccaggtgcgggggctcaacctagtaatcccagagctttgggaggcccaggtgaaagcagactcgcttgtgggtaggagttcgagaccagtctgggcaaaatagtgagctccctatcttattaaaaaaaaaaaaaaaagccaaatacaataacaaaataagtccacataatagtaaatgctaagaaaaataaaatacctgcactgtgggggcagcaagagaagggaagatctgagaagaccagaagactgaagagccacgggaagacctggaggaagagcatcacagacggagggaacagctagtacaaaggtcctgaggttgaaaccaggttggcttgtcagagggacagaaagaagtcatgatggaagaggtggaggggaagaggagtgaggggagggggcaaggtctgaatgtggggcggagaccagatctcgccatctttggaggcctaggagatgagcctgggtgccctggatcttggaaagccatgggggagtgagatgatttccatctgcaaagtcaccccggctgctgggtggagaatggactggccagccagagtggcagcaggaagtccagcgaggaggcagttggaggtgttgatgaagggacgaatttgagactggcttcagaaggagggtgggaggacttgttgatggatttcatatagggaaaggggaaagaaaggggggtgaaggatgacacccagcggctgtctgggctactggacggatggtgatgctcttgcccgagggcaggtgcctcagagtgagtaaggaaatcaagacttcagtcacaggcatgttacgtttcgagatgcccactacacttccaaatggatgcactgggtcagccaatttcctgaacttcctggagcaaaccggagtccccttaagagtcctcaaacctggtgtcatgggctgaattc

SEQ ID NO: 201009 - DNA, 1000 bp, Homo Sapiens
ataatcatatagttaagaataaaacacctgtgtgcctagaggaaaagaccatttgctaaaagcatttgttttactaaaaggatttttaaaattactgctataggctatgatactaagatagtggaaaacattgcaaaaattattaaaataattcagccttgaacttctaatttgcaatttcattcttatcagattggagtaatggtaaaaagttgccagaaatatgggtagctcttctgctttgaaatcatagcctaggaccctgacggtccccctagttgtctgcagataattgacagagccccttctctgagccagggatgtacttggggctccatcgcaatgggcgaaggcagccctcggcaaagttttcctcagctccaggatgctcctctcaccctccgatccataaagccctaagagccttggcctgtttccggagagtgccctacaccaaggagactttctccagagagtgaaaaaacgctgcaacttaccaatactaaattcagttttgtcaaggccagctctttgctggcactactattattaaaagatcagagctggccgggagcggtggctcacacctgtaatcccagcactttgggaggctgaggcaggcggattacaaggtcaggagattgagaccatcctggccaacatggtgaaaccctgtctctactaaaaatacacacacacacacacacacacacacaaaagttagccgggcgtggtggcaggcacctgtagtcccagctgctcaggaggctgaggcaggagaatggcgtgaacccgggaggcggagcttgcagtgagccgagatcgcgccactgcactccagcctggacgacagagtgaggctccatctcaaaaaagaaaagaaaagatcagagctgacttgttaccatcataaagcactattgtctcagggatacctggattttaaaaactgcctgtcttaagttgggttccccagaagcagatgctgagaggagaattc

SEQ ID NO: 201010 - DNA, 1000 bp, Homo Sapiens
cactccagcctgggtgacagagtgggactgcatctcaaaaaaaaaaaaaaaaaaaaaaaaaaaggctattaccaagggtccaaaaaagaaaggatgacagtagaagtcaagacagggaagtacagtctttaagattatttcaggcagggcacggtggctcacatttgtaatcccagcagtctgggaggccgaggtgggcagactgcttgagcccaggagttcgagaccagccaaagcaacacggtgaaactcggtctctacaaaaaatacaaaaattaaccaggcgtggtggtacgcacctgtagtcccactactcagggggctgaggtgggaggatcacctgagcccggggaggttaaggctgcagtgagccgtgacggtgccactgcattccagcctgggcaacagagtgagaccctgacttaaaaaacaaaaaaagaaactatttcaaatcacgtaagttaaatcaaatgtgaaagggaaaataagggagggaacagaagaggaatgagaattagttccgttttaaccactaagatttgcactaactactgaacataaacatggagctcctccccactccaccaaccctcagtaaatatagatccagatcttagcagagtgttcagggctagagactcaaatctgggagtagtcaacaaatggactgtaggtgatgtcctggagaagatgccaacacccaagcagagaggggagacccctgcccagacctgaaagcactctaagatcgccccagactggctgggctccacacatcagtgttctgcggtacagcctagattgagaaacattagtgttacagaggtaccatttttaaaaaaaaaagccaaaagatggaacatttaaagactaagccaaggaggaagcccagtttacatggaaacaagaataattaccaccacctttcgattattacctgggtagcactgggaaggaagaggataggccagaccttgtctttctgagtgacaaggaattc

SEQ ID NO: 201011 - DNA, 1000 bp, Homo Sapiens
agggactaaaccggtagaaataattgggggaatttcctttcctaaatttgacaggtaaatttgcttttcatactttctgttttagttgcttatatttaaactattttgagaaggagaaggatcaattaaaatgtattttatttagtgctaattgaatagtaccatatttaaacttataccaatttccaaagtacttgatgtaactatatataattagtaatagaatataggaatcatgatttttattttggtaaattaaaggtagtttttctctgttaaaatgggatttaaaacacctttatgaatgaatccctttatctagtttatcattgcctttcctatgaaagtagtgatacttgactaatactgtctaacttaattgctaccatgtggtgaattctagagaattctttaggggaaatttttctactacatttattttcaatgacaagaaattgggagaatttataatagctcttatcatttcatgtattttaatatctggactatatgttcggtccaaagagaatatatcacagagtgatcataagttgaaatgagataacacatgaaagtattttgtaaactgcaaagtcctatgcaaataaatgttaggtgatactattgttctgagattagcatttgttctttcaaggtctctacagaatagtcacagttcatagcttagactctagatccacgtgttctaagatcaagtctaggttcagccccttactagctctgtaacccgggataagtttctaaacctctctatacctcagttcctctgtctgttaaaatgacataataatagtttacccacttcaaaggattgttgtggagattcaatgaatttatatatgaaagtcatttgcaacagtgtcttggcacacagtaaatgttatgtgttagctattcattactgtcattattactacatcatgtagaatagataattgctttctgatatatgctaatcatgtttttctctgtggaattc

SEQ ID NO: 201012 - DNA, 1000 bp, Homo Sapiens
tttcaatgctagacatatatttttatgtttgtcaacaaaatacaaagtacccaggtaactctttaaagaataataattagtaattatttctgcctttcacatgtattatatcattcactatttataacagtcatgcaagactgacatcatttattattattgttagtattattatgtttatttaatatccccatttcatgataaagtccatgaagtgacttttccaaggttgttattcattaatatgaggagttcacattgtaaaatcaaattaccttaagtaaaaaataataataataatagtatttgaagtgtaaaattccgcaaatagttcaggaatgtctggaactaggtgctcaaacaatataagaaaactaggctctttttttctctttctctgtcctcctcctctttcccttatcttctccctttttgtcttttttgttctcgctcatcaatcatctttctctgtgttagttatattctcagagtagttgacatagtaacccacagaaactttagtgtacattactgtagctaacaactgcataatttctctttctatgatttaaagaaagaatcctagaagggattctcagtattctggcttgatatatgggcacatctttgaactaatcacaataagcagcttggttattcgtgcacagatcttagtgtatgtgactgtgtgctgtgaaagttcctaagtgggatgtactgatttgcagttcactgtctccactggaatggggccctaacatgaacctaaaccaagttggctagttccttacccttacctagccctatctgcattcttctcattgaggtgagctttggagatttgggagacagatactgtccctgaatcccagatgctgagtatgatccttattaacccacaaggaactacgagcagcagcctgcctgaaagaatacttctactgacacatctcctactgtttttttcaccatgtacaagactagaactcttagttgaatt

SEQ ID NO: 201013 - DNA, 1000 bp, Homo Sapiens
agagactgcggtgagccaagatcacaccattgcattgcactctaggacagagtgagaccccatctaaaaaaaaaaaaagattccctttaaatttttttttttttttagatggagtctcactctgttgcccaggctggagtgtagtggtgcgatcttagctcactgcaccctccacctgcctcagcctctcgagtatctggaattacaggaacacgccaccacgcctggctaatttttgtatttttagtaaagacggggtttcactatgttagccagggtggtctcgaactcctgacctcaagtgatctgcctgccttggcctcccatagtgctaggattacaggcgtgagccactgtgtctggccccctctaaacaaatttttttaaaatttacatggaaaagaataattgcaaggagagcaaaaagacactctgaaaaacactgagtggataaaataatgagtgggaaaaataaagcgaagagttatccttaaccactctaattaaaattaaaaataataaaataaacagaaagaaaaagagcattccagaaacaggtacaacagactgagatggaaaagtttatcacagtaaagaaagtgagataaagactgaaataaactatgatccatctgaagtataacgagcacatgggaaaacatcagaaaaagtaagctggggccacatcacacagagcattgtcagtaatgttaaggattttaacttaatagccttaaagcaattacaagttatcagcagtacagtggaaaacaacatgatcaaatctatgttgttgttattttttcttttctgtttttttttttttttttttttaagacagagtctcgctctgtcacccaggctggagtgcagtggtgcgatctctgctcactgcagcctccgcctcccgggttcaagcgattctcctgcctcagcctcctgagtagctgggactacaggcgtgtgccactatgcctggctaattttttgtatttttagt

SEQ ID NO: 201014 - DNA, 1000 bp, Homo Sapiens
caacttaccaccatggtcactgtggccggggcccctctcggctgctgggggctgcagcccactccgggcccaccccaggagggccaaatccaggtctcctttctctagtagggtcaaagagatcttcctggccagagcctcactatcaggctcatggagcagagtgcagtggtattccctggagaggaggtcctccttcagcaggttgtccaagagggcctgcaccaggctgggctgatggctggagagcagcattctcacctgagtcaggatggcctggaagttgttcatggcagcccttggagtcagggcagctgccctggccagtgcctggaatctccgctcacccagcatgcagcatccaaaacatgaagtgaaaaccaggacgagggaacctctgcaatttattacagtttatttctacttaggaagatttcctcttttgcgttgtaggctggggttcctgatgaacggatggatattggcttttgggttgattcagactccacagatattctctgggtcctacccaggtgcatgtgccagagaagcccacagccttctgttggagccaatctagtattgctaagaggaaggcgacatgcctccttagaggacctatagggtaataggtcttttcagatgttttaccatagcaagaaggcattgtggtatagaggttaagcaaataggcttggagctaatctgcctatgttcaagtcccagatctgctgctccttgccaattatgtgactttgggcatgttacatagccttttttttttttttgacagggtcttgctctgttgcccaggctggtgtgcagtggcgtgatcataactcactgcagcctcaacttcccaggctcaaacaaacctcccatctctgtttcccagtagctgggactacagactcacaccatcatgccccgctaattttttatttttttatttttagtagagacagggtctcactctgtttcccaggctggtcttgaattc

SEQ ID NO: 201015 - DNA, 1000 bp, Homo Sapiens
acatctgtcctctacctaccatgcccagtcctctccaggatgccacaagatgggttggaaggccgattactgcaattgtccaggaaagagctgacatctgtacatcacactccaagaggcagcagacacaggggtgaagcccaagggctctagagccagacaggccaagttcaaattccaactgtaccactgaactagctgagcaacattgggcgatgctttactccaaccaccactcctagcctttcctccccggcagcccgtggagactaaaacaccaaccaaatcatttcactcctctggtctcaactttccaacagcttctcatcacttctagaataaaatccaagtgcctcctcaaagccttccaggcctacagcagaggcagccagtgctcaccaaactctacattctcctctttgtcccaggctccctgctgtgccacatttctctgcttctttgcgtgggtggggtgatggtggatgcggagacttatgccttattcttgtcaatggagtgtgagtggaggtgacatgtgttaacccaggtcgaagtggttgagagcagtgtgccttctccacactttccccacatgccagctggatggacatccagtgaggaccctgaggaaatggcagagtcacacagtggaagatgcctggatccccaagtatgcgaatcagaactcctgtacctgtcttgtgacaacactaactgaactactacacaagcaaaaattgattctttattgtgtcacgtcactgaaacttgggttttttttttttttttttacagcagctggcttatcctaacacgaggccctacatcagtcgacctcagtccaaacccatgcctgctcaccctctccctcactgtgccccaccacaccaccttctcgtagctcctcagactccaagctcattcccatctagtgccttggccaggccgtgttccctcctcctggaatgctcttccacaaagctttacatgatgttttttc

SEQ ID NO: 201016 - DNA, 1000 bp, Homo Sapiens
tttgtgattaacaagtattaccacccagatcctctacttaactcattgtgtgacattgaggggtggcttcatctttgtatgtctcaattttctcacctgtaaaatacctttttttttgtatctattgaataatcccccttattctgctttggggcttagaatcatatggtttagtaaaatgaattacatagctatttctctttttatttttatttttataactgtgtttaaggaaagtttagtataattgatcataaaattgtttgggtttggatattttctttttagaatctgatgattatatgccttggggataatcttcttgtgaagtatcttactggggttctctgtatttcctgaatttgaatgttgtgctctttatctaggttggagaatttccttaaatgtaaatgggataaaagccacaattaaaatacacagactgacaagctggataaagatccaagatccattggtatgttatcttcaagaaacccatttcacgtgcagtgacacacacaggctcaaaataaaaggatggagacaaatctaccaaacaaatggaaaacagaacaaagtagatgttgcaaacctagttgcagacaaaatagacctcaaaccaacaaagattaaagaatgcaaagaagggcattacataatggtaaagggttcaattcaacaagatgagctaactatcctaaatatatacgcacccaacaaaggagcacccagattcataaagcaagttcttagagaacttcaaggagacttagatactcccacaataatagtgggagactttaaaactccactgactatatgagacagataagtgagacagaaaattaacaaagatattcaggacctaaactcagcatgggatcaaatagatctggtagctatctatagaactctccacccaaaaacaacaaagtatacattcttctcaatacctcatgagaaatactctaaaatggatcacataatcaaaaggaaaata

SEQ ID NO: 201017 - DNA, 1000 bp, Homo Sapiens
agccaccgcgcccagcatatatttttttacagagacaagatttcatcatgttgcccagattggtcttgaacttttgggctcaagcaatccactcgcctcggccttgcaaaatgctaagattacagacatgagccaccatccccgggctaaaaatagctgggtgcggtggagtgcacctgcagtcccagctatttgggagcctgagatggcggatcattgagcccaggagtttgagactgcactgagctgtttgcaccactgccctccagcctgggcaacagagtgagacccccatctctaaaattaattaattaaagaaagatagataaaagaggacaaggaagagagatagttacttccatagacaggggaatagttggagtatatagtgagcagatcaggaattctaagccaggactctagaaaatgcaaattgaaggccgggcgcggtggctcacgcctgtaatcctagcactttgggaggccaagtcgcgcagatcacaaggtcaggagatcgagaccatcctggctaacatggtgaaaccccgtctctactaaaaatacaaaaaaaattagctgggcatggtggcaggcgcctgtagtcccagctactctggaggctgaggcaggagaatggcatggacccaggaggtggagctagcagtgagccgagattgcgccactgcactccagcctgggggacagagtgacactccgtctcaaaaaaaaaaaaaaagaaagaaagaaaatgccaattgagccctttgcaagctttttcttaggtctggaagacccttcccatttctggcccctcattccctcgtttttgtgtttgtttgtttgtttgtttgtttgagatggagtctcattctgttgcccaggctggagtgcagtggcacaatctcagctcactgcaacccccgcctcccgggttcaagccattctcctgcctcagcctcccgagtatctggaactacaggcgaacaccactaaacctggc

SEQ ID NO: 201018 - DNA, 1000 bp, Homo Sapiens
atttatttcttattccaaacagcaattagattggttattgcaaaatactgatatttggcctattgcatgtgcaaatttttttaggcaaaattgataatcattatccaaaagacaagttgttaaatttgcctctatgcttgcttttgtattccctgtaaatttacacatgcagcccataaaaaaatgcacttactctatttacagatggctcatctaacggtaggcagcatatgtgactggatcacatgttcattctcttgcgtttccccctgcttctgtttttgaaatgctgaaaaatcaagcttttaatttgtatactgatagctaatatatagctcatggtttacaattacttgaaattgtacccttttttttaagatactgctaattctcaaattttgaaattatttatgcaaatacaactcaatttaagagaatgtacagttccttatcttgtaggtcatttaagaactcatactggattgccaggaccccttagtgagggcaatgccacagcagatttgcataccaggaaggttataggccttccacaggaacaatttgccaaacaatttcattctttacatcatcaaaatagtaatagcttgagacagcaatttggtatttcaagagaatgtgcacgtcaaattgtaaagacttgttctcaatgccctcagtttctaactgtaccacataatggtgttaatcctcaaggacttatacctaatcaattatggcaaatggatgttactcatacttttgattttgaaaaattaaagtatgtacatgtgacttgacactttttcaggctttctagttgcaattgctttaataagagaagcaattaaaaatgtaattagtcatttcctgcattaattttattttttatttatgcttggtgttccaaatcaggttaaaacagatagtggaactggctattacagtcaagcatttgagatgttttgttgataatttaacattacccatattactggaattc

SEQ ID NO: 201019 - DNA, 1000 bp, Homo Sapiens
tctctactaaaaatacaaaacatcagctgagcatggtggcgtgcacctgtagtcccagctactcggaaggctgaggcagaggaatcgctagaacttgggaggcagaggctgcagtgagccgagatcgcaccactgcgctccagcctggccacagagtgagactccatctcttaaaaaaaaaaaaaaaaaaaaaaaaagaagtacccatatttacgaaattcaggcctgaaagctatgcattgagaaacattcaactcttagcagacatccacctgtaaggtaaataaactatgaaagaaaaaaaattaggataaggtgagtagggactatgaacaggaatttcatgtggtaaaagtattctgcaaaatggtgatacgcttcaggcaaacaatgagaacaaaacttactctgttgttttttttttttccaaaaaatttttttcattatttttattgtaaaaatcaatatatgctcattgaggtaaaattcagaaagtaaaattaagtaaaaaataaataaatataagtacccataaaattctcaaaagggaaagtgagaatgatcttgctaagtctttcacaattatatgaaatataacagtgaaatataatattatatcctgagagacgtcatgctggatagcaatttaaacagaaaaaatgcagtccttattacaacaaaattacttttccataaagcaccacagcaaacaaatacaggaacccaaatggaacaatgaaataatgagatcactgtgcctcattatttataacagctgaaatttgtatttgctatgagaaaagcaattatgagcaataaaggaagtatgattgtagcatgcaccttcattaattcactcaaaaaaaatctgtattaagtgtctgtgaaatgctggagatacagcagtgagcaagaaacgaagtctctgctcctaggaaatctcacgagctgatgggtaagactggggctggatttacctgaagccagtgaagaaaagctt

SEQ ID NO: 201020 - DNA, 1000 bp, Homo Sapiens
agcaaaatggttcactggggcattgcaggttgattgtggaatttcaataatagcatgggtggtgggagaaccttcggacgtccacagacagcagcctggatgtataagagatgggggtggtgttctttccatctggagtcctccgggagctgtcaagcctggaatctttgcaatttaggcagtctgtttgtaatggtctcaagaaaacccattctgcctacaaatgcggtgacctttaatttttttttctcagatttttccaagatgcacattgactcttcctgtcaacgtggaaggctctaatgccgcctggggcatttagattgcatttgccaatcgctgactgctgtagccaatttgttcctgatctcaaggtcgattttgaataactttagctgggctaagtctcttgcattgaataactgggaaataacctattaaggtagcaggtgggcgggggcaggagggggcagggggctgtttctattttgtagaagttctttgattgtgggtaaatgagaaggcttctagctctgccagtcatggactatgtggccttgaacaagggagggaaagaaagaaacacatgccaagtacctagcatatgctagacacagtgctgggcacttcacacatgccagctgcttaatctactctgcgaggtgaacatcgtgatctccatgttacagataaagaaacggagtcccggcaacttgcagggttgagcttggatctgtctaaagccctgcccctccccttttttttgtttgtttgagaccgagtcttgctatgttgcccaggttggtgtgcaacagcgcaatgatcttggctcactgcaacctccgcctgccaggttcaagcaattctcctgcctcagcctcccgagcagcttgggattacaggcacgtgccaccatgcccagctaattttttatattttttgtatagacgaggtttcaccatgctggccaggttggtctccaactcctgacctcgtgatc

SEQ ID NO: 201021 - DNA, 1000 bp, Homo Sapiens
aatgtcaccacaatccatagatattggtcattctaattttttgcccttaacaatgtcaaacaacttgcagcatccacttgtgcagatgcttcaaagccagtcctgcattctatggtggggtcgggggcaggagatggggatcgtggtcccggttgagatcagggcttccttgaatgtggggttcactcttggatgactggcccttgaaagcacccctggcactcattctattaagtgatcttttctcccagacttttaaaaggcaaagtcccagaatccaagtccaacagaaaagaaaagtggagctttggccaggtgtggctcacacctgtaatcccagctctttgggaagccaaggcaggaggatcacctgaggtcaggagtttgagaccagcctggccaacatggtgaaaccccgtctctactaaaaatataaaaattagccgggtgtggtggggcatgcctgttatcccagctactcgggaggctgagggaggagaatcgcttgagcccaggaagcagaggtttcagtgagccgagatcacgccattgcactctagcctgggcaacagagcatgactccatctcaaaaaaaaaaagtggaggcttactggaagaaggggtcaggggtacccagagagccttctctctagcctcatcctcccagcttgtattcttatgaacccccaaatccagagcattttgaaaagtgccccaatccctccctgacattttacagatggaaaaagaggctcaaaagatggcactccctatggcccctccagtggggacagagatgggccagcggccaggcctcacttcataccatgccttttccctcgtcactgacccaacgatctttttttcttcccaaagggactaaaggggctacagataggccctgtccccacagtgcgctttcccagtccctagagaggcctgaggagggtggcatgctctcattcctagacagttggtgaggagctggggccccgaattc

SEQ ID NO: 201022 - DNA, 1000 bp, Homo Sapiens
tctgtccaccaatggaactagcttccctttgcaaagccccttttataggcagaattccttttccatttccttggggttttatttcactttgcgggctgtttgcaatattctggtttgagggagtaaaagggaaagaggaggaaaatgcagggtgagttcctccaaatgtcaggctgggtagtgccaggacagctgggcctgaaatcctgtacctaaggaggggactggtatggctgagaagaatgtgagctcagcctcatctggtttcttttaatgctcgaagcaaagagcctgagttattgcattctttctcgatgtcttacataaaatcagattattaagtgcagagacagtcgactgttctctgtcctcctggctagcttttagcatccccatagcaacgtcaataaacagagaaataaatgaacttctgaagaacaagtctgttggctttgctgtctaaattattctcactctctctgcttaaagacacacacacactgttattgttctccttcctaaatctatgtgcttttttagcccggtgatgacgtttgagcttttacatttagattttgatccattttgaatttggtttctgttactcctttgtttaaaaaaatcttcaactactcactgtcatctacagaattaagtctgtttcctttgcacagtattcagagttcacttgatcgctttcttttctttctttgttttctttttgaggcagagtcttgcttgctctgtcgcccagactggagtgcagtggcgcaatcttggctcactgcaccctccacctcctgggttcaagcaattctcttgcttcagcctcctgagcagctgggactgcagtcacctgccaccatgcccagctaatttttgtatttttagtaaagacgaggttttgccatattggccaggctggtctcgaactcctgacctcaagtgatctgcccacattggcctcccaaagtgctgggattacaggcatgagccacca

SEQ ID NO: 201023 - DNA, 1000 bp, Homo Sapiens
aggtttcagtccaacagattgccaaagggcagaagaaatattaaaagtatttcacaactagtgtggcatacgcactagctaaccagaacagatgcccggaagatgccagctggcagcaattctgcctcttccctttgcagggccagcattaaccccttagatgctgaactgtggagaggttctgggttcctggcagagggactaggtagccaagagagtagggggtctgggacaaaagcatgtcaatatttcaacgatctgtactgtggtgttctggctgaacattcactctgctaagaggattagaagacatcagaaaaataagccagtaccgctgagcagagcagaagagtgactcagcgtccactagcaaagatctgaagtagctcttcctcccagcagctgttccttctcttgccaataaccagggacatcctctagaccaggacaggggtatagtagtgttagtagcggatgtcaggaaatctaccctacagtcttggttctactacttttgtgtgtccttaggtggatattttgatctgggcctccatatccctgtttttaaaataaaaaggttagactgaagtttttcaaggatccttctctctgtaggtagaaattattatttttttcatgatctgcttttttgtttgttttgttttgttttgttttgttttgttttgtttttgagatggagtttcactctattgcccaggctggagtacagtggtgccatcttggctcactgcaacctctgcctcctgggttcaagcgattctccttgcctcagcttcccgagtagcttcgagtacaggcacccgccaccacaacccggctaatttttgtattattagtagagacggggtttcaccatgttaaccaggccggtcttgaactcctgacctcaggtgatccgcccacctcggcctcccaaagtgtgggattacaggtgtgagccactgcctctgactatgatctggtatttccaagtgaattc

SEQ ID NO: 201024 - DNA, 1000 bp, Homo Sapiens
accacgcccggctaattttttgtatttttagtagagacggggtttcaccatgttggccaggctggtctcgaactcctgaccccaggtggtccacccaccttggcctcccaaagtgctgggattacaggtgtgagccactgcgcctggtctgaaatgtaaatttttaatcattaagaagacacgtaggctaggcgtggtggctagcctactaaaaatacaaaaaatacaaaaatacaaaaaattagctgggcgtggtggtgggcgcctgtaatcccagctactcaggaatctgaggcaggagaatcgcttgaacctgggaggtggaggttgcagtgagccgagatcgcaccattgcactccagcctgggcgacaagagcaaaactctgtctcaaaaaaaaaggacatgtaaatgaaatgtctctattgcagaacgtgctgagtttatgggatatttacactctaactcctgtatggaactggccctctcttcacgtagaagagtttcttcttactacagaagcagactctccttcatcagtcacgtggtatgttatgactatggctagtagtcatttcccttctgttagtaccaggtatcttgtctggttttgttcaggtcatttattatgttttacattctaaacaacactgtgaaacagtctgacagagtaaagaccgtttgcaaaattcactgggaacagttaggcaatatgaacttccaagtcattttgttagaaactgtcagtctgggcataaacgtgcagaaatggaatacagtgtctattacattttattttttatggaagagtgttactttagtttatatcttgtaattggcaaagcctacttttttaatcaatagataatattgtatgtttttgttgtgtaaaagtttacttgaattatttaaaggttcttttctcttttaggcaaggaattacaaatctcaaattaatagctctgacagcttcagctaataagaaggtattggaaaatttt

SEQ ID NO: 201025 - DNA, 1000 bp, Homo Sapiens
ctacagggcaagacggcgccatcagatgtcattcacacaatgtatatctgcacattattccaagacaaggcaaaggggtctcacatctgttaaccgagtatccccaaccatgctggcaccagggactgggtttgcggaagataatttttccaggaacctgaggtttgtgatggttccaggatgattcaagtacattacattcattgtgcactttatttctattattattaatatataatgaaataattatataactcaccaaaatgtagaatcagtgggagccctgagcttgctttccagtgactagatggtcccgtctgggggtgatgggagatggtaacagatcataaaggcatttgattcacataaggagtgaacaacctatatcccctgcatgagcaacttacaacagggttcaggtcacactcttaggatgatctaatgccaccgctgatctgacaggaggagcagctctggtggtaatgtgagcgacagagagtggctgcaaacagatgaagctttgcttgctcacctgcctctaacttcctgctgtgtggcccaggtcctaacaggccagggactggtactggtctatggcctataactcatactttctatgtttattttttggaaacattttccacttatattcttgattcctatgtattttataaacaacttagaaattccttttagaacaagacagggtctaatattatgtttttaacataggactttgaaataattttatctgtgtatgagagagagatgtgaaataaactcattgttaagcactttccattttacttttatttcatgcatattaagaataaaactgggaagttctaggcaaagcaattgggcaagagaaataaagggcatccaaattggaaaagaggaagtcaaactatctcttcaccaatgatattaccttatacctagaaaaccctgaagactcctacaaaacactcctagatttgataaatgaattccgcggatc

SEQ ID NO: 201026 - DNA, 1000 bp, Homo Sapiens
gctggtcatggtggctcacgcctataatcccagcactttgggaggccaaagcaggaggatcacttggagccgggagttcaagaccatcctgggcaacataacaagacccctgtctctacaaaaactgaaaaagaaaaagaaaaactagccaggcatggtggcatgctccggtactcctagctacttgggaggccaaggcgagaggatcacttgagcccaggagtttgaggttacggtgaccttgatcataccactgcacttcaacctgggcaacaaagtgaccctatctcaaataaataagtaaataagtaaattcacccttctaaagtatacgtttcagtggtttttagtatactcacagcatgatacagccgtcaccgcaatcaattttataacacttcatcatcccccagtagaaatcctgtatccattaacagtcactctcattcccccagcgtcccctctgcccttgccaaacactaatctactttctgtttctactgatttgactagtctggacatttcttataaatggaattatgtaatgtgtggctttttgtgactggcttctttccctcacatgttttcaaggatcatccttgttgtagcatgcatcagcacttcattcctttttattgccaactaatattccattcactactgtatttttaactaaacctcaaatatcgggttcagctgactttttaaaaatgttttttatatcctagagatggtgtaaactctagtccttgccttcccttctgtcatgattacataggacagtgcctttcaaaaaaactgtggtaaaggccaggtgcagtggctcacgcctgtaatcccagtactttgggaggccgaggcaggcagatcatctgaggtcaggagttcaagaccagcctggccaatgtggtgaaaccgcgtctctactgaaaatacaagaattagccagatgtggtggtgggcgcctgtaattcagctacctggttgggaggctgaggca

SEQ ID NO: 201027 - DNA, 1000 bp, Homo Sapiens
ctatttaggaggctgagacaggagaatggcgtgaacccgggaggcggagcttgcagtgagcccagattgcaccactgcactccagcctgggcgacagagtgagactctgtctttaaaaaaaaaaaaaaaaaaaaaagagagagagagaaacaacctttatgtccaagaattggaggactggttggataaaatgatagtcatatggtgggatactgtggaaccattttaaatgatttagaatttttaattataaggaaaattccatgacgtatttattaagaaaaaacaagtcatcaaaatagcatatagactgtgattgcccttttatttagagaagaggcttgttcgattataagttgatatctattcttttttttttgcttatctataccttttaatatttttatagtgactgtaatgctttgaaattaaaaattttttaaacaaatattttaaatttgtcctttctacagggagattccatggagctggaaatatggtgtcttgaaatgaatgaaaagtaagtgctgcgtcttagggtccttggttgtggttgctgaggataaagtagatgacatcatgtgaaaagcagggctttgttttcagagtcagggagggcattctgaccacttaacaaagccaataggtctttgctacaatttgcttcatccttggcttccagcctggacacagagatgaccttcagagggaacatcagtccagagagactcagatactacagggaaaggagcagcagaaaaagctgaaaaggctttgttgttttcccagagtacagctagttctctgattaaatcccttgcgagctcttgtaatatgactactctgttttgtctgttttctgtgtggcagccatccaataagatttcccctccctgctcctttttacagactgtatgggtcatggattggaaatgcatgttatttcctttccccattttcttctttcaaggcagattagcttatctcttgcctgaagctt

SEQ ID NO: 201028 - DNA, 1000 bp, Homo Sapiens
ataataatcagtatatagttcaagtttttcctctacgtgaggcaatctaatcactaagataacattgttttagttatttggagtgtcttggtgcctttcaagtttatttgtattcatagatgattgtaggttgttggttgatcactttttttttttttttttttttttttgagacagagtctccttctatttttcaggctgcagtacagtggcaccatctcggctcactgcaacctctgcctcccaggctcaagcaattcttgtgcctcagcctcacaagtagctgggactacaggtgcacgccaccaaacctggctaatatctgtatttttagtagagatgaggtttcactctgttggccatgctggtcttgaactcttggcctcaagtgatctgcccgccttagcctcccaaagtgctgggattacaggggtgaaccacagtgcccagtgggtttgtcacattcttaaatcagatattcctaatgctattaatacttcctctaagcacgttggttttggggaggtgttatcccagttttacacataagtctgatgccagggaatggtgttaaagaaagtgagtaactgattaagtagaatatctgtgaagagagagcactgccattgaatattactggcttttccactctctgtcagctttagccttcaactcgttaggcttcttcaaacttaccttatataggtacatagaagtctcataaaaggtatggtctaaagcttttgtagcaaaagtttgatttttaatacttgcattgaatatggctgtgtctaattggggaaccaaatagtaagatcaatttcagagattactcaaaaagctaccatgcccctgcgctccttttttctcccctctgaacaatagtataaagtgagttgtgttgctctgtttttatgaaagtggggtgggatgtcaaattaagtggttcctaatgttagaatcagaattgtgggaagagagaagaggcagttgttcaaat

SEQ ID NO: 201029 - DNA, 1000 bp, Homo Sapiens
caactaaatacttgtgccagtttcagcagcaaaggccttaatctttgccaccaggaaacaaaaaagtttaagaacaaagatttggtactagccagcacttgtcatgtaggaaaaatttcacctattttcatatgctaaattctgagtgcattcagggaaaggggcaatgaaggcatagttgtgaatttgtttttaatgtattaactaactcttctatacccctttttagggttctcttggaacggttgattgtaaataggccacatccttggggtcttcttatcaccttcattgagctgattaaaaacccagcatttaagttctggaaccatgaatttgtacactgtgccccagagattgaaaagtgagttaaaatgttaattaccaagcagggagacagaaaagaatgtgtctaatttgggtctgtgagttaaaagggcagttatagctaattcagattaagagatctttaggcttaaagtttgttgtgaagttaattggtgcttgtctccacttcttaggttatttcagtctgttgcacagtgctgcatgggacagaagcaggctcagcaagtgatggaggggaccggtgccagttagatgaactgtgtatatcccttgcagatgcatcagccttggtccgctgaaccaagttcataaactgaagattcctcctgactttcctagccctttggttctcaggggtctgccccaccaactgctggggttgatctcctgtctatgtgggcaagttccaaagtttaaatgcattttttttttgactcttggccaaaatttagaagatgctgtgaatatcattttgaacttgtgtaaatatatgaaagagaaaacttttgtctgaaacttcttgggtttgtgtaaagtgtgtacgtatgtaaactaccttgtaacaggcagttgatggcatgctcttgtctcaagcatagcagcatgtcttccgacatccatgacattccaaagattagcaaatactgaattc

SEQ ID NO: 201030 - DNA, 1000 bp, Homo Sapiens
gtcaagttaagtctttcttttatcagagaaattattctactgagggaaagtgtctgcccctccccactacgattccccatttccttcctgcaaattgaggatcaacacatacagagatgttattgacaaaaaaaaattacacatgaagtaatatatataaatatatgtatatatatatatattagtttctttatctactcattgactgatgggcatttgggctggttccatgtttttgcaattgcgaattgtgctgctataaacatgtatgtgtaggtgtctttttcatgtaatgacttcttttcttctgggtagtcagccagtagtgggttgctagatcaaatggtagatctacttttagttgtttaaggaatctccacacggttttctgtagtggttgttctattttacattcccaccagcagtgtaaaagtgttcccttttcaccacatccacaccaacatctattatgtttttgatttttaaattatggccattcttgcaagagtaaggtgataatgcactgtggttttgatttacatttccctaataatcagtgatgttgatcattttttcatatgtttgttgtccatttgtatatcttcttgtgagaattgtttattcatgtccttagcccactttttgatgggattatttgcttttttcttgctgatttgttttttcttgtagattctggatattagtcctttgtcagatgcatagtttgcgaagattttctcccactctgtgagttgtctgtttactctgctgattatttcttttgcgtgcagaagctttttagtttaattaagtcccatctatttatctttgtttttattgcatttgcttttgggttcttggtcatgaagtcttttcctaagccaatttctagaagggtttttctgatgttatcttctagaatttttatggtttcaggtcttagatttaagtctttaatccatactgagttgatttttgtataaggtgagagatgaggatc

SEQ ID NO: 201031 - DNA, 1000 bp, Homo Sapiens
ccaggaggcggaggttgtagtgagcccagatcgcaccattgcactccagcctgggcgatatagcgagactccgtctcaaaaaaataaaacaacaacaacaaaaaaaaactgaaatatgatacgaaagaataaacatccttcagtggttaactttttaaaatagcctttatatgtatgtaggctacagtgtctattagtgttttataatcattgtttttcacttagggattattttggcttttgtttttttttttcctggtacctttagggttagcatggaggtccagggtccatctgactccctaggttcgaatctcccaaggccatttttttacacaccgtgattattactaatttccctgtggtttttctcattataaaatgagaatattgctgccgacaggtcttctcattattgtgaggattaaatgagctatttgttaaaggcttaaactttcagtaaacgtcagcattcttcagccatgatagtgcagagtttaagaggtagctctacctggcattgtgtaccaggcactttctagccctgtgacattgggatgcttgcttcttatgcttcccgtgcctcacctgtaaatggggtattagccactgtgcagagaatgttgtgaacatgcttgcacagtgcctttcattgagtaagtgcccagtaagtgttatcttttgggctttgaaagaatagattgaggccctgtgccttagatgccacataggcaattgggagtcacttgaccttggacaggcaggaaaggacaattttaggtggaggtggttgaaacaatgtgaggtggtaaggacctaagctgaggtgaatgagaaaaaagcagtcaggtgcaggtttcctatttccttaataagaaagtaagcaattctcttgcaggaggtacagctgggcactggaatgcctggtctcatgatagcattggtttggtcagaacccagtgcaataagcttgtcaagccatgggaatcagtgagaattc

SEQ ID NO: 201032 - DNA, 1000 bp, Homo Sapiens
catgaaggcttcagtggcttccagttcgttgttttttgtttgtttgtttgttttagagtgcttcctttacgtcaagcgttgtgctaaggacttcgtatttcccatgtgacttaaccgtaacagcagtcctatggtgggggttcaaggatcatccgcactttacaaatggggaaactgaggctagaaggggtgcaaaagctggacctagagcacacagtttgggagtggtggccccagcttctgaacgtgcgtccgactccagaccccactcctgaccccatgctgtgttgtctacaggaagagtaacgaaacacggctttccagtttttaaagaaatacgcttggcattttgctggtgggcggtcttcgcggcgcaggtctaatttcggaatttacagtgggatttaaaatttgcagtgagattctctgtttcaccttgaaagaggcttaaggtgtatgaatcccacactagactgatgctgaagaggagcctgtggaatccacacccgctggcatttccagtaaaaaggcctctgtgtcttcctgaaatgcgtgcgccccgcgcgggccacgttgctcttcaccgaactgccaccaggggccgctccagcccagcccgagtgatccatcggcccctgcacctgctgttcccgaaaacgcagcggcccagccttcctttgcagttatcctcttagaagaacgaacgtttcgcttccctcctcatttgcgtatcatagagccagagagacccagtagcctttttgggttttcccctgagcgtgcttggtccccagcccagggtggccgccgtttcaagcaagtcccttgttcaggtacaggcgtgcagatgccccgagccagcctgaggaggggccgcatgtcccgagggccccatggttcccctcaggaggcagattggaaagggctgacttgtctcttactccagtgagtagagaggcgggggatccggcccatcagaggctgctgcagtaaagaattc

SEQ ID NO: 201033 - DNA, 1000 bp, Homo Sapiens
aacaaagcttattttctttcttttgtggttcaaggtatggattattttgcatgtgaacaatagtcatagtggtaatgacagtgttgatttctcacctgttcccacctctcatgaagttggagttctgttgctggccttagggtttagtgcaatcagctcatgttatagttaagtaaaggaaggcttaactgcagttaaataactttctcaaggtcatacatctggaaagcagtcgattttgccctaaatctggaccacctgactcctaatctgtgctgcactgtgtctctgtctgcatctgactccatttctttctctgccagcttgctggtgactgattgatctaatggattgagctttcagcaaagtctgtcttgtctttgccttagcaacctaactcacagagatgttcattttcagctgtgccagaaattacttactgagctgtgcttggagtcttcctgggcctgtgttgaagatgataagcatttataaacaaacatttaaaaataaactctatcttgcaagttgagcttttgggtccattgtgttggctcggcatgaacggtgaagtctcctgggatgggcagagttgttacgttcatgtgctgtaagctaggatggagccaggcattctgacatgtccttttagtgggtcacgacctttttaactctaggtttgaggggtcctgcagggcagagtctccccttctcctcccagtaaggatgagctaggtgaaaggttttagctcgctgtcagtttcaggcaatttgtatttgaataatggtcttaccatctctctttctgttgcctgtatttgccactccagctaagcagtgtttccagttttccatacctgtggtgacaatggtgagtgttgcattctgcagtattcctcagctctgacagggtaaagtcacaatgtttccaaacttaattaaggttttagagagtgtgaaatcaccaatactgttaacaaaggaataccttgatgaattc

SEQ ID NO: 201034 - DNA, 1000 bp, Homo Sapiens
gccaatgaaggaagtagagtgacctgggttttcaggggaggctggggctggcatcggggatgaggtgcgagggagtggaaaggaaccaggaacccaatcgcaactccccttgtgtcacctctctccagcctggaggagctgctgaccacgcagtgtgaccgcttctcccaggaggaggtgagtggggaccggggcggggccggagcagcaaaggggctggggccggggagactaagggcctgtgcgagacgcccctacgtctttccccagatcaagaacatgtgggcggccttcccccccgacgtgggcggcaacgtcgactacaaaaacatctgctacgtcatcacgcacggcgacgccaaggaccaggagtaggggcacccgcgggcctccgctgcccgacgcttctgttcggcccgacctccaccccggctcccaataaaatttaactgatctttgtttcttatgggcggcgccttcagagtgtctgcgcgagggcctcaggtgggagcgccccacaaatgaatggatgcggcctggaggcctgcgggggtcggccccacaatctacgcccgccgcctttttccgcaaggaaggagaaggctcgcgtggccgcgggaagctcagtttttattgaagacagagtctgggagaagaagggggactccggaagacagtgatgcggtcggagattgtgcaggccccgggccgggaagtgggcggtgtctgggtgggcgggaccagcgccggggcggggctacggactcaggctgggagaacctccccctagcccgcgcgagggcggcacccgcggaggtcccggggggcgctgggcagtgtggggcgcggggattggacaagaggccgactgaaggcggagccgaggtaaggccgggcggggcgtggcctcagagggcgtctgactgctcgccctgggcctggctctgctgcatttgggcctgcatcttctccagcatctcttgcatgcggcgcagctgtg

SEQ ID NO: 201035 - DNA, 1000 bp, Homo Sapiens
attatctcagtcttttgaaagaatcctcctttagttttattttttaaatctagtggtttttctttttcctttttccttaggtcttaattatttccccctttttgtttgttttgcttttcctagtttagtggatcaatgtaatttaaattgctttttaaacaaacgtgtaagggtatacattttcgttggctgctgtttgacttcgttgcacaagttttaaaatctattttttaatagtttgtattttctaaattattttattgcatcttttgttcacattgctctattaattttttattttaattaattaattaattaattaattaattgagatggagtcttgctctgtagcccaggctggagtgcagtggcatgatcttggctcactgcaagctccacctcgggggttcatgtcattctcctgcctcagcctcccaagtagctgagactacagctgcctgccaccacatccggccttttttgtatttttagtagagatggggtttcaccgtgttagccaggatggtctcgatctcctgacctcatgatccacccaccttgggctctcaaagtcctggaattacaggcatgagccactgcacccggcccaaaagctttgtgcttttacagatattagacatgtttcttgtttaagaaaaaaaatcttaacgaaaacgtaggagaataagagaaacatttttccaaaaaagagaaatcattgtgattattttatcttattagaatgttggataatatagtctgcttcattaatcatcaagcatgctatgcattttccatttttataggatctgtatctcagttaaggtaatactggtaatttttgtactgtaatcaaagatgaaaaatataggccaaaatcatagaccttgcatagaagctggataatgaagacagctatggagaaaaacatagatacacacacatggacacacatatatataaagtatacacacatatattttttaaagttttaaagctt

SEQ ID NO: 201036 - DNA, 1000 bp, Homo Sapiens
cctcacctccccagcctgcccagcactctgtgagcacacggtcctgcaatcaggggctttggcagcaaaaggcatggaggcagcgctctaggtttcactggtttctcctttctgctctactgtgactcattttcattctgtcctttcctctgtgcctccgctgacctggaaaccagagtctatttgtaactttttagcggtgccttagttttttacacacacgtcgcgcggtctagtgtcctacgcgcctcttggattattgcagggctccttggattattgcagggctcccagggtacctgagtcctcctcttgtttaaccctccaattcgccatgagtattcttcatttttacaaatctatagatgtgccaacacgtgtgccaacttcttggctttttgccgtgtcctgcatcttgctttcccctcctggttccgtttcctcctcgctgacatgtggtctttctagccatggtctgtggggttcggaaggagtaaactgttggtgtctgaacgctgcttactacacccccattcctgagtggtgactgagctgggtgcaggtgacccgaccgtggtcgctttcctcgcacgccgagggctcccctgtccccggccgagagccgctgctgatgagaggtctgctgttggggccggtgctgtctcctcctttgctaataacgtttgttctggggacttttaaggtttgtctttatgccttcgatatttgctgttttcattatgatgcgtctatgtacgaatttgtttctctttaaccttctcaggattcatcctgcttttaaaatcggaactctcctttcttcaaatctggaaaattctcagccactatctaatcaaaaactgcttctctacttattctcctctcattctgaaccatgctggctacatggtgaacgttcccagcccggctcttagcccggctttcatatcttctcgcttagcttcatggacggcgctccaggtggctccttcatgaattc

SEQ ID NO: 201037 - DNA, 1000 bp, Homo Sapiens
ctacaattcaagatgcgattagggtggggacacagccaaactagatcagtgctacaactgacttcactgtaaatgagtttacaatgggtaactccatattatctgaaccaaacagcatagagagacctcaagaagagtaaagaaatctttgtctcatgtacatggtataccatcaataatgaaactgaggaagattcacggagggaagtcatcacgctgcagcaggcaattatatctaaaccagtgagatatgaacagtgcaaagaagaactagaacaaagatactgtctggcatagaaagtccagtattaaagacacagaaggccctacatttgtccagtaaagccatgcttgattaatgccttggaaaccctggagactggatcagaaatctgtatataaaatggttcttcctggataaagttgagagaaaaagaaagcttattgtgttcaagtagaaactgggataagctgtgggccatctggcttttctgttgcaaaaaccagggcttaaatctacatctttctatagtcatgaatgagcaaactgattttgaacaatcatctaacaacgaaatatttaggattcaaaaagaatgtacttatgaaaagaatgtaacacaagaaactgaaaattagaaaatttcccctttttacactaaaaaagacagaagagccatgactttttaaaaaactggagcagtaagcttgtagtgggaaaagtgatggtgagaagtgcaggcatagaaaggaagcaggtttaagtaagatgagaaaacacaaggaaatccaaaatcccaaataaaataattttgccttaaattttattatgtttaatagtagactgctgttttcttttgtcaattgctgtcagataagttttgctcttttgatttattttaaaagaaacattaactcttggttgggcatggtggttcatgcctgtaatcccagcactttgggaggccgaggtgggcagatcgcttgaggccaggaattc

SEQ ID NO: 201038 - DNA, 1000 bp, Homo Sapiens
cctgcctttctacatggatctgtatttcttttgttgttgttgttattgttgttgagactgagtctcgctctgtcgccaggctggagtgcagtggtgcgatcttggctcactgcaacctccacctcccaggttcaagtgattctcctgcctcagcctcctgactaactgggactacaggtgtgtgccaccatgcccagctgacttttgtatttttagtagagacgaggtttcaccatgttggccaagatggtctcgatctcttgagctcatgatccgcccaccttgacctcccaaacatggacctgcatttctacccagacctgcactactgtactacacggcatttccacactggcctgcatttccacactggcctgcatttccacacaggcctgcatttctgtgtggccgcaatcactggcactggccagcagctgcctgctccttaccccagactcctctgcttcccagctggtggtggcaggtctctgagttgtcaatcctaggactagaggctccccagggtctcccaagctctagcattttactgtacagcctgtgagcccccgaaccagggagcagcctgccagggtcgacggctgcaagtctcactctgtgaaccacacagcagagccagggccagcagagacctgagagttccctaggcctggctcacaggcaaaaacccattgggatcacattcaaagccaatgaaatgagctgtgtactctggatgtatttgaggtcaattccactaaaagtatatgcaaccagggcattacgcagaatcctcacagaggaaaaataaagaggaataagccccccttctcatctcacatctaatttagatatgccttgggtggtctctctcgatttatcacgattataaataaaaacgtgtatgagtccccaaagatgaaggtttctgattctgcgacccacagaaggcacaggggcagcgcagggcacttgcgccccctggtggccatggggtgaattc

SEQ ID NO: 201039 - DNA, 1000 bp, Homo Sapiens
gtgtgcccagcagtgcaaatgccactgagcaccaggaccgcccgccccgccagcctccccaagctcggggctgccctctaggatgcagaagagctgcgacgtgacactcacgtatgggcctcgatcagctcaggctggctccgagccagcagaagtgtcagatccatcagactggtcatggcggccttgcggaccctgatgggacaaggagaggcagagacacccagcttgagaggggggttccaaccctggttctgcccaccacgccggcagcctgtgtgaattcgacacccgtgactaaccccacacagagcccaggcacgctgccagggagtcacggggcctgcagaggttccctgtgcgctacagggacgtgtgcagggagccacccacagccacacacaccggggccccgaggcatcctacacacacaggcgtttcaggggttatcaatcccactacagcaagaaatgttggcaaaacccaatgtaagcagccggcagcctttcattgaagacgcgtcctccctcacaccctgtcaacgaggacgacacaggcccaacacctgaggacgggctggacaagcacctgcaaagccctgccacgcaggctcacccgggagcagagaacaggtcatcttccccagagcctttaaaacgcaaaacacggcacaaatctacaaagatttctccctgcagaaaagcccggggcctccgagtttccacggaatagatgggcttctcagaagaagcgctcacccactgctacgtacgtaccaggtgcccacgtcccctctgctgtccgtggtgtagtcgtccatgcagcccagcagcgcacagtaaatctgggaaacattctctccgcacacagcttcgtctggggctcctgctttcacaccaacagtctggcaaatcctgaaatttaaaatgtgtgagctaacaaacaaacatcggtgagcctcatcttccacatcgcagagggctgatgtgtgttcctgatc

SEQ ID NO: 201040 - DNA, 1000 bp, Homo Sapiens
cctccacctcccgggttcaagcaactctcctacctcagcctccaaagtagctgggattaaaggcgcatgctgccacgcccagctaaatttttaatatatttttagtggggacaggggcatgggagagagcatgttggccaggctggtctcgaactcatgacctcaagtgattcgcccaccttgacctcccaaagtgctgggattacaggcatgagtcatcatgcctggctagtatattcaggtttggttttttgttttgttttgttttgtttttttttttgagacagagtcttgctttgttgcccaggctagagtgcagtggcgcaatctcggctcactgcaacctccacctcctgagctcaagtgattctcctgcctcagcctcctgagtagctgggattacaggtgccaccaccatgcctggctaatttctgtatttccagtagagacagggtttcaccatgttggccaggctggtcttgaactcctgacctcaagtgatccacccaccttgcctcccaaagtgttgggattacaggcgtaagccactgcacccggccagtatattcattttaatgtctacacacaagaatgaacatatacacactcagatgcatgcacacaccagcacacatgcccacccaagaagagtttggagcctgtctatacccttcttgggcccttcccaagaagagtttggagcctgtctccccaggacttactccttcaacagcagaaatcatgcaggaaggactttggttcctgccatctgagaagtgaagggatggatggatggatggatggattggtgggtgggtgggtgggtgggtgcgtggttgaatggatggatggatggatggatggatagattggtggatggatggatggatggatggatggatggatggatggatggatggatagattggtggatggatggattggtggatgggtgggtgggtggatggatggatggatggatggattggtgggtgggtgg

SEQ ID NO: 201041 - DNA, 1000 bp, Homo Sapiens
cactttgggaagccattgagggtggatcacttgagcacaggagttcgagaccagcctggccaacacgacaaaaccccatctctactaaaaatacgaaaattagccgggcattgtggtacttgtctgtaatcccagctactcagcaggctgaggcaggagaattgcttgaaaccaggaggtggaggttgcagtgagccgagatggcgccactgccctctagcctgggcgacacagcaagactctgtctcaaaacacacagacacacacatgcgcacacacacaattattcctaggtgctggaggtttttgttgttgttgttcctggaatcttctgcttcattaaaattttcaaaaatatgtaaaatgcaaccaggttaagaaacagaactttatctacaaccaatacatcagatgcttgtgtgtccaactccctggcaatcaatacttttgtgctaaacattcccttgtttttccttatacttttagaacctatgtgtgtgcatcccaaactgtataagtttgccttttgaaaactcagcataggccgggcgcggtggctcatgcttgtaatcccagcactttgggaagccgaggtgggcagatcatgaggttgggagtcggagaccagcctggccaacacagtgaaaccccatctctactaaaaatacaaaaattagctggtcgtggtggcacacgcctataataccagctattcaggaggctgaggcaggagaatcactcgaacccgggaggtggaggttgcagtgagctgagattgcaccactgcactccagcctgagcgacaaacaagattctgtctcaaaaaaaaaaaaaaaagaaaaaaaactcagcatcaagtataaaactacctgcatagagcagtattgttactatcaaagaaggttcccaggaaaatataaacttgtctctgggtcacagtctggcttcagctttcaggaaagtttacagacctcttttggtgaaatcagtgggtgagatc

SEQ ID NO: 201042 - DNA, 1000 bp, Homo Sapiens
ataagaagcctgccacatttttactggatctgtgtttgcagaagagttctaggtcaggtgagcagaagtctaatctgaatcataaaaacagagtcacagtccccagtcaattcccagacataagccagttcacagacccggagtcccttgtctgaatgggaagccaggtcccctccagaaaggactctgctccactgccaaaaatttatactgtcaatctttctcccagcctgcccccaagggaatacacagccttttaccaggatgactgaacaggagaaaaggaactaatgagacctgtgcaggatcactggacacaggctctgaactggcactaggctgagactagggtctaccagtcagaataggcattttggaggtcaggtgaatgttggtacaacttcatgtcatggtagatccattgggtccccaaatccatcctctggttatatacaaagtggcaatgctgagattcaaattcagggcatccaacatagaggctgtgctcttactcatgaaacattctgacactagtaaccatttaaaaatgcaaacacctcctggggctagccagagtcctccaaacagtcatgtaaattggttctgtcaaggatttcctcccaccccctgctgagagccagttgcaaggagagactagggaagggcattgggtaactttgttgctaaaagctcttccggataaagacatttgggaaaagaagaaaatagagttcagcaaaagagataagaaagtaagtttatgtttggccaggcacggtggctcacacctgtaaacccaggactttgggaggccgaggtgggcagatcacgaggtcaagagatcggatcatcctggccaacatggtgaagccccgtctctactaaaaattcaaaaatgagcgggccatgatggcacacgcctgtagtcccagctactcgggagcctgaggcaggagaatcacttgaacccaggaggcagaggttgcagtgggccgagatc

SEQ ID NO: 201043 - DNA, 1000 bp, Homo Sapiens
tatttatttttgagatgtagtctttgttgcccaggctagagtgcagtggcatgatctcggctcactgcaacctccgtctcccaggttcaagagattctcctgcctcaatcttctgactacaggcgcatgccaccatgcccggctaattttttgtatttttagtagagacgaggtttcactgtgttagccaggatggtctcaatctcctgaccttgtcatccgcccacgttggcttcccaaagtgctgggattacaggtgtcagccaccgcgccccacctatttatttttatttttttgagacaagactctcactctgtcacccaggcaatggcgtgatcttggctcactgcaacctccgcctcctgggttcaagtgattctcctgcctcagcctcctgagtagctgggactacaggcgtgcgccactacgcctggctaatttgtgtatttttcgtagagatggagttttatcacgttggtcaggctggtcttgaactcctctcaagtgatccgcctgcctcggcctcccaaagtgctgggattacaggcgtgagccaccatgcctggccgcagcattatattgaatcaaagctcatcgaaacctgttagttctatcaagttgataaactaacactttttttagcctttccctcagaattgcttggtaaacacgagcatgttctattgcaaaaccaccatgtggaacttctggttcctttccaaactgcagacgtcagctcatctccctcagaaatgagaactgaccctcctccccacctgcagggagcccaactccgcctcctctcagccaaacttctcatggatatagcttatctcccacaactaaactaagttccttgaaggtaaggactgagtgctactttttaaaaaatctcctgcggtacccaacactgctatacatgaagaatattttccggccgggcacggtggctcacgcctgcaatcccagcactttgggaggccgaggtgggcagatcct

SEQ ID NO: 201044 - DNA, 1000 bp, Homo Sapiens
catgcttactttttcatgtgtcagtccacacgctaccttctcctgagtagccacagccccacgctacagtatcgccccacactcagggttttgtttgtggtctgtctccccctagtagaggaagaacagggattttgtccatcctgttcaccactgtgaccctagtgtctaggatactgcctggcacacagatgagtttaacaaatgtttgttaaaagaacaaatgggctgggcacggtggctcacgcctgtaatcccagcactttgggaggcccagatgggcggatcacctgaagtaggaagttcaagaccagcctggctaacatagtgaaaccctgtctctactaaaaataaaaaaattagctgggcatgatgttgcacgcctgtaatcccagctactcagaaggctgaggcaggagaatcacttgaacctgggaggcggaagttgcagtgagccaagatcatgccactgcactccagcctgggcaacagagtgagactccatctccaagaaacaaaaaggaacaaattagggaggagatatcactgttgtcaattgactggttaggatcacccaactggtaagtggtggggctgaattcaaacccagctcaggctgttcaccaccacactgcttccctggtggaatgggtctttattaatgacattgataatagcaccaaagttaaatcaagctgcacagatggctggcagcattccaagcatttaaatgtcacgccttgagagttttactttccaactccctggggctggaccccagtcagagtcaaaatgaacaaactgtggacagcctcccagcttagatctcaaggacaaatgtaccctgtgttgccaggaagtacaagccatgacctttgagctgttgacagtagcatatgctcttggagcaggctgggagccccctccacctccctctccttcccagcacacttagaaatgcggaaaatggggccgggcacggtggctcacacctgtgatc

SEQ ID NO: 201045 - DNA, 1000 bp, Homo Sapiens
gaccttgggtcttgactatacaaggtaaacttataattgataaatttataagggctgaacagacattggatgtacctgcctaattcacaggtcactgaaggatgggcaggctcatctcgggccagacgcttatttgcctcagtgggctgagcaatcatttgaggggtaatgaactattctactatacaatgtaacttcaaagtaaatctctgaataatttccacagaaggaatgcaggagaaatactgaggtatgataagataggttccctaactccctcaacccccacaaagtatgtaaaacaggatttataatgccaactggtaaaacataaattaggggttttttttttttttgctataccaccgatattttatactcctttaatgttctgagtttctctgctgaatttaaaatgtaacttgatttacatctttttcagatatacatctgttgggtacaattatgtacatctgcacttctctatttccttggcattgtgtaaatggtagaagagaaaagatttgaagcaacttctagtatctttttgttattaatacaatagtctctcaagtagcacttcggttagtataagtatcttgctaatatgcttacatgtgacatctccaacaatatactcagtgttgcttttctggacccttaaggacaaacatgataaataatcatttgttaatcttccttcataaggccgtgcttaataccatttattgagtttcctactaaactcaatagctttctccttttcattcagggaaacaggatatttttaggtttcagatagagtcctgcagaaatgtcctctcagaggcaccttcaaaagcaagccaaggatgagtattttgggccaggctttgtacaacacatgagtgtgtttctgtctatttgcatgactataggggtacagaatcactgaccagctgattatctgctccaaggtcagaaggaaaagagggacagaacaaagaacagaactgaattc

SEQ ID NO: 201046 - DNA, 1000 bp, Homo Sapiens
atgctgggtgggtatggtggcgtacctgtaattctagtactccagcggcagagacagggaatctctgctgtaaactggctagccagaatcttcctcaaatcagtgagctctcagtttaataaagagccttatctcaatgaataaagtagagggaaatccaggaacactccagatgtaaggctggggcctccatatacgcatacagtagatacgttcatatgcaggcacacacacgtgcatatacatatgcatatacaggctacgcatacagacacattcaaaagaaaaccatgagagacagaaactaaatcttttgttaccattttcaaggcttattgtaatttctaacatataaaagatagagctggctgtatgttgcattaactaactgtatgttagaagtttcagttctaagaaagggataagcaggaagatttgtaaaattaagcttaacattttatgcataacacacttttcattcatatttcttattacggtattagatagtgaaaatgcaaaaactgtaaatgtatttacatctccctaaccctccaacatagctttccttccctcctgcaaaggtagacattcttctgacagtatatcctataggtggcatatgagaagcatatcaatttgagctattgtgaattcaactgtaatgaatagttttgttatgcccgctgaagaacaaacatgtatatctcttccacttctgactacaagcacaagtgcttactgtctggatatgaatatgatttgcattagaatatattagtgaatagcttttcaaagtgagagattttttttttctttaaagactggcctgtcccagactgtgctgtggcctttaattccagcaaaggcagagaaaggcagagacagaggcagatggatctctgagttcaaggacagcttaatctacagagcaagctccaggatgatcaaggctatacagaaagaccctgtgttgaaaaatcaaagatgggctggcaagatc

SEQ ID NO: 201047 - DNA, 1000 bp, Homo Sapiens
tgtattacctttctgtgtataagttttctctggggaaaaaaatggaggactgaacacatgtttacctcagttccctctccaaatcacactgaggttacagaaatcagtttttttttgttttttttttttttgagatggagtttcgctcttgtcacccaggctggagtgcagtggcgcgatttttggctcagtgcaacctccacctcccaggttcaagcaattctcctgcctcagcctcaccaggagctggtgtcaggtgtgaggattacaagcaatccttgcaccttggcttcccagagtgctgggattgcaggtgtgagccactgcgcctggtcgaaaatgattcttaagtttatttttctcagaggcaggtgtacagcaaatggctttttgttagactactcatgtcctccctcctctccagttttcattgtgatgaaaaccttggtcagataagatttcattgtgtccaatagtctaaattgaagtatatgtactctttttttttctcaattttctgccttagttactgtgaatatgtcttcatgaccttatttttagatagaaatataacttacttctcttctttacagctgcatccagatctcattatgcatcagaaaaatgaaaaaacagaggaaaattctatggaggaaaggaatccacttagccttttctgagaaatggaatactgggtttggaggctttaagaagttttattttcaccaacacttgtgcattctgaaagctaagctgggaaggccagttacttggaatagacagttgagacatttccagggtagaaagaaagctcttcaaatccagaaaacgtggatcaaggatgaacccctttgtgctaagaccaagttcaatgtggctactcaaaatgttagtactttgtcctctaaagtgaaaagaaaggacgctaaacacttcatttcctcctcaaagactctcctgagactccaagcagagaagctgttgtcatcagcaaagaatt

SEQ ID NO: 201048 - DNA, 1000 bp, Homo Sapiens
cttcaagaccccatttttagcattgaacagatctcccagacagaaaatcaacaaaaaaaatcagaattaatctgcactacagaccaaatataaaccttatagatatttacagaaaatttcatgcatcagcttcagaatacacattcttctcctcagcacatgaatcattctaaaagatagatcatacattaggtcacaaaacaagtctgaaaacattcaagaaaatgaaataataccaagcatcgtatctggctacaagggaataatactagagatcaataacaaaagaaattttggaaactatacaaacacattgaaagtaaattatatggtcctgaatgaccagtgagtcgatgaagaaattcagaagaaaatttaagatttctggaaacaaatgataattgaaacacaacataccaaaactcatgggatacagtgaaaacaatactaagaggaacatgtatagctataagtgcctacatcaaaaaaggagaataacttcaaataaacaatctagtgatgcatcttaagtaattagaaaaggaagagcaagccaaaactaaaattagtggtagaaaaacataataataaagataagagcagaagtaaatgcatttgaaatgaagaaaatacaaaatatcaacaaaacaaaaagttggctttttgaaaagataaacaaaattgacaaacctttagccagactaacaaagaaaatgggagaagacccaaataaataaaatcagagatgaaaaacgtaaccattacaattgatactgcagaaattgaaaggattgttagtggctactatgagtaattatatgccaataaatttgaaaatctagtagaagcagataaattcccagacaatacaatccaccaagattgaaccatgagaaaatacataacccaaacagaccaataacaaatgatgatattgaagctgcaatgaaactcacccagcaaggagaaacctgggccccaatggcttctctgctgaatt

SEQ ID NO: 201049 - DNA, 1000 bp, Homo Sapiens
ctaattagaaaactttcatcttttatatccaccagtgaatgaactgtagttaccacagtggtggaatttcagaccagcaggagagggactttttccatcccactgaaatggcacaacataagtttctccctatggtgcctaagcatgaggttgatttattgaaatttgcagaaatttccactggaagttgcctgcagtgaagttgtctctgtagagctgggtcatctcactgaagccacactatggaacagtgaatatgtgggagtttaggaagaaacagatgctacattccaactgggcactttgaaacatttaagaaaaggatcacttgctgactagggaaaacaacaaggaatgatgcagaaccctgaagctagcaaccctggggaagcctgatcatcttaggtctgaattgcatgcttaatcttacttaatcctcacattatctccatagctattattactaatacttctcagataaggaaaactgaggctttaagaagttaagtgagttgcccaaggtctcacagctcgtaagaatcacctgaatcaattttagtgttaggttttctgaagctaaagtccatgctcttttcgccacttgagtaatctactgaccttttatttatgcaataactttatattttactcaattaggtgagtatacttgtataaaattcaaacattacagaaattatagagtaaaattatggagtaaaaagttcagttcagttcttctgacctctgtccctcaaaccactttttttctcagaagttatcattattgacagtgggacgtggcttcttccagatactttttcccctgtgcatttacaaacttagcacatatatgactatttttacagaaaaggtaaactgaagcttaaagaagttaaagtgacttgcccatggtctgtttctgctggatatccactgtaaatagggtcattttgttaataatttcctttaacttcttattactttgtgcttttttttcctt

SEQ ID NO: 201050 - DNA, 1000 bp, Homo Sapiens
aattaaattcaagacacttaacttgacaaaacatttatattcatgatcaaaaataccaaatgactgtcttaaaaacactctaatgatttttctatttcaaataataaagctaaaaatgtatttaatgttggataaatatagacaaaaaatggatctattcatgtccatttatgacagttttcttactgtcaaaatgagctacagaagaacaaatgagaattgcattcttttatttcaactttccacagaggcacagtacgaaattcttttcttgtaacttccttgttaaaattaccatgtatcaagtagaataccaacccactgggataatggtaaaattactgtcttggaattcagacttcattcctcaaagattttggaagttgtgacaagctgctaggtgtcttcaaactccaaagaaaagcaacatatccttatcttggctggcacaggacaagacagcaaacaaagtagggcaagtagccccaggcaattatttttctacagagattccaaatctgagaaaacctcttatgaaaatatttgttcctctatagtgataggggaggtttctaactaaacatgtaatgaatatttcatcaaaaaaatataaagtcattaataaaatgagagactgaagggaaaatgctaaaatatacattgtaccctataaacttctatacctggactgactaacagaaacacttcccctcatttgtagaattaatacgccttctctgtcttttaacctgcaatactgatgaagaatataatacgcaatttaaggcaaaatttattaagaaactctatcaagtgattgctttataatttatagagcacaaatttggactggctgggttcaaatccctgctacagaactgtctagctttgagacattggtttttagttacttccctctgtgagcctcaattttcccatctaatcaaaggggttaatagtaatatctacctcatgagttggttacagcattcagtgaatt

SEQ ID NO: 201051 - DNA, 1000 bp, Homo Sapiens
gaaaattaggcttctacggattttaacacaaccattttagctaattgtcggtaatttttattttcagatatagccagccactctgggattcatccttaaaactgtttgcatttgtttaatctttcttcaaacttctctttccatgtctaaatgtgcttctaaatattataatctataataattaaaaaattaaaaaaatataatctaagaaaagtgaataatgtgctaccctctactgataggagcaatgtggtcaatttctgctttctataaaaagattgcaaaataaacagaaaagcgaaaaaaaaaaacagggaaagaaaaggcaaaaataaaccaattccagactgattagatgctatcttatatatctggttatgtgagggggtagactccttcgtaatctaataaaatccttttaatttcatagtatatctgctctcaacttccaggtcagagatcattaaccagtgacccatgggctatatctggccctcagacttgttttgttttatgcttacaggattggcctatttagtgcttttataaaatttaaatttagtccccaacatttaaaatgtcaagacaattcaagtaaagaacagattctgctttattttgaaaagagattagctttggtaatacggtcctgcatttgctcattcatcatttcatttattgaacaaatattgaatgagcatctactacattccaggaaaactgccagtttgtaggaatgtaccagtgaacaacatagtcttttaatctttaagagagacaaaaataaacaaatagaaaagatgtaaaatgtcaggtaatcaaaactgtggtgaaaatacagagggtagaaagcaatttttaggaaatgatactgaagcagtgacctgatgatggagcaaactgtacagacccgggggaagggtctgggtgaaaacattcacagcacctaaaagtaaggcaagataagtgtgagagaagtgcagggaagaggaaggagatc

SEQ ID NO: 201052 - DNA, 1000 bp, Homo Sapiens
catgagcaagccacatgaaataaaaaaatatgtatatgtctcctgaaattttaaaatgaacaaacactttattctctggcccaatttcttaaaatttctctctttttttttttttttttttgagacatagtcttgctctgtcacccaggctggagtgcagtggcatgacctcagctcactgcaacctccacctcccagattcaagcaattctccctgcctcagcctcctgagtagctgggattacaggcgcccactaccacttccagctaatttttgtatttttagtagagatagggtttcaccatgttggctaggctggtcttgaactcctgacctcaggtgatctgcccactttggcctcccaaactgctgggattacagatatgagccaccgcacccagcctctctctctttttttttttttttgagatggaatttcactctatcacccaggctgaagtgcaatggcacaatctcagttcactgcaacctctgtctcctggattcaagtgattgtcctgactcagcctcccaagcagctgggattataggcacctgccaccacactaggctaatttttgcatttttagaagagatggggttttgccatgttggccaggctggtctccaactcctgacctcaggtaatccacctgccttgggctcccaaagtgctgggattataaacgtgagccaccacacccagccttctcttatatattttttatagtattaatagtatttttgattggcaaataagagttgtataaatttatgggttaaaatgtggttttaatatatgcatattatataatatgattaagtcaagttttataacatatctgtcaactcacttatcaatcatttcttatgatacatttgaaatttactcagttttttaaaaatatagtactttatagtttactatcatcatgctgctgtgcaatagatctcaaaacctacttaccctgtctttttgaaattttgtaccctttgatc

SEQ ID NO: 201053 - DNA, 1000 bp, Homo Sapiens
acaagcattttctgtaattcactcataacaggagcaagcaacactaccataggggacctatggacatgctgcttttctttccaaactatactgacaggtggatattctgtcccctagaccacgaggagtggctataagataggcctggccaggcatggtggctcacgcttgtaatcccagcactttgggaggccgaggcgggtggatcacgagatcaagagatcgagaccatcctggccaacatggtgaaaccctgtctttactaaaaatacaaaaattagctgggcgtggtggcgggcgcctgtagtcccagctactcaggaggctgaggcaggacaatcgcttgaacccaggaggcggaggttgcagtgagctgagatcgcggcactgcactgcagcctggcaacagagcgagactctgtctcaaaacaaacaaacaaataaataaataaataaataaaagataggcctagtggttatgggttttgaaaagaaaagaggagcacttggtactctggccggttgaaagctaatggtgatttcaaaggcagagaaatcagattgttctgaactaggaacaagcagcagctgtaagcatatggtactgtaatcaaaggcttccatttctacttattcttttttttttttaattttagattcaaggggcacatgtgcaggtttgttacattggtatattgtgtcatggtggggtttgggcttctattgaacccatcatgctaatattgaacttaatacccaggagatggtttttcagtccttgctctcctccctcccttcctcaatgtctcttatttccatctttacgtacatgtgtccccattgtttagctctcacgtataagtgaaaacgtgtagtatttggttctctctttctgcattcatccactcaggataatggcctccagctgcatccatgttgcagcaaaggacatgacttcattctttttatgggtctgtggaattccatggtgtatatgatc

SEQ ID NO: 201054 - DNA, 1000 bp, Homo Sapiens
cttctctccacttttctcaacatccacactgtgagcttcagggtgtcagctaggtttggatgcttcagccagcttccttggacctcaggaaagtatggcgtcacccagcccaggggataacaccccagtgaacgctggtgggtattatccctgagggttgtgcaagctgatccacttggtgtgcaaagaaaatcttggaacttttacctacctgaatgttagctaaaatatgaaagatatcaaagcttactaattttaatatatggattgtcatactaattttaatatggattgtcattcctgaggtaagaggtaagagttccataatccacttgtttgcttctttgattgtcttgtgatgaattgcagttatatcttcttggttaaagggatttatggataatatgttccattaaaataatctaatccttgcaaaatggttaagtaattaaaatttctggcatagaaaatgtggatcaaggataactcaaaatgccgacactggtaaacaactagagaatagcaaagctgatacttctaacctttattcaccccattatgtgatgcaaatattgatgatttcataaaatccgatgagaatttggccccataaagttcaaaactatcatgaagactatttattttgaagataaattttcactcatgatcattaatgattaatctcacccaaatataaattatgttgagatatttgctaatgagaatagcaatatgtatattgctatatataaaaatatgtatatatttataaatacatttacgtaaattgtagttgtgtgcttcatgttttaaaaaacataatgagtacattttttaaaaaacataatgagtacctgattcaaaacaatgtaaaaaccactgctgtagacagtcctccaactaatgatcctgattatcactccacagccaaactcaagctgagagaccctctggtgctcccctgggaggaactgcacttactgctgctagagccttctcc

SEQ ID NO: 201055 - DNA, 1000 bp, Homo Sapiens
ggttcaagaaaattttaatacactgatcaacaaaactggaactttgatggattacatttctaaccttgttatactgtatttacaaccttgaggctaaccctatcttatcaaaacatctctcagtattatcttgggacacagattagtgagctgaatagaccaacataggtgcaatcctgaataacattattcattctggtagatgaaatacattcattcatcaattaattttcctaaataatctaaaatttggctcaatttatgttttttgtaataaacctacaagcaagaaaaaaattaagccaaaccatcacaaaatttaccaaaaatggcaccgatgccagatttcttttgaagtctatcagagtaccactctcaacacacttcttcctctctatcccacaaattcttaaataatctggaatccatagctcagcttcatgtggtctgtgtatgtgaaataatatataggaatgaatgcatggtacatttttctggggaaggagtccactgatttcattaaattttttaagggtatccaaaaaagcttcagaatcacttctgtacaacctttccctggctacaattactacctatttcctgataactcccaaatctccatctctatcccagatttctatgcccaaaaatttataaccaactgctgggttaggtgtggtagttcatgcctgtaatcccaatactttggaaacttgaggtgggatgacagcttgagctcaggcgttcaggaacattctgggcaacacagtaaaatagtctctaccaaaaatgttaaaaaaaaaaaaagtcaactgggtgtggtggtgcacgcctgcagtcccggctacacaaagaaagctgaggcaagaggatcattggagttggaggctgaagtgagctacaattgcaccactgggcaccaacctaggcaacaatgtgagatcctacctctaaaaaataataataaattaaaaataaataaaaatataaccaaatacat

SEQ ID NO: 201056 - DNA, 1000 bp, Homo Sapiens
ttgacttaatgttcactacccaaagacaagaatgactgtaatcacaacctattttcaacatcacacattaaaagaactaagaaatccttctgaaaagtattcatcaaagctaacaaatgcccaatgaattattacattttttctgggaatttgataatcatagtgatgttgaaaactactagtgacaaatgaagaagcaatatcttgctcacctattctcatatgccctggaaatattatataaaatagcccatacttacatagtgcttactatatgttagacattgtgctacataccttacaagtattgactcatcttattctcactgcaatgctatgagataagtggtattatcatcattatttccagatggggaaacagaatcacagaaataattgccgaggctccatggctagtgagtgactgacctggaatttgaacccactccagctccagagcacataaacttaacatctattttataccgccagaaggaatttaacttagaagaaccaaacagaaaagaaaaaaaaaaaaccaaggaacagaagcctggcataatagaggaagtaacataaagcaattcaatatgaaattgtaatgatttcaggaccaagattacttactattatctcaaggatgatgccccatcgatacagaataaaaattgctgcaaaagctccccatgtttcagaaatcaagctctaagaatgatctgggtaaagcatctgtcaatattagtcaggttaaatcaaagggcaatagtctatggatcagaaaaactctgctagctctggcttcatccccaactactgctgtttatccctcattggatgatttgtgtctccctattttgctagaggcataaaggacttatggatatcagatagatattgatttgcttctcccttcaacaatactctacgtaggcaaaaactctttactgcagtttcaaataatggctccttcagcgtagaaatgaatcacaaaactaggcaa

SEQ ID NO: 201057 - DNA, 1000 bp, Homo Sapiens
ctgggtttttttttcttttgaaatggagtttcactcttgtcacccaggctggagtgcaatgatgcgatctcggctcaccgcaacctctgcctcccaggttcaagtgattctcctgcctcagtctcccgagtagctgggattataagcacctgccaccatgcccggctaatttttgtatttttagtagagatggggtttcaccatgttggccaggcttgtctcgaactcctgacctcaggtgatccaactgcctcggcctcccaaagtgctgggattacaagcgtgagccaccgcgcctggctttttttttttttttttaattcctgtaactggggcacaatctcttcactccacacgcatatagtgtctgcctgacccacagacacactttattcaggatgctctgtgaggaagatctccatttatgagacttccagtgagctaaaatttggccttctgaatggcattcttaagaactgttttacataacgttctgccttcttaggccaacattactcttgcctctcatcctcaagaaacagtgtcatcatcataataaacaccttgtcttgtactatgcactaacacttgtgcttttaaccccctgttccatgcttctgattctagaccgttaatgcacctgctgccaaccacaactacttctaatttgcctttcattcattcaactagtatttactgagaacctactcatgtggagaaagtgattctgatggactgtggatgagaacataaaatattcaagattgttggcattaggggctaaataagagcaaacaagcctccgagcgaggtatcagaaagtgagatcagcagcaaaggccagagcttcactacaaagcaatggaaggatattttgagggcttgaagccatttggccttctgaccttcctttctgtcaggttttgttctgagtgtcaaaagttctcagattctgataaatggggtgtttgttacatttattaaagaacatatctatttc

SEQ ID NO: 201058 - DNA, 1000 bp, Homo Sapiens
cttccttttgcctctgataccaagtctaaattaattaacattattctcaaagcttagactatttgggtatcaaatcaaatcaaataatgtcaattgcatgtgattcaatgtatagttatgtgctcatcttatgttcttaacataaggcttttaccaatcaggctgacttgttctctgttctcccaaaacattttattttaattcccatatctatgttgaattaaccgccctctcttccttcaacctatcagcttaattctgaagattctttatggccaaattccaaacctttccctcctactacttcatactgctctcttctgtctataaattcctagagcagagagcctggggaattactggatcatatgctgtttagtcctctaattatccctatccataaattcttctcactgcattataattccctaaagagaaacatatttctttggtctctattatagcacctaaggaatctttcttaacatgtagtattgaatagggagctctaggtgcagaaagaagagagaaagtataaggaagatattatcaatatgtcctaagatgttgtctgtaggtgaagaccctgagactggagagttagtgacttgtccaagagcaagcagttagtggccaagcccatcatcagaggtaagtctccaggcaccgtaagtgcgggctctttccacttcagcggttagactattgcatagtgaatggctcagttccttctcagatggacctgccttattctgaggaccatctgtcttcatacccccacctctcttcctgtgtcccattcagaggaagaaatgccagcttctgttcaaatatctctggtatttgattctagtcagagattcaggaaagggaggatcaccaccaggacagtgatggccagggcacacgagactccccagaataagataccttccccacttctcacttctcaagatatgtgtctaaaatatattccgtctctattgtgtgtatagtacgg

SEQ ID NO: 201059 - DNA, 1000 bp, Homo Sapiens
ggacttttgttgattagaaacccctaattttaatttaatcatattcgtaaaaatttgccttatgcttttgaaattttgttttgaggaggatcgatcacaaagatacgtccctgcactctcttctgcccattttatttccactatttttctttaaccttttatacttaggtttttaaagcatgcagagtcctcttttgtatttagtgttaagtaggggtccagttttatttttctctatacaatgagcctgtttcccaaatgccatttactaaataatctgtccttccccgtgatgtgcgggaccacctgcatcctatatgttattttttattttttaatcattttttattttttttgcgatggagtctcactctgtcgcccaggctggagtgcagtggcgcaatctcggctcacttcaagctccgcccctccaggtttaagtaattctctgcctcagcctccagagtagctgggattacaggtgcatgccaccacgcctggctaattttttgtatttttagtagatacggggttttgccatcttggccaggctggtcttgaactcctgacctcatgatccacctgcctcggcctcccaaagtgctgggattacagatgtgagccaccgcgcccggcctcaccttcatcctacattaagttgggactgaatctgagctctctattctgttctggtgatctatttttatggtttttaaactactgtttttattatgatggctttttaatatgtctttttttgttgttgttgagacaggttcccactctgtcacccaggctggggagtgcagtggtgcagccacggctcactgcagccccaacctcctgggctcaagaaatcctcccgtctaagtctcctgagttgcttggacttacaggcacgtgccaccgtgaccagctaattatttttttctattttttgtagagatggggtctcactgtgttgcccaggttggtcttgaacttctggcctcaagtgatc

SEQ ID NO: 201060 - DNA, 1000 bp, Homo Sapiens
tttgttgatttgcatacgttaaaccatccttgaatgccttatgtaaattttgcttgatcatggtgtattagtgagtttgtagtgagattaaatcagtaataaaaagtctcccacccaagaaaagcccaggcccagaaggattcacagctgaattctaccaaagatagaagaaataacaccagtcctcctcaaactattccaaaaaacttaaagggagagaattctcagtaactcattctagaaggccagcattaccctgttagcaaaaccagataaggccacagcaaaaacaacaacaacataaaggaacctacaggccaacatccctgatgaagttagatacaaaaattctagcaaaccaaagtcaacagacatcaaaaaggtaatataccatgatcaagcaatttgttagtgtatagttgttcataatagtctctgatgatcttttgtatttctgtgttatcagttgtaatgtctcatttttcatttctaattttttttatttgggtctttgttaatctagctagtggtttatcagttttatcttttcattttattgatccgttgtattttttttagttttaatttatttttggtctgatctgtattatttcttttctgctgttaattttgcatttggtttgttcttcctactctagttcctgaggtgcatcattaaattgttactttgaaaccttactactctttttttttttttttttatactttaagttttagggtacatgtgcacaatgtgcaggttagttacatatgtatacatgtgccatgctggtgcgctgcacccactaactcatcatctagcattaggtatatctcccgatgctatccctcccccctccccgcaccccacaacagtccccagagtgtgatattccccttcctgtgtccatgtgatctcattgttcaattcccacctatgagtgagaatatgcggtgtttggttttttgttcttgcgatagtttactgagaatgatgatt

SEQ ID NO: 201061 - DNA, 1000 bp, Homo Sapiens
actataggtgtatgccatcacgcctagcttaaaatatattttattaagaattggtgctatggaaaagtattgcttcaaccatttcccccttttcaagctaaaattaattagtaatttaaaaagagacatgaacatcaacaaattaaacaatggaacaaggatcattcaagtcctcctataggcctcttgatctgtacattaattggaataatggtctgttctttttgtagaaattaatcatgttcttaaacacctccatgcagtgtaagttctgactgtttaattaaaactttatagtaagctcaaactgggatcctgaaaatgaaaagatattttttgttatctggttcaggtttttgttaggatgagcactctcccttatgataatccagaggtctgctcctttgaaatgtcaccccaaagtaggttgcttgaagttcccagaggctaagagggttccccctatcaggacatagttatgacacctacacagctcccctcttagcttcatccctcttagaagagtttctatttatcttcatattctgagacgaaattgttccatttattctactaacctcagcaaaagctggttatgttaaaaacaaacaaaccaaaaaacctaactgcatctaggtaaacattttcccatatttgttcttgcaagatggctgataaggcattataagtggtgatccctttattccatcattacaggaaaaaataatgtttatttgatgtgaaggggaaaaattaaaattaaagataattctatacttcggatacttgaccatattaaatttacaaaatgtatagttgagttttaaaatcacaatataagtagatttcttctactcacaatcattatattagataagaaggtactcctcttgatctctcctttgctccatcataaaatccttactagatgggtaagacggtagttgtgataagacagtagtagcctatcctgtcttatacgtttctgtgaagcccagag

SEQ ID NO: 201062 - DNA, 1000 bp, Homo Sapiens
aaccaaatcaggctctcataggatagtgagaacacaaaacaatatcttttctctttttaatatacatgaaaaaatacctccagaaacccccagatgaagtaccatataaaaaaacattatatcatagaatttgttctaaaaaaaatttaaagacttaattagcaacaggatacaattgaaatactatatcaaatccataaagcacaaatgcatgtgtgtagaactcagggaaagcatttgacaaagctcaacacctcaatgacaggaagaaaaatgcaacaaactggaaacagaaggaaatgatctcactgtgacaaaacacatcaccaaaccccatagctgatgccaatgtataatggtggagctctgagtgctttctccttgtgctggtcagtttttgtttggttttggttttggttttggttttggttttggttttggttttggttttggttttggtttttcccttcatcttatacaagctcagtcatctgaaaagaggaaacatcaaatggggaaaatggttctatcaggttggcaggtaagcatatctatgtggcatttacttggttaaagattaatgtgggaggtgccagatcactgtgagcagctccctgggaagttgatcctgggaggcctatgactgaatatgggcttgagatgaagttagtaagcagtgttcctccctggtatctgcttcagtttctgcttccaagttcctgctttctagttcctgccctgacatccttctacatgggactgctatatagaactatatatggaaataaaccctttcctcctcaagttgcttttggtcatggtgttttattacagcaataggaagcactccttaagatcaggaacaagacaagtatgctcattttcatctgtatgtatatttcctgggatgttctaggaaaggcaaaacaagttacaagttacaagttaaaaagactccattagaggaaatgaaaccttttcaactatgctaagcaagatc

SEQ ID NO: 201063 - DNA, 1000 bp, Homo Sapiens
cagcatgagccaccatgccagtcctttctttgttaatttttaattacataagaatacaagatatattttagcgagttaattcaaaggtgtgtgaaaaagagaaagagcaagactccgtctcaaaaaaaaaaaaaagaaaaaaaaagaaaaagaaacatctcttctacttcccctcatctccaaaccctttctctgtgttcctacaaacatatacttgataaaggggtggggtttttttggcttttgttttagcaataaaaataggctcttacccaacactctgcatggtgcttttttcacttaaaagagtatcaggagcatccctccaggccaacggatacagattttacattattcattttcatggctgagtaaaatctcacaatatagtgtattataattaatcacctatcgatggacattcaaatcaatttctaggtttttttacttttttaattttagagacagggtattgctctgtcacccaggatggagtgccgtggcacaatcatggctcgctgcagccttgacctcctgggctcacgtgatcctcctacctcagcctccccagtagctgggactacaggtgcacaccactgcacctaccaaacttttaaattcgtatattttgtagagatgggagtctcactgtgttgtccaggctggtctcaaagtcctgagctcaagctgtccacccaccttggccttccaaagtgctggaattacaggcatgagccaccatccttggccaacgagattattattattattattattattgagatggagtctcactctgtcgccaggctggagtgcagtggcacaatctcggctcactgcaacctctgcctcctgggttcaagcaattctcctgcctcagcctcctgagtagctgggactacaggcgcccgctacacgccgagctcattttttgtatgtttagtagagacagggttcaccgtgttggccaggctggtctcgatctcctgatctcgtgatc

SEQ ID NO: 201064 - DNA, 1000 bp, Homo Sapiens
gcaaagcccccagaatccctgagcattagagagggacaaccaaggcctctgggtttgaggagatgcctcagggtcacagtggagcactagggcctggtcagaggaccagcttccccgcaggaagccctttccacgggataccccaccctctgccagccagtgtggggggtggggggagggagtggggatgggggcgttggccgggaccaggaggtcaggcaggcttattgttgagagataaagggtggtagcctttgtgtgaagaggaggaattcctctgggggttggaaacaaagggagcaggcagcgtccagggccccccaggaccccagcagggggccagggactgtgtgactgtgtgaccccaacggggctgcaggaaaaggaagactggttccgggtgtcttgagaccccaagagtggatcggagtggaagaagctgagatgggaagaggggcccagggccagggctgggagtgtgtggctgcccccatgggcactgcgcagcccagctgagagtgcgtcattgccggtgtccccaaagcacagacgcttcccagtcacccaggctgcacgcagaccacacaggctgggctccagcaggaggcgttggccgcccgctgacctgcctgggtcagcctgtccagactgcccactgggccacattcagccacgtgctggagtcctctagacctcaccccagccacggtgtggccacgcagtggacgctgagctcacatcttactgtggggtttttttgtttttttttttttgagatagagtttgcccttgtccgcccaggctggagtgcagtggcgcaatctcggctcactgcaatctctgcctcccgggttcaagcgactccgctgcctcagcctcctaagtagctgggattacaggtgcccgccaccgtgcccggctaattttttgtatttttagtagagacggcgtttcaccattgttggccaggctagtcttgaactcctgacatgaggtgatc

SEQ ID NO: 201065 - DNA, 1000 bp, Homo Sapiens
aagctgaatcgtgtttaattaaactctcaaaagtgtcaagtttttgtctataaaatggcaaaactggctatgatgaaataaactgatatttgctatttctaataaaagcatacaatatatttttctttcttaccagattcaaataatatttaacgccaacatattagtccaagtcctatcatcagtcagatttatcagaaaggtatgaaaacccatgcttactataaggaccaaaatagcctaattcaatactactttgaaaacatggggatgatgttactacgtaattgttttaagtacaataaccactgatcacatttgaactctcaggatacttcaatatttcttttggacaactatgacctgtttagtaaattacccccaaatactttaatatagttttacaaatcgccccaatgccagagacccagatcaaaaagaaaataatggtatgggtcagattcacagaataagcactaacttttatgcaaactgaaaataaagattttatctaaaagttatttggggaaaataagcagactttatcaagaattagagcttggtaagaaggtaacagaaacccattgtgagaaacaggttgactctgtgtagctttccatagtagagtttagagtttcttgtcatgattaccttatcaatgcagtataataactacttacacagcacttacattgcattaggtattataagtaatctacagatgatttaaagtatatgggaggatgtgcataggttataggcaaatactacaccattttatgtaagggacttgaacattaatagattttggtatcctcagaggttctggaactaatacgccatggatgccaagggacaactgtacttagaggtagaacgtctctgctcttcctacatgtccttatttttaacaacttctgttcttacaaataatcctaagtcaatcaataaaacttcaaattctattaacagcttaaaagcaccaagaaatactctgatc

SEQ ID NO: 201066 - DNA, 1000 bp, Homo Sapiens
ttttgagatttttgaaattagtatgcagcttagaatcaatgttaaaagacaggcagcagaggtgatgtagctctaattgcccatgcatatgccaacacacaaatctcttggaaaaaacagaagcacttcagagcctggagaggttggtgtgactgacccccgtatgagggactggctgcaaggcatgcataacacagaggactaatggagaagtaatgaagttaaggcttaaagggctcaaaatcttctgttaaaagaagacaggatagaccgggcgcggtggctcacacctgtaatcctagcactttgagaggccgagacgggtggatcgcgaggtcaggagatcgagaccattctggctaacacggtgaaacctcgtctccactaaaaatacaaaaaaatagctgggcgtggtggcgagcgcctgtagtcccagctactcgggcagctgaggcaggagaatggcctgaacccgggaggcggagcttgcagtgagccaagatcgcgccactgcactccagcctgggggacagagcaacactccgtctcaaaaaaaaaaaaaaaaaaaaaaaaaaaaaaaaaaagaagaagacaggataaccacaagtggatatttccagatctctaagtattactagggaagtaatatagagtagtaaaggctttcaatttgggaagatgaaaaagtttgtggagatgggtagtagtcttggttgcataacaatgtgaatgttcttaatgctattaaactgcacagttagcaatagttaaaatgacagattttgtattatatatattttaccacaataaatgaataaatgaaaaaagtgaagtctctggaatcagtcttcttggcttcaaatcttgcctctgatatttcctagctgtgagtccttgggtattgcattaccttctctgtgcttcagttttctcacctcagaatgggaggataacgacatgcacctcggaggtagtgagggttaaatgaattaaatgaatt

SEQ ID NO: 201067 - DNA, 1000 bp, Homo Sapiens
aggccaaggccgggtctgtttctatccctcaggcctcggcccttgggtctcagtcatccccacgccccgccccatgctgtctctcctcccagggattcaggccgagctttgaaagggtcacttcaaagaggacctgccttccgagggcctagccagacccagggccagctcctcggccagattcccagcggttggggacaaaggccccactgttccccgacccccggacgcccccaaatgcactgggcataagaagtctttctttccccagttccgctccttacgggcccgggctccttgccaccgggagtagccctggctcctcctccaggagaagctggggggttggcgggacagggaattactagtttccccactgccaccaccatacacccaaaccccttgggcacccaggatgatgacaaaatccagccaggcgcggtggctcacgcttgtaatcccagcacttcgggaggccaaggcaagtggatcacctgaggtcaggagttcgagaccagcctggccaacatgccagccaacatgccgaaaccttgtctctaaaaaaataaaaaaaattagccaggtgtagtggcacacctgtaatcccagcagcccaggagactgaggcacgaggatgatgacgcaaccccggggccaacctcaggaccagtggcccaggctcctctctgtccctcggccaccaagcccttcctgggcctagaatacaatcccacattttcccacctatcagaaccatacccacccttgcaggcctcctccaggcagcctctcaggactacctatcctctggggagcctcacagtccaaaccatagcagccaacccctgatgttcccagaggctggggacatctctgcctgctctcctcaatgccccacagtaggaagtaggattcacctgctcctctaatttcctatcatatagtgctgatcccaaggcagggcccttaaagtttcctgtgccaagcctttgctgaattc

SEQ ID NO: 201068 - DNA, 1000 bp, Homo Sapiens
cttagtgcttccggcaggaccccagcccagtccttggtcctctgtcccacccacactcacctgcctggaaccccctcatctggtggcttaagggcctccagccccggcagttcccagcccccaggtcctgtgagcggcaggggtctgggtccccttggtgccattagtgggtgtgggtgttgccctccagctgctcactggccacacaggactccaggccctctgggctggtggcacggagggtgttgggagcctgagtcccggctcaccccagaagggaagacacccgcccatcaggggaacccttgctggacttacgggagtgagaacacagccattccaggggcgagtgtggcaatgtcagggtctatttgtcgcagcagcaagagtgaggctgattcacacaccatcctcacagcccacctgcgtgtaactacaggctccgtcgtgaaatacacacagagcccactgcccgcaccaccctggccatggtcactctcgcctgggcaaccaccacagccccctggttggtctctccacctctaccctctgaaggtccttcctcatcttggtgtctggagggctctcccctcacatagggtgactctaggggcctcaggcactctgactcccactttccctctgacctgagacccccaggtcctgcccctcctgatgcagccacgtggcccccttgcctcctcagccaggcgccaccttgccctggggcctttgcacctccagccctcagcctggcatgctcttccctagacatccggctgcaagacagactctctcttcttcgatgttttctgcaaatgtcgaatcccaatgaggtcgtctttacctgccctgtttgatatttcactcaccctcgccaacatcctgcgtccccctagaccaggtcttttccccaaagcattccccatcccctaatatgctatgacattggcgtatgcacgcgtttattatgagcaaacaaagcaggggtgctaagatc

SEQ ID NO: 201069 - DNA, 1000 bp, Homo Sapiens
gaatacatccaggcataactcaacttttttgagccctgcagatactgcagtttttacaaattgaagattcgtggcaatcttgtgtcaagcaagtccgttgtgccatttttccaacagcatgtgctctctttggttgtctgtgtcacatttggttactcttagaatatttcaaactttttcatgattattatatgtgctgtggtgacctgagatcagtgagctttgatgttactgttgtaattgttttggactccatgaacacacctgtgtaagatggcaaacctcattggtaaatgttgtctgctctgactgctccaccaatgaggaggtttcccattgcttcctctcctaaggcctccctagtccctgagacacaatattgaagtgagaccagttaatagccctccagtggcctctaattgttcatgtaaaagaaggagttgcagtcagttcactttaaatcaagttaaaaatgaagaagcttagtgaggaagacatgttggcagttgaaagctaggccaaacagttggccaggtggtgaatgcacaggaaaagttatcgaaggaaatgagaagtgctgctccagtgaacccacaaatgataaaaaagcaaaacagccttgttgctgataccgagaaactttggtctgaatagaagatcaaatgggccataacattcctgtaagtcaaagcttaatccagaacaaggccctaactctcttcagttctgtgatggctgagaggaggtgagtaagctacaaaagaaaagctgaaagctagctgaggttggctcatgaggtttaaagaaagacacagtctctataatataaaagtgcaaggtgaagcagcaagtgcttgatgtaagaactgtgagttcttcagaagatctcgctgagataattcatgaagatggctacactcaaaaaacagattattaatgtagacaaaacagccttatattggaagatgccatctaggactttgctagctagagagaattc

SEQ ID NO: 201070 - DNA, 1000 bp, Homo Sapiens
gagtttgtgtttttctacacacatgtataataaaataaacaatggaacagaatagaaatacagaagttggttcaattgcaaatggaaatttagagtatgaaaaaggcagcatctcaaattagtggcaaaaagatggcatttctaatttacattgggatatctagatagctacatgaaaagataacattagtttcatttgttatatcatacaccaggatattttccaaatgggtcagagatttaaatatttttaaatgaactaatacaaattagtctttatagctcaatagttggaaaatatgtcctaattatgattcaaaatctagaaatcataaggaaaaagataaattttattacatcaaattttttatgaccaaaaagagtgccacaagcaaagtaaaaagacaaccagaaaaaaatgtgcatcttttatttaacattacaaatatgtaaagaatttctaaaaatagacaaaagaaaaaacttgtagaaaaataggctagagataaggacaatccatcagaaaaataaatgcaaatggctcttaaccatatgaaaagatgttcaacctctctcataagagaaatgcaaattaaaacactctgagataacatttcacacatgggattggcaaaaattcatgttggattttgtcagggtactccagagaaacagaaccaattgaacatatatatagagaaagagaaaatagatttataaggaattggtttacatgatcatggaggctaaaagtcccccaagatctgcagggggcaagctggagacccaggagagccaatggtatacttctagtccaagtccaagggcctgagaatctgaaaaatcagtggtataaggtccagcctgagtttgagtctgagactgaaggcaggagaagaccaatatcccatcttgaagaaaggcagagggagagaattatcttattgagcctttttgttctattcaggccttcagtgaacgcaattacttcagtgaattc

SEQ ID NO: 201071 - DNA, 1000 bp, Homo Sapiens
gaattttcctccttccagaccaaaccaatgcagaccaaaccaatgcagaactcctatgtgctgatggtggtcttacatttccctaagtttctgccgactaaactgtgcacacgttctcgggacctcctgaagctgcgtcacaggcactaatcaaagaacacaaccaaggtgagtctcaatcatttcaagaaatctatttgcaaggttaaggacacacctgagaaaagaacagagaaccacaggaaaaactgtggtccgtgcttttcccaaagattgtctggggacctcagtaagtaaaggggaaaagtgtgggtattggggaaaggggaagaagtggaaaaaatgggtgtgggtaaatcagaggcaaattgttgcattcttctgtctttggtcagcgttcactgaatacacattttacatgcgatggaggtagaggcagggatgtagcttttttatctttgtgtaatagctatcttatttaggaaccagatgggaagcaggtttgcataagccagttcccagcttggcttttccctttggcttagtgagtctggggtcccaggatttattttccgttctcacaggttgtggtcctcacatttggctcaaaatattcaaaattttttccagagtttggccttttcttcagcactgggaattgtgatccaaagcttttcctgatgaggcacaaagttggagaaacaaaacgcaaactaaacaacaatgaaacagaacagagtgaatctgctgtagctcaagagaggacgtagctgcccccactccgcatccccaggctcgggtttgccttgctgacctctgctgccacctggtgccgcacagagaaactgaggagaaaccacatcagtctccttcagcctcagcttcacatctgtgggtcaagcaaccctttcagaagctgtataatgtgggaaagctttcctctcaggaaaatgcacacatccaactttgagaagatgcccttgggggtgcttcaaggatc

SEQ ID NO: 201072 - DNA, 1000 bp, Homo Sapiens
cccacgctggagtgcaatggcgcgatctctcctccctgcaacctccatctcccaggtttaagcgattctcctgcctcagcctcctgaatagctgggattacaggtgcacgacactctgcccagctaattttcgtatttttagtagagatggggtttttaccatgttggtcaggctgttctcaatctcctgacctcgtgatccgcccacctcggcctccaaagtgctgggactacaggcatgagtcaccgtgcccggttacaaaatttacaaaatcatccaggcatggtatcttgcgcctgtggtcctaggctattcggtaggctgaggcaggaggatcatttgaggccaggaggtcaagggtaaagtgagtcatgatcgcacaattgcaatccagcctgggtgatgaagtgagaccctgtctcctaaaaaaactttttttaataaaataaaataagtgggacatggtagcatgtgcctgtagtcccagctactcaggaggctaaggcaggagggttacttgagcccaggagctcatggctgtagttgagccatgatcacaccactgtactgccgcctcagcgacagggcaaatcctcatctctaaaaagtaaaataaaaaataaagtaagacaacggagcctggaagttcgaggatgcagtaagctatgaacgtatcaatgcactcccgtgtgggtgacagaacaagaccccacgtcttagagaacaaaaaaaaaagaacgaacgactttcttaagaccaacatccttaaattaccttgaagacaatgcactgtctggccctggccatctgctccagcttcttctcataccactctcaaggagacttgctctttctacacagctactctggcatcaaatgctgtatatgtaatattccctttaactagaaccacctatttgttcatcctcccaccccattttacttctgtacacttctttcaaatctcagcttatttcttcagagatgcctttcctgatc

SEQ ID NO: 201073 - DNA, 1000 bp, Homo Sapiens
acttctgggggcctggaggggtgaggggtggtcgctgcagggggtgggggaaagtgactagccctgcccaacccctgggtcctggctggggtggccaggaaggggtagcggggcagtgcagtgtcgggggagagcggcttgctgcctcgttcttttcttgcaggccccaggatgcaggccctggtgctactcctctgcattggagccctcctcgggcacagcagctgccagaaccctgccagccccccggaggaggtcagtaggcaggcggggagggcgtggtcagcattccccgcccctccttggcaggcagcacgggaaacaggacagggaacccggacccaggttccaggccaggcttgggcctttatttctctagggctggagtttctccagcagcaaaacagagagaaaatgtcttgccttgcctttcaggggatggagtagggacatgaataagatcccaaaagagtaaaaatctgaagcacttttaacaagtccagggcaattctcctgcctcagcttcccaagcagctgggattacaggcatgcaccaccaagcccggctcattttgtatttttagtagagacggggtttctccatgttggtcaggctggtctcgaactcccgacctcaagtgattctcctgcctcggcctcccaaagtgccgggatgacaggtgtgagccaccgcacctggccaggatcttttctcattaccttgtcttcctagtgggggctccactgagcaggtcatgttcccggacatttgttcggatactgaccaggctgtggcagggagtgagggtatggagtgacctctctcctgcccagaaagggcgcagctgggttcccaaggcagatacaggcacatggagggaagcctgggccatatgagtgttatggggtgagtgttggcggaggcccacccttgagggacaagagcagctgggcatcttggcgagagccctggactttcgtgaggtcagagtatgaattc

SEQ ID NO: 201074 - DNA, 1000 bp, Homo Sapiens
ttttggaggggagaagtgggaccaaaaaagatgcagttttcatttgtattgggaaatgtgaaaataaaattgacaactcttttagttaaaaacaaaaaaaagaaaaggaaacaagatgtggggctgccatatgtaataccgtggattccacggatcttctactctggaggcaaatattatctttgctgaagccagaccaacctgacacaaagaccttttgtttttttaatgtgactgtgttttattttagaatgtgtaattcactttagaagggcaaagtacctgtctggggaagactatttaatttcctgcatttatttagaatgttggctgatgttattatgaagggaaacagctctaacaactgagtgccccccacatagccacagctcatgagttcacggggcaaaggaaatgaacagcagcctcctaatagccagccttctttgtgatgtggaaataattatcagcatgtaaaagactatatatatattcaacaattctgatcccctgaaaaattcaaatctacaactgatttgcttcctgggctcctgaaaacaactttgtcaaaattgttcagaaatataatcagccaatcgttgccccttggggacgcaggataaagcaagtcagccatgaccaatgaggagtcggccgtgcacaattacatgcagacctgcaggacatcgagtccctgctatggtccctccccagtcagacccccattgcctgggctgcagccagaagcattcaggcacaagtgcattcaacaaatacttatttaattgtattggtggttagagggttgcgattgattaaggcacattaatggatccgtgtcctccctgtatccaagattctgccatttgtctctgcagttcctcccactgaagaatcggagtatatttctccagtccctaatgttgggtttagtcatgtgtctagctttggccactggaatattaatctgtatgaccaaaaacttggaaagtgtgaattc

SEQ ID NO: 201075 - DNA, 1000 bp, Homo Sapiens
cagaaaagtaactgtgccaaacaggatgctgatgtttctttttttgtaagagagcttaaaagccacgttgtgatggccactacaactaaaatttactgaatgctcacactgtcccaaaaattctcctcaattctttaaaatgtattctttaattctcacaaaaactcaaggagatcggctctattactgcttatattttactgaaaaaagggagccatggctcagcgtcagtggggaggccacgttcatggctgctgcccggggccacctccccgttctgcactctgcagccatgcttgtctcggtcagagggggaggccagacaccacattaaaagtgaaaaatgtaagcaaacaaaatggctttgccaaaatcataatgaaagttaatggcaaaaataggataagaatccgagctgaatcttaaagaatataaagctatctggacaacagacaagtaaaccacgtaatccctcgtgaacaatttttatattctcctgtaacaccaagatccatagttcatactttacctctgggtcacagaagcctttgagaatctctcaaagcccagaaagatgaacacactgtctccccagagaaatccgacagacgcacacacaaaattctgctttactttcaggagacatcagaccccagctgcagatgcacggctggaaaccagaggcttctgtgctcgttctgtgtgcccccaactccaccaggagagcacggggcccaatgcccccacccagagttggctgcacgctccatcgtgggaccgcagccgcgcgccccggagggaaaccacactccagctgcagccgaaacctccaccgactgcactagcttcataagccttcctcagagaccaaggacatgctggctacgtgcacagaaagtctgcactcatttcctaggagtctcttcccctcccagggcaaccctccaaggtggctgttcacaagcatgacgccagcagagagcctgttcccagagtgatc

SEQ ID NO: 201076 - DNA, 1000 bp, Homo Sapiens
gttcctaaagaaatccaaaatagaactaccatatgacccagcaattcctcttctgaacacatacccaaagtagatgaagtcaacaccttataaagatacctgcactatcatgtatattgaagcattatttacaataggtaagatataaaaacaatccaccggtctattgacagatggattgataaataaaatgtggaataaatatgtaacaatattattcaattttaatgaagatagagatccttccacttgccacaatgcagatgaaactggaggacattatgctaagtgaaataagccagacaaagagagaaaaacattgcatgatctcacttataggtggaatataacccaaaaaaaataagctcaaatacacaaatattgagaatgaatggttaccatgggttgggtagaggagggagaaaaaaatggttagatgtaggtcaaagaatataaactagcaaaaatacaggataaacaagtctagagctctagtgtataacataagaactaaagttaataaaattgcactaccttagagatttttaataaataagattttagttgctcttatcacaataaattaactatgtgtaatatgttaatctgcttcactgtagaaaccattttactgtctatatgtatcccataacaacatattgtaaaccagaaaaatatacacaataatatttattttttcaaaaattagataattgtgaaagtatggagatatgtaagtttgaggtgaagtgggcttggagctgtcctttcctaataacaatgtatcttcctgctttgctctgctataattcttttcatcattgccatcattagagatgttgcatcatctcagaagtttatttaaaattaacattaagaaataattaattatgtattatcatacttgtcatggttctttcttttggaaggtaaaactcaattcaaaaatttttgaggaaatagtaaatccaaggtcatattcaaggtcattgctccttca

SEQ ID NO: 201077 - DNA, 1000 bp, Homo Sapiens
atgtccacaagatcgaagaccaagtactcagaagaacagcttttcctgatactaggagttaagagaagctttctccaggaactctcatagagacaacttgcatgatgcagtggacagcacccttagcatgctccacaagggtcattctgcagtctctttcagcactggataacggcactctgtctcaaaagtagactctaagtaagttgatagcatccttagactctgtcctaatattaccaagaacacaatttagcatatgtgcccccctcaatggggaccctcctaccatcctgcaagaaatcctctgtgaaactagactttgggtgagaacagacaacagggagttggaggcttcattctctggcaccagttagcctggtggggagaatttccgcatgcctggcggtgcagttgagataatccacaaagctgaaggcagggtcaacaacctcccatgccatgcaagttaaggacacctaggcaagtgcgtgtatgcctgagggcaggaccaacacatttcccaggaaaccacacagcacagactggttaagaatgtgagctgtttggcgctggatcatgcctgtaatcccagcactttgggaggccaaggctggtggattacttgaggtcaggagtttgagaccagcctgaccaatatgatgaaaccctctctctactaaaaatacaaaaattagctggacgtggtggtgcgtgcctgtaatcccagctattcgggaggctgaggcaagagaatcacttgaacccaggaggcggaggttgcagtgagccaagattgtgccattgcatcccagcctgggcgacagagtgagactctatctcaaaagaagaaaaagagtgtgggctatgaggtcacgaaatttggattaaaatcccggttttatcactttctaggtatttgaccttgggtaagtttcctcagatataaaaggaggatagtagcagtagctcacttatggggttgctgaaaaaaataaat

SEQ ID NO: 201078 - DNA, 1000 bp, Homo Sapiens
tggctaattttaaatttttttgtagagatggggtcttgctatgttgcccggatgggtcttagcctcccaaagtgctgggattacaggcatgaaccattgtgtcccaccttagctgtgcactttaaataagtcacttgacctctctgttcctgtttcttcatttacaaggtgaagatgataatatactacttcttagggtgagtattaaataagttaacctatgcaaagaggttaaaacagtgcctagcatatcatagaaatgtttgcttgacccagaggcctgaacctgctttgccttcagtgttggtctttaggtcctggcttcactccttaatgctgcatctcagcctttcctcatgaaactttctgtctttgatccttttcactccttaactgtgaatctcccaaattccactgagcagtgatcaattcttggggcatcttgctctgtgttcccagacattccttcaccctcattttctctccatggccaaatcctatagtgcctcctaaataattatagctgacatgtatgtagcacctatcatatgccacgtgctgttctaagtgattgatatatgctaactcatttaatcctcaccctatgagaaagatgcttttttaacacctattttatagaggaggaaactgaggcccagagaagtgaactgacttgccaggtcacataactaataagcagagtctggatttgagtttggctctagagcctgctcttagccaccatgtcccatcctcactgagaggacccttgttcaactccactaaccctctctggacaagtagcctctggtcctgtctccctgcttcctctctgtctcactggcctaccctttccacacctttctaaaaaccaaatgtgatcatgtcatcctctttgttgaaaacatgtcaatggcttcccattgttcttgggacaaagtaaatactctttgaagtggctgcgaagcagggtggacatacgtcctcctctgccaagctt

SEQ ID NO: 201079 - DNA, 1000 bp, Homo Sapiens
tttagccaatgtgctcaatcagatgaggtggtcatggttggtaccctgccccggtatctactaaataagttctcaatcataaaccctttgagaaaataatgtgaagaatgtaaagcactaatatgcagcacatatgagaacttttttttcccagtccttaaaaactgcaatcctatctttaaaatggaaaaattaaaacttcaggatcaaattttaataatgtcatgagaataaacttttaattggctattgacttaaatcctggccagagataattaattagaactcaatgaggagggaaccaaggtcagttcaagatgggctgtttagttttgaccctttccagagcaaatggctgaagagttgtaggggtgaggagggggatggggaagtgaggtgggaagggagagaagggattgtgacgagagaatgggagaggacaacagagaaatggagagatgtggatggagttcctttagtctctgctcttgtgctcctctgggggaatgtcttatacgttttaaaggactctgtggtcaaggaagtttgggaaacactgttccaaatgtctgcaagccccatgaccctattcaactccatgacagcttctattgataggctctatcctcactgtaaaaattttcaatgtatgctctgttggtcactggtaaagaatgctacggaaccagcttgttattctggaaactggtaaataaaaggaaagataaagcatttattctgcctatttggtaactaaatagtagaggaggaaaagtttctttttaaagatctatttcagctaatgcaagaagtaatagaattaaaatatcagcattttgtagctccctagaaaatggacagatctggccaatgagcatcaatagcagccaaaaacaacaggagtcaaccagatgtcaagtgcctcctgacggaaaaacaccctcatctctagagttatcttgccaagaataaccaaccctaacctcatcaaggcaagctt

SEQ ID NO: 201080 - DNA, 1000 bp, Homo Sapiens
actggtgaaatgtgaagatagattatatggtaaataatggtattatatcaaagccaatctcctaaatttgatcactgtatttgccaggataaatcccatgttctacagagatctgtgcctcagtctcaagtctctcaagctattccctccctgctagattggacctgatggatgatgacaactcaagtgactacgactgctgatttctttcacgtaagtccatccttttattcttgcttccaagacctatatgctaatctgttttctccctcatccattccacaaagtcctagaatcagcatgattttggcaaaacaataccattctcacatacggatcataaaatgttcagtaagagagatcataacatttgccaaattcaatagttttctcctatttcatttttttctttttgagacacagtctcactctgttgcccaggctggagtgcagtggcacaatcttggctcactgcaacctctgcctctcaggttcaagctattctcctgcctcagcctcctgaatagctgggattttttttgtatttttagtagagacaggatctcacaaggttgaccagcctggtccagaactcctgatttcaggtaatccgcccgcctcagcctcccaaagtgctgggattacaggcgtgagctaccatgcccagcttgctttctcctattcctttgccacagaacatttttagaaactcagagagaggactattaagaaaaattgttcaaagtgaaacttgaagacaacagattcttcttagccctctgcatttactcctcccctccctcttctcagatgctacaggtactccccaggaaataattataaaaccagtgatcaagtccaactccaactgtaagccccttcttattaacttcacgttccaaacggtttattcaatcaaatgaaaacagactgttaaagtgacagtcctccaactcccaccctttccattacaccagactgatccagttggtgagaattc

SEQ ID NO: 201081 - DNA, 1000 bp, Homo Sapiens
agcaattatacgttcagctgaaaccatacaagggaaatccgtgggacttgtgggctggtgggtgaccccgtggggccaagctgttcctccagagagcaatcttccattctcctgcctgggtgagccatttgtgagtggactgggagtggggcaggcgtctcttgactccctgtgcaggcttctcacacactccactttttcagtaaagagcctcacttctgccctgagaaaggctgagctccccacctccagagagtctgggttcaccctccacagagaataaacctcccatcttcaactgggatggtgggggatagggatccaaatgcccagaccctacctccagggtatctggtgcctccaattctgcaggcttgctgggcctcgtgattggcctgattctgcctggcttccttaattcttgcttcagaacagtttttgtttcactgtattttctgggccttctattagtaagtgagggaccatctggactaatttgttaacatttcttttttctctcatattttctctctctttccttttgttctgctttcttgcagatttctgcaactttatgttttaatccttgggtagatttttaaaaatcagctatcatattttaatgttgttattacattttttattttgggataattatattcacatgcacttataataaataatacagatatttctgtgtactctgtactcaatttcccccagtggtaatggtttgtaaagctatggtagaatatcacaaccaggatattgacattaatgcagtcaagataaagaacatttccattgcttcaggtatctcttgtagccacccttgtttatatccaaaacaacttttccttcccccgtccctctaaccttgatccttggcaaccactaatctgttcttcagttctataattttgtcatctcaatggtattatatgaatagaaccacagagtatgtaatcctttgggcttggctttttcactcagcagaatt

SEQ ID NO: 201082 - DNA, 1000 bp, Homo Sapiens
gctggtccctttcaggttccccacactcaataaaacatttcctgtattgaatccagcaatctctgggaccatctccggaacatgctttcccatagttggtgttctgcagaaaatagtacggcctttgcaaccatccagacagccctggtttgagtccccgctctgccctcattaccagcatggcctctcaacaattactaaatacctctgggctttactttcccatctgctaaatgggaatcataccacctgctccttgaaactagtgatgatggaatgcagaagcccttgcaaggtgcctggcttcccctgcctgctgaggacgaggctctcactctctgctgaatctttctgggtgatgcaggttgtactggaccctacattcctttgcacggtgtgtgatcggccatcaatcagtactccctgagtagaactgactttaagagcctcaacttccttcctcccttccttactactttgaaaagccaagggaaccaaaggcttctgaagagagctcccttcattactttaaaaaacaaagaaatgtagaaataagctggctctgtcattctccatggatcgtttttgtgttctcagctgttgttcatcagttcctggaggctcacagggcagtgccagcccccaggggccaaggaatgggatgatggtgtgtgaggatctggatgtagccttcccacctccagtcatgcaggctccttcagcccttcctggagcacagagagttggatgccttggcccaggcccttggcagtgagatttagtccctgctgattgcagcccagcccctgggggagaaccgggcctcagaaactgagactgagatccaggtggacagatgggagctggttctatgctgaccagggtagatggaaatgctgactgcccagaggagcttctggagaaagctgtcatggaggtaattccagtgactgaacagaacccaggaagtgcattctctgagctttgggccctgaagctt

SEQ ID NO: 201083 - DNA, 1000 bp, Homo Sapiens
tttctttcagcctgagtctcgctttgtcgccaggctggagtgcagtggcacgatctgggctcactgcaacctctgcttcccaggttcaagtgattcttctgcctcagcctcccgagtagctgggactacaggtgcatgccaccatgcctggctaatttttgtatttttagtacagacggagtttcaccatattagccaggatggtcttgaactcctgatctcatgatctgcccgcctcggtctcccaaagtgttgggattacaggcgtgagccaccgctcctggccttccttttttttgaagcaggttctcactctgttgcccaggttggagtgcaatggtgtgattatgtctcactgcagtgtctaccttccaaggctcaggtgatctcctgcttcagcccactgagtagctgggattataggcgagttcaccatgcctggctaatttttgtgtttctagtagagacgggtttcaccatgttgtccaggctggttttgaactcctgggctcaagtgatccacccgtgtcggcctcccaaagtgccgggattacaggcatgagccaccgtgtccagcttttctgactctttttacttatcaggagactgaagcttggagaaattaagtgacttgcccaagttcacatggggttaaggcctgaatttgaatctacatctgctcaattaggaagtgagtggtcatagctagtctctacctggatggattgttgtttaattgttaaattttttcaaaataattttaaattattttattaaaaaagagggtatcattatgtttcccaggctggtcttgaactcctgggctcaagtgatcctcctgccttggcctcccaaaatgctgaggttacaagtgcaaactactgtgcctagccagattattacttaacaaccaaaacaaaggaggaaattgacggtggacaagtaagaagatcattgcaaaggttgggggcaggttgtttggggagtgtggaggaagctt

SEQ ID NO: 201084 - DNA, 1000 bp, Homo Sapiens
ttgggaagctaacaaatacagccatctcagccacagctgtctggcccggggatcaatacccaggccaaggggaccacatttaggctagaagcaagagaggccacacctgagacagcctggcacggaattttatccaatcagagctgggcgcagtggctcctgcctataatcccagcactttgggaggccaaggcgggcggatcacttgaggtcaggagtttgagatcagcctggccaacatggtgaaacctgtctctactaaaaaaaaaaaatacaaaaattggccgggcacggtggctcacacctgtaatcccagcacgttgggaggctgaggcaggcggatcacgaggtcaggagattgagaccatcctggccaatatggtgaaaccccgtctctactaaaaatacaaaaattagctgggcatggtggcgggcgcctgtagtccaagctactcgggaggctgaggcaggagaatcccttgaacccgggaggtagagattgcagtgaaccgagattgcaccactgcactccagtctgggcgatagagagaaactccgtctcaaaaacaaacaaacaaacgaacaaaattagccaggcgtggtggtgcatgcctgtagttccagctactcgagaggttgaggcaggagagtggcttgaacccaggaggcagaggctgcagtgagccgagatcgtgccactgcactccagcctgggtgacagagcaagactctgtctcaaaaaaaaaaaaaagaagtttatccaatcagaatgttccacgcaagatgctgagaaatccaatccaatcagatcctcctttctaaggagcactgtgtgagcgccccgtggaatctcccaggctgggggctgcagagaccctgagtggctacatggccgtggggtggtccctgtgctgccccaaagtccatgggcccttgtaataaacccttatcaacaacggtcacctgagtctcaattcaatgccccctcctcacagaattc

SEQ ID NO: 201085 - DNA, 1000 bp, Homo Sapiens
caccttatacaaaaatcaactcaagatggattaaggacttaaatctaagacctgaaactatcaaaattctagaagataactttggaaaaacccttctagtcattggtttaggcaaggatttcatgatcaagacccttcatattctaatggggagttttaactatctttactttggaaaatagaaaaaaaaatcatttcaaaaatccttgtaatatttttaagacttcagaatttagtatgaataaacatgaaaggaatctgaattgtgtcccttttgattttatttttaaattttaattccaagtacaatcttctccagcctgtggtgttcaaaagcactgctatagaattgtcatttcaaaagtgtatcttctccaagaaaacagttttaacttatatgcatctttttctctcccctgaggagaattctaagcaatgccttctatactaaaactaaattgattgcatccagattatcttgctgccctgcaccattttacaggctctgtgattatctgcaattgtgagcagaaaataccatttttctgtgtgctccctcaggttttcacgtagttatgatgctgagggtggtgaccttgagttctcttagtctacagctattgccacaatctcaatgttttcttaacatatttattttgtgtatatacatttcatataatatattatgttatatataacatgttatatgctgtataacacataattgttctacataaacacataaagtagtatatgtttacatatatatgtattgctaacttaaaatgtttggcttaggaaaatgccatttcctcattggtggacctcctgcagagggggtcatggcaggcttggagttatctcaaatggtacatttttccaatgtaaggcctgaaaatgggaaagctttttttcttttaacatgttgtaagaatagagtttattaatctgatagtgctatatttgaatgcaagcaacaaaaaaggtgtttaagtgaatt

SEQ ID NO: 201086 - DNA, 1000 bp, Homo Sapiens
tgtcatcactatttttttaattttagtaattctgatagatgtgtagtgatatttcattttgattttcatttgcatttccctagcagttaatgatgtgggacatcttttcgtcacttgtcatctatatatccatttgaatgaaatgctggctcatgtcttttgcccattttctaattgaattgattggattgttctttattgttaagttttaagagttccttatattttttaaatggttgtcctttctcacatatgtagtttggtatattttctcccaatatcaagatattattttcattcccttaacaggatctttcatgtggcaaaagtcttttgttttgatacagtgtaacttatcaatttttttatggattatacttttggtgttaagtataaaaactctttgtctagacagagatcccaaagattttctcttattttctaagagaattttatgttttacatttagcttcatgatccattttgaattcatttttgtttaaggtggtagacttgagttcagattcatttttttcctatggatgtccaatttctccagcaccatttgttggaaaagctgcctttttttttttttttttttttttttttttgagacagtctcgctctgtcacccgagctggagtgcagtggcacaatctcggctcacggcaagctctgcctcccgggttcatgccattctcctgcctcagcctcccaagtagctgggactacaggcacctgccaccacacctggcaattttgtgtgtgtgtttttttagtagagacggggttttatcatattagccaggatggtcttgatctcctgacctcgtgatccacccgcctcggcctcccaaagtgctgggattacaggagtgagccactgcgcctggccaaaagctgtcttttgttggctgagttgcttttgcactgttgtgaaaaaccaggcaggcatatttgcatggtctgttcacagattctctgttctttttcattgatc

SEQ ID NO: 201087 - DNA, 1000 bp, Homo Sapiens
ccctgcctctaaataaaagaaaatagaggcagactgtggtggctcacgcctgtaatcccagcactttggtaggccaaggcgggtggatcacctgcagtcaggagttcacaaccagcctgaccaacatggtgaaaccctgtctatactaaaaatacaaaacattagccacgtgtggtggtacacgcctgtaatcccagctactcgggaggctgagtcaggagaatcacttgaacctgggaggcggaggttgcagtgagctgagattgtaccactgcactccagcctgggtgacagagcaaaaccctatctcaaaaaaaaaaagaagaaaaaaatagaaaatccaaaaagaaaaaccagaaggcctgctggcgtataaatccctgggcgggtttctgataaattgccctgtgctgtcagcccctgcactgcactgctgccttccatggtgggtgggagaccccagagcggggcaggcgccactgagggcttttcttggagtcggccagcaggccacgcagcatccggcaccctgggcgggctggctagctgccttcttaggacatctctactttgaaggattttaccgcaggaagcaatagcagcgctggccattggtgctgatgacagcattgggtctggttgaggggaaggggctggaaagcagcagacccccccagtgctgcgcatggtcccggagctgtcagccaggggagtggggtcagccgtcagccagccctcccatttcccgcccatgggccctgaccacactcccttttctagaagtcaatcctaaggtttctctgctctggctaagaggatgtaaatttggattcttagagggcatggcacccccagtccctgcccagataaagtagcacagtggcaggcagcacctctgtctgttgctgacgttggggggcttacacacccacctcatctccgtgcacagccatgactggccctgccggcagctggggtgcaggtaagggtctctctcata

SEQ ID NO: 201088 - DNA, 1000 bp, Homo Sapiens
ttcagcagcatccctgatctctccctacctgatgccagtcacaccctcctccctcagtcgtgacaacccaaaatgtctccagatagtgccagattttccttgggagggcaagtcacccctggttgaaaaccactgttttagccttccgagggctgttgagagcctgcaccatgcacatagtgtaggaattggccagagatttgggcagagtttgtgtctttgattctcttctttccagaatttctattctcattttcagcagctgtggtctctttaactcagtcctctggttctttgccactaagaaccaaggtcgggtttctgttagttttagctgttgtggttcagtctgccctatgctacaaactgtttaaaaaggggggtggaggggtaggtggacaactgtgatgagaatgaggatgattgattcagtgccatttcctccttctggtggtaaactctttcccctcccccaggatcttcctgcatttggtaactcaggtttttgcagattttaatatcttcttcataatttatagttgttatttaaagggagtgtcatgttggagtggaaggaactactttgtactactggatggggaacctgatacgtattttaggatgtaaaacttgacgttgcataccatcctttgtcaaggagggtaccatcttttaaaaaatgtatagacataaaagatctttattatatatttggagttaacatttatataaaaccttttcctgatgcacttttagtgctctatacaaatgtttcttaacagcccttatgaacttttttttgcagaatgaggtaggatgatgagaaatgagacagaccagtaagaggaaggaaggtctgggaggtgaccaaacaaggctgaaaggcagatgataggattgtaaggggaatggaggcgattgagggatggctgcctgtttgattcgtagtgtgctgttagtaaatggggtcctttctttgaaaagtgtgatcacacttggt

SEQ ID NO: 201089 - DNA, 1000 bp, Homo Sapiens
gtgcatgttcagggaatgatattacatggataaaaatccaggaaaaaaacaacctttatagaggtcagactcaaatatcctgctttccaaaatcagtggcagtaaaatgcaccttctcaaaggcacttcacaggaaaattcaccttcccagaggcctgtgtacactgtgctccaatagcaatttgaaatagtctatttcttaaaaatttttaaactatgatgctttagaaaaaggcttttgattactttatttctaatttttttaaaaaagaggctgggtgcactagctcatgcctataatcccagcactttgggaggcggaggtgggaagattgcttgagcccaggagttagagatcagcctgagcaacacagcaagacctcatctttacaaaaaattttaaaaaatcagccaagcacagtggcatgcaactgtagtcccagctactcgggaggctgagggagaaggatcacttgagcctgggaggtagaggctgcagtgagccgcaattgagccactatactctagcctgggtgatagagtgagatcctatctcaaaaataaaacaaaacaacacgcccaaaaaaggacaaagatctttccagtcataaaaacattagagggagttgtttcaggatttgttccaaaccatgcaaccaaagagaaagttcaagatgttgtagttcttgaggaatgtgaaaattaaagattgttaaaagctactgaaccattgtataaatataggacttaatttttatggatagaaaatcaaaatctgttttgtttgatgccactttctctttctctcgcctctgagcttctaacattgttactctttctttttccctatatttacacgggtgcaacccagtttaaaaaataataatgtggcaactagcacttcagctatatatgctgtatttttaagaattcatagtcaaggtggaaggatcccttgaggctaggagttcaagaccagcctggacaaaagagcgagatc

SEQ ID NO: 201090 - DNA, 1000 bp, Homo Sapiens
aagcactatctgtcacctgaattatggcaaacccctcctaacaagtctccctaatcctgcccttgccttcaggtatcagtgcccaccacagctctgacctctctcctgttagtctctccccagggctaagtcctcattatcttccttgctttttcttacagatgcatcacctgttggctctgcttcattatcttttccaacagatattcatttgtctggctctctcactttcttcacttcttctcccgaaaagcttcttctcggagaggcctttctttacattgcaatccccgcctgcacctgaggttttgtattcctgtttcctgccttgcttcttcttctcacttacctaacatcagcctagcctctaaattctgtgtgagaaggtatttttgtctgcttttttctcactgccagtgctagatgagagccttgaatataataggtggtcaataaataatactgagaaaaaaagaataaaacatgaaagtacattgatagatggtatgttttggtgctggctataacattttgaggtagatagtacaggtattattttctttattttccaaatgaaggcaattatacatcttgcccagggtcacaaaactagttaagtatcaaagattaaaccaaaactcaattctcttgactcctaacccggtttccattccactacaataggtgctaaaaatacaatgttgtctgttcttgggagctacagtacagcatccctcaagaacctggaaataaagaaataagattgccttctgagagtcacactatgaaatcgacgtgtaatgagtcacttaccttaaagagctagaaatgcttttaagccaaagggaccattactgattaaatggtttaacatttccaaagaaagaacattttaataagaaaaggcagacatagaggcacttcaagaggatactccaaagcgaaagttgggcacgtgaatcctaggggctggagtctaagccagtgaattatgagaatt

SEQ ID NO: 201091 - DNA, 1000 bp, Homo Sapiens
tccataacctcaatgcctttattatatctgagaaattcaacagtgatacagttatttaatatgtgatccgtattcagatttcaccagttgtccctaaaatgtcctttatagctatcttcctgattcaggacccaatccatcaaggattgtatattgcatttggttatcctgtttctttagaatagtctctctgccatttgctgtctttcaaaaattgatatttttaaagagttcaagccagttttctttttcttttttttttttttttctttttttgagacagagtttcgctcttgttgcccaggctggagtgcactggcacgatctcggctcaccgcaacctccacctcctgggttcaagcaattctcctgcctcagcctcccgagtagctgggattacaggcatgtgccaccacgcccggctaattttgtatttttagtagaaacgaggtttctccttgttggtcaggctggtctcaaactcccaacttcaggtgatccccacccggcttggcctctcaaagtgctgggattacaggcgtgagccaccacgcccggcctaaagccagttttcttgtagagtgttctacaacctatatttgactgtttcctcatgattagaatcaggttaaacatttagcagatgccagtatcctttttataatgttaagtttctagtgtgcaattaaggctgtaactgtaaggcttccctaattgttccagcgttcacatgtaaggcaagcagtaagcactacccaaaatgaaaagcagattctttaaaagtagtaggtgattgttcatcttcaagttttattagataatggcatatcttaaattatattcttttttttcttctttttaggccggcatttgtaaatccactcatccctgaaagcccagaggaagaggagctctttagacaaggggaatgtacattaatttgtttataataaaataaatttgaaaagcacattaattacgctgcagaagagattattta

SEQ ID NO: 201092 - DNA, 1000 bp, Homo Sapiens
ttaatttaattttgattttcttcttttggcttcggtgctgtcagaaaaaaaaattctccaaaactttgactaggccacggtgaaacatgggcagatatcaacaatgtgtcccagccaagtcccaccactgaacctaggtgggctccaggtcagcaaggacacttcctggtcacccgtgcactaatggcagccctgaggccctgcaaagccaatggacaggctttctccccagcagaaatatgtccgtgttctgctgatacctggtaaccacgtcaatgacatgtggaaagccaaacgggaacctgtcaggtgactgtaggcaagccactactccttgtacctgtttccccagttgtagaatcaatgagataggattaggtaagtggtttcctaatgctcttctgatgaagcctatgggatctgcatagcttccttaggtgctgccccggtggtaagagggatggaatgggctgtgctcagtgttctcattcccacttcacccatagcagctctgttgcttaagattttgtttgcaaaaggtttctgaggccaaaagtagtttgaaaaacactggtaaatggcattctggggtcttcccaacactactcttgaatacacactctcgtatggtttaaggacagtgcttcattccttggtttggacacaccctcagaatccttctcaccacagtgctccagggagacactcccaatctctctacagcctaatccaggggttggccaaccttttcggtaaaggacaagatactacatattttaggctttgttggcctctgtttcaactacccaactctgtccttatagtgagaaagtagccctagacaatatataatgaacaggtgtggctgtgttccaagaaaactttctttacaaagacaggtagcaggccagattttgcccttggattgaggtctgctggtccctgcactctaatacttcaaccttaatggtgaaggaactgaagcccaaggggggaattc

SEQ ID NO: 201093 - DNA, 1000 bp, Homo Sapiens
cactgcgatccctgagccatgtgggagtaattgtgggcgttcaaagccaggaatgaaagccctgaggtctctgctctagaggagtaaagcaggccacccacacaggtgccatcatgtcccagttcagctgggagcaaagaccccacggaaggcaccatcagtccaggggcgaagctgcgggttacttaccattaactcaccattgctgccacctgccaggctccctgtctgttatttcatttccaattccattgcctcaacctttttatcccttattgccagtgaggacttcaatatcccagcgcggagcgggaatctgagctgagcctgaactaaatttgtctgctttttgccccccagaggcagagtggctactatcattttgctcaccagggaacaaacaaagccaatgattggatccagtatctgtaaagactatcaagctccataccagctaaaactctattagaacgatacaattacacacatattgtataattatacaaccatataggttttagtgagcacaaggacgtgagaaagtcctattagggagaactctggtgtatcctattccactccctcccccagttccatgccaaatcttggcttcagaaacatctcaacaaagctctcctgtcactacaagacaaccgtcatagacgtgaacggtaaaatcctttgcctctgagctaatccagttccttcacattacatctggggaaactgaggccagggagactataggacactcattcatgtcactaatatttattgagcatcttctgtgtgataggcatctattcagcattgggcagacaatggtgagcaaaaccggatgggggtctgctcagtacagaagagaaaccccccggaggcctccagacttcacaagggtatgctaactgccacgttcctaggacctgctccagaggacaaggcagcccaggcatggcccctgcctgcctcgggcaccccgctctcctaccatctggaattc

SEQ ID NO: 201094 - DNA, 1000 bp, Homo Sapiens
tatgtgacgtgggaagatccataactaatgttaaatggtaaaacatataaaatgttatgcccaataaaatactttctgtgagagaatatgttaatttatgcaagtggcgccaatgtggagggtttatgctaatttcattatacctcacagacagacctgggctctcccactcattatctatgtggcctggggtaagtcatttaactgctggaagcctcagcttcttcatctgtcaggcagtgataccctgactactctgcagggtaactctgagatttcaacgtgatcatctcagaatatgcctggcaaacagtaggagctcagaacttgattttttttcctacagcaactgctgtaggggatagcagctaatgcatgaggttggtaaatccttatatatatcaaatattgtagaaacataactacatgctactattttttcaaaccctccccccacccttttttttcccctgagacagagtctcactctgttgcccaggctggagtgcagtggcgccatctcggcttggctcactgcaacctctgactcccgggttcaagcgattcttgtgcctcagtctcccaagtagctgggattacaggcatgtgccaccatgcccaggtaatttttttggtgtttttaatagagatggggtttcaccatgttggccaggcgggtctccagctcctggcctcaagtgatccgcctgtctcagccccccaaagtgctgggtcaaacccctcatatccagtaaaacagcctcactgggtcaatggatatcatgtggctgcctaacatttttactttataaaaggtcttcctgaggccatttgaaagtatgaataaaaacaccttaagatgaacagggccacaggtttgcatgaggcttgtcagtggacctccaggatgaagaccaaagtgactgtgcaatttctagtggaataattttcacttaagatcttatttatttatcaaaagaccactgtgaggtaggaattc

SEQ ID NO: 201095 - DNA, 1000 bp, Homo Sapiens
ggttcaagtgattctcctacctcagcctcccgagtagctaggattacaggcacgcaccaccatacccagctaatttttgtatttttagtagagatgaggtttcaccacattggccaagcttgtcttaaacttctgacctcaggtgatctgcccacctcggcctcccaaagtgctgggattacaagcatgagtcaccatgcccagcccagtatacaactttagagaagtcactttacccctctgagcccaaattcccgcactaaaaaaatgcaataattatgggacaaaccagagaatgttcgtgaaatactctgtaaatgataaaacattaactcaaaatatttctcatttcagaaaattgaaaagcaaatgttttgacagccatttaaaaacaacaggcaaatacaaccatattcctccgtgtttttccctctgccaatatttacttaagatacctgccagtttgctgagatgatgctgtcttacactgagcaaagagattcaaacctgtgctgtcctctgaagatagaaaacaagagcaggtacctcactgaattgccaaatattccacatattgaggctgaaaagccaacaagcagtcttcccacagccctctgtcacctcagacttaacaggggggtaaactggcatctccctgcccctgcacacgtttctgtttaaagtgctgtcttaatttttttccaaagttctcaatttaggaagcaccaaatttactcccatagacatcaaaagagaatggaggctgggcccggtggcccacgcctgtaatcccagcacttccaggaggccaaggtgggcggattacttgaggtcaggagttttgagaccagcctggccaacatggtgaaaccccgtctctactaaagatacaaaaattagccaggcgtggtggtgggtgtctgtaatcccagctacccaggaggctgaggcaagagaattgcttgaacccaggaggcagaggttgcagtgagctgagatc

SEQ ID NO: 201096 - DNA, 1000 bp, Homo Sapiens
tttggagctgcaatgaactaagaagaggtgagatctggctggggtgctgaagttgggtgccgaagttgggtgtccactgctgttcacagtctactctgcccttctcagatcatggctgagcagccaactccggggcctgcaacacatcagtaccttggtgaaaggagctgctctcgagtcaagagcccctccccactgggcgcagccactggcccctgcaccacatcgggcttgcgggtcaggggccggggcgggggtcagggattggcttctctgccatctgagagtcattgttctcactaccaaaatgatctctcagtggtcagaaatctcccaggtgatgttcttgtacccttagatgggactggagccaggcacctacacctctgagttagaagccagaaactgttcggagccaatactgggccgagagagagaagggcatatgggctgggtcttgctcagcctcttcctagctttgtgggcatggcaggtttcccagtgcagtcccatcgcatcccctacctgcatcttccccagccctcacttagctctagctgatgacctccacagaatcaaaagctgcttgcctgctttctagttgagccatgctctgccacagactgtctgacctcctgcctgtgggcctcaggatggcagtgtttactctgcccctcactttcctcttaacccgaaacgcactccactcctagagcacttgagtgtctgatgaacttggtgctgctcaggtccggcttggtttcttggcctcaggtggtgggggagggtccaggcagcgtcaggcagtaaaagcagagtaccagctctgctctccttcccgctggcggccagttgctgtcatcccgagtctcagtttcccttctgtgacatttctattcctatatcttcagggttaggactgtttgtaagtgaggcgtggcggccagacagagacgcatacctataattcaagtgaggcagaggcagaggcaggaggatc

SEQ ID NO: 201097 - DNA, 1000 bp, Homo Sapiens
ctgatgcatttccacccactgaacacacctgtgtaaccagaacctggttcagaaacagagcatggccaacatctagactctccttcccccgccaggtgccactttctctaagggtgaccactgtcctggcttgtaacagcatagatcaatttcttctggttttgtactttacacaaatggaatcatatagtatggactcttttggcacttactcttgacaaacaggttggtcaaagactctggagagagaaggcaagggggtattgaaagactgccctcatgaggaataggaacctataaatgtaaaatggagtaaatcacatgtatgagggtctctgtggtccccgggagagtggggaaggcaggtggcctggtagaaagtgctctggtccaggagtcagggacttgtgctcacatttgatacgtctccatggtttgctgtgcaaccttgggaaaaacttctttccctctctggacctcaggtacatcccctgcagggttggggtggatcatttcctaccttttcaccagaagagacactgtcttttatctatccccacctccactgctgccgtggatgtcatgctttgaaaaatgtttctaggccaggcgcagtggctcacgcctgtaatcccagcactttgggaggccaagatgagcagatcgtgagctcagaagttcgagaccagcctggccaacatggagaaaccctgtctctactaaaaatacaaaacttagctaggcatggtggcgcatgcctgtaatcccagctactcaggagactgaggcaggagaaccattttaacctgggaggcagaggttgcagtgagccgagatttctcaaaaaaaaaaaaaaaaaaagaaagaaagaaaaatgtttctgagcagagtgtgaagattaatttgtttccccatttcttattaactggaagaaaggctcatagagcagactcagatctgcaacagatagcaagcagtgccaccctgggtggacagaatt

SEQ ID NO: 201098 - DNA, 1000 bp, Homo Sapiens
aaccttgtgccagccaggaatgacctacctgtctgcacctcccagatcttgatctgcccatcgttgagtcccgtagcaagaaccaggcaagagacatcgggcacttgggggtggtggcgtgcccagagcttcctgctgggtggggaaggccacgggctgaaggccagcccccagacaatctgaccacagtccagcgtcttctcttttgggctgccccgccctttcgtctcatttttgctacttcggcttttggcttcaaaccctttagggatgctgggagaagcagagatttcttaatgaatctgcaattgttaccagtctatcaacttttcatcctgggacacgtaagacttttggggagtggagggaagggtctgtcacccaagctggcgtacagtgacacaatcatggctcactgcagcctcgacctccctgttcaactgatcctcctgcctcagatccaccaagtagctaggacgacaggcatgtgccattaggctctgttaactttgtttgtattttttgtaggacggagttttgtcatgttgcccaggctggtctcaaactcctgagctcaagtgatctgcccaccttgccctcccaaagtgctgggattactggcataagccaccccacccggccacataagactttaaatcctagaaacaagctggccttcggtgaaatctgctgtgacttttctttttgtttctttttaagagttgatgtaggccaggcgtggtggctcatgcccgtaatcccagcactttgggaggctaaggcaggtggatcgcctgaggtctagaattcgagaccagcctggccaacatggtgaaaccccatctctactaaaaaaaaaaaacaattcgccgggcgtagtggcgggtgcctgtaaccccagctacttaggaggctgaggcaggagaatcgcttgaacccagtgggtggaggttgcagtgaaccaagaccgcaccattgcactccagcctggggaacgaag

SEQ ID NO: 201099 - DNA, 1000 bp, Homo Sapiens
tagtcgggaagctgaggcaggagaatcgcttgaacccgggaagcagaggttgcagtgagccgagatcatgccactgcactccagcgtgggcgacagggcaagactccatcaaaaaaataataataatacagtacaatacaatataatcttgcagccataaaaaagaatgagttcatgtcctttgcagggacatggatgaagctggaagccatcattctcatcagcaaacgaacacaggaacagaaaaccacacaccgcatgttctcactcataagtgggaactgaacaatgagaacacatcgacacagggaggggaacatcacacaccgtggcctgttggggggtgcggggcaagggaagggagagcattaggacaaatacctaatgcatgtggggcttaaaacctagatgatgggttgacaggtgcagcaaaccaccatggcacatgtatacttaggtaacgaacctggacgttctacacatgtatcctagaacttaaagtaaaatttaaaaaaataaaatcttcggttttcacagcttttgggattttagaattgcagataaaggattatggactaacaacaaaaatgatcacacatgataatggcagtggcaattgtttatataatggccactacacaccagacagtattctaagcactgatatattacaaactcatttaaacctctcaaccttatgaagtaggtattattatcaatctcatttacagctgagaaactgaagcaaatcacttcaactaaggcaatgtggtctcaggatgtgtgctctctgttactcagaaacaaaaggtacacttttctgaggccctctagtgcaggcacaaagacaccatagctcttactggatctccagcctatcactctaacactagccaagataataactaatgttaaaaattatgacttggagtcaacaaggctaagatatattttatatactttataaaagcaaagaaaggtatacattttatagtgaatt

SEQ ID NO: 201100 - DNA, 1000 bp, Homo Sapiens
aatggtgcatgcctgtagtcccactcaggaggctgaggcatgagaattgcttgaacgaaggaggcagaggttgcagtgagctcagatcatgccactgcactccagcctagccgacaaagtgatactcttgtctcaaaaaaaaaaaaaaaattaaaaaaaaaagaaatagagtaaaatatttgtagagctatagaggaatgataatattctcagctataaagaaacataatctaaacagaaaaggctgacaaataacaggtttaaatatgtgaaatttaaaaacttccatacaatgcaaaataagatcactaatattaaaaggaaaaaaatcaggctgtgaaaaagattttcatcaaacatgacagaataatatctataatatgtaaaaaactaggttaaattttataagaaaaaacatgatgaatagaaacaataattcacagaggaggaaatatacttctttaaaagacacattcataggaggagcagttcacactgtgcagagcggtgagagtctcagggagtgtctgggatcatcatccgactaagctctgtctgtgaaatggacaaaagactcttagcagagaatctcctccaccagaagagatgatcacctctcccaggatgacttttctgacatctacacccacctccgccattagatacttcccttttgtgctcctgcgatatcctctccatatttttctcattgtgcttattattttgtattctaattatacgtttatgtgcaatcttccccatcagactggaagcttcttgagtggaagaaccatggcttgcatcttttattcccagagtcctgtacctgatagggacccaacacttgttagttatgaaataagtggcatacatgttcttggtagagggacagtgggaggccgcagggtgatttgagcaaaacaaagaaagtaaaattacaacccggcctccacactcccatggtgtgagtctaagagtaggccttagagctggtgaattc

SEQ ID NO: 201101 - DNA, 1000 bp, Homo Sapiens
caattatgtgctccagcctagacatggtatacatcattccagctcataattcattggccagagcttgtcacaaggcccaagtggaaattgtagtactatctggggggttgatatgctttggatctgtgtccccaccaaatctcatgttgaattataattctcagtgttggaaatggggcctggtgggaggtgattggatcatgggggcagattggatcatgggtgctgatagccagtgagttatcatgagatctggttatttaaaagtgtgtaaagtatgtagcaccttctcccatctctcttcctcctgctccggctatgtgaagtgctggctgcccctttgccttctgtcatgattgtaagtttcctgaggtcccccaggcagcagaagctgctatgcttcctgtacagcctgcagaaccatgagccaattaaacctcttttctgtataaattacccagttacccagtctcagatatttatttttctttcttttttttcaggtatttctttataacaataagagaatggactaatacaggggtggatagctgggtaataactaccacagttgttttaccacagtgttctagattgattttatttctggaagtttctttctttctctttctttctttctttctttcaactttgtttctttcctcctttttttctttgccaatctctgggaaatcattttttctctgagacagtttttcacactattgcccaggctggagtgtaatggtgccattgtggttcactgcagcctcaacctccagagctcaggtgatcctctcacaccggcctcctgagtgtctgggactaaggacatgtgcctccatggccggctggtggtagtttttcataacagaacccaagagcactttcctagagagcagtagtttaaatattagactggccattttgtaacctcagcaaactaggtcttacagcagcaatgatcatagacttcgaatcagagagacgcacctctgct

SEQ ID NO: 201102 - DNA, 1000 bp, Homo Sapiens
agcttctgacacgcctgccttcctcactaagcttaatcatttctagcttttgatttaaagtgagagacgtccaagtgtcacttgaacatttagaagacattgtagggttattaattggcctgatttcaatattgttgtgtctcagggcctagggcagcctgagcaggcagagacgatcagagcagtaatcagaacatacacaacacatatcaattaagttcaccatctcacatgggcacagttcatggcaccccaaaactactacaatagtaacatcaaagattgctgatcaccgtaatagatacaataattatgataaagtttgaaatattgccaagaactatcaaaatgtgactcaagagacatgtagtgagcacatgcagtgtgaaaaatggaactggtagatttgctccacacagagttgccacaaactttcaattggggagaaaaaaacacgcagtatcggcaaagtacaacaaagtgaaatgcaaaaaaaacaaggtatgcctgtatatgtctttacttgacaaaataagcagtcagatactatgtatggtaaccccacagtttttaattgagccacgaaatcccagggtctggatatcactgatctatttattcaactttttgttttcgtttttttttttaacataaactcagaccccaaggtttctataaactcacaccgaaccagctgcggggtagggattagagagagatctccaatcttccaggttcaagttctccacttcattaatagcatagccaccagcttttgcaacgtaaatactgaactttacacccatcttgtaaagtatgaatcgaaggtaagtgtattaaaggaattatatggtaaattcttctgtaatctaaaagggatctagttttaaatgttggatttttctaaaataggattcacccacacagtatttccttggtattgcttcacatttctggtgtgaaagagtaacggctgctcttacaactgtttgtttttgtt

SEQ ID NO: 201103 - DNA, 1000 bp, Homo Sapiens
ccgtgaggcttgtcctgtgaggcagccgggctgccacatcccaaccttgcctgggcagagcagctccatgaggtcctaggtctgggacctgtcagctgagtgcgtctttccagcggcttccccaccccagaggctgatgctcaatgtgcctggtcactgatgaattgtcagtcaacagtcaaagacagcacatcccgggccctggcagggttgcagctgccatactcttgggtgacctgaaacggcctctcggaggccaccctcctcccatgagatgtggtgacagcacagtctgcaagaggccttcagatctcgctcacggacagcagtgaggagccatgctgctctgtggcccctacctgaggcagtccatgtggatgcactggggcgccttgtactccccctggctgtccttctggaagcctatctcctgctgcatgctcagaccgtggactgctgcccgggcctccacaaatggcctgggttggaaagaggacagacaagcaagtgggcaggtcaggctctaatgcccctttctccattcctccctcagacccagggaggaacccagacacgggaggtgcagagtgaacccaggagccacctcctaagtcgacatgggaagcgcccctgcaccacgcaacgccctccctctcaaatgctgcccagttactcatagagaagacacagactcaccagtcaaaaaagtccccgttgtaggtgaccatgatggtgggtttggtctcctggacgtgttcaaaccacctttggatcagatgagcctgaacccaagtcacagcagtcagaggtctgctctttctcttcttcaagctattccaaattcctctcccaaagttcagaagcagcagcctcatgttggcccttattcctgccccgcccctccgcccgtctctggcagaaaagacggtcataccctgagaacaaagctcatggagctgcaattctgatctgacggaatgcctgaggccttggaaagatc

SEQ ID NO: 201104 - DNA, 1000 bp, Homo Sapiens
tccaacacacacctcgcttttggtctcttgatggatgaggacgtactagtgaagcatgtgatgaagtgctagtggctgggagcaagtcattcatcatgagcaggaagacgctgtagcccagcagaacagtcatcttgaatggggcacaattcccactttccagtggcaggtagaaactgagggcatcgatggcaatcagaatgccactgggcaccagaaagtttaccacgtaggggctgggcctgcacctgcgcctgatggccacctggtggggaggagaaggaggggcaagtgagaagtaggctgggaggctgtcaagacaggtaagagtaagaactgggatttgtcccaggccaaactgtctagtaaggaaatattacctcccgtccctttcagcatccggtcttttcatccaaaggcgtctcacaaggttagagtctcccatgctgcttacctctgaaatgtatctcattccttttggcccaaggtgtcaactttctccacttaaatttttattcctaccgacgtgctcttagcaagactgtggaaccaccgacttaggtgtcgcgtgtgttttatcttttcatttctaattgcttttctcgtcaaggtctaatctctagtgactttgcaggggaacatttgagaccagtgggagggaaagcagacagtatcagatattttggggttatcaggatttggaatcatcatatccctaaggcagtgtttcctaactctttctaccatatctttttaaaaataaacaaaaattcctgccttccaaaaagttctgacagccattggggaaggcggggctcaccctcaccatgaatcactggcatagagcctttgtttcttcctcaagggatgctttatttagtaactatttactgagtaccaggtattgttttagtactgaaggtttatcagtgaaaaaagtgacaaaaggctgggcacggtggctcatacctgtaatcccagaactttgggaggccgaggc

SEQ ID NO: 201105 - DNA, 1000 bp, Homo Sapiens
ggagttatacccaaacatttatttatttttttaaagcaacttttcccaagaataacctaggatttacaatccggggtagctagtggatgcatataagttgtctggcattgaatgtcaggagaaaaatttttttccccaaaaactcccaacttaaaaaacaaacacacaacaaaaatacaccaagctcaggaagccccctggcatcatacacaaaggtgaagcaggtctgggcatcaaaatagctgggcaaaggcccaacacggtggctcacacccataatcccaacactttgggaggccgagacaggaggatcgcttgggtccaggagtttaagaccagcctgggctcaagcgattgtagagaccgtctctacaaaaaaattttagaaattagctaggcgtggtggtgcacgcctgtagtcccagctacttgtaggctgaggtgggaggatcagtgcagtgattgcaccactgcactccagcctgggcaacagagcgagagcctggctcgaaaaaaatagctggccatagcagtggagataggttccccatggggcgggtggcagtcagcctgaaagccaggtcattccagcaggatgacttcatcccagggttcttctcacttcccaggttcctggtgttcatcgtgcaggaaacactgcaaacagctggggagatgggaatacttgacaaccacctttcacgtccagagatgaccaactaggaactgtcctcccccatcacccacaccccagcacagtgattactcagccaaatgcctgcagggccagcaggtaacacccatgactgaaggtggcggggcaaatattacaacagggagaggtggaacaaatttgggctcatatgccctagataagaggatgaccactgcccaattccaactgggaaagcaggccccgtgttgccagaccttcagatttttccagataaactggaaatctagagatgttattgtttttaaatggttggttaaaaaaaaa

SEQ ID NO: 201106 - DNA, 1000 bp, Homo Sapiens
tcagcctcccaagtagctgggattacgtgccaccatgcctggctaatttttgtatttttagtagagtcggggttttaccatgtcggccaggctggcctcgcactcctgacctcaagtgatccacccacctcagcctcccaaagtgctaggattacaggcatgggccaccgcacccggccttattgtatttctttaatacaactagttaactaaatacatatgtaacaggcattctagatatgtaatcaaaggatctcaataatctgtcaaatctgtttctattcttccaggtccctttgaggaaatcttgagagtccagacagctctacattttaacaaagataagaagctaaagcataatcatttttttttcacttaatgtgcaagttacatgtgaaacaaaaatgaatatgaaaaatgaaacaaatctttttctaattttgactaatgtaattttgttcttcacattctcaaatactgataatatcaactaacaatgcatatctgatcctatagaaaaaagaatagaacagattaccttaaaaccattatctcaatctacctacaaacacactcaaattattatatgtatttccacatactgagagtcactataagccttgagaatccctcgatccagatagttactgctgttgaccatggtggactgcctcttaggttgaggaattttaggtacagcctcttgctgtttcagtaaggagtcaagaagtggaaggtctacaagttgtagtagacgcccaattgtttcttcttgccacacttcattaataactacacaggaaaaatgacaaggtgaaaagtaacaattaatagttactatatgctcaccataatatttttctaagcaggtctaagctagtaaatttgtggccaaaaagaaagaaaaagtcaaccttacgaagtgctttcttataacaaagtaaaacaatccaagatttgtttagagtgtaggagaataggctttggacaacaggaattc

SEQ ID NO: 201107 - DNA, 1000 bp, Homo Sapiens
tcaatatcatggtgggcaggagaagagttttatcccatggagcacattacagtttttaccttaaaatgtatttttgatgtctttgattttccatgaattcattgttatgttcttgagaatatatttataattacaaatgcattttaaggatgttctataacaaacttaagagatctcataaattcccttgataaaatttaagccagttagatataatttactttaatgggctaaaaattttacaataaagatccctgattgcatctcttgtaagaaatagctgagagtcattttatgaagactgatttaataagatatatgttctcaactatatgagattaccatatagatttacacagaaaacatgtctcactatttctagatttttggcctatgccataaatttgaacagagaatttccaaaaaaagaaattaatgagtttttcttttgcacccccaatgttttctctattaaaaatatgttttcatcaaatatcaaaattgacaaaatcaacataagtaaattgtattttgtacagaagtgcctgctttcagttgccataaacccacagcttgtggcatgacatatatgatacaagggtgaaatacgtacaaaatatttaagatttgtaaagggtagtgttgtggttattttcctgagtaaaaatttttaatttgtataattacacacaacaaactgaataacctatttcatacttagtgtgtgtgtttaaggcagttataaacattcccaatagtcttggggaatatactacacttatttacttctattcccattttttaatagcaaaaatacccacagtaattttcatgatcacatgcgatttgtcacttaggtttttccatatgttcttaggcgctctttgttcattttattttgtgaggatttaagattatcatgtataactgtgaagactctgaaaaacatgggacataataaaacaaagaaaagagcattcaagtttcacttgctgaattc

SEQ ID NO: 201108 - DNA, 1000 bp, Homo Sapiens
caaataaaatgaaccttagtgataatggagtagtatgaatctatccagctttactttagatggaggttgaggtacatttgattagagcaaaaagagtgagatcaattgggaaaaggcttagatggtaaatccgaaggttctatggcatccacatttggagaactttacatatcgcaattaaataaaatatccatggattcacaacaggctatatgaccaattctacctggttgctgaaatgtcaacctgaccaggaggtgggagagttactatcttgaataattttatgagtgattcagatattgtaaagtcaacaccgattttatctggatgactctctcgaccccttaccatctcaacagaggacgtcatcctcctaaaattaccagaatgcaaagagtagagaaccatattttaaccatgatagagcaacgtttcttaaccaagacactgttgctattttggcttggggaagtctttgtgtaagagctgttctatatactgtggtatgtttagcagaacccttggcctctaccaactagatgtcaacatcaatttccccaccccattctgacaaaccagaatgcctccagatattgccagctgtcccctgggggaacaaaacagtctcagttgagaactcctggcatagaggatgcttttatcctgcttatttttctaaggtcttcctcttacggtccctgtgacatttttcttcattgatctattattacttcccgttagtaaaattcaaagataaactggaaaaaaaaagtggaatattttcttatgaaacaatgttaggaactaaccaggaataatagttctgtattattttagactttccctgttgtgtatatcagaatgcacaatcttttcttagatactgatgtcttcacacacattaagaaaatacattcagccaggcatggtggctcacacctgtaatcccagcactttgggaggcttaggtgggcagatcacctgaggtcaggaattc

SEQ ID NO: 201109 - DNA, 1000 bp, Homo Sapiens
acagcgttttaaccatgttgcccaggctggtctgtaaatcctgacctcaaatgatcctctcaccttggcctcccaaaagcacttgggattacaggtctaagccaccatgcccagcctggatgctttgctctttactgtgtttaagtaaatgagcaatgtgtgaataagttctggcttaaaccatttgaacgatgagcatatatagagcaaaacgtgaacatctccctcggctgcatcgtctctgccttttggtgcatctgtgtatacatgggtgcttgcttcatatgaggtttcagttttaactaaaatgggaccagatgtcttttgttctgtagcttttcccttacctgtgtcttgaaggtgtttctgtgccccgtgcatgggtgtgcatcgtcttctgtaatgtcagcgtgtcctgctgtttccgcacacctgccatgccaggtccatgggtcctgcacataggcatggagtggtttccaagcttcctccgcagcaggatgctgcattgaacattctcgcccacgtttttgtgaacttgttcaacaatttcttaaagctgacaccaagacttggagctcccaagccagaggagctcactcacacatacctgcctcagtttccccaggtttcaccagtttgtgcatttgctaaccacagggatgccaattctcagcatccctgcccatgcctggtgacagctgtctttcagtctttcagtttgcattttccttaagtgtattagaacgtgctctctcccccgccatagaatgcaattgtttattctagaaatttgtattgagcacctgctctgtgccattctttccgtaggtgccagggtgctcaggaaagaggacaaagatatgtcagcatgccatacaggacaggcagtgcaggggagaggggctgaggagggcagcaagcacggcctctggagaaaacaatggaggtggtgaggggggtcagtcagccggagcacctttctttcttgcagaggcag

SEQ ID NO: 201110 - DNA, 1000 bp, Homo Sapiens
attttattactatcaagcaataattatcatatggaggattttccagacacttgttgcattatttttcatgtattttaatacatgtatgatagctattgctgattcatcagtgtctgattcattttagtgatgaaattatcctattgaaacaaaattcacaatataagaaataaagataaaaatgtaagcttgtaaattaagcttttatgcataaatagcttagaatatgaataaaatacacaaatattttaatttgtacagaaaatttttaattttagagatcttgcttggagtcatttatggactttgaatttattcttaaaatattaagtgaagctattgattttactcatcatctctttgtattaactacaaagtcgacattttatttttgtaattttaaaaatcaactgtgagtttgtacggaagtttacctatttaatgtctatgatgcagaataaaaaagaaaatccatagacacatgaggcttcataaacatggcatgcatataattctggattaaagtatatcataaggttcacactaacaatagggtgaactgcagattttaaacaacagttctgtgctaatagacttcctgggctttgatggcttaattttctgcctgttatttctccatcttcttgtgaggtttttatatgtataagctaacgttggcactctgcaacattcatttttattttcttcttatttatttggttatctattcaacttactgatttagtttccttgtaaaataaaaaatacttatttaaaaaaattttgttaacttactgtgtacagtcacattagaatattacattttcaaaagaacaggcctaattattttcataattgacaggagtgcactttgtttcttttggaggatattctttgcctctttagagtctttgtatatgcaacagaataaaaattaattaaagttttaataaaaatgaaatgtttcatttttattaaaatttttttcattaaatgaatt

SEQ ID NO: 201111 - DNA, 1000 bp, Homo Sapiens
aaaatgcaggcaatcaaatggcatttctaatcattcttaggaagctttttcatcattctcactcaatattggatttgattgaggaattaccatagctagtctagcaggtaaacacatagtccattcttctatcaaagccagggccccttccctctccaacacacccccagctacagccagctatagacagctgccattgaagaagggatgtggtgcgcttcagctttcttctttgcttactcccttcttctttaggtagccgctgtgtgagctgttcaagtgtacatgggaaagcatggagagtaagagggatgaatgtatgtggattggactatcctttgatggcttcctgttccctgagactagcaggtttttaatgcaccctctatctctcatgataacagttatggcttctcccttctaggtgcctccattgcagttccccttggtttctacctttcacatcttctacccctagaggaacaacccagcctcttccagtccaagtcccctcaccctgatgggtaggatccctttaaaatgacccaaggccagcagatacaagttctgtatctggctctaggactcatacacttctgagcccataagaggaaatgcagtcacgcccaggcacagctgtctccttcacaggctgcttgagtgttctcaggtgtgagttcagcttcgccaaccacagcttaatttcttcccaggaggtaccaccaaagacttcttgctggatttgatggtggtggggaggagctgggaatcccagcacagcattttcaagaaaatccttaaaaaactatctctttattgtttttgtttttttaattactcctccatgtgagtgggaggtttaacgattatccaattgatttttggttactcactttgaaatactgcatatggtccagcacttcctttggaatgcagcatcagttgcatcctgatgcctcagaagaaaagttcaattttgtgtcctgttactttaatgatc

SEQ ID NO: 201112 - DNA, 1000 bp, Homo Sapiens
gaggacaatgagcagcaaaaatatggaagcaactcaatccctttttctctctctgtgcaatttggaaaaaggtcttagtgtatcatacagatgtgtgtaagagaaagttggagatacctcctgggcaggcaatggaagaagtgtggccaagactcctggtcacctaccatagcttcgaagctacaggagaagagtttgtggaaagagagggggcattggctcagcagcgaatggccaggttgctacaggagtattctggaatagtgaattactatacaggccttggagttggaaatgggttcaaatctcacttctgcagttcctggatttgagatcttaagcaagtcatttgacttctctgtgcctaatttcctcatcagtaactgggacaatgacagtcccacttccaataagtagatatgtaataaaacaaacaaacaacaagaaaaaacaaaaaaacaaaggaaaagaaaagaaaataagtaaatatgcatgtctcagacatttcatctatggagcttttttacctggaagtcccaggcctgaaatataagcagtaaaccaatttttggtatagtttttcatccattatttgctctatattaaataaaagtacaattctaactcccagtgaccaaagatgaggaatgtaagtgattcccagaggtcactttgtcagggattggtagaacctggatcagaacctgggcttctggaatgttctttcagtgcatgttatggtttcccacgtgcactgcagacacttctctaaatgccaaaggatggagggccaggggaggggggaaattgttattaggtattaattcaagagtgttagaatagtgtcagtcttaaggctaccatgaacctaacaattagttgtatttctctctttgctcttgcctgtaagaatcttagggtcaaatccgtggcccacttccagacactgtatgtgactttttgttactcattttgtggagaaatcacactcctggaattc

SEQ ID NO: 201113 - DNA, 1000 bp, Homo Sapiens
caaggcaccaacaggttcagtgtctggtgaaggcctgtctaggtgttctcacatggtggaaggagcagaagagcaagaacacactcccttcaacctcaaattccattcataaaggcaagccttcatgacttaatcacctcctaaaggccacacctcttaatattgttgtattggggattacattttaacatgaattttggagggaacatcatcatgcagaaggaaactctcagctccaagcttctccatggacagagaagactggaccataaacatccaacattctgacttctgaggggagctgcccaagggactggcttctgtgtcatctctctcagagcactgacacggcctggcatactctagatgcattagggcactgagagcaagagcttggcagtgtgctactgctcaagaaactgcagtatagcagacacaggaaaatacaacttggttagctctatctcaaggggaaagagaagaatggagcatgtgttcaacattctagcattttagggggctgcccaaggggctgaattccttctagcctgacataggacactgacaggacccagcatattctagattcctgggggtcactgagaacaaaaaagagctgggtgatgtcctgctgctttagaagaccttcagtatatcagaggaatcagagggagcaagagattacaagctcctgaaaaaaaaaaagaagccagcaaatctaagtaaaaatctaaacacacaagtttagagaagacacatcagagaaaaagcttgaaagactcccagaacctctaatcaggctgattggcaaaagtctttctctgtacaaagccagtctgaaaaaactgagagaggtggttactttgtcaaatgtgtagataccaacacaaagttataagaacgtgaagaaacagggaaataggccaatcaaaggagcaaaataaatttccagaaacaaacccttaaaaaacaggtatgtgaattgcttgacaaagaattc

SEQ ID NO: 201114 - DNA, 1000 bp, Homo Sapiens
acaggagatcagcacaagatacaggtcataaagaccttgctgttaaaacagattgcaggaaagaagccggctaaaacccaacaaaaccaagatggctacaagagtgacctctggtcatcctcattgctacactcccaccagtgccgtgagagcttacaaatgccatggaaatgtcagcaagttactgtcaggcctctgagcccaaacctgcatgtattcatccagatggcctgaagaatcacaaaagaagtgaaaatggcctgttcctaccttaactgacaatattaccttgtgaaattccttctcctggctcatcctggctcaaaagctcccccactgagcaccttgtgacccccacccctgccagccagagaacaaccccctttgactgtaattttccactacctacccaaatcctataaaacagccccacctctatctcccttcgcttcagcccacctgcacccaggtgattaaaaagctttattgctcacacaaagcctgtgtggtggtctctgcacacagacacgcatgaaagttaccctatatggtctaaaaaaggggaggcatgaataatccaccccttgtttagcatataatcaagaaataaccataaaaatgggcaaccagacaggtgcagtggctcatgcctgtaatcccagcactttgggaggtcgaggcgggtgggtcacctgaggtcaggagtttgagaccagcttggccaatatggtgaaaccccgtttctactaaaaatacaaaaattagctgggtatgatggcatatgtgcctgtagtcccagctacttgggaagctgaggcaggagaatcgtgccattgcagtccagcctgggtgacagagcaagactctgtctcaaaaaaaaaaaagggggggcaaccagcagccatcagggttgttctgtctatggagtagccattcttttattcccttactttcctaataaacttgcttttactttaatctgtggactcaccctgaattc

SEQ ID NO: 201115 - DNA, 1000 bp, Homo Sapiens
ggtttttttcttttttcttttttttttttttttttaacagttttagattcacagcaaaattgagaggaaggtacagagacattccatgtatcctgtgtccccacacatgcatcatctcccccattatcaatttcccccccagagtggtggtacatttgttacaattgatgggcccacattgacacttcattacagccaaagtccatagtttacattacggttcacttttggtattacatgttctataggtttggacaaaattataatgacatatatcaccattatagtatcatacaaagtattttttctgccctaaacatcctctgtgctcttgctgtttagtccttctttatctcttaacccctcgcaaccactgatctttttattctttccatagttttgccttttccagaatgtcatataattggaatcataacagtatgtagccttttcagattggcttctttcacttagtattatgtagtttaatgttttctccatgtcttttcatggcttaatagcttatttcttttaagcactgaataatatttcattgtctgaatgtactatagtttattaattcacctactgaaggacatcttgattgcttccaagtttttgcagttatcaataaagctgctaataagcattcatatgcagttttttgtatggaaggaagttttcagatcttttggttaaataccaaggagtgcaactacgagatcatatggcaaaagtatgtttagttttgtaaggaaccactaaactgacttccaaagtggctgtaccattttgtatttttaccagcaatgagagttccagatcccgcaacttgttgcttcacatcttcaccagtgttcgggattgtcagtgttccggattttggcagttctaatagatgtatagaggtacctcgtttgtttgtttgagacagtcttgctctgtcgcccaggctggagtggagtggtgtgatctcggttcaccgcaacctctgcctccc

SEQ ID NO: 201116 - DNA, 1000 bp, Homo Sapiens
tccaaaattcataagaagccctaacccccaatgtgacagcagatagacatggaacctttaaggttataggattggtgtccttagatgagggaaggccaggtgaggtcacagcggggaggcggccgtctgtaagtcaggaagggggcctccccaggaaccaggcctgctggtatctcagatgtctagtttccaaaaccaagaaaaggaagacctgcggtttacgctgcccagcctgtggtatcctgacagcaactgagctggctgcgacacacgacacacacccacaggccgacagtggctcacactgagctcctgcggtaggtgctgcctgtggggcccccttcccagagagcttgtctcccccaccctcactcccgggttttcaaacattgcacctcacaccaagccactgaagaaggcgaaggtttctttgctgaaaggaaactatgttttaattgtttctatcgagccttctgggaaggtagtttgggaagtgctgccactggtatgaggtatatgtgcccctccaagcagccgaggctcgggagtctatgcaaagatccttgaaacttcatcccaaagaccccagacagccctgagtaaggcaaaaacaatcaagggaagggagtcaagctgatgatttccctgaaaattgagcctgaattcaactgaacttaactaccacttaccacgggctgaactgttctaggatctaagatacgagttaaacaagagtaaacccattctcccaagagtcctgcacctatgagaaggtgtctgctgtgtggcccttgctagggccatacaagaaagacaggagacaggcatgcaggaagagaagccgactgccccgggcacacgacacgccctgccaggccagcagaggggggcggcgggtgggggcactccaagagcctaactaggtcccctaacatctgttcttatacaagttctctggggacaaaggcaaggatgagcagtaccttctttcaaagaattc

SEQ ID NO: 201117 - DNA, 1000 bp, Homo Sapiens
tttgcaaagaagggaaggaagaaggaaggcagattgacaacgacaggcactgatggatttctaagtgtgcctcacctctggtctttgctgacagcgtggctccactcccagaaactcccctctttgggccgtgccgtctcttcattcttaccatcatcagtaatgctgagcactcccagcccccagaagcatggcttctgcttctcacctcctgcccttgctggttcaaggccagttcaagtgtagtttgggggatcccactggggagaggaaagaaagagaagagggaaagtagatcccacaaggcctgattccccactgccggacctcccttatgggctgcatcctgagcgctagcccatcttgtatgcaaacattccagatgctagacctgccccttaccaaggataacccttgtgaggaaacaaaaggacattagaggagtagtctgaatgttcctgtaaatatgtatcttggaccctggcatgatggtggcttgaatgagggctcatccactcatctcccagcagactcgctacctcctgtgagctgagcagtgatcgagggtacacatgacatctgcaactctgttaggatcgtgaaggaccaagctggcgcaagtgttttccgctttgtgccagaagagagtgtggaatggggtgaagccctaacgtgaaggtcaagaagaatgctgtggcctggtggttccagagagaggctgacctgcccctcccatggcccccacttgggcaaatgttgccttgtgggagcagctggtttccttggcccctcaggagctggggaagcctgaacagatgcatttctccctctgatagggtgagaatgccatctaagaaaaccaaatagtagagatgttggtcccaggaatctaacacgatttcccgctctttcttaaagcacctcaggaaaacaacaaatttaatggcacccagaattcaggaagtgggataagatgtaaaagaaatagactaagaagctt

SEQ ID NO: 201118 - DNA, 1000 bp, Homo Sapiens
ggttcaagcgattctcctgcctaagccacccaagtagctgggattacaggtgcccgccaccatgcccggctaatttttttgtatttttttagtagagatggggttgcaccatgttggccaggctggtctccaactcctgacctcaggtgatccacctgccttggcctcccaaagtgctgctattacaggcgtgagccaccgtgcccggcctccctgtagtttcaacaaatgattttgcctgctacttcaagggggaaattagtgtcttttagcaagaactccctcaattacttgtcccctcctatcactccaagaagcataggagcatttctattatttctattttcttcctttttatttcaatggaaaaaaaaaactgattgcaggccactgatttcggtggtaaaaaggtaaaacatatttaagaatgtttcacatatatctgcttaaatttctatgtgctcatcactttgactccctcttttgttatcttattctcttttggtagatgcacccctctttgctatcagcaagttgcagaaaaataatcaaggcagcaagctacaactgtagattgtaccctacaccaatcatgtgtaagaggcactgtaagaaggcactctatcatttaaagccccctgaacttcccttcaagcagtaaaaacaccagatgaaagatatgagaaatatgaattcatagatattttctgtatttacactgatgacagccatattacacgtattgcccatgaagttgaaaacttggtatggtccctcttatttacaattcaagtccatctcctcattatctcatccttttcatctgttctttataaccaaaaccctttgcaaatgcctcccagaccttccccccatataaagttaattagatcacgagcagctcttctaattaagcttacttcaaccacaaatgcattttctcattttattatcactaacaccaagatgagatactgtgattaacaattaggtgaacgct

SEQ ID NO: 201119 - DNA, 1000 bp, Homo Sapiens
tgcatgacaccacacccagctaattttgtatatttagcagagatgaactccccacctctggggatctacccgccttggcctcccaaagtgccgggattacaggggtgagccaccaccgcgcccagccatacatatatatatatgtgtaagtgtctctcagaaggacacttatgactggatttaggtcccactcaggtaatccaggataatatcctcaggtcaaaatccttaacttaatcacatctgtgaagaccctactaccccgcacccgtttattttttttgagacagagtctcactctgttgcccaggctagagggcaatgttgcagtcttggctcactgcaacctccacctcctgggttcaagtggcgatcctcccgcctcagactcctgagtagctgggactacaggcaagagccatcatccccagttagtttttgtattcttagtagagacggggttttgccacgttggccaggctggtctcgaactcctggcctcaagtgatccgcccgccttggcctcccaaagtgctgggattacaggcatgagccaccgcacccggcctcaactccttttctgaagtttcctcttccttccctcatgtgggcctctgcacaaggtaattggagtgtccatattaacagctaaaaggagtaggaacactgacccattaatttagaattcatggtttcagacacggttcagccacatttttgtataaaactgattaagtcgtgtaaaagttctaggtctcagtttcctcatctgtaaaagggacataatgctacaccctgtagtcctgaaaggactaatggagatagaccctcagtaaaccataaagcattgtgtcaaaacatgcacagagttctgattattctcccctcattctccccttcagataatcaaaagtacttttaagcatctaatataaggataacatcatgttgaagcacacacaaggaaatctaagatatggtgatggctgtcaaggaattc

SEQ ID NO: 201120 - DNA, 1000 bp, Homo Sapiens
acattgctggtgggaatgtagcgacgcaaccactgtggaaaacagcttggcagttcctcaagaagttaaacatagaattaccatatgatccagcaacttcactcctatgaaaacacccagaagaagtaaaaaggactcaggcaaatacttgcacaccaatgttcattgaggtattattcaccagagccaaaagctagaaacaactgaaatgcccaacatgggaagaaacaaaacgtggttcagtatacatacacacacacacacacacacagacacacacacacaatggaatattattcagccgtcaaaattaagctctgatgcatgctacaatatggatggaccttgaagacatgctaaatgaaagaggctagacacaaaaggaccatactgtatgattccacatataggaagagacgcaaattcgtagatacagaagtctaatggtagttgccagaagctgggaggagaaaggaattgggagttattaaccttggttaatgggaagagagttttgtcagagtagtgatgcttgcacagattatgaatgtaatgaatgccactgagttatacacaaaagtggcttaagtgggaaattttatgttatatgtatttcaacacattttttaagagaaaagtaatatgtgcaaaatgacctatgaatacaggaattagagactgttgctggtcaggcatggtggctcatgcttataatcccagcactttggaaggctgaggcaggaggatcacttgagcccaggagtttgagattagcctgggcaacataaggagagcatgtctctacaaaaaataaaaaattagccgggtgtggtggcatatgcctgtagtactagttattctggaacctgaggcgggaagatttcctgagcctaggagttcgaggctgcagtgagtcatgatagtgccactgcactccagcgtgggggacaaagttagaccctgtctttgaaaaaaacagaagaaactgttctgaaagctt

SEQ ID NO: 201121 - DNA, 1000 bp, Homo Sapiens
ggccgcaggctgctcccggggatgggctcggtgggacaggctcggccgcaggctgctcccggggatgggctcggtgggacaggctcggccgcaggctgctcccggggatgggctcggtgggacaggctcggccgcaggctgctcccggggatggattcggtgggacaggcttggccgcaggctgctcccaggccagggcgaggctctctatctggtcatctcagctcctccactaagcagggcgtgctgggccaacgcgcctgggagtgcaggggtggccccggctggaggagcccctgggctcagtatctgcccacagggcaggcccagcctgcagcacctctgcaggggaccagtcactctcccaaattcctgccaggcagaacagaaactgcttccaaccggaaccataaatggtttaaaaatcttactttcacacttgctttatcttagggttttttgggattttaacacctttttttttttttttttttgagatggcgtctcgctctgtcgcccagcgtggactgcagtggcgcgatctcggctcactgcaagctccgcctcccgggttcacgccattctcctgcgtcagcctcccgagtagctgggactacaggtgcctgccactaggcccggctaattttttttttttttttgtatttttggtagagacggggtttcaccatgttcgccaggatggtctcaatctcctgaccttgggatccgcccgcctcggcctcccaaagtgctgggattacaggcgtgagccaccgcgcccggcctaacacgtttcttaaaggaagagctggcaagctcacttcgtgcagtgcgtctaagaggggctcacagtgagtgccgtgaaggacttcagatccaggactcagacaccaaggtcagaagcctatttgtgttgcgtctcagtttgcccattaagtttaaaaaagcttgaacttaggagccctgcaggttgtgacatgaacctggagctaacaagctt

SEQ ID NO: 201122 - DNA, 1000 bp, Homo Sapiens
gcaaaaccccatctctgcagaaaatacaaaaattagccaagcatggcggcacacacctatagtcccagctacttcgagggctgaggtggcaggatcacttgatcacttgaggttaaggctgcaatgagccaagattgtgccactgcactctatccagcctgggtgacaaacagagaccctgtctcaaaaaaaaaaaaaaaaaaaaagtcagggaaacatgacacctccaactgaacaaaataaaacactactaaccaactctaaagaaaaaaaagatgtatgaactgcgtgacaaagaatacattatcaatgtttataggaacctcaacaaacttcaagaaaatacatagaaataattcaaaaaaattaggaaaacaataaatgaccaaaacaagaaaattaacaaaaatattaaaaatcattttaaaagtcaaattctggagctgaaggatgcaatgaaccaaatttaaaaatgcaagtgtcaacagcagaattgatcaagaagaagaaagtatctgtgaacttgaagacaggttatttgaaaatattatatatagaaaaccctaaagactattactagatacaattagaactaatagatgaggccgggtgcagtggctcacgcctgtaatcccagcactttgggaggccgaggcgggtggatcacgaggtcaggagatcaagaccatcctggctaacacagtgaaacccagtctggaaaaaaaaaaaaaagaactaataaactaattcagtaaagttgcaggatacaaaatcaaaactaaaaaatcagttatggctgggtatggtggttcatgactgtaatcctagcactttgggaagctgaggcaggcgaatcacccgaggtcaggagtttgagaccagcctagccaaagtaatgaaaccccatctccactaaaaatacaaaagttatctgtgcatggtggtgcatgcctgtagtcccagctactcaggaggctgaggcaggagaatcacttgaatt

SEQ ID NO: 201123 - DNA, 1000 bp, Homo Sapiens
gtgaaacgggaacagaaaactaagtgcatcctcccttcctgattctcccagtcttcaaggctgtatgtgccaggagctggggataaaggagatagccttagctctccagaagctcacagaatggacagacagagccaacagttttatttgtttgtttgttttttgagacagtctcccactgttgcccaggctggaatgcagtggcaccatctcagctcactgcaacctctgcctcccaggcttaagcaattcttctgcctcagcctcccacctagctgggattacaagcatccactacgaagggcagggtttcaccacattggccaggctggtctcaaactcctggcctaaagtgatccacccgcctcagcctcctacagtgctgggattataggcgtgagccaccgcacccggtctacagttttctttaaatcttcatcatgccagtacttccctcctcctgttttcatcttcctgtatttgcaagtttcattcattctcttcattctattcattccttctctgtactttacctaaacatagttgtgaacccccaaaatctgagccagatcaatttaggaagtttattttcccaaagttaagaatgcacgcaagtgaaatggcctcaggaagtcctgacatgtgcctaaggtggttgggacacagctcggttttatacattttagggagacatgagacatcaatcaacatatgtaagatgaacattggctcagtctggaaaggtgggacaactcgaagcaaggagggagcccccaggttataggtagatgagagacaaatggtcgcattctttcgagtttctgatgagcctctccaaagggggaatcagatatgcatttatctcagtgagcagggggtgattttgagtagaatgggggcaggttggccctaagccgttcccagcttgactttcccctttagcctagtgatttgggggccccaaggtttattttcctttcgcgtagcttcgccactaatg

SEQ ID NO: 201124 - DNA, 1000 bp, Homo Sapiens
taaaaaatctgggtagagaagaaacatatctcaacacaataaaagtcatataaaacagacccacaactagtatcatactgaatggggaaaaactgaaagactttcttctaagatctgtaggaagacaagaacgctcactttcacctctgttattcaacattgcactggacgtcctagctggagcaattagacaagagaaagaaataaagaacattcaaattggaaaggaagaagacaaattatccttgtttgtagataatataatcttatatttggaaaaacccaaagactccacaagaaaactcagcactgataaattcagtaaagttgcaggatacaaaatctacatctaaaaatgagtagcagttctatatgtcaacaccaagcaagctgaaaaagaaattaagaaagtaatcccattcacaatacctacaaatactgtaaaatgcctaggaattaaccaaagaagtgaaagatctctacaatgaaaaatgtaaaatattgattgaagaaatcaaagaggacacaaaaaaatggaaagatattccatgtttatggatttggagaatcaatattgttaaaatatccacactacccaaagcaatctacagattcatcacaatcctgatcaaactaccagtaacattcttcaccgaaatagaaaaaataatcttaaaatttatatagaatcacaaaagacccagaatagccaaagctagcttgagcaaaaagaacaaaactgtaggaatcgtattacctgacttcaaattatactacagagctgtagtaaccaaaacagcatggtattggcataaagatagacacatagaccaatggaacagaatagataacccagaaacaaatacatacatctacaatcgactcattttcaacaaagttgccaagaacgtacactgggggaaaggacggtgtcttcaataaatggtgctgggaaagccagatatccatatacataagaatgaaactagacttctatctc

SEQ ID NO: 201125 - DNA, 1000 bp, Homo Sapiens
gaaaaccctgggaggctgtaaagtcacctttgtgcacacaaaaaataaatgcattatttttaactgtcagaccagggatgaatttttgagagctgtcagaggaacagccaggcttgcgcaaagatcgagaaaggacagacgactgagcatttagccaaccccttccctgaggtgttgtgttctgtgagggcggtccatagggtggcagctccaaaggggacctaaaagtttgtaaattttggctgggcgtggtagctgacacctgtaatcccagcactttaggaagctgagacgggtggatcacttaaggtcaggagttcaagaccagcctgaccaacatggtgaaaccctatctctactaaaaatagaaaattagccaggcgtggtggtgcatgcctgtagtcccagctcctcgggaggctgaggcaggagaatcacttgaacccaggagggagaggttgcagtgagctgagatcgtgccactgcattccagcctgggcaacagagtgagtgagactctgtctcaaaaagtaaaaagtttgtaaatttggaaggtggtttggagggacacacgtttgatatttgttaaacgctgaaaggaaagaggggggaaagcgggcaggcttttaagaattgttgactttgtggatttggagcttcctgggggaaaacagagccgttccaccgaggcctgatggaacaggaagcgggtgtctgcggcaccatcccagaaccagctctgcagggggaccagctggagggggctctgtgttttcctccctgctctaaacagaaagccgtttttctagatgggaatctggatctgttaaaatataatcggtaacgagaccaggattatttatttaagtatgtggaacgctgagggagtgttgtacttcccagctgggctaggagctgcaaacgtccaccatgtcgaggggcacggaaataagaactcgccaccccttcggagatgcctgcatagtgtccttacaagctt

SEQ ID NO: 201126 - DNA, 1000 bp, Homo Sapiens
agacctaatgcatgcagctacaggcaatgatgctctagacttggtcttagataaacattttacactatacccaaaagttcagtgttataaaatggagtttatggtcctttgccctcagggttgtaggaatgaatgattttgagaagtttgacttcccaaggatttattgtgcatccagaaatcttataatgaagatttcaaaggagaaattaagataatggcttatgtaaaatatatgaaacttaacacaggtgataggattgcttagctgctactgtttccctttatcaaaggctaagctgcttcaacagaaagatcagggtggtttataaatattggaaaacatgtgttctggcaagcagttgttaatgatcagaggccaaaattaacattacaaatgaatgacattgaaacagaaggttttctggatacagaatctgattcagaaactatcattcacaaaaaatcttggaattcagaatggccacttcaaaaggtttatactcagtttctaggaattgggaagttgtctctgataaaacaaaatgtgtgagtgacttaaatgtatggaccaaaaggtcaaataggactattaaggccttatgtggctgacatagccatcaatttatggggatgagatttactacagcagtgaggaactcaggttaatattttctcaataccagacaatccctaaaataagggatgaaatggaagatgcttcagggaaagaattgaaaaatgtcatccaaaacaaccacagactgcagattgccccaaaacaagacacagcagggattgagtgagtttccatatttataagggtgggaccactactgaaattataccaacatccttacccttaaaaatgtttgattaacaaagctgtgtgagtagagcaaattcccttaactaaagaaaaaatacaggaacttgaacagttgatacaagagcatttggaggttcaacacatagaagagcctatcagcccatggaattc

SEQ ID NO: 201127 - DNA, 1000 bp, Homo Sapiens
atatcgtaacaaatgcagtgatatgaaatgtaactttgatttctactggcaagtcgcagatgctgctaaaatgtctgaggcctgttgactacattcagaagagcaggagatactcaatttcagtggaaggttagtgaaaataaggatataaattttttccccattcaagttcacagacccttcgaattctctccacagccccaccgcccctgttgtaaatccatcagcacagtatgctagccattcgggtcattactgctaattatagctgttgttagtatttgcttcaggcacagctggcaccatggcctggctggtcccagcttcactcattccctgctctcagtcctagtgactagcgagggaaacgtgtctgcacagcttttctccctggatggaagccgagtgcctctggcctggagcctgtccctcaacctgtccctccaccagggaaagctgcaaaagggagtctgtggcctttccatcctgggtctgtgggagttcatcagagcagagggtgggctcctgacccagcctgtcctcatgggagtgctgcaagctgacacctaagagagaactgcctgattcctagggtgacctaccctgtcaacagaggagggtgtctctgttgcaaaggcctgggaggaggtggccggcagagcttcagagagccattctggggtaagcagcttatttttccctccctgcaatggcttgttttcagactcattcacagaatgccccagaggctatgagaccaaggaaagggtgacacttttcccctgcacctatggtggaatgggcacagaggagaacaaggctcgtgtgcctccctacttctcaggaaggaaactgcctgtcatcattgtttgcaatttctcagacaccacacagtggtgccaggtccctgttgggtggcccaccgtttgaagggctcctggctcagactggaaaatggagaaggcagggtagggtcggatgagcccagacagagccaaga

SEQ ID NO: 201128 - DNA, 1000 bp, Homo Sapiens
aattttgatatccgtgggggtcctggaaccagtccctcagttaccaagggaaaagtgtgtaatggaagaagtaacagtattgaagaatcaaaaggaggatcccctaatacagaagacctgaacagaaggagttaggtggatgaaagggaggtattgaccctttccactaccctagatgtgaacattgccaaccattgtcactttacttaaacacccttccacctatgccactcagcataccatttattctggtctctctccttctcaggctcctttactgatttctcatcctgtttaatctataaatgctagaattcaccaggacttggtcataggccatctttcttctccccagatgatctcatccaatcactatctttacaaagcataattttccactgaaaattattactctacttccctgcaccatttctcccaacctctcatcactatcctcacagtaatcctcaccaccttcctcttcatcaacccaatttaatatatcaagtcctgtcaattctatacccaaaatccttctttaaaatgctgccgggcgcggtggctcacgcctgtaatcccagcactttgggaggccgaggcgggtggatcacctgaggtcaggagttcaagaccagcctgaccaacatggagaaaccccgtctctactaaaaatacaaaattagccggggtggtggtgcatgcctgtaatcccagctactcgggagtctgaggcaggagaatcgcttgaacccggagacagaggttgtggtgagccgagattgtgccattgtactccagcctgggcaacaagagtgaaactctgtcaaaaaaaaaaaaaaaagcatccattttctccattcccatgaacaccaacctagtccaagtgactatcatccctcttaatttaactatttgtgcccccaatcattctccatttagcagccaaagatcttttaaaattataaatcaatcccctttaagcaaaccttttaacaagctt

SEQ ID NO: 201129 - DNA, 1000 bp, Homo Sapiens
gaaaccccgtctctactgaaaatacaaaaactagctgggcgtagtggcatgcacctgtagtcccagttactcgggaggctgaggcaggagaactgcttgaatctgggaggcagaggcagaggttgcagtgagctgagatcgcgccactgcactccagcctgccaacagagcaagactccatctcaaaaaaaaaaaaaaggaaaaatacaaaaattagctgggtgtggtggtgtgcacctgtagtcctagctacttgggaggctgaggcaggagaatcacttgaacccgggaggcggaggctgcagtgagccgagatcgtgccactgtgttccagcctgggcgacagagtgagactccatccaaaaaataaaataaaaataaaaaagtacttgttagccggacgtggcggctcacgcctgtaatcccagcactttgggaggctgaggaagatggatcacctgaggtcaggagttcaagaccagcctggccaacatgatgaaaccccatctctactaaaaacaaaaattacgccgggcgcagtggctcacgcctgtaatcctaacactttgggaggccgaggcgggaggatcacttgaggtcaggagttcgagaccagcctggccaacatggtgaaactcggtctctacgaaaaatacaaaaattagccaggcgtggtggcgcacacctgtaatcccagctactccggaggctgaggcaggagaatcgcttgaacccgggagacagaggttgcagtgagccaagattgtgccactgcactccagcctgggtgacgagagacaaactccatctcaaaaaataaataaataaaataaaaagcatttgtccacagaggtccatcaccacacggggatgagagtggacccgggacagagcaaggccccgtggccagtgctaagtgggcatcctgactaatctgcgaggcactggagggacgcagccttcagggcggggatgtggctgcagcgcttccttcttccac

SEQ ID NO: 201130 - DNA, 1000 bp, Homo Sapiens
tgctgaactctatctactcatttcataaatacttcatgattgattttgtaaaatgaaaaatcctaagcttttattttttacaattatatcaatgataactacaatttaaactgtgtgtttcttagtgtttgacatactttttaaaaatattgccagtaaaagcaactgatgggtagagctctttctggtacctataacaccaacataaacacttattaattttaaatgcccatcttggaggatcaaggagatatttactaaatttaaattaaactcctatcatcttttttctaaaagatttatctaaatttcagcttgcctaagaaaatacttcagcaataaagatgaaatctaaagagataataggaagtaaacactaaataacagtatagtctgaaaagaaaaataatggattttttttcataaaggattaaataggtctacaatgaaactgtttgaaattagtctgcatgatcaaaattgtaataatttcattaaaaactaagtattccacttaactatcaggtaacttcatgaattgcttttatctttcggcttgtttagtcatttaaaaaaattaacagaagtacagaattatagatttcaaattcatcagtataatatatgaagctcaggaacagtaaataaaattcatatataactgtaggtatacattaaaaataacactttattttggcatattacaagaaagcatcttaaccaaatcttaaaatggataaaataatttagcattccatattttaccttttcatttaaactgaggtttttacagtggcagaaaaatttggcagctaaataactacaaagttacatgggtttcccatcaccaaacactataaaaatatactaactttaaagcttcaaggagtccaaagaaggaggaaaggacaagtcacaaatgggagagaacaggaccagtacagctttcttattaaacacctgtcaaaattggagagtaatttctgcatgttctaagatc

SEQ ID NO: 201131 - DNA, 1000 bp, Homo Sapiens
tagagatggggtttcaccattggccatgatggtcctgatcttttgaccttgtgatctgcctgctccagcctcccaaaatgctgggattagaggtgtgagccaccacacttatccttatttttatcttttaaaacaatgctatgagaacgtcttccttgattctgcatgtctttccccagataaacaggtacctccttccttgaggctgccttagtacttcactgatttttctactgcatctttaccacctgaactctacattattcctccacatgtctgtcccgtctgctccaagactgcagaggacagtcttgcacatcatcttactcacattttactcagaaatttcttattgagtcctgctaaatacatgctaggcataagggtttaaaaagaattaaaataaagcatgtcagggatggcttttctagaaaacatgcccaagcagagacttaaatattgagactagccagattaaaaggggtagagggcaggaaagggtgacggcatgccacacagcagcaagagcgggagcgaggcctgaaagagtgaaaatatttgcctacaatagaaggatgagtgagtagggcattgccagcagctcagtaatgccagagaaagggcacacagggaaaaggcctaaagatggagagtggggcagaagtcagattatgaaagccttatgtgtaattttaagatgcctggacattaatgttcaagagaggtccctgatcctatctgcatttagatatagatcactttaaatgccaaaaccaatattcctagtgaaccattattcattaagacaaggtgacagatagctcatgtggacacagttgagatgatactatgtagcaaattctcaataattctcatgaacacttggaaagtcaattctataagaagtcagagaaattataataaatcacttaatacttggtttgggaaggtgatttctaaaattatagtgcctatgaatttaactaataattgtgaattc

SEQ ID NO: 201132 - DNA, 1000 bp, Homo Sapiens
actctgttggctaagcaggaacctgagcatcatgatttctttctcctccaggaaccaactgttcaataatggttgtcttccccctttatgtaacccgtgaatccttctacctctctccatctccactccctccactctagaagaagccaccatcatctctcaccagcaatactgctgcagcctctcacatatccctcttccctccttgtcctctccaccctcccttcattgttattcatcacatatggcgaggaggattactctaaaatcaaatctattgttcatgtcatggtcttcatatacgatccctactgccttgaagataaaatataaactcccttcacttgaaagacaagatgctgcaaaaactggcccctgattatctccccagcctcatttattcctttattctctcctcaacgtgctgttccttacgccaagtttatgctctaaccattctaaactttgaccttttttttttttcagatgtagtaagttctcctatgccattctctctgccttggatactttcccctgtatcttcacctggttaatttctaattatcttttaggtcttcgattagatattacttcttctgaacaatcttccttgatgacccagctactttacatctctggatggaatcctcctctttgctctaatggtaagtggtatgttcacattatagcacttatcacatctttttgtaattgtctaagttttgttatctcattagcctattagctccatatgagatagaaattatgtccaacttctgtgtgggcactccaccacctattgcggttcctggtatgtaactacaaatagttggtgaacgaatgaatgaatgaggtctttttaattttctcaaattcctcatagagttaagagagattgagttgagttgaggatggatgggaaacgatatggacagaaatatccaagaatggagtcagggaggaggcagaatatcttttgtttcctccctgtttggaattc

SEQ ID NO: 201133 - DNA, 1000 bp, Homo Sapiens
gcgttccccccggccaggggaggttgagtttatatcgtgtgccgggatgagtgggagagtatcggttcaccaagaagcaatgccctccttaaaatttttcctgccctttttttcttgctcttctctttggtgttcacaagcccagcccgagcaagtggtctttcacaaagaagccagggaggcctcctccctcctggtcggtggggtagtcgggctgaagaacaaggttgtcaaggctgcagaaggaggaatattctgaggagatggccacatgggacctcagcctcctctcaggagagcctttgtctcatgggaggagctttgtaaaagggtccctcatggcagagttctccactgagtcaggtacaccttctagcaggactcgtcagtatctctgttaggggacacaggctggcagagtttcagttgcttcataaaataagtatagaaagtgaggtaagacaaaattcttactggtaggtgagaaggcatttcaagagggaacggttaaagaaagttgagaaatctgaccttaaggacttattttatgtaagggagcttgatggagaaactgggcctcctaagagagtatatttagagggaaatggcccaaggtcatgggagatgagatgacccagcctctgccaacccagagggaggtgggaagtagacagagggagaaaactccgagctggaagcctccatgatggaagaggccatctcacctcaggggaggaggcattttggagcactggtcaggcaagagtggaaggtagttaggagccgaagcgcaaaagcatccgggaaaagcaagcaggtgatttagccgattgtgggttcccgaagggaaagttcaccagctgggtgttgacctggtgcagcctaggtcctgctttcaacttggggtcaactagacctctgtagggttttcaaaagcaggccctagtttaggtgacacaagccccattctccaagcctttccctccagctgctagaattc

SEQ ID NO: 201134 - DNA, 1000 bp, Homo Sapiens
ttgtgagttgtgctgctacaaacctgcgtgtgcaagtatctttttcgtataatgacttctttccctctgggttaatacctagtagtgggattgctagatcaaacagtagatctacttttagttctttaaggaatctccacactgttttccgtagtggttgtactagtttacattactaccagccgtgtaaaagtgttcccttttcactgcatccatgccaacatctgttatttttaaattttttgattatggccattcttgcaggagtgaggtggcatcgcattatagttctgatttgcatttccctgatacttagtgatgctgagcatttttcattatgcttattggcctatcttgttgatatatctttttttgagaattgtctattgatgtccttaacccactttttgatgggattgtttgattttttcttgctgatttgtttgagtactttatagattctggatattagtcctttgtcagctgttgtttttcttaatccttaatctttttttccactgagatagggtcttgctctgtcaaccaggttggagtgcagtggcatgatcatggctcactgcagcctcggcctcccaggctcaagcaatcctcccattttagcctcctgagtagctgagactacagacgtatgccaccatgcttggctaacttttaaattattttgtgggggatggggggtggtcttactatgttgcccaggctggtttcaaactcctgggctcaagtgatcctttcgcctcagcctcccaaagtgctgaaattacaggtgtgagctactgtgtctggccagtccttaattctttttcattttatttttttaaaaaagcaagaaaccagagagacttaattcttcaactagtttaataacacccaaagggaaagtttagaaatgtgatttttttgtttttgctcataaatacacatttatatgtttatttatttaaatagtagagtgaaaataacaagatagagtgaattc

SEQ ID NO: 201135 - DNA, 1000 bp, Homo Sapiens
attaattccaaagaatacatttgcacaaataacagtgtactgttaatatctcttgaagagatgctttgctaaaatgaaaacaattatttgtggctattacagtcttggaaagaaatacttgttggtatatgctgtttaaatagttttaaacatagagaacacttgcactattaattactaagaaaacattagaaaaagatattgcaatacttccacttctgccaacaaaggaagaaatgctttggaaatggctttccttccataaaacctagaaaacctagggaatgtgatctctgagagaaacaaaacaatggagtgggcagtataattgccccagtttaccactgagaggcagtttccactttgctgcacagggagaatccaaatggagtcagtgggtttgtgacttgtagagacagaagttgtagtttggggaggcagaagcagtcactatttgtggccagagtaccagaggggagggacagacagttgcagagacagaaagttctagatatctgcagatggtccccttttagtctttggctaaatattcatctgcacacacaggggataaaccttttcaggctaggggaaacactactacaaagtagcaagccaaacaattcccagaactcacatagtgaaatgtgacagcgtgctggcagccctcgcagtcctcgcagccctggctggctctcggcacctcctcggccttggcgcccactcttgccatgcttgaggagcccttcagcccaccgctgcactgtgggagcccctttctgggctggccaaggctggagctggctccctcagcttgtggggaggtgtggagggagaggtgcacgcgggaactggggctgcatggggcgcttgcaggccagtgcgagttccgggtgggcgtgggctctgcgggccagcactcagagcagccaggtggcggcaagccccgggcagtgaggggcttagcacctgggccagcagcagctgagcttgatttctc

SEQ ID NO: 201136 - DNA, 1000 bp, Homo Sapiens
aagagacagatggttgcattcttttgagtttctgatgagcctctccaaaggaggcagtgagatacgcattcatctcagtgagcaaagggtgactttgaatagaatgggaggcaggtttgccctgagcagttcccagcttgacttctccctttagcttagtgatattttcctttcacactgccgagccctctgagccttgcttgccgctgtggtgggcctgctcagccagtgaggccaggcagccagcaccctcagcacgtcctgggacatagcctggtaagcctctgggcactcggtatcccgctctgtaactggccaggtggagcacggccttccagggtctacccctcatgcgactgtttctccaggagaattctttcttccttttggttctaccataaatattttcccacgccattacaattcttcacgaacagaatctaaatggctgcatgttttatcaagcggccacaccataacgcacctagcgattttgttaccaatggtccttcatgttgttcgccattgtgatcacggcactgcggtgggcagtttcctgttgttgtacccaggcgagttagagaagacgccacactctgaaacgaattgagtcctttatttaagccggcagccaaagagacggctaacgctcaaaattctctcggccctgaggaaggggcttgattaacttgtataccttggtttaggaaggggaggggaactcaaaggcaataattctacagaagtaaaaacatgcaagaatcaaaagaagcaaatggttacagagcgataaacaatttaaaagacaaatggttacaaaaagcaacggtaccaggtgcagggctctaaatccttcattatagttagacatagatgctatgccggacacgaactcaaggctttatgttgttatctctttgagaagaatcctgggaacttcagacgttgttggtgccagtaccttatcagttaattgggctcctttgaaatgctgaggatc

SEQ ID NO: 201137 - DNA, 1000 bp, Homo Sapiens
cgaggtcacagagacaaaaaactaatacaatcaactgcacagtgggaactattaaactctataaaaacactacaaacaaaaataaacaacaaacgtctacaaatcagggtgaaatatttgacaagtaaattacaaatcaaaggttagtatgtttaattcatacacagccgtatcaatccatgggaagaaaacaccaactaaaaatacgcaaattccaaaaatgagcgatagacacaggaaccattcccactgctgggtgtcgacgcaacaccagttgaaatgaggtaacctttcgccaactgggtttgcaaagatgtaaatatcattaaaatataatgcgaccgggtgaggtggctcacacctctaatcctagcactttgggaggccgaggcgggtggattgcctgagctcaggagttggagaccagcctgggcaacatggtgaaaccccgtctctactaaaatacaaaaaaaaaaaaaaattagccggctgtggtggcgggtgcctgtagtcccagctactcgggaggctgaggcaggagaagtgcttgaacccaggaggcggaggttgcagtgagccgagatcgcgccactacacaccagcctggagacagagtgagactccgtctcaaaacaaaaacaaaaacaaaaacaataaaatataatgccccttttacctggaaattccacttctataaaagtttctttgggaaattatctttaggcacagaaacaagtttagaggtatagtgatattcattgcaatgtaactttcaattaaaaaattaacaactgaagccgggtatcgtggtgtgcacctgtggtccagctacttgggaggccaaggtgtgaggatcacttgagcccaggagtttgaggctgcagtgagctgtgactgtgtcactgcactccagcctgggtggcagagcaagaccccatctttatctttatcttttatatatatatatatatatatttttttttttgaggtggagtcacca

SEQ ID NO: 201138 - DNA, 1000 bp, Homo Sapiens
gtgtatgcaggtggagtcgccctacccctcttccaaacatgtcctgtgagatttttaaaataagatgggatagtacaggggcatgaaaagaattgattccttcacaggatttgaatccagttcaagggagaatgtagaaaattcaaaaccaacatataaggtatcacacaaccaagaaaagtaaaaccattgcaagtttacttgcgttgagtacaaaacagatttaatggtgttctatgtcatagtttaatgctctgggtatttaaatatgttttcaacaggatttgagttgaaagtttgtaatgtgctttgatggaacacctctcaatttctattcaataaacttatgtaattgtccattgacaatataatgataacagtaccattgaactctaaactgtggtttatcttcactactgggaagcaactgtgcatcagtattaaagatatgcagaaacataatattcactaatttgttcatctgcttctgtatattgtttatggaattacatggcaagaactgttctaaagcaacatgtctttccacattattttagaggtgaaattacttttgttttgcttctctataatgtgtacttcaaatgaaacaccatacttttttctaaaaaaagatgttcaatttactaatttttttaaatctcataatttaaaaagcatttgttgtgattttaaagtgttgcaagaaaagggattttgtggccgtgggtagactttttatactttgttttatagatggattttttttaactgtagtttgtttaagtcaccaagcagcatccaaaatcttaatgtgtttcatttgatgttgttagatcagagaagaaattggcataaaatcggttaatagtattgtcaaagaattgtgtattgtgtactcactgggaaaaaataaaatatattcacatttcaaatttgtagaaaagccatttatgtaaaacaaacctgtttgtagacatgctaaaaaaagaccaggtagcca

SEQ ID NO: 201139 - DNA, 1000 bp, Homo Sapiens
tgaaaagacaggatgccagttaaacttgaatttcagataaacaacaaatcattttttagggtaagcaggtcccaaatattgcatgggatatatttgcaccaaaaaaaaaaaaaaaggttaatgagaaactcaggtttaattggacctcctgtattttacctggcaagccttaccctgcataaacacatcctcaagcttgaaactcagagaagccacggccgtgcttacacacgtgcacaaacccatataccttacagagtcaagggctgtgatgagggggtccccaccattgcacacttccctgtcctctgtctgggctcagagtgaacagggggtcacctggcatccacgtctaagctgggcttggaggtgtcctaatgaagcaggatgctgacctgcacttccccagctcagcgggggctgcagccaggcctagcttccggtctcgggcctagaacacacagcacagccccagaccttggcaagaagtcttcatctcaagggccactggctcaggacctattagaagccccacttctttcctctgtttctgctgccattgcctccatctctgaccctgccacccaatcactctataaacacagcaggtactaggggtggctctgggctcggcactaaagacaatgcccctggtaaagcctcagtctagcaatgacagtcaacaacgtatcagcaacagccctgacccacacgtgctgactgcgcacaagggcggcgctgtgaacgtgctctcaacagtgatctcactgaaccctcatggcagctctaggatgcagacagtagcatcacattatccccattttacttatgagaaaactgaggcctgaagaaggcaaacacaggcctagggatttgcagtaacattgtcaggaatgtttgagaaagcaaacttctccagagtgaagcagtctgccaaagctcagaagacagagtccctgttagcaggcgctgggggtactggggacagacaagcgggtag

SEQ ID NO: 201140 - DNA, 1000 bp, Homo Sapiens
tttatccgttcatggattcagacagaatcaggcagcactgagtaagttccaggcccatgacctcaccactgtggagatgccagacgaggacagagaggcacccacaactgagtcagcccgcaggcacacctcatttcttccaagtgtcccagatgcaagattatctggtgttagcttgagtacagagaacacataactagaaacgtcattctcttcctttagagaaaggcactggatggtctgtttccttttcaagactgaaagagccaacgtgtacccccagaagccagtgccgctaggctgtgtacagacaagtatcctatccacaaggagaaaggcagaaacagacctggggatgggttagtagggtttctccaccacatcagtacctgtgtatttctttctagttattttcccctagaacttgacaatttgggagccacagtacatttggttgtcatatctccccagcctcctctgttccgtgactcttttttagtcttctgttgtttttacgaccctgaaagttttgagaaatgctggccaggtcttctgtggaatgtcccccaaaatgggtttgtctcacttttctcatgattaaactggcagttaaggggaagaaaaccgtagggctaaagctttttgggaacttttttttcttttttttcttttttttttttttggctctgtcacccaggctggagtgcagtggcctgatcatatctcactgcagccttgaactcctgggctcaagcggtcctcccaccttagcctcctgagtagctggcacttcaggcatgcaccaccgcctaattttttttttcttctctgtagaggtaggggtcttgttattttgcccaggctgggtcttgaactggcctcaagcgatcatcctgcctcagcctcccaaagtactgggattgcaggcatgagccactgtgcccagatctaaaactcatttaatactcataattatatcttattcctttgctgggaattc

SEQ ID NO: 201141 - DNA, 1000 bp, Homo Sapiens
tctgtgagcagcatccctccatttgtttcagctcctgccttaagtccctgccttagcttgccttggtgataagactaaatcgtgtaagctgaaataaatcctttggcctgaatcttttatcatagcaacagaatgcaaaccaaaacacagaattactgttcttgtttcagtcctggggactgaacctccagccttgcacatacgaggaaagaggaagcctcccagaactcctgcggcatcctcagccctcttcttgacttcctccctccccaccctaagacagggcctcactcagttacccattcctggccttgaaatcactgtgtagcccaggccaaccttgaacttttggtcttcctgccactgttgctcaaacagctggaatttcaagcatgcaccaccaggcccagcttaaagttggtaaattctgggtttaggttgtgaaatgggatagagtttggatgagctatatgaacgcacaagttgcacctgggaccacggaggcacagtggcgcagtggcatagtgaaatgagactgggaattgtccagatttcttggctggtgccaggtctgtaagatctcaaatgataagaagacagaaggcagaagtataacctgcttacagcacacacaagggccaaaaggaaaggccaaagaggaagaaaagctatgacctgcgaccaaccaggtgcccatcttctgcttgtttcttttaatcagactgtgtgtgtcatatttcctgggctcactgaagtcatgagccctgccaaaaaagactggaatgttaccaatctgaagcagtgcaaagagcagaagctggcctagccagataaaaagagggccatttctccatcaacagggtatctttaattgacaccacttcagccaagctatcaaggtcactggaaagaagaagcagaagcaagagacctggcagatgcacccttcacacctacagccaccaaagactctccctcctatccctgctctcctgaattc

SEQ ID NO: 201142 - DNA, 1000 bp, Homo Sapiens
aaggaaaaaaaaaaacagcaacgcacaggttagaaagaagtctctaacagtgctatccattagaattttctgtgacgatgaaaatattctacatctgcagtaatacagtggcctctagccacatgcagctaatgggcacttgaaatatggctagcataactaagaaacttaatttttaagtaatttaaatttaaatagagtttgtggctaccctattagacagcacaggcttataattaactaaatccctgaaaaatgaaactattgtttatgatcagttaaatatggcaattatcttgcggccagcaggagtctagaattatttttatctaatggttatctgatgatctttaaaaatcattactaaatcagccatgaaaaagagcttggactacaaataaataaaaggagctttgacttcctggtcaaagatggccagaaatggtaagaatcccagggcagaaaagacaagcccgaccctgagtcctattgttactgttctgccatcttacccagctttctcaggaattagacatttaaagaggactggtattttagccagggcagttcaacatgaccccaactttctacagaataagtagaaccaagcagaaatgaaaagaaagatcttgctaactttctatggaaagagtggggttattttaaactatcactacaccttaactaaataacctactggatatacactctgttgagaccatgagccccttatgggggacatataaatatttaattggggttttatctcttttttattggtataccaacaattttttaatcatacagttattatgccttatgtgtggtcccgaatacttttattcatttaagtttcacaaacactgaggtaggtggagaagaaattattatcctcattttatagattaaaagaaaggcttgaagttaagtgatttgccaaaggtgacccgaacatcagtcctctgattgctattccacatctctttcttcagagtattta

SEQ ID NO: 201143 - DNA, 1000 bp, Homo Sapiens
ttaagtatttattgagtctacttactgtatgcctgactatataccatggaagaaagatacaaaagttaaagatacacaagctactccagaggagcttagaggaaagtttataaagtcactcttttaacaaatatttactaagaacattcaaaatgtaaagtatcttctatccagttgtttcttcaatgaccacaattagttgaggtagcaaatagtttatataagatacgaggtttgagaattacaaataagaaatctgaaaagatggtatcactataagctgaaattatctgagaaagggtgagtagaagtgggttcttaagcaggccttgaaaaaatagaaggtatttgaggtggtgggggtaaggaaaactctgcctgggaaagaggcagggaaccacctaaaacaggaatagagagggaggaaaacatgtcatatacatagcttcaggaggggatggtttaatttatcaaaaaaaggaggtgatgagaatacttggtacatgtgatacctcttccactaggaaagttttaacgacatgcccacatggaatttggtcattctcttctcttgctctcatctcaccttatccgtacacctggcaaatacctgcaacattctattacacttattggtttgtttgcatgtaaactctactgggctgtacatttcttgagaatgaaaaatatttaatttctctctatatcatgagtgtattaaagtgcctgatacatgaaatgcttgctgaataaatgaaaaaaggtaataaataaaagaatgtataagaagctttcaggaatattaacgtaactacctaattaaagataaatcagaaataaatgagaccaaaggccactagtggaaaatgttatactggagttaggagaaacagtagttatgagaacagaggtaaagccacgagacactaggtagaaaatacgaagggtttgatgaagtttgggtgggataaagtatttaattttttttttttgagatgga

SEQ ID NO: 201144 - DNA, 1000 bp, Homo Sapiens
aaaacagagacctcaggacttctactgtgttgacattgttttaagcaaggtgggaaaagagaacagataagcaagtcgttctactggctccactttcccaccacctaagtcaattcagagtatttcccgaacattttttacccatagattcagattacccctaagacagatggttatggtttattccgttttgtgcacacaggggtaaaagtcacttaaaattggactcaaattacttcaaagtttgatacctgccaatcaccatttcatcttgggtatacaaaaccatactgcataagctccaattgcctgattctaattttcaatgttttcccctttttaggtaaataccatcttcagtttttttttccttttttttttaatgagcagtttaatggaaaataattgctccaggtacaggtcttctaggcacattttgtctctgcagctattgttttaattagtgggcctgcttgttcgctgtccctttgttgtggcccgctctggggcaggggtgcccggggagggttcctcttgtggaacgcaggcgttaatgagccatttcagtaataagagtcctgccttgagccagaagtcagagcacccaagacaccccaagcagcagaaatgctcatgaatttctgaaactgcctttctaatttgcatttaaacataacttccaaagaacaatttcacctgtgattttctgagctggaaaggtaagggactttagatgttgaatatgtacaaattatgttaatataacggaggtaaatgaaagtcaaatgcattgtcatgtaaaatgtagacgtcttttctaaatgtctattttctaccaaggcttgttttattttccccctaagtgaaatgtgataattttttttaattaagtgaatctctataataattcctatttgattgaaactgattattcctcattttcctgtaacctagacttcggaaacctcagcaagaggaggcttagttggtgcctggtgac

SEQ ID NO: 201145 - DNA, 1000 bp, Homo Sapiens
gcaccatttattaaatagggaatcctttccccattgcttgtttttctcaggtttgtcaaagatcagatggtcgtagacatgcggcattatttctgagggctctgttctgttccattggtctatatctctattttggtaccagtaccatgctgttttgattactgtagccttgtagtatagtttgaagtcaggtagtgggatgcctccagctttgttcttttggcttaggattgacttggcaatgcaggctcttttttggttccatatgaactttaaagtagttttttccaattgtgtgaagaaactcattcgtagcttgaaggggatggcattgaatctataaattaccttgggcagtatggccattttcatgatattgattcttcctacccatgagcatggaatgttcttccatttgtttgtatcctcttttatttccttgaacagtggtttgtagttctccttgaagaggtccttcacatcccttgtaagttggattcctaggtattttattctctttgaagcaattgtgaatgggagttcattcatgatttggctctctgtttgtctgttattggtgtataagaatgcttgtgatttttgcacattggttttgtatcctgagactttgttgaagttgcttatcagcttaatgagattttgggctgagatgatggggttttctagatatacaaccatgtcatctgcaacagggacaatttgacttcctcttttcctaattgaataccctttatttccttctcccggggagggaggctttctatgcttctcaagtcatgctgcgttggtgaattttaggtgtcaatttcactgggttaaggtatacctagataactgggtgtatttgtgcgggtgtttccaaagaaggttggcatatgagttggtggactgagtggggaacattcttcttcattgtgtgtgagcatcatgcaattggctaggtacaagacagaataaaacagcagaggaaaggtgaatt

SEQ ID NO: 201146 - DNA, 1000 bp, Homo Sapiens
ttccaaagtgaaccaaggtctccacagcccccattcttctggcaagctggaggaagtgaaaatgttaggaggggttgttctcaaactgtctcttggattgaaagaaatggctgggaaaattggcccttggtttactctttggtcacatctcccaattcttcccttccttgtcaacagctttttagagcaaacagggacaggccagtgtgtgccttctggtcagctcctctgaggaatccaaatatgcagaggaaggtgggaggcagcaagaggcagctggagccgtggtgggccgtctgtcatcctgttcacctcccactcttcccactctgctctggcttcctgctgctctatagtcagcatagcctccaggttccgtggaacatgtaccctctggaaaatatctataatttgctaaccagccggggacttatttttttaagtccaggagctggaaatgataaaacactcctcagctcgctcctctcagagttaaactgtttttgcacttaagtttttcatgtttggtcttttgatttatttcctttctctggaggaaacactcactcctaagcaaaggtaagcaggcaggtcctaaatacttcttcctgagtggcagacagggtttttcaggctggagaaccgttttcagactggaatctgagttctgtctagggagcagaggcatgccttaggcaacagcgtgtaaccctttctatctgagatcaaggactgtcaatgacttctagaatattcaagggttccttcaaaagaaaaagttctggagttctatcagatcttcccttttcctcttttcagttctctttctctcttcccttcccctcacctgtagtgataagataatgcatataagattgttttgttaaccatagtcactccacaaccttagaaagtaatgctggtttttgtgaatttttttctgaccagattccttgggtcttcctaaaaggtaccagactggaaatgcagtgaatctttg

SEQ ID NO: 201147 - DNA, 1000 bp, Homo Sapiens
tgtttttatgtatttgatacccacaaaaaccctacaaagtagatacaatttctcagacacaaggaaattacaaaatggagagctgaagtaaattcctaataaataatatctggcttctaacctgacaattttaaccactaaaaaaccccacatatctagaatagtgtacatggcacatgtaccaaaaatgttagtgaatgaatgagtaatctgaaatgttaatgaaaatatacattaaaaacatactagttagatgtcccccaaactattcaaataagggtagcttatttaattcaagacagaatagtcatcatgaatctaagttactgactatatgattaggctcttttctctagctgtgtttctcttctgtaaaatgtgtgtgaactttcaactacaagctcaagagtttgttaaagtggtgattgctttgaactttaaatactgagttccttatgttatagaatgagaaaacatcaatttgtagaataaaatgacagatgtgtgtgtataaatttctagcgaaatatttgcaagtgttgcgttacaaactcaaagaatttaatactcatctaaaagaaatcttggtcattaaagaaacaaacagagtcctggaggagaattaggcagaaacacattgaacagaatttcaggaagacctgattatatgatgttttcttttttttttttttccctgaaagaacagatgttaaaaaaaaatgcctagtagctatgattaactattacccaaagttaaagaattattcaatattaaatttctaggataactgattaagcctaatgttaagtcattggccctgtttgttctgcgccaaaagaatctgtactcaaatgagacgccatagacatgataacagtcatttgtcacaatatttattgttttcataagccctgaaaaagtgcatcagatatttttattgaatagtgggagggagaggatttctcaaagaaccaaggatattatagtagtgaactaaag

SEQ ID NO: 201148 - DNA, 1000 bp, Homo Sapiens
atgccacagggccctgggattgggagtccgcagcccggccagttctccagccaaagcaaacagggtaatgctgctgaccggaccatcccagctgataaaggctgctctgtatctcattaattaagatctggaagcagagcagagcccatgagaggctggctgggggcgggggacgacatggaaattcccaggactgacccggcagctcccaaacacagatctccggggctgctgcaggctggccccagactgaaggtggggacacaacccgggcttcttcctgtctgcactgcccaagggcagggagacagcgctggcctcaagggactgaccctgagcagccgtgagggcagatgcaggtctgagctgtgtccctctggggtccccctagacatctgggacttcttcccagccattccaggggtctggcatcatcttttcagaaggccactaaaaggatcccctagggtcattctcagagcccgactagaggcagcagcaggcggcggatctcatggagccccaccaaccccctagctcccacccagagacctctccctccttctgaacttctcagatgggactccacctcctcctggaggctctgtgctggtccccatggattctgtctgcaccccacacacactcctgggcaggccaggtctacacagctttgctctctgggcccagcccaccacgtaagggcaggggccacctagagcccatgccagcgccagcctgagaggaggcagcgtgtcccctcacggggtcgtgccctccgactccaaccccctgcctggagagccaccgattcagtttcacctatgctgtcacctccccttcccgggctcagccacaggcgccccatgtgccctcttcgggcatcacataaacattcccaggtgacggccacagcccagctgtggtgaggggactggacagtcacagtggggctggtccctccctcttgggtccagaccttggagacggtgggggcagc

SEQ ID NO: 201149 - DNA, 1000 bp, Homo Sapiens
ccagtgagaagccaaaggagcaggtacccatatagaagacagtctggctgcttttctaccgcctgctagagactcattatagctttggggctctctgcaccctccccagcatgagggtagtagtggtcggcctgtggcagcagcaattgcagtgggcccatgggtcacttctgggagctgtcccagagaaatgaaaagccatgactgacaggagtgctaaaataggggtggtatggctgtgctgtagtcccaggcctgtgggctttgcctggttgaggtgcagcacaggtgaagcctgcagtgcctccacaagttgccaccatggatgcggcccctgtcatgagggccatgaaagagcctggcctcccttgttgatgggcctatagcagctaggaccagggtactcagggatccaaggccctttgggctccacatgggccctgagctgtggctatgcccagactccaagtagctccctgtgtctgtctggaggcctccgggctggcaggggatggtcagtggggattgtctgtgcccaggattgtaaaggtctgtggcaggagtgtaggtccctgggggctcttgctcactcaccccttccccatgttggggagccttccttggcttctttccaaacccaggtgggcagctgtcttgccttgctcctgtctgctctctgtgggtcactgttgcttccttgataaaacccaacatggagcactggaaaacccacattagagctattgtttacttgccattctgtctcctctctgtgagagtggtacacactagttcctcctagtcagccatcttggaccctccatttctcttttttaatggccatttatcttttctacagtgttaaactatttttctaagggattaggatatgctacataattagaaccattttatgatgagaaatatttattttgttggaaactatgtgagtttaggtaattaaatagaaatttaaaagaaatattctgtttaaattaat

SEQ ID NO: 201150 - DNA, 1000 bp, Homo Sapiens
gagggatatacttcccctccctgaggaaagagttcaaataaggccaggtagccacaaaacccacgttttggaaagatgaagccatttcttcttctaaagtctcccccttctgcccccaaacatacacacactgcctggctccagcaccatcccacttgaagatctgccctagtttaacgttctgtggctacggacttatgacctcatgtgacatcaactctgagccaaccaacctggccagtgctccacaattctacaactcctgacctatgacaaaagtaggatcacaccgtagttccagggatagtttttaaaagacacaaataatgtagttatatttcacttttataaaaagaaatagcacataaattttgaattttttttttttagatctacaagctccagctttgttactttaggcaaattacataatctcgctttacctcaacctcctaaacctgtgtatgacattttacatggtcacaaggcttaaaccacagcactcatcaactctgggcccaggccccaggatattcccagaagccccaagtagtcctggctgtttgcaacagtcacctggatgccaagctggggctctcccgccctgagccctgccgctggactgcactgtgcttctcctcttcagtgcgcccatcgtcgttctccatggcgatccgtaggcggtactgggggcttgattcaatctctcgagccaactgggccgcacgcagctctcgctgacgaaactcttctgagttgtccttttctaagggcaccctgagacagcacccacagaccaccaccatcccagtgccaggggacaaaagaggaaaaaaggaaaaacatttcaacaagtccaatcaccagttcaggcatggaagtatttaatcccttcaacatctgggtaacgggcaccgactgcatcccaggtagagcaccaaggcttatctgggaatgtgagaagcacttaagacgcttaaaacctttgagggaagaattc

SEQ ID NO: 201151 - DNA, 1000 bp, Homo Sapiens
tgcctcagcctttcaactagttgggagtacaggtgcatgccactgcttctggccttttttttttttttaaatttttcatagagatgaggttttagtatgttgtccaggctagtctcatactcctgagctcaagtgatcttcccatcttgacctcccaaagtgctaggattacaggtgtgagccactgcacctggccccagaagataattttttatttgtcttttactctatgttcaaattcttcaattttttggtagactctactttttcaatttgtagagcttgcatgaatagtgttttccttctcttgaagtttagagagatcatgtactgtaattcctgagccaccttgctgtaacaaattttccagttcttcaatcttttcttcctaattgcttagattttcttgatgcttacaacttatttccctcaatttctgttgatgaacattctgtaatactgataattcaagctgatggtcatcagtatcctgacttcttttttgtttgagctccttgatgatattaatatttggtgtttgtagtttgtagatttcattttcatcaaaactagttgttcctcctattttataagtctgagcaatacatttccaatggccaactggagactcaagttttagaacttcattggactatctgtttatttcttgttatgatgaaattatgtcataaaaacccatgtaagcgtcgtggaacactgaagcatgatgggtaccacatggaatggaggggatgcagtgtggatgggaacctccggccttccctgaatgtgctgactccagggctggctgccggtcctgcaaccgatcctgtagtgcttgctttcttgttttaggaaggctcatttctacctctttctgttgtaattgatgtcgataacttttagtttgctgccctatctgaagctctgatgcttcctaggtctctcctaggtcactaaaaagatcttgaagtccctcattctttgatattaagaattc

SEQ ID NO: 201152 - DNA, 1000 bp, Homo Sapiens
caatagatgtctttagctataaaaagataatttaaaaactgtaatcaactttatgctcatatattcaacaagtttgaagaaatgggctaattcctcaaaaaccacaaagtactaaaacttagccaaggtgaaacagataatctgaatagctgtgtagatatttctaagaattggatttataataaaaatactccccaaaaagaaatctccaggtccagagggtttcatccaagaattttaccaaacattcaaataaaaattaatgccaattctatgtgtatcttccagaaaataggagagaagagaaaattaggaagttcccaattctctttatgaagccgtcattactctgatacccaaaccatctaaagaaagtatgcaaaaagaaagctacagatcaatatctctcatgaactttggatgtaaaaatcaccaatcaaatgtaattaatcaaaatccaacaatgtataaaaagactaaagcaccatgaccaagtgaaatttatgccaggtagacaaagctgattcaatatttgaaaagaaattaataaaatttatcatagcaacaggctaaagaagagaaaccatataatcatagcagttggcaacaaaaaattatttaacaaaattcaacacccattaatgatgaaaatagaaaatcctctcaaatacactaggaatagagggagacttcctcaacctcataaagaacatctattaaaaaactacatcagacattgtatttcatgataaagacagaatacattgccttatacaatccaaaacaaggcgaagatttctactttcatcagtcttattaaacacagtactagaagttctagccactgcaataaggcaggaaaagggaataaaggtcatgctcattggaaaataagaaatgaaactgtctccttttttaggcagcatgattatttaaatagaaaatcccccaaaaaatctatgaaaaataggttgtcctccttctgttggctacattgatc

SEQ ID NO: 201153 - DNA, 1000 bp, Homo Sapiens
aaggaaaagaaaaaaaataaatgtaatatttgcttcaagtctgaaatgtagttattattatcttctaaagatacactgtatgctgtttactagtttagtttccttagttaaaattatgatgccaatgacaacattattattagctaaatgttaaatgttctcaagaaccaaaggacacctcagtaaatcacttccttcaaaagtaaaataaaataggcctaggcactttttttttttttttttgatacggagtctccctctgttgcctaagctggagtgcagtggtgcgatctcggctcactgtaacctctgactcatgggttcaaggattctcttgcctcagccttccaagtagccaggattacaggcatgcgtcaccatgcctggctaatttttttttttttttttttgtatctttagtagagatggagtttcaccatgttggccaggctggtctcgaactcctgacctcaggtaatcccccccaccttgacctccccaaagtgctggaatagcaggcgtggggaggcctagccctaggcattttttacaagttcattttccctttcccccttgaaaatggctttagggtttttgttttcttcactctcgacttaggtattatggatcccaccaagattccaccacatggttttaaacatcagcatgcttaagagaacagcttgctcatgtaacaccctggtcttgtgtgatgcccttcaaaactgtctggctagggcacaatggctcacgcctgtaatcccagcactttgggatgccgaggcgggcagatcacctgaggtcaggagttcgagaccagcctgaccaacacggagaagccctgtctctactaaaaatacaaaattagccaggtgtggtggtgcatgcctgtaatccaagctacttgggaggctgaggcaggagaatcacttgaacccaggaggcagaggttgcagtgagccgagatcatgccattgcactccatcctgggcaacaagag

SEQ ID NO: 201154 - DNA, 1000 bp, Homo Sapiens
ctcatgatctgcccgcctcggcctcccaaagtgctgggatcacaggcatgagccaccgcacccggccatgcccagataatttttaaatttttttttttgtagagatgaggtgtccctgtgttgcccaggctggtcttgaactcctggcctccagcggcctcccacctcagcctcccaaagtgctgggattacaggcccgagcctctgcgtccagccgatccagcatgctttgaaggcacaaatcaggggcactttcatgctggcccagcagagccagtgggtcccgcccaatgcctgggctacttcctgctgtgcctgggggcacctggggctgtcctgcctcactggccaaggcccggctctgtccctgggctctggccactgttctgccatcccaggctgggtacccatgggcagcccgacagtatctgttgcacagagcagaccccaggccccatgggtgcctgacacgaagccccacagcgtgtgcccgcgtcccccgaggtcagccggcggctcctgcccttccctctgacctctggttgggggccggccatttttctgcttgttcctctagctctgctactgggcacatggtccgtgctgggtaggctgcaggccagggtgagttgctgacccgctgaccctggctgtgcacctgccctcctgccctgggtggctgctgctggcccaggggtgacttgggggctttcaagcttctgcccgtgctggccgcacgaccccacgtcccaccctgggtagggacttgtgattctcagagctggggtccgttgctttcctaaggacctccggccctggtcgtggtctaaatgctcactcctgttgttggagaggccagccgggtgacagggaaaagcccagagccccgggcttcccgtgaggatctgggctcagcatgggctgtggggctgcagaggcctggccttgcctgctgagggacacccgctggtagtgcctgcagaggggggaggaggaattc

SEQ ID NO: 201155 - DNA, 1000 bp, Homo Sapiens
gggaggagggcgtgaagggctgcttgcggtagttgtgtagcagcagcacaatggccgcagacaaggaaaacagtttctaggaattcctcgtatataattttatatttttgacaagattaatgacccatgctcccttcctctccatttctttttttggaattctgttggtatgtagttactatattttattaaaggaaattagccttatctcttattatattttattaaagaaaattattatattattcctttatatttttattaaaggattttattattattaaaggaaattagccttatctcttattatattttttatgaccttcaaagtagtgtctctgcttaaaagtgtaccctggccgggcgtggtggctcacacctgtaattccagcactttgggaggccgaggcgggtggatcacgaggtcaggagatcgagaccatcctggctaacacggtgaaaccccgtctgtactaaaaatacaaaaaattagcagggcatagtggcgggcgcctgtagtcccagctactcaggaggctcaggcaggagaatggcgtgaacccgggagacggagcttgcggtgagctgagatcgcaccgctgcactccagcctgggcgacagagcaagactccgtctcaaaaaaaaaaaaagtataccctgaggcacacatcaagcgacatgtagagttcataaattctggccaaatggtcatacctcaaacctcatcagcagtaaggctctttacttgcactgacaaatatgaacgctggggaatttggaaatgatatataatatataatattatatatataataaatatataatatatataatacatatataatattatatatgtaatagatatacaatatataatatataatagatatataatattatatataatagatatataatattatatataatagatatataatatataactttccttgtgattttcctcttaatttttttctagctgatccatatgaattc

SEQ ID NO: 201156 - DNA, 1000 bp, Homo Sapiens
cagtattccagggagggccagttacagaatttttgaggccagtgtaaaatgagattgtgggccaccttactcaaaaattatcaagaacttcaagatggagactgaagaggattaaagcaagagtgggcccttgagcacggggccctggtcaagggcacaggtcacatgtccatgaagccatcccaattccagggctggggctggtgatctgatggtctctggcctaattcagatgcagtttattgagattgaaaacaaatcttggggggaacataataagatcaaatcgagggatggaagttacatcaataatacctagttattgagtacctgctgtatgtcaggctttcttctaaatgccttatatatgttccctaattcaaactttatgacaactaaatggggtaggtactaccatcatcatcattatctgccagcttaagacactgaggcactgaaaggttgagtgatagaaccattgtgaccattagttaccggaaaggctaagtaatttgctcaaggacatcaagcttcctaagtgaaagagctgggatttgaatgtagggctagggcccatgcccctaatcatttaacagtgctgcaaacttagtgggcaatttcatccaagggaagcttctttacaaggaatcatcttcctgcagcaaaggaggttctaagtagaggtgttcagagagccatggctggcaacatttgaatataggcaggatcccctttacaaaggggaagccagcattgctatggagttggatgaaataacaacaatcctcataagacctaccactttctcagtatttgtgataagtcagcaactatgctaagcattttataagcacttttagagcccagaatattagtgccttgtcctgttttacggaaaaggaaacaagcccaaaggcacaaaacttagagctgtcattccctagagtcaaggagccaggatgcaaccccagatcagtcttcctccaaagcccttgctttc

SEQ ID NO: 201157 - DNA, 1000 bp, Homo Sapiens
gcaaattgcaattacctttcgtcatctttttttggctttactcttcaggtgctagtttctgcatctccactcaattctgcatcagtagaatgcctttgcttaaaacttttaaatttgcccatactttttttaagctaaacaaatttaattgcattataattaaaatcagtatttcgatctacctcttactgtctgcagaaaatatttgttttttgttttgttttgttttgtttcgcccggcctgcagaaaagatttgaataggccgggtgcggtggctcatgcctgtagtcctggcactttgggaggctgaggtgggcagatcacttgtggtcaggagttcgaaactagcctggccaacatggtgaaaccccatttgtactaaaaatacaaaacaattagccggggatggtggctttaacccaggaggcggaggttgcagtgaggcgagattgtgccactgcactccggcctgggtgatagagcaagaacctgtctcaaaaaaaaaaaaaaaaaaatttaggattttactctgtagtctttattccttcaggactggcttcaagaactgagttcctagagtcaggataaccatcgtgctcattccctctcagctgagtgcttgaggttcaccactctgtaccccacaaaccaacacagggccagcatggagcagacatgaaaaacaaatattgagttgaatagcaccaaatgaaactgaacttcaagctgaaggtccaggaccctcgctcttctccagtgactcacactgcaaaactttctctcttttctttttgtcctttaccatcgaatctcccaagacctgatgattcttccctctctggccctctaaatgcatcttctcctctgtgctccctgcatttttgtgtaacccttgtaaacccaagtccagatttctgcccctgttcctgactggtctctgggctctccctgaccctgtggacagctaagttaatgccattcaagcttcccaaacaggaa

SEQ ID NO: 201158 - DNA, 1000 bp, Homo Sapiens
tatttggcaagactcccatgtcatctgctcctctttacttcgggtccctcttggcactggaaatactaagtgaacccagcagttgcacaggattctaggaatttctcctttccaacttcctgaactggttttctaattcacctcagaggtaccttaacaaatcatgttccaaggccgggcacagtggctcacgcctgtaatcccagcactttgggaggtcgaggcaggaggacctcctgagcccaggagttcaagaccagcctgggcaacatagtgagaccgtgtctctacaaaaaataaaagaattatcctggtgtggtggtgtgtgccactgcactccagcctggatgaaagtgagagatctctttcgaaaaactcacgctccacacaatcaggaggtctgccatccacagactccagacagatagttccatcagccagcaggagcggcatgggcaacgtcagtagcatgcacatcaggttagcttctctgaggtcacaaagttgcctggaagtggggaatccatgagggccaggccctccacaggaggaggacttccctctccagtcaccggcctccctgatgtggttccctcctctcagcccacatgctcctgccgaggtaacatgtccccccactccatgttagaaaaccataaagcccccaagagacgtttctaccaatcatctaaatattgagtttcaccttataaaatttataaaatgtaaagaacacttggaacagcccagttttaatgcctccagcttttgttttccaaagaacaattggtagacttggccccgaggggagcagagcccggctctcagacaacgagcctcaccagcaattctgtatcttcgaggcggcagaggtttttgtgatcttgtgtcatttctaaacacgacagtgtagatgggatcctcttcattttgcaaatgagaaaatggaaaaacccgagggacaaagggcctctctcaaggtgccatggtgagaaggagg

SEQ ID NO: 201159 - DNA, 1000 bp, Homo Sapiens
ctttccatgtgagtgaggcccttctgatgggagtgctgaggagaggaagaactagagattggacactggagtggtgatgatgggagagggtaaagtggttaaggaagagtgagacgtggaggaaaaggccaacagtcctaccttgagaggagtgggaatgtggtgccccccactggcaagatggggatacaagaggaagagcacagagtacctgaacaggtgctgcaaaagacatcatagagatcaagagggggtcattaaggcagaaggaagttaagtgtctgatttctgtcagcaagataaggtatgagaaatgtttgaatttggcaacaagggagtttatattgcctggtatatgtgcataaagaaagaatatcttagtatttctactgtcagcaatttttttttttttaaacgcagtctcgttcttgtcacccaagctagagtgcagtggcgcgatcttggctcactgcaacctctgcttctcgagttcaaccgattctcatacttcagcttcccaagtagctgggattacaggtgcccaccactatgcccggctaatttttatatttttagtagagacagggtttcactatgttggccaggctgatctcaaactcccgacctcaggtgacctgcccgcctcggcctcccaaagtgctggcattacaggtgtaagccaccgcgcctggccagcaattctgagtagattgaaattcatcaattgaaatcaacatcttatcaaattatgagccaaactgaattaaaatcaggaataatctgtgaatttttaatttatgattttggcagttagaccccataagctttgaaaagtattatagttattaaacatgattattcattttcttttttttattttttattttagacggagtctcgctctgtctcccaggctggagggcagtggtgcgacctcggctcactgcaagctccgcctcccgggttcacgccattctcctgcctcagcctcctgagtagc

SEQ ID NO: 201160 - DNA, 1000 bp, Homo Sapiens
cccgctcagtgggcttcatgtctgagtcatatttgcctgctttcctttgaggtggtgggcgccaaggttgtgacaaatgcccggagtcctggagctcgctgttacggttttgtcacgatgtccacagcagaagaggccacaaaatgcattaaccacctgcacaagacggagctccacggaaagatgatctccgtggagaaagtgagtggccgttttcttcccaggatatagcccacattaggaaatgggggtaatacttgattctctttttcaggccaaaaatgaacctgtgggaaagaaaacctctgacaaaagagacagtgacgggaaaaaggagaagtcgagcaacagtgacaggtacccctccttcctggctaaattaaaggggcagggtgttttttgttgttgttgttttgtttttgagatggagtcgcgctctgtcgcccagactggagtgcagtggtgtgatctcggctcacctcaactccacctcctgggttcaagcaattctcctgcctcagcctcctgagtatctgggactaaggtgtgcaccaccacacccggctaatttttgtattttcagtagagatggggtttcaccatattggccaggctggtcttgaactcctgaccttgtgatccgcctgcctcggcctcccaaagtgctcggattacaggcgtgagccaccatgcctggccggggcagggtgttttaaacagaatctcactctgttgcccaggctggtgtgcagtggcaagatctcttttcattgaacctccacctccctggctcaaccaattctcatgcctcagcctcccgatttgcttggattatagccatgcccatttgtggttttagtagagatggggtttcaccatgttggccaggctggtctcgaactcccggtctcatgtgatccgcccgcctcatccccccaaagtgctgggaatacaggcatgagccaccacgcccagccaacatgtctgttttttatagatc

SEQ ID NO: 201161 - DNA, 1000 bp, Homo Sapiens
cggggcaggtgctggctctggcaccgcaggaagcacatctggtccagggcatctcagaacctgaggctctggggtgtagaatggactttgagtttctggaagagaccttaggaaacgttgtgtctgcatttccaggtggccggatggtggtgggggcgcctcactcctcaccgtgtgctgcatcctcagcctctgcctgcatctctcgagtctgctctgggtcagcactgggggtgaggaggtgatgaggggcagcggcaggggccgggggtcaagagcaccagaagggaggccaggtcaggtccctgcagcccaggtgagatgagggcctcgtggtggccttgagggctggaggtgagggaagggccctgagccgggtgccgcagccgatgccctgtcctttgccgtgacagtctctgtgcagtgcaggcagcccccaccgaatccaggtacagtgctcagtcacaaccgtagggagagtggtcaaatcggagcgggggcgggggccgtgagtcaggctgaaaagaagaagctcagagcaggaagggcagaagggccgggaagggcaggtctgaagctcggagtgggaagggcagaggtggtgaagggcgagtccggagcatcctcgagttgcccaggtgctcggagagtgaggaaccccccagggagggaggagcccccaacccacagggctgcagccttggacatggccaagacccgcgtctaggaagaatggggtcctcagagctcaggtgggttactcatccgcccgctctgtgcccagggccctcccccaccaccgtcagcgagtccgcacacaggtgcccggggttgtcacctgagggcggcgcctgcctcctctcctgctcccacagcagcccagggagcagggccccgtgtgagctcccggagctgcggcatcaaaacaccacaaatgacggtgggggcggggacggggcgggggtggaggcaggagctgggggccaaagccgtggaattc

SEQ ID NO: 201162 - DNA, 1000 bp, Homo Sapiens
ccaaatggataaacaaattatggcatacttatacaatggaatactatacagtgatcaaaattaacaaagaagactgacatgtttacaacagtataatacaacaaaggaaatgaacaaatttgagctacatagataataatactcacagatgtgaaaggaattatcaagatggaaaaatacatttggaatgatcttttacataaagtttggaaaaaaaatttttaatacattgtaatttgttacattggtgatgaaactctacagtgaaatatatgaatgatcatcataacaattgggataatcaggagggaggaaataaaagggaaatatcaacaagaagacgtatattgggagtatctggattgctggcaaattctattttctgaccaaggtttggtaacatcaatgttaatgttataattttttcttactgtttttaggttttattactctctgtatgttatattccccaataaaaaaatgttaaaaaagcaaaaacataagtacatttctacgtataaattcagggtgatacagcatattctcatagataccattgtaattagagtttttgctgaataaaggagaatagagcattatggtactaagaaatacaagttaaaatttaaaactttttttattttgagacagggtcttgctctgttgtccaggctggagtgcacaagtgcaatcgcggctcaatgcaacctctgccacccgggctgaagtgattctctcagttcagcctccagagtagctaggacaacaggcgtgcaccaccacgccctgctaattttttctatttttggtagagatgggattttgccatgttgcccaagctggtcttgaactcctgtgctcaggcaatccacctgcctcagcctcctaaaatggtgggattacagttatgagccaccacacctggcccaaaagttttcttaaattaattaaaaaagaagataagcaagaactgtaaatccaccttcttaatgctaatatg

SEQ ID NO: 201163 - DNA, 1000 bp, Homo Sapiens
ggcagatcacttgaggtcaagagttcaagaccagcctggctaacgtgttgaaaccctgtctctactaaaaatacaaaaattagccgggcatggtggtgcacacctgtaataccagctacgcaggaggccggggccctagaatcacctgaaccagggaggcagtggttgcagtgagctgagatggtgccgctgtactccagcctgggctacagagcgagactccatctcaaaacataacataacaaaacaaaacaaaatgttggctgggcacattggctcacgcctgtaatactagcactttgggaggctgaggcaggtggatcacgaggtcaagagatcgagaccatcctggccaacatggtgaaaccccgtctctattaaaaatacaaaaattaactgggcgtggtggtggacgcctgtaatcccagctactcgggtggctgagacaggagaatcgcttgaacccaggagatggaggttgcagtgagccgagatcatgtcactgcactccagcctgggtgacagagcaagagtccgtctcaaaaaaaaagaaaaaaaaaaagagtgttatataaatggaatcagacggtgtgtggccttttgagattggctttttccactcagcaaaaagccctgagacccatccacattgttgcatggatcaatcgctcattaccttttattgctgagttacttcactgaatggatagaccatcatgtgtttatctgtttacttgttgagggacatttggcttgtttccagtttttggcttgtgatggttaattttatgtgtcaacttcactgggctatggggtgccctgacagttgatcaaacagtattctgggtgtttctgtgagggtgattttgggtgagtttaacatctaagtcaatagactgaataaagccgactgccctccctaaggtgggtgggcctcatccaatcagttgaaggcctgaatagaacaaatagactatctttcctgaataacagagaattc

SEQ ID NO: 201164 - DNA, 1000 bp, Homo Sapiens
cactcatgcttaccgggactggggcagctcactaggattctatcctttccaatcggcatcagccagctcttgtcccctgataagtgaggacagcctgaccctggcctcaaatgcagccatccctgagttcatgcgatgctgacgggaccccagcacacttccctgcctcctttgagatctgcgagcccttgctgcagttcagattcaacaaggccctctgcccaccctctcactaggcctcacccaacaccagtggaactggagcctctggctgggcacagtggctcactttgggaggctgaggcaggaaggctgctggaaactgagagttcaagaccagcctgggcaacatagtgagaccctgtctctacaaatacaaaataaaataattagctgggtgtgttggtgtgtgcctgtggtcccagctactcgggaggctgaggtgggaagatccctgagcctggagggtcgaggttgcagtgagcggagatcgcacctctgcactcaatcctgggtgacaaaatgaaaccctgcctcaaaaataaaaataaaaataaaaataaaataaataaaaaagagcatctggacagagcctagggggctgcagtgttttaaaagggtcctggaagagtccaagggcagacagagctatatcagacccttacaacgaaacccacagagcaggcaggcaggcaggagtccttcctgtagatgagcctgaccactgcagtgagtgcttcatgcacagaagacccacccagtccacattccagggtgacctctcccagctgctgcaggagcccctggctgcccagagagcctgctggtgcccagtctctggatggcagggttggccagcagggaccctagcacctcagtgatctcactgatgttcagagcagcctggcagggcccagctccagtccctccaccattctagttcccacctctttcccgggatgaggattctctcttcagcggtgatcttgaggaagtgcta

SEQ ID NO: 201165 - DNA, 1000 bp, Homo Sapiens
gtgaggggcacaatcttggctcactgcaacctttcgcctcccgggttcaagtgattctcctgcttcatcctccccagtagctggggttacaggcatgtgccaccatgcccagctaatttttgtatttctagtagagacatggtttctccatgttgtccaggctgatctcgaactcctgacctcatgggacttcagtctagctccaaatctagtgctcttgcagtcaattcatattttcttctgttactgaccatatgaaataattcctctatgaaatttatgtgcaatttttataaaagtctaaatgtattttatggctaaccctcaactatggagcatattaacattaaaatgagttcttgaaataagagttgattaacatgggaaaatatccatctctttcatcttgaacaaagtagttttgttttaaaacttatacttcctgctaatgtacatctggaatgtgtaggataaaagattaaactttctaaatattttacaaagttatattctccctatgtgatatatattgttctgtgggagactaagccttaattgaagtatttctgcaaggttactataagcatttctcataccactaggacaataaataatgggagaacccaaaacattgtaattttctagtaattcagaggaaataactgaatcctgaaacattgtacaaaagggtacacaatgatacccatttttgcatgttaatgtattattaaatatcagtgggaatagtctgcatgctatttcacatctcaggcacacttaaggaagaccttgtgatgtgcatgttgctcatttaatctagaaaggataccaagattcatttagaacttctttatgcacagtttttttttgagtatgttatgtcctgaggcattaagggtattactaaagcaagcagcgggacttctcagagaaattaaaggtttcatatcaaccacacgttgtcaaaatcttcactttgaataggattaaatgatgtttc

SEQ ID NO: 201166 - DNA, 1000 bp, Homo Sapiens
aaaaatcaaaccacttttagtgtgtttaaaaagtagaaaaatatttattctagaaagatttccttccagaatggttaaatgttttaagtgtaaaataagtgaagaaataaataaatggaaaaataaatattcacttctcctagtgaacagcagaaagaatctctactacacaactaaaatagcactttctaagacactatgactttttgaagggtataggtcctattacctgagagagaaaaaaagcgaggaagacgtgcacatacacatcagaaattctaggtagagtcctactctgatcaagaaatgtgtacactgatattctgcagcacattaagatgtgcattatcccagaggtcatatgaaccataatgactttacaagggacttgagaaattgcaatctttgctatataaattcttagcaagcttagggggctctttcacgctaaaatataaacatgtgctcaggagaaacgtgcctaagtatatttcactgtccccaagaggggttctcttgactctgagcagaataaaacaaaaagcttcagagatgctttaaaataaatcctgctatagcagacagactggcatcttcactacaacttgggcctggtgaactcttataattcaggaagtcctcagagctttggagaagcactctaaaaagacttctgacaggaattccatgttgagcatctgaaatggagagagtgaggagggagggaaaaggaatgattcgaatagagcatcaaatacccaaagcgatgcaaggaaggaaacaaataatcctgcgatggaggcagagtgtaaacaatccggcttaagggcttcaaccatgttgtgatggtgagagagcaatttcccttgaatttctacaggaggagggatacatgatgcatcactcagcagaatcctcagcagctgaaaactgagcagttggcatgaaatcagaaatattatccccacatgagagacaacaagaaagtagcattagaata

SEQ ID NO: 201167 - DNA, 1000 bp, Homo Sapiens
ttgtgatatattattttctcagtaaatagtttctttgggataggcactgtgattaaaaaaataaaagcatcttgagttttctttgaagtgacaaatttgctggaaagatcagtactttctgctgctggagagtatattctgtttataaacatgaatgaggatgtgaataaggctagaagatgacctctgctggaagtttctggtatgatttggaggaaggagcactagtcttccctggtggctgctagcctttcatttagttcaagcctgccagcctctagcttttccttgcaacttgtcttttcatttttcttgtgctattttctgctatgatagcaaactttgcataacaaaatgtgaagttttccatgtgacattaacttagtaaacattttagcaattgactattaaaatgaaatgtgcataaacaatttgccaggttgtatcttatcacaaatatagtcatgtgctgcataacaacattgcagtcaacaacagaacacatatagacagtggtcccgaaagattataatactgtatttttactgtaccttttctgtgttagatatacaaatagttagcattgtgttacaactacataaagtacacaatatggtaacctgctgtacaggtttgttgcctgggagaaacaggctataccatatagccttggtgtgtagtaggctatgctatctaagttcatgtaagtacactccacaatatttgcacagacaaaatcgcctaatgattgtttcctagaatgtgtccccgttgttaagcgacacatgactgcaatgaaattcagtcctggaaggaaaagaagaagtaactggctgttctctttttctccaggaatcgacaaggagaacgttgaactctcccctaccactggccactgtaacagtggacgaactcgccacggatccgcaagccaagtgcagaagcaaagaagcgctggcagtttcaaacgtaatagcattaagaagatcgtgtgaagctt

SEQ ID NO: 201168 - DNA, 1000 bp, Homo Sapiens
tccagcaaactccaacagacctgcagctgagggtcctgactgttagaaggaaaactaacaaacagaaaggacatccacatgaaaaccccatctgtacgtcaccatcatcaaagaccaaaggtagataaaaccacaaagatgggggaaaaacagagcagaaaagctgaaaattctaaaaatcaaagtgcctttccccctccaaaggaacgcagctcctcgccagcaatggaacaaagctggatggagaaagactttgacgagttgagagaagaaggcttcagatgatcaaactactccgagctaaaggaggaagttggaacccattgcaaagaagctaaaaaccttgaaaaaagatcagatgaatagctaactagaataaccagtgtagagaagtccttaaatgacctgatggagctgaaaaccatggcacgagaactacgtgatgaatgcacaagcttcagtagctgattcgatcaactggaagaaagggtatcagtgattgaagatcaaatgaaagaaatgaagggagaagagaagtttagagaaaaaagagtaaaaagaaagaaacaaaccctccaagaaatatcagactatgtgaaaagaccaaatctatgtctgattggtgtacctgaaagtgacagggagaatggaaccaatttggaaaacactctgcaggatattatccaggagaacttccccaacctagcaagacaggccaacattcaaattcaggaaatacagagaatgtcacaaagatactcctcgagaagagcaactccaagacacataattgtcagattcaccaaagttgaaatgaaaaaaaaatattaagggcagccagagagaaaggttgggttacccacaaagggaggcccatcagactaatagctgatctctcagcagaaactctacaagccagaagagaatgggggccaatatccaacattcttaaagaaaagaaatttcaacccagaatttcatatccagccaaactaagctt

SEQ ID NO: 201169 - DNA, 1000 bp, Homo Sapiens
gactccgtctcaaaaaaatatatatatttacgtccaaagcagctttctcaggaagctactgatatatgtataccacttgaaaatgaaacaaaagaataaaacaagaaagagaaagatgtgggttcattccaggaaacaggaagtctcacagggagagaagagaacagcatgctttggaaggcagtgccagggccacagctgtgcagggagctgtccagaccagatgaagtaagagaatgaaggaagggtggtagcaggggtttctctgagaaatgcagctgtttatccaaaatgtttgacatatggaaatcagaccactgcaagttcacatgggagtctaaggagaatcgaacccaagtcatactttttatgtgatttatcataaaaatctgtctgccttatctctaagatttatttttacagatgctctccttaacaactgttacaattctgcaaatgaaagggtctctacctcatctaaataaaaacccaatgcaaagcttggtgctggtggcataggaaaaatttatatgtgtgtgggaggtgtatgtatatagagggtgggcatttaaaagagccaaactttcatattttattacaaggaactcgttgcataataggtaaactagcaattcaagaaacagtaggtacatccttaaagatgtgtcttacaggaacttaaagatgtgtcttatggaactatgaacctgttccatagttcagaacattttatatggatgtaccccccaaatcgccaccatataaagtatattcactgtaattctctagagtagaaagtatcaataatcgatgcactatttgattttcgaccaaataagagagaaaggagatgaaggcaaggattacagcagtagcagctttgatatgcaatatttataccattattccatgcacatgaagagatgcttaaggaataggtttgatcttgtaatcttcggcactcccagtagcactgtagtcctggtggttgcattgagtc

SEQ ID NO: 201170 - DNA, 1000 bp, Homo Sapiens
aatgtccaatgtccaggctgtccagacacactgtgactctgtggggcactcagatctgatatgacctgcatgacagtggctccatgtggcagtgtccagacactgtatgcccagatgtggcagcgtccagacactgtatgcccagatgtggcagcatccgtccagctgtgtggctgccctccaggtcttcccatccagggtggccctatcactgtgaccccctctctcaggctcagcagtggccgacacgggccaggatgcgggcgttggtggtggcctgctccctggcagccctggcccgggcttgctccagtaagatctgcaagaggccgatggggacatccagcgataggacaatgcgcgagccagggtggcgggtggggctgcagtggctctgggcagcccacggccatgtgggagcagctgaggggctctctgaggccgcaggtcggggagtggtctggggagaattctgagggcggagctggaaggttgggataggggtcactgggacaaccaggactctgcccaacatcaggaccatcagcaacagcagagcacacctggtcatcgtgaggtcaggctgcaaggagaaaatgggctcagggcaggggctctggtcaactggggtccatggacagagacagatggcaagggcagagtgacagagcgggggatggagagagaggaagacaccgagaaaggggttagagaggccaggccaggccagagacagagaaggggagacaagaggagagccagaatgagacaaagaggcagaaagcaagacagaaaaaaagaaacaaagaaatccagagacagagggacagcaagagagggagatgaaggagatggaggcagagcaaaatggagactagaagaaaaagacagacagaaaccatcccagagacagacagcatgatggaaagaaagattcagacagaaacacagagtccacaggagggcaggcggttctcagcaggagagcttgcagctgatc

SEQ ID NO: 201171 - DNA, 1000 bp, Homo Sapiens
cctgtgagcacagggaggagctgagcccccgccgttgcataggggcctggtaggacctctgatatgatttggatgtttgtcccctccaaatttcatgttgaaatgtgacccccagtgttggaggcggggcctggtcagaagcgtttgggtcataagggtggatccgtcatgaatggctagtgccctccccacggcaatgtgtgagttctccctctgttggttcacgggagagctgcttgcttaaaagactctggcctccctcttgctccctctctggccatgtgacatgcctgctccccctccaccttccaccatgagtggaagcttctcaaggcctcaccagaagaagatgttggtgccatgcttgtatagcctgcagaactgtgagccaaataattctctttcctttacaaattacctagctcagatattcccttatagcaacacagaacggactaacacaagctccctaccctccagtctgccctccttcctctgtgcagggcagagatgttcagaaccagagagcaacccccatgtagcccatgggccatggctttccaggaccagcctgatccctctaatactgcagcatcccaaactccctccctctgcctctctgggacacggcttctatcaggcttctctccacatcaacccttagaactacccgtttgtgggaaaactaagaaactgggacaaataagacatcacttttatactaaatagtggggcattcacttaattaaatatggagtatctattcaatagaatttatgaaaagctatgatgtggatcgatgcatactgatactaaatgcaaatccaattaatttaaaaagcaggttgaaaaatagcatgtagaatacaaactcatttggtaaaagaaaataaacatgcatatataggcatcacctccaaaatgttaacttatttatctctgggtggtgggaatatgactgacttgttttgtattataataaacaaatatttctagggca

SEQ ID NO: 201172 - DNA, 1000 bp, Homo Sapiens
ggcaagggttgcaaaatgaactacggggtactatgctcactactgtaccccaaaccacagcatcacacgatatacccatgtaacaaatctacacgtgtgccccccgaatctaaactaaaagttgacattattaaaagaaaagaaaatataaaaagattatcacaccaatttcagaacagtttcattacaagatgaatactagagaaaatatttgcgacaacaaaattaacatgcaactatgaatcttaaaaaaatctacaagtaaattccagtgattagaaattcaactggcatctgacattaatgaattgagaatacccttcttgtgtatcagttacatactgtattatttaaagatggcttcattttttaatctgtcttcttgatagtggagaccttaatttgggatctcggaagtaaatttgaatcaatctatcactcaattctcccctctctcatctctctctctctctctctctctatccattcatctaatctatctatatacatatatatatataattcctgtctcccttatctatccatccatctaagctatctacatacatatatatatataattcctctctcttatctatcatctatccatttatctaatctgtctatatacatatgtatataattcctctctcttatctatctacctatctaatctacttatacacacacagacacacacacacacacacactttatataccctctgccaatccatagagacccctctctctgtacatacacacacacacacacacacacacacacacacacacacacacccttataccctctgacgaacctttctgatttttatcctttcatggttacaaggaatattaaattgctatatcaatacttggtaaataacctacagtgttagagattaccaccataaaaggtgtagttttttgtctagttttgttttgtcttgagaccgggtctcgctctatggtccagactggagtgcagtggtgtgatc

SEQ ID NO: 201173 - DNA, 1000 bp, Homo Sapiens
tattatggtgttattactgaaccctgaaatagtcttaacagggaaattggcactggttttaaacaacttccagaaatgatggctccatattagccatgcaaaaatgaaaatcattgtctttgttagatattctccactaagggtaattttatttagacagtcactgcggggtacattttgcagaaagccaagttattcagtatcagacaatttatggaatccttactgagattttctacaacctctacgggttatcagtaactttttattttttgagatggagttttgccctgttgcctaggttatggcacaatcttggctcactgcaacctccgcctcccaggttcaagcaattctcctgactcagcctcctgagtggctgggattataggagtgcgccaccatgcccggctaattttttgtgtgtttttagtagagatggggtttcaccatgttggtcaggctggtcttgaactcctgaccctgtgatctgcctgcttcagcctcccaaagtgttaggattacaggcgtgagccaccacgcctggcaatcagtaacttttgattccaaacatctctaggcaagcaattgtcaagttttgtaatgtgaaatctgaggtattcactcacatatctgttcttctgcttgagttcttccaatgttgcttctgaaagaaaactggcagttttcctatcaggcctattctgaagtagacgattgagtagtatcaaatactaggaagtatttaacaaaagttgaattttatatttttgtaagtcttttttggtttgtttatttctgttgtaaatgatctcaagtcttttagagaaagaaaattttatttaatcatccttacggagtagagacgaagacaattcatacatcaaaaagcaataatctgagtgtctgaaactatttaagaggaaggcttatcagccactggattctttttttataaaccctatttcaagagaaaaagaatacttctggaaatagaatt

SEQ ID NO: 201174 - DNA, 1000 bp, Homo Sapiens
ttcactcctgatgagatctcagctgttatctgataaaattgaacaactattactaggctctgctgagtaaagccccttgactgctcttaacagaaatcctatacactccactttgtcagcagttttgaattcatcgtcgcaacaagatgataggaataatcttaccaactgagattgacagttcatttcagaaatcaatatttacaatttacttctttcaaagttcattcgagagaagattccatattatccctctccaaataagctgatcatatctcagtcgtccctggaatgagttttcccaaaatgtgaatttttggtaaaaatcaatgtcagcattgtgcactttaatctcgcctatgatgacagtaaatctttatctttttatgggtaaacgccagtggcggctgacaccatttcctctcagaacaaagcttggtccatgtggactgtggtagatacatggagctctaatgtggctggacatgtttcagtggggtcattaatcagacccggtgacagccacctaccgacagcaggctgccggcccgaggcaggctggcggcaccgcacctgagcgcataaggagctccagtgttcaaatataggttcatacatgtgcatttgtaagttacaatctgaaaaataacacaaggtgtattggcacactctgagattttacttagatacagtagccattttctaatgtaaatctcaaagcaactgcccaggcaccttgtgcgtctgtgtttaaggctggttaacatagctgtgtcacatgtgatttaatgaaaaccagaatgcaatgatgcaaatgcaaccattctgtccataaatgttcatccatgtgtgctattttggtttgttaaaaatagctgccacaatgactgaaaataagtaggggtgtagtcacaagaaactgaaatattatgttgctgctgcaaggaataatgtcattgttctacctaaatggccataaaatggataaactaatgaattc

SEQ ID NO: 201175 - DNA, 1000 bp, Homo Sapiens
ggaagcagaaagtaaagattttgaaaatatttaggctagtcatgtaaagaatgaaaaggcatgtttaggagaggaaaccaagggtgtggccaagtgaccctttgctaaagagattacgattgggtagaagggagccaggtagtattcatcaggacaatgaggtaaaactctcaaggcatttcagagatattaggctgccccttccgaggctggtccagagcagaaccttgaaggcagttttcagagaggagcctgtgggacctcaggattcaccatcctgtgctgcttcaaacattggctcactgcatcgtggtggagcacttctcagcccccaccactacccatagctcagtgggcctagttgcagcttggctcaccacactggagggcacaaacagtaagccttggcagcatccatatggtgctgactctgcggacacacggagtgcacaagctgtagggctgtggtggcctccacctggatttcaaagaatgtattggacagccttggggcccaggcagggcagaaacttgatgcaggaacagagccaccacagagagccctcactggggcaatgcccagcagaactgtggggtcagggatattacataaactctagaactgtagagctatcagcataaaacttcagcctgggagagttgcaagcctgagattccaacctgtgagagttgtggtgtagcctatgtccaacaaagacatacaagtgtggctgcctgagactttgaaggcccacccccagtccagcatgtccagctatatgtccaggaggaggaacatagagtcaagaaatattattctggaactttacaatttaatgttgtgcgtattgttgttgtgttttgtacttgggacctgttactcctttcttctgaattatttctccttttttgaatacaaatgtctatcctatgcttgttacaccgttgtattttgggaatagataatttgctttgatttcacaggcttacctctggagga

SEQ ID NO: 201176 - DNA, 1000 bp, Homo Sapiens
caggactttttttttttttttttttttttttttaacccaagaaccattttactagcatacagctgcccagcgttcaactaaaagcaatggactagattgccaattacagcatggccacaatattagggtggaatggacagagccaagaacactgctctgtagtgttagaaagtgagagtgtgctcagtgcccacttcaggtcccctacctctttcatctacggccacagaagctactcaaaatttaatcataatattgaaaggggcagggaatttccttcagatttcccaaggtctgaaatgggaagataaagttaccttctccacagaactaatggaaaatcaagagggaaggtaattttaaaacttctctcaagttattttgaaatataaaccttcctgggatacttctggctcctggaatattttgcaaaatagctattgaccttccatcctgctcctcaagcaactgggactgactggctcacaagccctctgcctggactttcaacacagcaacgatgtctctccattgccctctacccataccataggagagagatgattgactttcacaatttcattctaggacccttatctcgggagcaatcagctagcatggttgttgattatttattttgtgtcttataatagttttattcctagtttgcttcaggaaaatgcaataaatatgttaaccatgggaaaactgataaagttgcggaagctctcatgatcagtttttagggactttcatggtaatatatatggagtaaggctaacctcttttacactaatttattttattcgttctcatgttgagaaacagtagtctagattcactttctctgtacctcttttttcatttctaggatttatcaaccaaatgggttcaaatagttttagtctatgaacattaagtcttctttttggtaaatgttgagcaaccaaccgagatactgtcacgttgttgagctgtacgttagctcagatctaccacc

SEQ ID NO: 201177 - DNA, 1000 bp, Homo Sapiens
caggttcaagtgattctcgtgcctcagcctctcgagtagctcggactatggacttgtgccaccgcgcctggctagtttacagtccaagctcttaacctcaccagcctgcctcaaccaccaggggccagactgctgatcttgaacaaggaagaagaaaatccaaatggtttcagtgcctaaatgtcctcctttcttgcctttggtaacaactttttctgtctctgaatatcattgctacttctctggacactgcttctctgcttccagggctgtttttcttgcttagccctaagtcagcctcgtttgggccctgtccttagactctttcttctgcacgggtctgtgaaagatctcctttatgtgcgcagctccagctgttggtcctttctcagtagtctaacccagactgcccctctgagcgccagcctgagcagccagctgcctccttgacatcccctctctgggtctcattcgtgatgtctcccctaacacggcttgcttccaaagtgccacctcctccctgccatggcctcttagttccaaattgtggcatagtggtggggaatttagaaaggcttcaaagacgaagcctcttgaatgagttctcagggctagagatagaccacagagtgtgttctctgagcgctaccaacagtctgggggtgaatttggagagtggaattcaccatttaatcagtcagctggctatggaatgcccagctgcatgccaggtccagccgctggggtggaaagatgcattcatgagtagaacaaacaggattcctggcttcagggagcatccaggctgttggagaagacagacgtcatgcaatcccccaaaatacactcttataaactgtgataagtgtcatgaaggaaaagttcttggtgccatgaaagcatattgtagatctaaattagattaagatggtcaaagaaggtcattgtgagaaagtgacaattactgtctccctgagatctgaattggggaggagaattc

SEQ ID NO: 201178 - DNA, 1000 bp, Homo Sapiens
ggtattaaagactcacaccatttggtgacagcccggactgaagggacctgtttcccagacaggaggaatggagcaggcttccccagtcattcattcccaggagccttctctgcaaggccagggcagcctatgcatggcctgcctggggtgagagccccccggcccaagatggacacgagtggcccccagtgacaccacctggccgatcctgcttttttgttttttttttttttgagacggagtcttgctctgtctcccaggctggagtacagtggcgtgatctcggctcactgcaacctccgcctcctgggttcaagtgattctcctgtctcagcctcccaagtagctgggatgacaggcacccaccaccatgcccggctagtttttatatttttagtagagacagggtttcaccatattagccaggctggtcttgaacacctgacctcaggtgatccgcctgccttggcctcccaaagtgctgggatcacaggtgtgagccaccacgcctgacctgatcctgcttcttgaacccatcactggtgcctctgcccgccccatgcctgatgtctccccccttctggagggaagactgtggaaaggaagccaaaagggggcactagggagcaaaccctaagaacatggaaaggaaacatggaggaaaacagaaagggaaattcaaagcagtgggacctgtacagagccatggacaatagatggcctgcaaggaggctgtggaacgagcccagccctgccccttcccaggcacaccatgagtgtgcccacaacagtggatgcagagtgtacttggcccatgtttaccaacgtttgcctgttcacccgaggaatgcacatgcatgaggtctgatgtaaggtccctgatgccagtgatcacgggcacagcctgatgctcactgccccccgggcttcgtccccagtaccttctgatcagaccctttgcctgtttgtcacagggtgatttgtctttttcttattgatc

SEQ ID NO: 201179 - DNA, 1000 bp, Homo Sapiens
tacgctgatgtagcaccatctacaaacacctacctcttgccccacaaggcgatcaactgcccctgcccatcaacttcacctctttaccattctctctcacataaccaacgatggcaatgaccatccaccacaggcccggcactcatgatcacaatgtgaggtagacactgctgcccccacttcacagacaaggaaatcgaagttcagagctattcaatcacctcttcgaggccgcacaattcaccagcagtaaagcttggcctgggacccagttgcacctggcccaaagtctgaggtctcctccactgcctcctcccgtcttcatccccagcatcaggcccagatctgggcctccaccaccttcagcctgactatggcgaggtctttctacctggtctccctgcctctagtacttccctcctccatcccctctcatgtgtggctgaccaggtgtgctcatgtcattctctttcaaaaaagtattcagggccttcaatacatacaaaatctggagtggtcctcacctgtcactgaatcctggctatattgcaggacccagccaaagactttttccacagagtcttctcccaaaaccttagctctcacactctctccctctctcccctctacccagcgtctgtatctggtttctctctgtgctctcataacacctcaggccaaggtaattctgtgtggtggagacccgtcttgtgcattgcaggatgtttagcagcatccctggctcctgcccactcgaggccaggagtacccactcccaatcatgacaatcaaaaatgtccccagacaactaccaagtatcccccggagggcaaaatcaccctgggttaagagccactgtctcagacagtacttcagccactgcctcggaccgcaccttgtggctcagggaataagtacagacttctctgaaggggctgcctgcattttaaaaagccaccaccagaactcaccattgcgagtcaatttgggggtggttcgg

SEQ ID NO: 201180 - DNA, 1000 bp, Homo Sapiens
gtggttctgttgggcacagtggctcgcacctgtaatcaatcccagcactttgggaggctgaggttggaggattcttgagccccggagttctagaccagcctgagcaacataggaagaccccccatctctacaaaaaattaaaaagtagctgggcgttgtcatgctcgcctgtggtcccagctacttgggggtatgggggtgctgaggtaggagaaccccgagaggctgaggctgcagtgagcagtgattgtgacactgcactccagcctttgccacagagcgagatcctgtctcaaaacacaaaacaaaaacaaaaaacccagatggttctaaaaccacatgggagtggagtaatagttatgcagagagaactatggaagccttaaggaagagcatccaatccagcttggggggcaggggatggagaaagctcagggaaggggctaaagagatgacgaggtgatgattcagttcaacagtttcagaaatcccaataggttaatcttctatttggcgtaaaaagaagctttattgaacccaaggcatagtgttaaaaatttgtgcctaaatccaaatctgtgcttgacctcttactagctgtccaactaggaacaatttacctaaactctctttgccttactttccccatatttaaaaggggactaataatagtatctccctgataggattgttgtgaagaccaaatgacgtaacacatgtgaagtgcttggtggcgtgaaggactcaaacttccagggtcactgttcacaccctcaaaacagcccacagtctagtaagcactttataaatgtcagttattatcattaacatttcagaagatctcgtttaaacttccagttacaaccatcaccactgggagttttagttttggttcctgttgctgtggctgtagcactgggaggtgggctcacgctgctgggacatgcaggattctctcccctgcaccaagtggctccagactcccgcggctctagaattc

SEQ ID NO: 201181 - DNA, 1000 bp, Homo Sapiens
tgccctaacaaattcagatttcattgatctgggttgaggctggagcatccatgtcgcttttaactccccaggtggttctgaggggttcagaagcccttccctaagagttctggtccttccccaccaatggatgctcctctgtaactgctcttccacttccatcactaaagctctgacctcggctgggcgcggcagctcatgcctgtcatcccagcactttgggaggccgaggcgggtggatcacctgaggtctggggttcaagaccagcctggccaacatggtgaaatcccatctgtactaaaaatacaaaaaaaaaaaaaaaaaaaaaaaattagccgggcgtggtggcgggtgcatgtaatcccagctacttgggagaatgaagcagaagaatctcttgaaccccgggagtggaggttgcagtgaagcaagattgggccattgcactccagcctgggcaacaagagggaaactccatctcaaaaaaaaaaaagaaaagaaaacaaagacatcatctcctcacacgtgaaaattccaagtatccagagcaagagccatccccaaatgtaatgtaaaaccatggcataattctacatgccacataaaacctgcattccacccccatcccactcaacaagccctacagacaatacaagggctgatgccctggggtatggggagaaaactgtcctagttgacattcttctaaatgctgagcatagctgactggggcatttgttcatttttgggacttgatgatcaccttaccttcccactgaatggatgatgccaaaaaaagaaagcagaaaagatatccagccttgcttgttcccctgataggtcggcagataacttctctctacttctgtgaagtaatgtgggcactggcaacattgagggtgggtaatctgacccccacccctactgtggcctatggaggggtgagacctgtggatgatcgagctttcactttgagtcagcatgtctcactttgaattc

SEQ ID NO: 201182 - DNA, 1000 bp, Homo Sapiens
atcaacttctatctccactgccaaaactccactatcacctctcatcacttctgcaacacctctactacactctccacctccattctcagtacctgtctgcctctgcctgaatccattatccaccttaaagccaaaatgatactttccaaatgtccctttcttgcttaaaacctttcagtggtattccattgcacagcagataaaccttttaccacgtctagacatcccagcaagaactggccgttgcctaccgctccagcttcacctcttacttctcttgttcatctcaatagttggagcactgcaaactctttccagctcagacctttgaacttcttacccctcttaacattgcttttcacatggctcactctttctcatccttcagatcttagcttaaatgtcctcatcccagagagttcttgcttgatcacctagtttgaagtatgccacccgtcaacaaacacacacaagttttctttatcagactgctttgttgatttcaattgcacttttgtaagttataactacatgttcattgcttattgtctgtcttcccactagaatgcaagctccatgagagctgggacctagatattcttgtgcactgatatatttctagtgttggcccagtgcttggtacatactaggtgcttaatatttgttgaatgaataatcatattctttacaacctagcctggcttgcataatattggcttgtgggagtgtgatttgctctaaatccatgtaataataaaccatgtttggacagagtttatgtatttccattattgccctgaagaatgtgacttatgagcttctgcggggagggctctgccttgtagcagggcactgagtgaaattcttaacatggtctttgtaattggaaggattgaaggaggggcagttctaggaataggcatccacatgctcccatagtcaagtcttcatttcagcatgtaattccccacatttctgggatactttgagagttccattg

SEQ ID NO: 201183 - DNA, 1000 bp, Homo Sapiens
gatgcttcagaaagatgccccatatttatcctgtggcactcaaagtaccccaggttgagatgagatgaggaagactcaagctaagttcagtttcccaagatctgttccacagaagataagcagatctcactccagaaccagtgactgaggggcactctggtcccagaacaatggagaattcaaatctgaggtgcagaactgagaaaaaatgttaaaatctctctggagagtagaagcctgggagaaaaccaaaccaaacccgttctcccattgccacccagagacactgtcaacgtgttgagctcatgggggaggtgtaggcttttcacactgtcaaggtctgtggtaaggaagtcaggcagcctgaaacctctctcttctaggtcccacagtccccattccccttccagctggaaacctgtgctgcaaccagaggaaacagaagtgggcaagaacacttaggggactgggtcctaagaccaaaggccggtcttgtggtagtaatgacagtttgtagcgggactgtgacatcactacattctactcctcggtggagtggttgggggggacacatgagtgcaatgcccaagttgccgctttgagactggggagggggtcacaaaattgggagccaggtccttggagacgtgaccccaaagagccccgggaggtcaggcttggggcggcaggaggtgagggccaattaaggagcaaggagctccaggagtcacatccccaaagtcaccctgtggcaactggtgagggcaggttctggggcacccaggtccttggagctgtgagctcaaggagcccagggaggtcgggtttggggtagcaggaggtaagggcggagtatggagttggaagccccaggagtcacctgctcaaagtcaccctggtgtgccgggcagagcaggggcaggacttatgagggggttgggctggctgacaagattttggtgtggggagcccagaggcactggggtggggggcccagcct

SEQ ID NO: 201184 - DNA, 1000 bp, Homo Sapiens
agttgatagatgtatttcagtttttggaaagaaatatttaaattagtaaaagggtaaacctttctcatttaatacctggtataccatatttcataaaactaagaaaatagaaaaaaaatccattgccctacaactctaatgtaatgtcatcaccgcctttccttccagccttcttctccatgcatttcccataactgaagtcagagtgtatataaaagtttgctttttgcttctttctctttatatcttaatatagaaatgtcttacaaagtttgacacagacacttgccccagtgtgtcatgctcagagcaatgacccacgggttctaatgggaggtgagcattggagaaggaagggaaattccataggtcagtaaggctgcatcaggatcagctgaatttctgacagcagatctcacggagagaatcaaaggctaactaggggaaacagtaggagtcactaagagattccggaagttgtgtagggatgaaagttgcttaactactgtctgactcagttcatcttctatacatcaaagatgttacatgcccctacctttatagggctgctgggaggattcatcaagtttctgcaggtaaagttccaggcacaaagtaaagatgttgctattaaaatggtaagatgtggctgggcgcggtggctcatgcctgtaatcccagcactttgggaagccgaggcgggtggatcacgaggtcaggagttcaagataagcctggctaagatggtgacaccccatctctactaaaaagacaaaattagccaggcgtggtggcgggcgctactcgggaggctggggcaggagggttgtgtgagcccgggaggcagaggttgcggtgagctgagataatgccactgcactccagcctgggcaacagagtgagactctgtctcaaaaaacaaaaaacaaaaccaaaaaatggtaagatgcaatgcatccgggtctaggattttctcaagcgtttagcagcctaggaattc

SEQ ID NO: 201185 - DNA, 1000 bp, Homo Sapiens
aggagggggacaattgcacccaaagtctgtggcagagcccaatcttatgatcagatttccttcacccaagagccagtttagattacctaggaagtgctgggcacagtgtgtcatgcaggagctacagacatgggcaggttacaggccctgtcctaggggattttagaatacagtaagttctcttctcttctccttttctttttttccttccttccttccttcccttcctcccttcctccctcccttcctccctttttctttctttccctctctttctttccttttctttctttctccttccttccttccttccttccttttctttctttctttctttctttctttctttctttctttctttctttctttctttctttctttctttctttctcttttctcttcctttgttttctttctttcacatcttaccctgtcacccaggctggaggagagtggtgcaatcaaccatggctcactgcagcctctacctcccagaagcaagtgatccccagcctcctgagtagctgggaccacaggtatgtgccaccacaccctgctaatttttgtatttttttgtacagacaagggcttgccatgttgcccagcctggttgatatggtttggttctgtgtctccaccaaaatctcatcttgaattgtaatccccataacccccaaatgtcgagggagggatcaggtgggtggtgattggataaagggagtggtttcctccatgctgttctcatggtagtgagtgagttctcatgagatctgatagttttatacggcagtttttcctgatcttgctcactctctctcctgttgccttgtgaagaaggtgcctgcttccccttccatcatgattgtaagtttcctgaggcctccccagccatgcagaactgagtctactaaacctctttccttataattacccagtatttctttatagcagtgtgaaaatggtctaatacacttgtcttgaactcctgcctcaagcgatc

SEQ ID NO: 201186 - DNA, 1000 bp, Homo Sapiens
cagcctgggtgacagagagagactacatcttaaaaaaaaaaaaagaaagaaaaaaaaagaaaagaacatctcactttctggggagatattcaagcctgctgcagaaatttgcatgagtaacaaggagtagaatgttaatctccaagacaatgggaaaatgtctctggagcatgtcagagacctttttggcaggccctcccatcacaggccaggaggcttaggaggaaaaaatggtgttgtgggctgggcccaggtcccccctactgctccagccatggctaaaaggcctgaagctcaggccaaggcttcagaagatgcaagccccaatgcttggcagcttctatgtggtgttgaggccacaggtgcacagaagtcaagaattgaggtttgagaacctccacctagatttcagaggatgtatggaaatgcctggatgtccaggccaaagttggatgcaggggtggagccctcatggagaacctctgctagggcagtgaggaagggaaatgtggggttggagccctcacacagtgtccccactggggcactgcctagtgcagctgtgagaagagggccatcatcctccagactccagaatggtagatccaccaacagcttgcactgttcacctggaaaagccatagatactcaatgccagctcatgaaagcagccagaaaggggggctgtgccctgcaaagccacagggactgagctgtctaaggccatgggaacccacctcttgcattagtgctccctggatgtgggccaatttctcccattcagaacaggtgtatttacccaatacctgtaccctgccccctccccattgtatctaggaagtaactaacttgctttcaattttatgggctcataggcagaagaaacttgtcttgtctcagatgagattttggacttggacttttgagttaatgctggaatgagttaactatttaggggactgttggaagggcatgattgcatttcaaattgtgaggacat

SEQ ID NO: 201187 - DNA, 1000 bp, Homo Sapiens
tgctgcatccccaggcttggtggggagacctgggtgcgggaagtccagacagtggtgaagccagcagggcagcacatgtgtccaacctcccccaactacaggtgagaaaataccacccaggacctgactgagaccccatccggcatcagtccacgtgaacccagtgtctgcagggaaattttacagtcaaaacctgtgcagtctgctatgaaccaaggaataaggaggctgctggaaaagccatcattttgctgggctattgatgttggtgagagttgatcacagtttgaaaggtgcagaaggccatgcctggcaaagagacagatgggagacctctctggttggggcgagaatgctgtgtgggatggctcaggggtggaggtagcgagcctgtgcttgagcggggccaaccgagagtcaaatcccgggctgccgcgtgtcgagtgcggtggccatgggtccatccatgacttctctgagtccctagtcccctacccgtaaaaacggaagcaataacacagacttcttaggttgtttttttgagacctgagatagaccacatgtgtaaggcattcagcacagtgcttgacttgtgtagggctcccaaagctgagctataattgggtaattgctgatggtgctcagattccaaggtgaaaggagaagagacacagggatgctgagggggagttgaggagaggttgctgcacagtccaagaggaccataaacaacatcacagaggaggcacatgagggctgcctcacactcagcagaaaggccagagtgagggcgtgcagctggctcgcagaggtgggctttcaaatcccagaggaatgggctgactgcactgcccgggctgtggttgctccacactgaggacttgggatacccacctgcctcagcttcttggatgatctccagaatgccaggcagccagacgtgaggtcatgcatttactgtagggagctgtgcagctgggtgaggggagggggctaccag

SEQ ID NO: 201188 - DNA, 1000 bp, Homo Sapiens
gacaaccacagattccatatgagctagggtgggaggcagctcagagcttcggagagtcacggcgttcgggggctctgacatgactggttgggaagacaggtggatgtggaaatgccaacagaaggaggctggaagggaaggaagggaagggagggaggaaaggagggaagggaaggaagggaagggagggagggaaggaagggaagggagggagggaaggaagggaatggaggggcctccacggcctctgtattctgcacagtgccactggggtgcttgcagcctgaatgcgtttctgtttagctctgatgctcagcacttggcttggagagggaggccaggaggctggggccggtttagcgtgtgacggtgtgacagtcctgatccaaggcagggagtgagggttgtgaggattcaggatctgtcatgtggggcagggggaggcccagggatgctggttcttagggaggggttggcacctggggtttttgtgccatccgtggagacagggaatgggtagagaaggggcttgaggcaggaggtgaccctgctaccgatatgctagcctggaagccccacccatatgggggccctgaagaccaccatgaggcttggtttgggctcgcactgtagattgggactcactgggttgcgggtgggtcttggtgaaagctggggtagtggatgaactgaaggcaagaggtaaagtgagagaagaaggccacagggtggaggctgcggggggtggagaccggacatgacccctggacagctgctccagggaatgcgtctgtagggaggaggtagagacaggttccgggtagagtgtgggggccttcttttcttaatttttattttttatttattttttaaatttttattcttcttggcatctgatcacatcttgccttctattaaaggagggtgggcttgagtgtttccgtgctgaagggacagtgtgaggagagaagatcagtgtggttgatagaactaggcccca

SEQ ID NO: 201189 - DNA, 1000 bp, Homo Sapiens
cctcaggtgatccgtctgccctggtctcccgaagtgctgggattacaggcatgagccactgcacccaggcccctgtctctatttttaaaaataaataaataaggctgggagtggtggctgacgcctgtaatcccagcactatccgagtcagaggtgggcagatcacaaggtcaagaggtcaagacccctggccaaccaacatggtgaaaccctgtctctactaaaaatacaaaaattagctgggtgtagtggtgcacgcctgtagtcccagctactcaggaggctgaggcaggagaatcgcttgaacccaggaaggcacgggttgcagtgaactgagatcgtggcactgcactccagcccgggcgacagagcgagactccgtctcaaaaataaataaataaaacataataaaaataaataaatacatacatacataaaaagggtaaaaagaaaaatggcataaggaaaacatgtttatgaagctgatgggacaccccgggttgtctaataaccgtgtgtccaggtcaaaccttgattttaccccgagctctccttttagttgatggcttgtgattcagggtaagtagcagtctgtggaaacccaggaaactggtttgattcccagctgtgtcattcagttggcatgtgtccttcatcaatgtacataatgtctgagattcaggtttgtgccagtgaagtcagcatgatgtttactttgaactttcattaggtgggctcaggataaaatacatgaagtgcttctcgcctggtgagtccttgataaacgctagcacttgtattgtggtcctcctgccccaataatgatcacaccttagcacaatgttgcccttcacagtttgcaaaggcgggggcgcttatattcatgatctcatcctaaaaaagtctaatttttgttaacaacagctcatatgtatagagtacttgctatttttacaagtattatgtaacagtgggtgctcaacaaatgccgaatgagtga

SEQ ID NO: 201190 - DNA, 1000 bp, Homo Sapiens
ttttaaaaattcccgaggtcacagttcactacaccgaaacaaatctaaaaattgagtcttgtttatatcaatgaggttcccttaagatcttgatatgctttggtttcacttacaaaagtagaacttaattaagatagcattcatcaaagccataatgtaaaggctgtgatgagttacaaaatcattgctttcaacagtacttcctggggctagtacagaatacatttttatttaatgttatgggattcaatatctgaatacctaaattcatatataatttcttgtaaaatgatctgaattttatgtttccttaagataactattttcattttctcccgacatgtgacttctgacaaagagaggccctctgccttagcactgttgttaacaacacaacaaagtgccaagtaacagtggtgacaaagtccaagctctctccccatactcagaaaaatggtggcctcacagatacataacacatcatgcacgagtgggggcactgctcagtgcctggccgcctggctaggtaattcctactaaactataaagatgactccatgagactccatgatctagtcccctctgactttcgtacccgaagctggacaaatatccaggttatactcaatctactttagataaaactaatggagggcatggggagaggcagatttaagcttttgtaatagttactgaaattaaatattaggtaatatatatggcccgtcacaaaagctgactagactctgatgtaaatgaaaacagtgatatagatcagggcaaccaagagcctgaacacactgtatttagcctgaggagagtgaggaagtcatgaaggcaaaagatgctggagatcttttcacaaatgcttcccattcttttagtcttcgtcccctgttctaattacacactgaagtttgtcttggaacagcaagatggctcagcaggtgagagtactcgtcactaagctaagtgatccgagttctagtcccaagaattc

SEQ ID NO: 201191 - DNA, 1000 bp, Homo Sapiens
ctactactctattagtttcctattgctgttaacaacaaattatcacaaactcagtggcttaagacaacacaaatttattatcatgttatcatttctggaagtcaaaagtccaaaatgactttcacttgtttaaaaatcaaagtgccagcagggctgtgttccttctagagtctctatgtggagaaagtgttcttttgctatttccagcttctagagctgcattctgtggctcatgggctccttcctccatgttctaagccagcagtgtagcatcttcaatcacctgacaaaatccaacacgttttcatcataaaaatggtcaaagtaggaatagaagggaacgtcctcatctaacaaaaggtacctgtgaaaaacccacacctaacaacatcatacttaatggggaaagcttggatgctttctctttcagatcagtagcaagacaaggatgtttgtgctcaccacttctattcaatgttgtaccagagatgcttctcagggcgattaggcaagaaaaagaaataaaaggcatccagattggaaaggaagaaaacgatctccaactacttcatcctgtacatagaaaatcctaaggcatccacttaagagctgttgccaaacaaacaagccagattatagtctataattgacctctgaaacaaggctacagtttcagagaccggtatgcaaaaatcaatagtatttctatatataatcaatgaacaatcaaaaactgaacaattaagataacaaaattaacaatcgcatcaaaatgaataaaatcataagcaacaaatttcaagaaagtaccaagtttatacaatgaacactacaaaacactgttgaaagaaatcaaagacaacctaaatgaaaggaatcaaattcagcatccagaaaaaattcctcacatttatgatcaatttcaacaacgatgcccaagacaattcaattggggaaagaacagtcttttcaacaaatgcttctggaacatctagagatc

SEQ ID NO: 201192 - DNA, 1000 bp, Homo Sapiens
aatgtctgttctgtaaattagatgaaggtgtttgatcgtgttgttcagttcttctatatccttgctggttttctcaccacttgttctgttactaagtgaggggttgaattttccaactataactgcctgtttctgctttcagtttttgcttcatatattttgaaagtctgttgtttggtacattcacatttataatgattgtgtcttattggtgaattgactcttattaacatttaatgctctggtaatgctctttgctcttaagtttactttgatattattatagctattttaatttctcggttggagtttgcatggtatttattgttctatccctttacttccaacctacctgtgtaattgtatttgaagcaagtttcttatacacagcatacagttggattatgtgtgttttttaaatccagcctgacaagctttgtaattggtatgtttagaccatttacatttaatgtaattattgatgtgcttgaatttaagcctaccattttactatgtgtttactattgttccctgagagttttattgctcaactttactgccttctttgaggttattttttcatattccattttaatttgtctcttaagtttttgaccataaatgtctttgcatagtttttttagtagtagttccagaaactacaatatacatacttccttttttacagtctacttaaagtcaacattttaacacttccagaagaatgtagagccacatccctgcctccacatcggttacttaccctctgcctttagagtgtagtcagtgtaatacctgtatttgttgtaaactccgttagacaaaatggtaatttttgctttcaacagtcaaaaatatttcagagaacttgagaagaaaggaactcaacttcattcatccaaatatttgccacttctgttgcttttcctgtattcccaatataccaagtctccttctgataccagtttctttctgtctgaaggacattctataggaattc

SEQ ID NO: 201193 - DNA, 1000 bp, Homo Sapiens
atcttataacggagagcattttgtgatttcagttagagcactgtgtcccatctttttcatggtgtgttaaatgtggctttacagttctgtagctcctgttaaaccatgagctccttgagggcacagaccacagaccacttctctgggcttctagtactgggcacttggcctgtcacatacatgttgttttttaaagaaaatgctagttaaaatctaaatacatattagaatagccttctttgatatttgtgaatgatggaagcctaaaggaaataaaattgtgcctcagtttcctcaattctgtgtttttgtttgagaagttagagaaattccagctttctgttgaaagtggttttctaactgacgttgaaaaacaagaattcattttctcaggcttggcctgaaaacttatgaagagaactaagtacaagttgtcctatgctatgataatcttgactgcagaggcagaaaaactgaaggctatttgcttttctttcaaggagagaaaaaatacagttgcctgaacatacttttttttttttttccttaaatctcagagctcattttgttgcctgtgagagttcagaaaattgcacttttgaaaatcaggcttaagtgttactgtataaggggagaacataacttttgacttattgagtactgtttctcaaaggacttttaaagttctcttagaaaagggaaaggaaaactagtatttgaagtttttattcaggaaaggatctttgttccattttaccagttgttttggtaccctaaggacatagctttgaattcttaggttctttaatggttgattaaagtaaggcatacattcctttttaattacttttttttaatgtgatggatgaggcatttttcacaagctgttaattctcggtgatcataaaggagcaatttaatcttatctttcattttctaggaagaaagtataatccagaaaaaaacactcagttacctaagcctaaagtgcagggttgat

SEQ ID NO: 201194 - DNA, 1000 bp, Homo Sapiens
ggaattatctgtataatgcttgcaactttcaaatctgaaactaggaaaataaagcctgtgagtcagggcacaaaagaacctggaaaggctcagttcattctcagaggatacttctggtattacagataagactcaattctgcttcttttcttttcttttttatttttttgagacggagtctcgctctgtcacccaggctggagtgcagtggccggatctcagctcactgcaagctctgcctcccgaattcacgacattctcctgcttcagcctcccagtagctgggactacaggcgcccgccacagcgcccgctaatttttttgtatttttagtagagacggggtttcaccgtgttagccaggatggtcttgatctcctgacctgtgatctgcccgcttcggcctcccaaagtgctaggattacaggcgtgagctactgcgcccggcctcaattctgcttctaagcagctgctggcagatggagagggggtgccacatgaaaacttattttttaaaagaaactgtaattaaatgatattttttaaaccacgaattaaacatgcatggtacaggcaggcttggtggtcaccaggccctaaacattagaaatgcagtgtaatttctgggatgagtagttaactcgtcttcaccttagaaaaagaaccaaatttagtaggtaaattgtcagtaattcaacatgtctgataggtacatcttgccaagtttagaattaaaactgtcaattaatttagaattaaaactgtcattactaaaatgaagtattatctaagatttaatatttggaagatatcaggccatttctattttttagaaattggagacatacataattctgcaggtaaagtagtaatcttttgctaaaaattacatcaaaaaagcaaactaagtttgcctcaaaaagaaggatgataattacttaagggaaattatttgaatattgatttaatcttgagagctgaactttatgacaccgccagta

SEQ ID NO: 201195 - DNA, 1000 bp, Homo Sapiens
agtaagagacaagtctgactctaacatagtgcagcaacagataaccaggaggatctgtgaagacactgtttatactccacttcattccaggctcttggaagaagctgaaaaagcatatagttccataatctccaactgtctttccatgcatgaactcaagagttacaactgtattacaaaaaaagcaatctggttctcaccattcggcaggcagttctcagggaactgtgtccagggtttttgatgatgttcaccttttcatgtgtaaactcagagtaacttaagacacagcttcatgtatctcaaaaccagtctgttacatccttgaacatggctacatagaatgaagacaagactacagatccttcagtgggtatgggaatagctccaacagacatctttgaagaaaccaagtgaatgccccaatgcagccaaatttgctcaatgttccaggctggagatggtatctaatgcttctgtaagtgtgaacggtatagagatcccattgtcaattactgcttttttttctttcctctttcttttttctttctctttttaaggacttctcatatagcaaacctcccatctaccaacatatgttgcagtctaaagtcacactgggaatttgtgacagtaacattaacaatgagagaagtagaaacattctagtcatcctataaatatatcaaacgtggagagcagaaatgactcgagttgactttctttaattcttctttttttttttttttgagacagagtcttgctctgttgcctaggctggagtgcagtgacatgtggcatgatttgggctcactacaacctccacctcccaggttcaaacgattctcacgtctcagcctcccaagtagctgggattactggtgcgtgccaccacacctggctagtttttgtatttttagtagagatggggtttcaccatgtggccaggctgatctcaaactcctggcctcaagttacctgcccgcctaggcctcccaaa

SEQ ID NO: 201196 - DNA, 1000 bp, Homo Sapiens
taagtgggcctgatggaagcaccatccttgtcccaatccactacaagtttcagcccaggagacacacagggaagggaggatggggtctccctgctggctgtcactggaaaagcaggacctgggagcagagggagctcagggctggcaggggatgctcaggcccatggagagcttgggctgcatcctggggctgcccctcctgggctagaggctgtgccctctgcaggatctgagaaagtccagtcctgagatgggacagtgctgcccagggtgggtggctggggcctgacagcagtcccccagggaacgatcacatcacccggcctgggtctagggaacctgggctgagacctgcccagtgcactgagggttcacctggagcccaccccacctgatgcccccacagccctctcagggtctgacttcccagcatgcacctgcctctccctgcaccccaactgcccacgtgcctattccctggcttcctccatcctgtgcagcacatagactgtgaccgtctctccagccactctggcctttcctttaactttgtcctgtcaggatctctgagcaagatcctccaggtccatccaaacacctgctttgtccacttttgactgggctgttgggtgccactgggccgtcccagctgtccacagggccctcaataacatgcattgcacctgtgatctcccagcagcgctcatcaccccccaatgaccaagtccctgctggccagaccccacacaccaggtcctccccgaccaaaccctcaccgattagacctccatcaggaggtcccactaaccaggcctccgctgccaggcccacagtgaccaggacttcactgaccaggaccttactgacaaggcctcactgaccaggttccactgatcatgaccccattgcctggccccacagatgaggccccactgaccaggcctccagggaacaggctgccactgaccaggcccctgctaaccaggactgaggtgaccag

SEQ ID NO: 201197 - DNA, 1000 bp, Homo Sapiens
attgtcataatgttttgacttatacaaaataagactttttctgaaacacagaaatccttgacagtttatttctttaagataaccaattttatacaggtgaattcttttaaaattgaacattgtagtggaaaagacgtcacaagtcactttagggtatggaaaagtgtggaacaggggcataaatattaccaaccagcacttctgcgggcagtcttcccacatccagtgaggccccctaaatcactgtctacttccttgtatatgtgtgtgtgcgtttgtgcacatgcatgcatacatgtgttcatggccatgaactaggagttatcccaagtgtagctgtgctcgctaagtcttatatttaagttatcttttgggcatggtttggcaagaggttaggtttttttcccttttctgtaaatatttagtgaaagcactccattgtttgctactgaatttttttcttatttttaaaaaagtattgtttgaaaaccttacatgatggcttgcatctgtaattccagctacttaggagattgaggcaggaagatcactatggcacacatatacctgtgtaacaaacctacatgttctgcacatgtatcctggaactttaaaaaaaaaaaagtcttgactcaaatattgtaatttttcttggagtaaaatttaggggccaaaggctgtattacatgtgtgaatataacatacagaaaaattaccttacatcatatataccctgtggaaattatttggatgattcagcgtattggaagaggttgatggggccctaaccatgaaaaacttcagtgtaagattttaaggtaagaggaccctcgagagttttcccaattctgaaacaaaagtgaaattcaccagctttgcctattaacttttctctgctttatagtgtcaataagaggtgtggatggaaacacatggaattagatcagtagactgcaaaatcctgcttaagttcattaaatatagtactagtctggaattc

SEQ ID NO: 201198 - DNA, 1000 bp, Homo Sapiens
ggaaagccttactgaggcctccttaccctctctatctgcctaatataatttctgaataactcctctattaaaagtaccacttaggtgcttaatatgacagttctgatatttcccaacgctcctccacaaattcaatttggaacggtaatctgtcccaggagggcaaaccaaagaaaaagtcctaggctcctgaatcaaggtttgtttctttcctttgtacaagttgacaataacattcctcctgatagtcccctacggcttatgctaaaatattggaaagagaatgaaaggactcaatacaagaaaaagcagcaaatgataaaatattgttgtttcatttggactcaggaatcaatcctgaaaagcaagtcagaaattaactcctctgagaaagataaggtccctgttcctagacagctcaccaacacatggaacctcctccaccaccttcctccgtccaatacccctaaacctaacctccctccccctcaagcagaggcagttgtcccagacccttttcctacccacattgttccccctctgtataaccctgcctcctgggaatcgtcccaagagcctgctcactaccaccctaagtactcttccctgaaaggatttcaatgtgagatagagcaatgtaaaagggatattcagaacttccccttcccctctacctcgggagaattagctccacctctcttccccttaagacaggtgtccctaggaggaggaagtattcgctttgtaaatgctcctttaaccagctgggaggtccaaaacctaaaaacagagttcaagccgcactattagacaactcctgtggaacagcagatcaaattaaccaatttctaggaccacagttatatatacttgggctgagttaatgtccatcctaggcatccttttctcaggggaagaaagaagcatgatctgtagagctgctatggtagcctgggaacatgaacaccctcctggccaaaacacattcatgcagcagatc

SEQ ID NO: 201199 - DNA, 1000 bp, Homo Sapiens
cattttacattctaaggccaacaagcatcatatgatcattataggcaggcagtagatagtcacttcaaccatctacttgaattgactgcaaaggtatctagctcttaaaggtaacatggaatatctgcattctatgttcttgccagaaagcaatactttcaccaatctgttgtctagggcttttttcagatttaattttatttatttttagtacctgtctgctattttttttgtttttttagacagagtcttgctctgctgcccaggctggagtgcagtggtgcgatcatggctcactgcagctttgccctccgggcctcaagcaatcatcccacctcagtctcccgagaagctggtaccaccggtgcatgctgccatggctggctaattaaaaaatttttttgtagagactgagactccgtatgttgtccaggctggtctcaaattcctaggctcaagtgatcctcccacctcagcctcccaaagtgctgggattgcaggcctgagctaccacaactggccggtcgtctaagtcttagtaaatattctcactgagaggtattataacacagtatctaggagatactcaagttttccatacaaggaggtagttttaaaacttcactagtaaagacttttgataagaaaaactttcaaaagttgtttagttctttcccctctaaggacacatgtgggcctgagaagaagaaagcatttacctttatggactggagcagagattgctgtgggggcaaactcttccagaaggtcagtagtagggttagagagcagagagcaatcaagcagggaatcttccccggtgagagaatctgagtccagattaacagcatcccaggtcagtgatggcattaagtggcacacacaacaatatcatgagattagatcttagcttttaagttactgcatttacacgttacacataaaagccaaagcgggagaataaaaaccaaaagaaatgtgtggagccttctggattttc

SEQ ID NO: 201200 - DNA, 1000 bp, Homo Sapiens
acaccactgcactccagcctgagcgacagaatgagactctgtcacacacacacacacacacacacacacaaaacacacaagaatgacgaggctggcatgttggctcactcccgtaatcccagcactttgggaggccgaggcaggcggatcacctgaggtcgggagtttgagaccagcctcaccaacatggagaaacgctgtctctgctaaaaatacaaaattagccaggcatggtggtgcatgcctgtaatcccagctagtcgggaggctgaggcaggagaatcacttgaacccagcaggaaaaagttgtgttgagctgagattgtgccattgcactccaacctgggcaacaaaattcaaactctgtctcaaaaaaaaaaaaaaaaaaaataggccaggtgtggtagctcacgcctgtaatcctagcactttgggaggccgaggcgggtgaatcacaaggtcaagagatggagaccatcctgggcaacatggtgaaaccccgtctctactaaaaatacaaaaattagctgagcatggtggcgcacgcctgtagtcccagctactccggaggctgaggcaggagaactgcttgaacccaagaggcagaggttgcagtgagccaagatcccaccactgcactccagcctggtgacagagtgagactccgtctcaaaaaaaaaaaaaaaaaaaaaaaatgacatgaatatacttcacacaactgaactgtacacttcaacacggttagatggtaattatcatcttgtaagtattttaccacaggttaacatgtttcacaacttgaaaaggaaggaattaattaccttcagctctctgagttctagaatttgtaacatttcaccccctgctccttcctgatctgcactggagcatctttcttctgtccctgctctactcagagttcactttcccttccctcacatcagcttcgttgaggctggtttgaacttaatgcaaaacattctcactaatgactgaattc

SEQ ID NO: 201201 - DNA, 1000 bp, Homo Sapiens
ggaacttattgggaactggagcaaaggtgacacttgttatgttttagcaaagacactggtggcatttttgcctctgccctagagatttgtggaactttgaacatcagagagatgatttagggtatctggcagaagaaatttttaagcagcaaagcattaaaaaggtgacttggatactgttaaacattccattttaaaagggaaataggccgggcacagtggctcacacctgtaatcccagcactttgggaggctgaggtgggtggatcacctgaggctgagttcgagaccagcctggccaacatgaagaaaccccgtgtctactaaaaatgcaaaaattagttgggcataatggctcatgcctgtgatcccaactagggaggctgaggcaggagaatcacttgaacccgggaggtggaggttgcagtgagccaagattgcgccactgcactccagcctgggtgacagagcaagactccgtctcaaaaagattttttgttgttgttaaagaggaaaacagagcgtaaaagttcagaaaatttgcagcccaatgatgcagtagaaaagaaaaacccattttttgaggagaaatttaagctgactgcagaaatttccttaagtagcaaggagcctaatgttaatccccaagaccatggggaaaatatctccaggccatgtcagagaccttcacggcaccccctcccatcagaaacctggaggcccaggaggaaaaaattgttttgtgggctgagcccaggatccctgttctgtgtgcaacctagggacttggtgccctgcatcccagcctctccaactgtggctgaaaggggcccaacgtggagttcaggctgtggcttcagagggtagaagctccaagccttagcaacttccatgtggtgttgagtctgtgggtgcacagaagtcaagaactgaggttttggaacctccgcctcaatttcagaacatttacggaaacacctgaatgtccaggcagaagctt

SEQ ID NO: 201202 - DNA, 1000 bp, Homo Sapiens
actaataaaaagaaaatgagtttattgttctagagagtatgagaattttgacaacatgaattctcctgtcctaggacataattaatacttagaggcatactatttcatgtggaagctaccattaaatcaatgttaagtgttaattacctcacataatcttctaatctgacttgactgaagacgtacctgacaaagttgatttatcaagttgtaaatcttcacctgttgaattcataagttcatgtctgaaaggtgagaataaatacttaatattcattaggcaatattcagcaaagtaatatccactagtacatatttaatatttcatcatgaactgcgggtgtgaagagaaaagacaggctgggcacagtggctcacacctgtaatcccagcagtttgggaggccgaggcaggcagatcatgaggtcaggagttcgagaccagcctggccaacatggtaaaaccccgtctgtactaaaagtacaataattagctgggcatggtggcaggcacctgtaatcccagctactcgggaggctgaggcaggagaattgcctgaacccaggaggtggaggttgcagaaaccattatcacgccactgcattccagcctgggcaagagagcaagattctgtctccatcaatcaatcaataaaaatataaggaggaagcatttactgtgtatttatatgtctggtattatgtgaagcactttactatcttatcaaatcttcgggacagatcttcagttctcatgaccacaaaagaggatactaaagctcagacaggagaagagacgtggccagcctgtgtccccagggcctatggtcttaccactaggttacagtgtttccagatatcacatgttgtgagatttttgctttaaaatgaaccaaaaaaaaaccaaaggtgaaaaaggcataagctattaaaaagtgggagaaacactaagagaaccttaagcatgtaactaaaaatattatggaaatgttattgaattc

SEQ ID NO: 201203 - DNA, 1000 bp, Homo Sapiens
aaaggaggagaagggggctgttggggaggaggaggaggagaagaagaaaggggtctgggaaaggatccggttcaaattaagttctcaagcgctggtggaaggtttagctacaggtcacggagaagatcagggaagcaacaggacaggcagggcaagggagcgtgaggcttaggagcaattagagggagacaaaggttctgctttccaccaaaccttcttcggtctgggccctcccttagcaaccctggggctttagactctctctccaccaatccctgatgaccccggtggtgcctcacaatggacattccaagtagcgcccgcatcatcccaatgacccctcccccatctcagtcccccacgctcctcccaaggccaggtcctctctggaaccttcacaaacctgacttctggtcctccccaaccagctccctgtccctgcttctgggcgctccttccttcctgagctcccagggttcctcaaggtcacttttggcgacaaaacataaaaaacaaatgatggcaggatggcaggaagaacctcatacccaagcagagtgccaggttttacagcctccgctcagccattcatatcctaagcaacaaaacatcagcaggatgcggaaggtcccgatagtaaaccatctccatcacatccatgtagccatccgtccatcaacctgtatctcaggaacaaatgtacatacattcattttaagcatgcatggtacatttacaaaaattaacctgacttattttgttccagcaaatctcaatatatttgagagcaatcaaatcacacagcatgtttctgatcataaaactgtgctagaagtcaatgattaaaagctaattcaaaattattatttgcttggaaattcaaagtgcccttataagacataaacataagaaagaatccaaaatgaaacaagattgcctttcaactcaatgatgagatcataacatggcaataaaatgtctccctctggccggggaattc

SEQ ID NO: 201204 - DNA, 1000 bp, Homo Sapiens
attccatcattcccacttctgcccacaagaacaaaataattcaaactttatgcactgaagtaactctggaaggtagaagtgccgggagagtcccttggagataaaaaaacctcaacaataaaaaaaagcaatttaaaaatccaactgcagccgggggcggtggttcacgcctataattccagcactttgggaggctgaggctcaggatcacctgaggtcaagagttcaagaccagcctggccaacatggtggaactccacccctctaaaaatacaaaaattaggctggtgtggtggcgggcacctgtaatcccagctactggggagaatgaggcaggagaatcgcttgaacccagatggcggagcttgcagtgagcagagatcacgccactgcactccagcctgggcgacagagcgagactctgtctcaaaaaaaaaaaaaaaaaattccaacttcctcttttaggcgtcttcttaaggaaggaagtgtccgcgtgaacacgagaggcctcagatccagaagcacaagccgtgcatgaaaacaccaaaagactcactgcagggagcaaaggcagccaggccctgccaaaccagagggggccctggcaccggcgaccacagagcgctgggggaggcatcgcacccaagggcacacacgcaggaaaaccggggtgagaacatagagctacttttccttcggtattttcagaattagtctgtcctaagagaaaaaaaaatacatggtgaacatcactcacttgaggacttcccataagcaaggagaagtcgctccccactgaatgtgtgatttctcgattttagattttttaaaatcatttatttatttttgagacggagtctcgctctgttgcccaggctggagggcagtggcgcgatctcggctcactgcaagctccgcctcctgggttcaagtgattctcctgcctcagcctcccaagtagctgggattataggtgcgcactacgacacccggctaattt

SEQ ID NO: 201205 - DNA, 1000 bp, Homo Sapiens
gcacccgccaccacgcccgtctaattttttgtatttttagtagagacggggtttcaccgtgttagccacgatggtttcaatctcctgacctcgtgatccgcctgccttggcctcccaaagtgctgggactacaggcgtgagccaccgcgcctggccaatttttgtattttcagtagagacgagggtttcaacatattggtcaggctggtctcgaactcctgaactcaagtgatccgcctgcctcagcctcacaacattctgggattacaggcatgagccaccactctggccgcaatttccaatctccttttctctctctctgtctctctctctctctctctctctctcacacacacacacacacacacacaaacacacacccctctgcttccatcataacaccttctataactctgaccctcctacctttctcttcttttttattttgagacagagtctctgtctttcaggctgaagtgcagtggtgtgatcttggctcactgcaatctctgcttcctgggttcaagagaagtgattctcatgcctcagcctctggagtagctgggactacaggcatgcaccaccatgcctggctaaattttttgtgtgtttttagtagaggaagggtttcaccatgttagccaggctggtctcgaactcctggcttcaagtgatctgtccgcctcagcctcctaaagtgctgggattacaggcgtgagccactgtgccagccataatgattttatgttatgagacagggtctcactctgttgcccaggctgcagtacagtggctcaatcatggctcactgcaacttcgacctcctgggctcaagcgatcctcctgcctcagcttcccaatgtgctgggattaccggaatgtgtcactgcacctggccaataatcaggtttttatcttgcctttcttctctaaaagtgtcactggaaaaccagatagtacataagaagaagtatcttgcataaaaaaaaaaaaagaattc

SEQ ID NO: 201206 - DNA, 1000 bp, Homo Sapiens
gagatcgcgccactgcactccagcctgggcgatagagcgagactccgtctcaaaagaaaagaaaagaaaaggctgcatgctctaagattccaatagtatgacattctggagaaagtaaaactatagggaccagaggcacaggggtctggggatgaaatgaataggggaaggacagaggaatttcttggaatggtaaaactattatgcatgatactgtaatggttggtacatgacactcaaaaccttaaaactggacaacacagagggaaccttcatgtacgaaaattgtgttttatttttgagacaacgtcttgctctgtctcccaggctggagtgcggtggcaggatcaccgctcactgcagccttaacctcctgagctcaagcaatctcctcacctcagactccccagtagcagagactgtaggcgcacaccaccacacctggctaatttttgtgggatctcatcatgctgcccaggctggtgttgaactcctggctcaagcgattctccagcctcagcctcccaaagtgctgggatgacaggcatgaaccaccatacccagcctcaaaatttttaaataataatttacgagggcaggggatcccaagaaagaatgtagaaggtgacaaaagaatgcgatcgtgttacaaaggtatgaaacacctcgctgaagggggcaggggaaaggtgccgacctcagtgattctggaaatgagtggagtctgtaagactaaaggcaaaaggcactggcatctgcaatgtgctttagttgatgaagttgcttcccacaaggctacaggttgacaattctgatatcaccgtgcacgtatactgggattgagcagctaaataagtagagggcagatggtggagccccgtccctcgctctcagaggggagtttgcagatcatgaaggggaggcggctgaatgatcctggtggtgacgggcgggattggaggcatctgtgagggttcctgtttaacttcacatagacaca

SEQ ID NO: 201207 - DNA, 1000 bp, Homo Sapiens
catgaaaaagggcccccacctgcaaaaggcactgcaacctctgtacctggacctgctgagtacatggatggaggtggacaagagccttggcctctgccaagtcaccccagtgtctaatctttctaatctccacaatatgctattgactcactggactccgttataagaaacaaaaatcaatagcaactggtataacttttaaattggattctaatccattgtagggttgggtgttcatttattcctttaggaaaacttagtcatttttttttttttttgagacggagtctcgctctgtcgcccaggctggagtgcagtggcatgatcttggctcattgcaaccttcgcctcccaggttcaagcaattctcctgcctcagcctcctgagtagctgggactacaggcacacgctgccacggccagctaattttttgtattttagtagagacaggttttcaccgtgttgcccaggctggtcgcaaactcctgagctcaggcaatcggcccgccacggcttcccaaagtgctgggattacaggcgtgagccaccgcggccaacccaacttcgtcattttaaggaagactgaattgaatataagaacgcacaatggagttgctagccttggcaagggccgtggccaccatgccccacccagagaccctcagggcaaacgtgctcaaccccatttttttgcctagggacatgctggtggcagaatgcagcagcaatcctgggtggtgaggtggtatggaggtgggaatcattcctgggagatggggagaggtgagggtgaaagatttaaagtctctggagcaagctctgttgttcataatactaatgtaccattggccaaaggaagttacatggccaacccagattcaacagatgacttcacttagtaagcacaaattcaaagataaaaatgaagaatgtaaaaatggtgactgcagagcattaaactccaaatgtgggtctgggtctgggtctgggtctgggatc

SEQ ID NO: 201208 - DNA, 1000 bp, Homo Sapiens
accaaaaacagttgtctctttaagaaaatatgccttggtttccaatgacttcaaatgaactctggtatcagtacccccaacagggaaacctggggccactcataccccagtttaagaagcatgaaattaagagggtcttcttgtttcacagggatcataaacaacctatttatgggactccactggtgaccctagtccttcaattcattgcttccacaattgttaagttttataaacatgggggtgagagattcaggcatatggcccttacagtcagagaggaacgtctataaatctacaggtgttacccataagagctccttggacgtcttagaacccaaaggcaggcattcttaatgaacagatgtcagccaggtgtgagccactttgaagggggcatcactcttctgtaattccttgtaaatgggagggattgatggaaacaaatctccttaaaggcaatgtacactttggtaaggactgaagctttgggaactggtaaggaagctatggtttctttaagtcctttcagaaaacctttcaaatgttcaaaaggaattggaaaacaaaagttgttgcttctcttccatttactattagattgagagaaatggactagatattaataaaaccttaggagttagacagttccaggttgaagtacaaccacactcccttcctaacacatggatttcctcactgtattagtccgttttcacgctgctgataaagacatacctgagactgggaagaaaaagaggtttaactggacttacagttccacatggctggggaggcctcagaaacatggtggtaggcaaaaggcacttcttacatggcagtggcaagagaaaatgaggaagaagcaaaagcggaaactcctgatacacccatcagatctcatgagacttattcactattatgagaatagcatgggaaaggctgggccccatgattcaattacctccccctgggtccctcccacaacatgtgggaattc

SEQ ID NO: 201209 - DNA, 1000 bp, Homo Sapiens
ggcgagtagtcgtagccgccatagccaggcccgtagccctgctggtagccgtagccctggttccagtagttgccgtagccctgattccaactctgactctgacctgtggggggagcagggcacaggggcccgtggaccatttagcatacgcaggagctaggatggaggaaatcctgccctttggggtggcagggttactgtggcaactcaggcagaagccaaggggctgctgttctggtgtatagggccctgggcccaaccctgcatctgagagacccaagcagaggatcagagaccaggatgctaactttacttggggcaaacaaggcagctcactcactcagtcactctctgatcactcccactctccttggcagcttagcctttaaaaagatgcagttcaggctttggagtcagaggggcctgggatggaaggggataaatgcctggcacagctctgccctacccacccttctgcctacctgctcacaggtgtaccagactcaggacatccacaaagccaagacacccatcacatcccctcccccagagtgtaacacaaatgctctctctgccctgggcacccaagccattccaaggggcagcagcaggcaacagcctcaagcatacagccctgacccagagccattcctattcctgttcgtccccaacctcacacaatctgcccacccctgctgcacagcaccagagggagccccaagacaggcttggaaggctccatgtaggcagggaaacaggacctatcttcatccacgttccactcacctccacctccaccaccacctccgctgcctcggttccctcggttgcggtttccacggcccccagagccatactgctgctgctgatagacttctttgggctgggccaccttgatctcacactaaaagtcaagaggacagtggtcaggccagtaggacaaactcagggcagtgactgcccaaacaccttcactgcgacaaacatcaaatggtggatc

SEQ ID NO: 201210 - DNA, 1000 bp, Homo Sapiens
aattgagctcctgccgttctattttatttttattttttaaaaaagattttttaaaaaaacagagacaaggtctcgctgtgtttcccaggctggttttgaattcctaggctcaagtgatcttccagcctcagcctcccaaagtgctgggattacaggtgtgagccactgcacctggccgagatcctgctgttttatggcctcctttttatttaatatgttgtgaccattttctcatattattagatgttttttttttgagatggagtcttacttttttgccaaggccggagtgcagtggcatgatctcggctcactgcaacctccgcctcctgggtttaagtgattctcctgcctcagcctcccgagtagctgggattacaggtgcctgccaccatgcctggctaatttttgtatttttagtagagacggggttttgccacattgcccaggcttgaactcctgacttcgagtgatccgcctgcctgggcctcccaaagtgctgggattacaggcgtgagccactgcgcccagcctgatattctacaaatatctaaggctatcactgatattctacaaatatctaaggctgtcactgacgatgcagtgatcatccttgtgtgtaaatctgtgtgtttgattgtttccataggttggattcctgcatgtgaaattgctgggtcagatgtgtctgaggcttttatggatatttctggggactggtttctattctgaaggaggaaaaatatcacagatttgaccaaatcagcccctggttttgtgggtcttggagattcagaactctaattggttagtggcctaaccaggcctgcccacttctgagccacatccttgtcccagtgtccctctccagcgtgagacctctgcagaggagctgagaccaggagaggaaggttgctgacagttctagctggctccttgggcctgggcagaagagccatgattgttggccatttattaataactattatttgctgaattc

SEQ ID NO: 201211 - DNA, 1000 bp, Homo Sapiens
tttacttacatttgtgtcttagtccattttgtgcttctgtaacagaatacctgaggctgggtaatgtataagtaaaaaaggttcatttggctcaaaatactggtggctgcaatgtctgagattgggcagttgcatctggtggggcctcagtctttttcacctcatgatggaaagtggaaggggagcaaggtgtgcaccagagatcacatagcaaaagtgaaagcaagagggaagccaaggaacccagactctttttaactagctactcctgtaggaattaatccattcctgtgacagcagaactcactcacccccatggaggacattaatgtattcatgagagatccgtccccatgacccaaacaccttccactaggccccaccgccccacactgacacagtgggggtcaaatttctcaaaaagaaataaaaatttttttgagactgggtccggctctgtcgcccaggctggagtgcaaatgtgcaatctcagctcactgcaacctctaccccctgggtgcaagcgatcctccctcttcagcctcctgattagctgtgactacaggcacatgccatcatgcccatctaatttttgtatttttggtagagatggggtttcaccatgttgcccaggctggtcttgaactcctggcctcccaaagtgctgcaattataggcatgtgccaccatgcccggctaaattatagttttccattgaaacataaaatttctctctgtagtaaccatcatttttgatcataatcaaagtaagactattcttgttttaaaaataagtctagttttgttagattttgcttgattatttacataagtgcagcaagaacaggagatgaccacataggtgctttcaagtttctttgctggaagttttcatacagaatctcagatttgacttttaaaggccttattcaggctaaaacccaagccaagcacatactatcaaatttcagccgcagtccttatggctttgtgtgaattc

SEQ ID NO: 201212 - DNA, 1000 bp, Homo Sapiens
ggcacgcgcctgtgatcccagctacttaggaggctgaggcatgagaatcatttgaacctaggaggcagtgagccaagatggcaccactgcattccagcctgggcaacaatgtgagacccccatttcaaaaaaaaaaaaaattgccttatcttctgaataaggcgcagtcagaagaccaatcacagagatccctgaatctccccaggtgccccagctcagtgacgctgtcaccctggaaatatcactctcaaagcccaccaaaaaataaaataaaataaaaattaaaaatgaaaacagtaataccaacccttacaccatatggctctgttttccctgctgggaactacagcaggtcacacagtctgtacaatctgtacagccgggaactaccaaggtcacacagtctgtacaggcggagccaggatcaagcccatatccccactacaatggcggtctgtgtgacctgggaaaagtctcttaacctctctgaggctctgtccccttatctgtaaaatggggatatagcatccaccttgcaggcttgctttgaaaagcagaggagtgacagaacaatgggaacacactttgtcaagctgttggttgttgttacagaggaagggtttcttctaatgtgggttttgaaagaaaaatattaaaagtcagtggacacttctgcttctagcagatggagtaaaaggaaacggatttaccctcccacttggcacaaccaaaatcctgaaaaaatacaggaaacaacagctctcaggccagtgggcatgaggcaataaaagctaatgatccctgtggcagccctgtgactgcccggcacaccacctcaagcaagtgcctaggcatagggagaggaaacgaggaggagggcaggctccctgaactgaggaggccaaggcagtgggtgttcacaagacagagtaacaggcaacagaaagcaggaaaggagaaaactccagacttctgtggagggtctgtttgagtactgatc

SEQ ID NO: 201213 - DNA, 1000 bp, Homo Sapiens
taagctgtataattcctttcccttcctacattcttgtttgtaattttttcgggggaagaggagttgctagtactggcattggttttcctttctctctctctcttttttttttttttcctgagatggagctttgctgttgttgcccaggctgtagtgcaatggcacaatctcagctcactgccttttggcttcaagcaattctcctgcctcagcctcccaagtagctgggattacaggtgcccaccaccatgcccagctaatttttgtatttttactagagatggggtttcaccatgttgtccaggctggtctcgaacttctgacctcaggtaatccacctgcctcagcctcccaaagtgctgggattagaggtgtgagccaccacacccaggctttttttttttttttttttaattttgagatagaatctcactctgtcgcccaggctggagtgctatggtgcaatcttggctcactgcaacctctgcctcccagtttgaagcaattctgcctcagcttcctgagtagcttggattacaggtgtgtgccaccacattcggccaattttttttttttttttttttttgagacagagtctcactctgtcacccaggctagagtgcagtggcatgatcttggctcactgcaacctccacctcccaggttcaagcgattcttatccctcagcctcttgagtagctgggactacaggcatatgccaccatgcctggataatttttgtattcttagtagaggcggggtttcaccatattggccaagctggtctagaactctggacatcatgatccacacacctcggcctcccaatgtgctgggattacaggcgtgagccaccgtgcccggcccaatttttgtatttttagtagagacaggggttcaccatgttggccaggctagtcttgaactcctgacctcaggtgatctgcctacctcagcctcccagtgtgagccaccgcacccagcctggattgttgaattc

SEQ ID NO: 201214 - DNA, 1000 bp, Homo Sapiens
tgtagtcccagctacttgggaggctgaggcaggagaatggcgtgaacccgggaggcggagcttgcagtgagccgagatcccgccactgcactccagcctgggcgacagagcgagactccgtctcaaaaaaaaaaaaaaagataccactggcattatttactcccaacatgattatatatcaggaaaactaaaaaaaattaattaactgaaaataagaaatcctggccgggtgcagtggctcacacctgcaatcctagcactttgggaggccgaggcgggtggatcatctgaggtcaggagtgagagaccagcctgaccaacatggtgaaaccccatctctacttaaaagacaaaattagcagggcgtggtggcgcatgcctgtaatcccagctactccgcaggcggaggcaggagaatcaattgaacctgggaggcagaggttgcagtgagtctaaatcgcaccattgcactccagcctgggtgagaaagtgaaaatctgtctcaaaaaaaaaaaaaaaaaaaaaaagaaagagaaagaaaagaaggaatcctataaggtatctatttgtaaaactagtataccataactaatagtttttctttataaaaataataaccaagaataacaaaaaaacaaacttgtaatatcagtgaagtaacaaaatacttaaaaaataaacctaacaagacatgtataaggcctatcagagaaatacttaaaaattcatcttaggaacataaaatatgatttacatagaaaggtatcctttgttcttaatgaaaggattcaatattgtattgatattaattcctccccccccccactaagctataatcttgatgtggtcacaattaaaattcaaaaaatattttgggggaaacaaaataaaatgttctaaatttcatctggaagaataaacatggaagaatatgaaagaagatattaaccctaccagatatcaaaatatattacaaagctgctaaaaagaatgaaataga

SEQ ID NO: 201215 - DNA, 1000 bp, Homo Sapiens
tatgtgccaagtgtttactcatcttacatatgttaatgcctttaacattcatagtaagcctacatgaaaagcattattaatcccattattattactcagcagactgaggagagaaatagtacttaattcagtgcatttgttcaaagattcctagtcaaaattcttatcttcaacagacagtgtagattcttgtgagacctggagtatcagttcacagttctcattcaagtcaagacaataatataatggcttcctatactttaaaagaacttcaaggctcatatttctcttttataagtcttcaaaatttaacaagcaattgacattagtgtccatttcactattactgttgttaacattattatgtctatctttaaatatatgtcactcattataaacatatatgtcaagaacttgccataaatgaagacattctggtttatgctgctttctcagcaattcaaattcaaggagacttgaattagctcagcaagcactctctccttgatcatcttcaagagaaaggcaaaataagagtacttcaactagctcctactgacagacaagtatgtgctaatgcacccaggaaatggattaggtaaagttcaaagcagacaattgagttaggaacttcattttgtattacaatgattctgggtgacatgcatacagtttatcaacactgttgagtccagttaagtttctatgaaacaagtttctacagcactctgtggaattattacctggaataaattctaacacctttgaagcactttctggctcccattattttaagcactttatacccattatctcatttaaacctgacattaaccctttacagctatacctgctattattactacttttcaaatgaggaaagtaaggcacacagaagttaggtaatttacctaacatacacacctcataatcaagagaatcatgacccaaaataagaaaatttcagaattccaatggtatctggaaagtcacctatacc

SEQ ID NO: 201216 - DNA, 1000 bp, Homo Sapiens
ggattacaggcacatgctgccacgcccagctaatttttgtatttttagtaaagatggggtttcgccacattggccaggctggtctcctgatctcaggtgatctgcccacctctgcctcccaaagtgctgggattacaggtgtgagccaccgtgcctgacctaaaagctctttacagtgtaaaaaatattctgagctttaagccatgtgaaaataggccatgggcatttgctgacccctaatagaactccattttacctttctgatcatgtttcccattaactcttcaaaaatatgacctccatttaaatcaagatggtctccttcctcactgcttgtggaggtccagtgcccagtgtctgcctcttgcttgctcctccatcattgttctgccattcgagatcctcatacttaccctttaagatctagcccaaattttccatgaaactaattctaataattaaaaacttcctgtagaacttaactttgtctagtacaagttagctttcttattcagtagtagcttactataaattacaagaataaaaagattaccattttccctcacactgttttgtggagaatgcctaaagttactttttctttttacaggtcagtattcctatttggcatcctaatcccctttcccaaatctgaattttgggatttgaagcttgcatttgagattatgatttgtcttccttgttgtacacaggagcagggactttacaattagtattcgcatccctgctccttcatacttcgtgatgtaaggcaagttattttcacttatgcttaagtttcttcccctgtaaaaaggggatggaagaggattaaatgaattaaacatgtaacacgcttaaagcaatgcctggcaagtaataagtgctcagtaacttttagctgttcttattagcatgtttggaaaccagtagaaactacaccagcaagttaaggttgaaaagtggtattgatgggcttggggtagtacagtatgaatgg

SEQ ID NO: 201217 - DNA, 1000 bp, Homo Sapiens
ttacttatgtctagattttatgtgaagatatttccttttctacattagggggcaaagaaatccaaatgccacttgcagaatctacaaaaagaatctttccaaactggttaatcaaaagaaagtttcaactctgagagatgaatgcattcataacaaagaagtttctcagaattcttctgtcaagtttttatgtgaagatatttccatttccaccatagtcctcaaagtgctccagatggccatttgcagattctacaaaaagagagtttcagaactgctcaatcaaaagaaagttttaactgcgtgaggtgaatgcacacataacaaagaagtttctcagtttgcttctatctagattttatctgaagatgtctccttttctaccataaaccacaaagcgctccaaatgtccacttgcagattctacaaaaagagagtttcaaaactgctcgatcaaaattaaggtttaactctgtaagatgaatgcacacatcacaaagctgtttctacgattgcttctgtctagattttatgtgaagatatttccttttctaccttaggccacaaagcactccaaatgtccacttgcagattctacaaaaagagagtttccaaactcctcaatcaaaagaaagatttaactctgtgagatgaatgcacatttcacaaataagtttctcagattgcttctgtctagattttatgtgaagatatttccttttttactataggccccaaagcgctctgaatattcacttgcaggttctacaaaaagagtgtttccaaacggctcaatgaaaagaaagattcaactctgtgagatgaacacacctatcacaaagaagtttctcagaattcttctgtctagtttttacatgaagatatttccttttccaccacaggcatttaagcactccaaatgtccacgtgaagatactacaaaaagagagtttcaaaacaactcaatcaaaagaaaggtttaactctgtgagatgaattc

SEQ ID NO: 201218 - DNA, 1000 bp, Homo Sapiens
tatcccctgaaccaagaatggcacctggggctataaacatcattcaaaaccctggtacctgaacactagtccaaggtaaagtttacatacaactccagtaaaaggtgaaaaataaggacccagtggtgattttttcagaaaacaagaggtattcaacttaagcaggattcttatttttggtgttaaaatgcccattaatgaaatgtttttaacttttaaaagttaacaaccatatgtttttgttgttgttgttgtttttgttttgttttgttttggtggggggggggtttatagagtgagattttagtattccatgaaatctgagaatccaggaaaaagtatttttacatacatgaacttagtagaagggtcaataaccctctgaagacacaaaaaaggttcttgatgcaacctggaaaaagttaaatgtgagggtgtatagcccttaataacttaaaatagcctgtgtgaattgtattggaacccacttctctctcctctgggtgccctaagtccctaatgcccttaaaacgcagtcctccaggcacatggctgctacatactagaacagaaagcccctcaaaggcaggaactccaccttaaacctgtttaatcctctaacattgcctgggacagcgtcttgtaaagggtaggtgccaaatcacactggaaaacatcaagtttctaggcctagtgaaccttgtaaattgccacaaatcacaatgaacagagattcctgtgatccatcaggggctacacctgggagaatcttgatagaatttggggaaatgtctacttccgcgtgtcagaagcttaagaaaaaagaggaccataagaatggcttacggtgtcctaactggaggggaaagctatgtgatctgatgtgagtgttttgctcaacaaggttctgtttttgttttcttttccaagtgttaactaagaaaactaggtcactgaaataggccctggaggctcactagagacattagcattctgcatg

SEQ ID NO: 201219 - DNA, 1000 bp, Homo Sapiens
ttccactggacaggcctggtagaaaccaccttaacgaagtggtcagagttaacattactagttataggacaaagtgacatcacacccttctgataagacacattgaaacggacatatcattacttctatagcaatcttctcaaaaatacatgatccaaagaggacacaagaaaacatcagacaatcccacatcaaaggacactgtacaaaataattggtctgtactttttaacgcccaggcccaggccaaagccaaggtcatgaaagactaagaaaccaacccagattaaaaaggccagagaggcatgacaacttgatactggactagggggaaagaaacactatgaaggacatccttgagacaagagatgaaatttgaatataaactatggattagaatgtattattgtactactgtacaatttcctgatatttatcactgtactgtgattaggtaaggaaacattcttatctaatacatgctgaagtatttacagataaaagaataggatatgatgttttagatatgtgtatatatatgagaatgaaaataatgcaaatggggcaaaaacaactgataaatttggtaaaggatataaggggtttttaaaataattaattgcaactattatgtacatttgaaattaaatcaaaatttaaagtaacaacaaaaatcccaaggatgaaactgctttcacaacccaacactatctattccaaagctagtagaaatttgatggtttgtttggtttttgtttgtttgtttgtttgtttttgagacggagtcctgctctactgcccaggctggagtgcagtgacacaatctcggctcactgcaacctccgcctcccaggttcaagcaattctcctgcctcagcctcctgagtagccgggattataggcatgcaccaccatgcccagctaattttcatagttttagtagggacagcgtttcaccctgttggctaggctggtctcgaattcctgacctcaggtgatc

SEQ ID NO: 201220 - DNA, 1000 bp, Homo Sapiens
atttatttttccttttttaaatgatgagtaatttgggggaagatactttgagactatgtaaatatcctgaatctccttaaacttttacccactagttctagcatctgttggtgagtcttgcctgaatcagttattactataaagaatccatgctgggttttctaactccatcattctgtctacatttattagaatcagtaggctgtaatatatcactatcagtatttatttgcttatgtttgtttaaacttatttaatgtacattcagtaaaatgcactgttttttagtctgtacttgtgaattttgacgaatccattgagttgtgtaaccaccaccacagtcaagcaacagaagctccatcacctcccaaaatgttccctcatcaacccttcacgcctcccttgacctttgttctccatcgctaatgattttgccttttccagaatgaatatctatggaatcctagtctgggttgcttttcagtctggcttctttcacttaagataatgcatttcagattcatctactttgttttatttaccattaatttgttctttttattgctgagtgctattccattgtgtgaatgtgccccagtttgtttatccatttaccctttaaagaatatttgggttgtttccagttttcagaatttgggaataaagctgctacaaatgttcacatacagtttttcatgtcaacataggtattcatttcatttggataaatgcctaggagtcaaagagtctctctgaaagtattctggtttgggtggctggctggctgatttcaaaaaaaaaaaaaaagaaaaactaggaatcagatttctgggtatgttgaactttattaagaacccgtccggccgggtgcagtggcacacacctgtaatcccagcactttgggatgctgaggcgggaggattgcttgaggccagaaatttaagaccaacctgggccaggcactgtggttcacgcctgaaatcccagcactttgggaggc

SEQ ID NO: 201221 - DNA, 1000 bp, Homo Sapiens
gctttactgttgtggaaaatactgctgtcgtcctcattgtgtaggaatacagggtacacttactcaacattttcttatattgagcacttgttaatctttcagatttccattttttacaagattcagttatgagtggccctcaccatactgacactgactgagctactctctactctgaataaaagagaccctaatagttaggcaggaatatcattgcttctattcagcctgaagaagttatgaaagatggatcttcatccctctacaaaccctaggttgcaagcgttcccttgcaaaaaggatggaggaaatatgtcagaggcattcaaaccagagtgactccatcttgagtaggggctaggtaaaatgagaatgagatatggtaggctgcattgccaggaggttaggcattcttcactacaggatgagataggaggttagcaggactgatttcacaagatacagatcacaaagaccctactgataaagggagaggcagtaaagaagctggccaaagtccaccaaaaccaagatggcaatgaaagagacctctgatcatcctcattgctcattatttgctaattataatgcattcctctgcttaaagacactcccagcagtgccacaacagtttacaaatgccatgggaacatctggaagctaccctatatggtctataaaggggaataaccctcagttctgggaactccttagccctttcctggaaaacttatgaatgataccccctttgtttagcatataatcaagaaataaccatttgtgtacttagtcaagcagcccatgctgctactctgtctatggagtagccactgtttgattcatttacttcttaataagcttactttcactttactgtctgggattgctcttgaattccttcctgtgtgaagccaagaacccatgtggcctcccaggctgaaccccatttttgggttttgccctgtgaaaattctggtaatgatttaaaaataaagaattc

SEQ ID NO: 201222 - DNA, 1000 bp, Homo Sapiens
tcatggtccactgctgctaatctaagggtcgctgagaaggctttctatcccatattatgaacctacagcatgtcattccatcttacctctgagtcttaaggtctcttgatccttaaacaaccactgtagccaataacttagtgaacacaaacactgaatgcctggaagttcctgctgagtctggctccttgctgcatttccaggctcatggtgcgctgtgttcctttttcctttctttgctctggattccatgactttgttacaattatttgtgtatgctctgtttcctcctaccccggagccttggtacctacaaacactatttctccatctaaaaatctcatgctctagcagccctgcctttacctccaggccctcctttagtgcctctgttttatactacgaaatacactaccaaatcaccatgagcctctccctgatggtacttgctactcctgcatgtagctgtgtgcttattgattgagatctctctccactggcctgtgaactctgcaggaagagaccaggtctccccttgttcaattgatcaagcacagcatgttgtacttggtggcttcttaataaacatttgatgactcaatgaatgctgcaaggatattgggataaaatgtgtaccatgaggaaagggaaggagagtctttggtagcaaagatgtggggctaatataggcagacctcacttcacttagaccagaggacgttgtacctaatgggtgtccttggaggccccttccattgctgaggatagaatttgaattctcactatggtactggcccagggcagagcctgtcttactcaagcatgaaactcttgcctatttcatcaaattgttctaatgccaatctttccctcaccatgtttcctgtccttggagtaaattccaggccagggtctagcaagtgcttccccactgtatttacttgtcactttgcctgtcaggtttttggagtaatgtttgcatcacattttgtgcaagctt

SEQ ID NO: 201223 - DNA, 1000 bp, Homo Sapiens
aaccctaattgtgtcggaaaaaactcaaaccatctgtctgctgttctcacaccacaacaacaacgaacacagaagacttctgtgagcaaatgtgtgggagtttctccccacacaccatgcaagcaatcagttttgcagtggatcccagctgtatagcatcagaaaccacaggatgagggttccatctcacaagtctgccccctctccttcccaccagtcatgaatctaggcccctggaacatctgaccaaccagctttaacttggggttttcacaacccccgatttgggttggattaatttgttagagcagcccacagaactagggaaatacttatattgaccaatttaatgcaaaggatatcttaaaggacacaaataaacagccacatgaagagatacacaggatgagttctagaagagtccttgagtgcggcagttttgtccctgtgaagttggggacattctcttggcacatggatgagttcttgtgcacttccctgaaagctgggggatggagctgaaagtcccatcccctctaaccctgccttgttccttctggtgaccaggcccccatcctgcaactacctaggaactgccagccttgagtcaactcagtgtatgaaagacacttatcactttgaatattccaaggattttaggagttgtgtgccagcacacacggtcaaagaccaaatatatatttctcagtatcatacaaatacaaatccttcccagtgaactgcaatcaactggctcgtgagaatcaggatcattagcaacccaagaatgtttcttgagttcctgcactctcctcatgcagagctcctgcccagtcattgttctagctgcttcattgctcccttcgtaagggagacactatgtcctgacaaagcattacttgcccaaagtaatgtcctgtactctgtctgttctttagaaaattagcattacactgtcacatgttcaccttttactatcccagatgttatctctgaattc

SEQ ID NO: 201224 - DNA, 1000 bp, Homo Sapiens
ataggtatttttcagagggagagtggggaggggcaaaggcattccagacgagggtaacatcctatggtgaggcaggcctgcaggtgggaaggaggggaggatgggcagagtttgtgctgtggagcacagtagcccagtcatgagagaggtgcaggacggagcacacagggtgggctgggcaggctgggcagggtgctgattggcggctgcagggctgctccccaggcatgggtaatcgtcccacgcatctggaggcaggctctgtatgcatctggttctttccatggccctgaaaacagtctttttttcccttgatgaaatcctgcagtctgctcccatgtaccagtacctggataggaaactgttcaaggaagcctaccagattgcttgcttgggtgtcacagacactgattggcgtgcactggccatggaagcgctaggtttagattttgaaacagcaaagaaggtaagcatctagccagcaggagctggagtttggtccttgtggggtcccttaagaaggcagatggggacgcaggtggcacggagaggccatagactgcagcagtctctggagttaggctgacctgggcttgtatcttagccacttcctcactgtgggcctgggtaggtgacaccctttctaagattgcttctctatagacgtagggtgatgacaggccccatcctcacaaagctgtgaggatcaaatgggaggatgcctgtaaagcctgacccaggagcagcatgtcagattctggctgtcactcttattagctgttctctatgggaagcacctgactagtagcctggcacatcacaggcactccgtaaatggcggcttttattatcggtgtagtcactggccatgatgctgcacacaatgctgcttttcttagcatctgccaactaaggtgggagagatggtcaaggtctctgattctgacagcaatgtgggcacttcccacgtaccttcatggcgggattcatggacttgatt

SEQ ID NO: 201225 - DNA, 1000 bp, Homo Sapiens
ggcccgcgaggaacagctccatgtcggcgcagtctccgccctccgcactggggctgcggaacttgaagctctggccacgatgggcggggcgcggcggggccaatggcagggcggccttcagataggcggtggggacattcaaatagctgctccccgctgcagtgattggccgaaaggagtgggcgcgccggggcggggcggggtctccgctgcctcagggacgggtcttttgaagtgcctggtgtgacccatcttccgtgcttgaaatcgacgtagtggaccctggctagcatatttttccctgccaagattattgcaaaaagacgatgtggtggttaatatcggaaagaatgtgtggttaatatcaggaagaacacgtgaaatggagaatttcagggctaacatttcttgttttgtttctgaaaacatcggcatgtcctaaaaagtgtcgcctgtgcccatcatctctcaggcttgggagcaggacaccgccggctcactttaaagccaagggaaagaatttggacaaccaactacgtctggagaagacaccaatgtcagcagagctccgctttcatctgtgggcgaaggattacctagatgccaaggcaagagactgaagacacaaactgtttcagtataacaaagaaaataggccgggagcggtggctcacgcctgtaatcccagcactttgggaggccgaggcgggtggatcacgaggtcaggagatcgagaccatcctggctaacacggtgaaaccccatctctactaaaaatacaaaaaattagccgggcgcggtggcgggcacctgtagtcccagctactcaggaggctgaggcaggagaatggcgcgaacccaggaggcggagcttgcagtgagccgagattgcgccactgcactccagcctgggcgacagagcaagactccatctttaaaaaaaaaacagttaaaataaaaatagtcataatacaaattagatataaaaatgatcatgatc

SEQ ID NO: 201226 - DNA, 1000 bp, Homo Sapiens
ggtgtttatgtatttcccacaacacctggacctcagagccgttgaatatgtatttgttatatttacttgaaaagtccaaaaacaatttgctcattaaatttgtagaagacttggaggggctaggaggagtggtccctaattattagttgtagtagctagtaagttgaatgtcatagtcagaattataaaagttgtcaaaagatgaaaaccttataaaaatcaaaaataccaacacctgaattcaaaaatacagaaatcaaaattaaggagagaatagatgtgtttaatagcatattacacatagctgaagagagagctagtgaattggaagagagctcaaaagaaagcatcaaaaatgaagcacagaaaacaacaaacagaaaatgcagatgaggctcagaaacagagacaggttgagaaatacaaatactactgtgttatagttgcctacagtattcagtacagaaacatgctgcacgggttttcagcctaggagcaacaggttataccgtatagcctaggtgtgtagtagactccactgtctcgctctacaatgtttgcacagcaacgaaatcacctaatgacacatttcttagaatgtttccctgtcattaagtaacacatgtctgtatttcagaataagtttgcaattttagctaatgaaattctgatgaggctaattattaattattataaattagtagaaatccagatgacttcttatattatattaatgaaattggttcatcctcactataacactagaaattttgcatttgaaaaacgtttcttttaaaaatttcaaactccaaaaaaaaaaaaaacaaaaaggaaaaataaataagaataaaaaataaaaatttcaaactccataaagagtattgtgccttctgttggtatctcagaatctggagattatagtagataataattataagcttgtttgagaattggacggttatcttgcgaaagagatgtaaagaatcttcacagagaattc

SEQ ID NO: 201227 - DNA, 1000 bp, Homo Sapiens
cctccacacggccaatgccattggtcaccacgtcttcacgccacgtctggtcccgcttggcccggctgatcgtgctcaggcccatgtccacccagtagatggtgtcattttctggaggtggaggaggtaacatggggatgcccaataaggcaggggtaaggtgaggggtcaaaatctcacaaggctcaagacagaggtgagagagtgccggaggggccaggtgcttgaaggggaggtggagtcagggtggcagctgtagcaagtgccccacctcaggccaattcaggcagcctctcactggaccctcagggcacaccacaccacccctaaagctcctacgccacgcccaactccctctgccaccaaatggctcaccagcgtggaagtcgatgccgacagccagcgaggtcccggacactgggaccagggcatctgacttgtcattgggatccaggggaattcccctgattccctcatgcacagagtacaggagaaaggaacctacgcctgaaagacaaggaaacttaaggcatgggtatcgccaacactcccttaaacttggttcctgtcaccctccaactgttctctgcttctcctttgatatcatccccccccaccatcatccctatcctccacccagcacacacaccctagcctgaggccagagcatgggccgggaggaagcgcacctggctggtagctctggggaaccacctgcaggacccctagccaccatgagagggcagcagagactcggatttctcaccctgtgctctgccggcctccacccagcacaacccaaccctgcacccctgcaagttccttagggaaagtctgggagttcagaccagacaatcaggactaggtgactccaaaatctagacttccagtttggtgctcagcctgatcctagtttcctctttgtcctccctctgtctggtctatgccacaccctctctccaacatcaaaaactcaaccccctaaggtcactccgaagcc

SEQ ID NO: 201228 - DNA, 1000 bp, Homo Sapiens
catcttgaaataatctcagccaggcacaggggccacgcctgtaatcccagcaccgtgggagtccaaggtggatggatcacttgagcccaggagtttgagatcagcttgggcaacatagcaagacccctgtgtctaaaaataaaaaattagacaggcatgatggcacctgtagtcacagctactcataggaggtggggaggtcaagctgcagtgagctgagattgcaccgctgcactccagactgggcgacagagcaaaaccctgtcgcaaaaaaaaaaaaaaaaaaaaaaacactccctccccgccctccgccaggttccttctctttcgccgtgttcacggtggtgctggcccctgctccctcccgtgcgtgcacagcgcgtcaggccactgttctttttcctgaactagttgagagttggacatgcaacacccctttatctactgacacttcagtgtgtatttcctgagagggaggacattcccttaaatgcagtgcgatggccaaagtcaggaattacacctgtacatgactcttagccatgctgaagaccatattcaaatgtcaccagctgtcccaacagtgacttttttttttttgagatggagtctcattctgtcgcccaggctggagtgcagtggcgcaatctcagctcactgcaacctctgcctcccaggttgaattttcctacctcagcctcccgagtagctgagattacaggcactcaccaccacgcccagctgatttctgtatttttagtagagacggggtttcaccatgttggccaggctggtcttgaactcctgacctcaagtgatccacccacctcagcctcccaaagtgctgggattacaggattacagggatgagccaccgcgcctggcctgttttttgtttttttcattgttgttttttttaagacagagtctctctcttgttgcccaggctggagtgcagtggtgcaatcttggctcactgcaacctcagcctcttgaattc

SEQ ID NO: 201229 - DNA, 1000 bp, Homo Sapiens
ccctcttttctcaccagggacagtggaggatagaacccggcacacagcatgagggtgtgggggaaagggggctcttctctggaaggatggcagtggcccgcaacgaccttgcatcctgcaagatgcccgcggggaggagtgtatccaaaagcaccctacaggacacgagtcaagacagaatcacaaatctcttctcgtccaggaaacttgactcccttaccttctgctaggtggaaaagcagacacgcttataagctactcaagttttttattaaaaccattgactgttggatttcatcaatccaaaatagcactgtagaatccttccagatggcacaatgacttgtaaacagcatctccataaagcagaagcctgaagactcagtcctatcacagccagagctgtgtgcgaacagacaagccctgagaagtgtgccagcaagagaccctgccccagctccccacgcctcgaccaccgagtcaagggcatgaagggcttggcagtgagggcaggagggtggccccaccctgggagccctgtatcgactgggtgctctggaggccgcccgtggtgacaggccagggctgctttcagacctcctggaaggtgcaggagccacagaaggccccagtgacatggaggaggtgtctgccctgccaagagcagcgagggtgggagaggtaggtcacacagccaccaccaaacaatggtgaagaaggcccactaaggacactgctcagcaaggaaacacacaggaagatctggagtgccaagttaaaaaaaaaaaaagcatctctcaagggagaggcctgaatggtgggagtgcccctcgaacagaaggaaggggctgcgtctgtggtgaggggacagcagagggatagtcaggcctcccactctgcaccacaggtctgtgaagtttctattaagactgtgcttgggccgggcgcggtggctcactcctgtaatcccagcactttgggaggctgaggcgggcagatc

SEQ ID NO: 201230 - DNA, 1000 bp, Homo Sapiens
tactttaagctttagttattattcgacactatagcattatgttgcacaattccttcctgtgttggccatcggtagctgtttttattggcttttatttttgtttgatatattttaatttttttagtacttactttctgatacttccagattatcctggctcctatatttactgtcccagttctagtatcagacatttcttcaaagagcctgattcctttcagaatggtgggaaaacttacatgtggctgctgaatgcacattgtatcttgtccctcattagcaatgctaggaagcatatgtgcgtgtctaacctacctacacacacctaattataaagttttctatgtagaactgtgtgtatctatattaaactaagcataagtttacgttgatgtctccacctctgatctactatcacaggaatcattctagccttctcgtcttgctaatttgtaacctcccacttcaacagtgagaaagctggttcccaccatctgcgacttatgtaagtcattgttttactccagatacagacactgtggttttacaattgttcacaattgcttctgttggaaagaactttataaaatggaatccaataatgaagtatagttcatgtgccttcagcctacagattctattcattttcaaagtttttacctagatttgtgtcttagtccattttgtgcttctgtaacagaatacctgaggctgcgtaatttataagtaaaacagtttcatttggttcacaatactggtggctggaatgtctgagattgggcagttgcatctggcggggcctcagtctttttcacctcatggtggaaagtggaaggggagcaaggggtgcaccagcgatcacacagcagaagtgaaagcaagagggaagccaaggaagccaggctctttttaattacctactcctgcaggaattatctattcctgtgagaacagaactcactcacccccatggaggacattaatctattcatgagggatc

SEQ ID NO: 201231 - DNA, 1000 bp, Homo Sapiens
aattttgtatttttagtagagacggggtttctccatgttggtcaggctggtctcgaactcccgacctcaggtgatctgcccgcctctacctcccaaagtgctgggattgcagatgtgagccaccgcgcccggccaaacctggataattttgaaattttgttgttgttgttggttgtcacaacttgtaggtaacatcaagtgggtagaggccagggatgctgctaaacgtcctacgatgcacaggacggtgccacaacaaagaattatatggcctccagtgtcacttgtgccacagttgagaaactgaaactggatatgattttcacaacattaaagtcctttctgaccttgcatgtagttgcctcttccaagaagatcaaagtattctcctaaaccggaccctcagaaaccctctggatcctatttgacgcttcccaatcctagaggccacttggggtgttgctgcctgtggctggatgggtttggggtctgtcatgagcttctgtgcggctctctggtgctgtaccaaggaaactgctgattcaggggagcaggacagcactcaggaggtgtgggcagaggttcttacactgctgcaggttgggatcctcttctttttaagtaatatattaacagcagcctttgctcttaggcatttttccagaagctgtggctgtttggctgttggcattgggtgtttgccttgtgatatacccagaaaaggattcatacgttacatatgatgaagtctggggatgggactggattctgagagtataaagatggcaatgcagaccctgcccagagactactcaggcatctcaataggcctgagcagtggccatgcagggtggtggaggtatggcagggctgcctaactctgcctgtgaagtcaggcaagatcccagcagtgcagagtgaatgcttagtatctgcctgtcactgctttgaacagtttccttgcatcatcccatttcatccccacactgaggtagaattc

SEQ ID NO: 201232 - DNA, 1000 bp, Homo Sapiens
gtggcaggagtgggcaccagtgcggccccggtggccatggggaataaaccagcattgctgcctccggcctccgccgtttttctgtttcgtaaaccagcatcccggggttcctgctctgagtgaccctggcacctgtcagggagtccaggtgtgccccatgagggcctgggggaggggcaggctgggcagagccacagaggggctcccctcaaaccccacattggctcaggtgggaccctcaggagcaaccccaggtctaaagtcttcccatgggcgctgggctcaccacccccacgccagcccctgcctcccgtacccaggccggacgtgacggggccgtccctgcattctgtgctttcccagttgtacacatcctgtcccctccctcgagtctcagtcacagttcagtgacctggtgacgggaggccccctgcagtgtctgacccaggccacgcctgtgccagcccagagccagggggaggaaatgggggctgggcctctggtccccatggggaggccacccttgtccttggtagcatcagggtgcagaggtgttcccgggctgtaggggtgactcccccaccccccaaggctctggagaggccgatttgctcaggaagccgaccttcacaccttgtcctgctattaatagacgcctggttgacacgggaccctcggttgggtccggagcattgggcaggggcacttgtcagtgtttgagagctgaagtttgggaagccctggggaagcgcaggaactccccgcctgggctggggctgccgggcagggcccctcctatgcctcggcgtggctagagagggcgggggcagaaggctccgggacagccctgcaccctacagatgcgggtctccgcccagccgcggtcacctggggggctgggggcggggcctgggcggggcggggttcggccgggagcgcaggggcggcagtgcgcgcctagcagtgtcccagccgggttcgtgtcgccatggggcagatc

SEQ ID NO: 201233 - DNA, 1000 bp, Homo Sapiens
caactttttaacagtcaaattttaatatttccacttatctttggtattatatcacaaaaggaaggaactgatgtagtggaagaggctgggagtcactaccaacacagaaatctacaattacacagtggcctggggtctgtcatttccttttctgtatcacagtttcatcttcagtaaatataaggaatgggctacagaagtctgacattccttggtcctctctgaatctataaacctaagaataaagtcatgtatcacttcacaatagggataggttctgagaaacgtgttgttaggcgattttgctactgtgccaacataagagtgtacttaaacccagatagtatgtatatttttacttatatattttcatatggaaaaccgtatgtcccagcactgttacctaatgtcagtcacttctcctactttatctgcaatgacaataccaagtgctatgtatcaggtatgctccattataattttatgggaccacagtcatatatgcaaaccatcgttgaccaaaacatccttgtgtggcacatgactgtacttcattgattggccatttggggattttagaattagatgggatatctaccaccatgtagagtgtcccccgccacccccgccccgcccgccagcacacagctcaattttaaacacagggagcctcatagaaactcagtaactacttattgcttaatcaattagtaactatatcactgaggtatagcaaagaagagaacttaaatttcatactctaaaagctgtaacttttttaattttacagagttaatctgaatgaaacccaaccaaagcaaaatttgcaactataaacaaatttatattaatggcatgtgctgggacaagagaatgactgatatttgggataaattaaacaatgaaagtataaatggctctcctttgaaagatacaaagttccttatctaacaagctgcaaatcaagttggggaagtgggaaaatatcgagggagaattc

SEQ ID NO: 201234 - DNA, 1000 bp, Homo Sapiens
tagaaatgttaatagtagcatcagctaagaattatctttgctgattctttatacacagtaacattttaaacataacaagctttcgtttttgaccaaccaatgtttttgatttgtgactcatggttttcagatatttctgtatttcatcaatataactattctactagagaggttctgtataaaccctgcaatttagccattcccttccctgcacagttcccaagccagatctagacatttctacctctgtgcctaagagaacactggtctcctggtctggatggacagctgtctcctcctcttccatgtacctaagaatgacctgttggcccagtcaaaaccctccttctatgaagctttccagacctatagccaggattactctttcacaccctatacccctgggacactttggggtccctctattacattcttacttttcagacccccttgtacatgctattcctctgctgctctccctggttagggcccactcatccttggggtttcagttcaacgttatacctcaaggagaaccttccctgctttggaacagggcacattacacgtgcatttgcatacctctgcattcctttcctttgttgcactaaccacagttgttgttagtatcttttgtttgtttgtttgtttgtttttcaggaaaaaaaggcatctgtgatgcgtctcttttccactagggctaggctttagacaaggtctgtgttgagttttcctaaatctagtagcaaggacatgatgctccatatctgaagaaagaatgcatggatgaatgaatgaacaaacactatctctgtctgtctctccctacctctatctgtcctctccactaaacttgaactcaaaggtaatacagtgctcattgtagccacaataatgcctaattagggtctcgtccataatagagatgagaaaaactcagttgaaataaatttaatttctcctactgtagtgttaacatcaggttagtcatagagaattc

SEQ ID NO: 201235 - DNA, 1000 bp, Homo Sapiens
ggctcactgcaagcttcgcctcctgggttcacaccattctcctgcctcagcctcccgagtagctgggactacaggcacccaccaccgcacccggctaatttttgctgtatttttagtagagacggggtttcaccgtgttagccaggatggtctcgatctcctgacctcgtgatccgcctgccttggcctctcaaagtgctgggattacaggcgtgagccaccacgcttggccattttcctgcttgctttcatttttttttgagacagtgtcttgctctgtcccccaggctggagtgcagtggtgtgatcacagctcactgcagccttgacctcctgggctcaagtgatcctcttggttcagcctcccaagtagctgggatcacagatgcccacccaatcccagctaattaaaatttttttaattttttaaaatttctagaagtttttaaaattctcaacaaagtgagaacctagagatagggtcttgctatgttggccaggctggtctgcaactcctgggctcaagcgatcttcttgcttcagcctcccaaagtgctgggattacaggcgtgagccactgtgcgcggccccaatccttctttatttttacctgtttacattttattttatttaactcattattataattcttttagagacaaggtctccctctgtcacccaggctgcagtgcagttgagagaccatagttcactgcagccttgaccttcctggctcaggggatcctcctgcctcagccgctggagtagctggaactacaggtgtgcaccaccatgtccctaatttttaaatttgctgcagagatggggtctggctatgtagccctggctggtcttgaactcctgagctcaagcgatcctcttgcctctgcctcccaaagtgcacaccgggcccacataccctcttttaaatcagagtcagccgggtgcggtggctcacgcctgtaatcccagcactttggaagggtgagatgggtggatc

SEQ ID NO: 201236 - DNA, 1000 bp, Homo Sapiens
agaaattcttgtataattccaaaacacttaaaaggagatctgtatttagattttaactatctattctggtttagtacaaaggtgacattacatctgcactacatgttcaagttaataataatgaatactttttagcatttgtctttcagttctaagcaaaaaaataaacttttaactttatcactttacacaaagttaattgtccaattttcagttcccatattttatgtgaaaagaagtaaactagttctatttataattaacttacactttaaagaatttttaaactctagggaaaatatctttttcctaagaataaactttaacaatactttattatgatctgaaatgctgatttataaatagcttcaccatattttacgtaccatatttgttttagagatttattacgtacttctccctgtagactgaaaattatttgaaagcgatgttaattttaatttatattatatctctcatcctgtgaacagtgcccaacaatttatacattcaatgaatatttgttgaatgaattaaggaataaatcaatgagatgttatagtttaagtatactttgattaagttctacgtgaactaatattctcatatgtttgacatatttgtatgtatttcttccatttgaatctacctattactaccaggccaatcttctttaaatatttatttcataatggtattgcccatttcctaaacattaagaggaccaactctttctaaagcttaaaaatataaatgccttgacctttttcagtcacagattttaattctatacaacgccttcactcttgagttttacttttagtttcaagcattgtcataaactcattgtgggagttgtttatagagttttggggaaggaaatgcttttctattttatgtttcattgcttggatatctaatccatttatcaacaaagtattttcagaaatttgtgtttaatatatttctttggtctaaggctatatagagaggctactag

SEQ ID NO: 201237 - DNA, 1000 bp, Homo Sapiens
acacatattctaaaaaggaccttgccaatgttcagtagaatggaaggccatcccatgagtttcagaaacactgatgctgctttaaaacaaaaaactcctggtgattataaggcttacctggagtatctcaaatatttcagtagcgaaaattcaaagacaaggaccagcaggaatgccaattccatgttgcaatcacgcctccccacccacaagcatgttattagtgtgtgcttccaatgcataattacctttcattttcccatagaatttcaggaaaaaagagcacagggctcagatggtttgtgaaatcaataggtgatttcatctcttacatgcaaaaataatcagttctattgagaaggaaatgtatacacacacacacacatacacacacacactacacacacacacactggaaagcccacattcaacagtcaaggtcacacacacaggaaatattcatgaaaagggaacatttgtagtatcatcctgagccatatagcacagtccaaagtacatgggttaataaagggttaataaaggaagaaaccatctcactctcaataaggctgaatttgatgtgctcaaataacactgattgctccaaaaaaaaagataaaattcctacaaagaggaggatcccaggcctaacgattggattcttttctagacaactgtaaccaccctctggacactataaaagaaaacaagtatccaaaatagcaggatgactatttgtaattactgtgtaattgttggttttacatgtctgtctcttcctgggcttagtgaaggcagagaccaagttcactaattggattcagccaaggagagcagttggctccatgaagtatgaatgaacaaatgaactaatgaaaaaaagaacacgtaagttctgtaccaaagaaagaggaaagaaaaccatgaatcctggtagtaccaatcctgattctatcccacctgccagcaaacaagaaaacaaagggaccatcaggaattc

SEQ ID NO: 201238 - DNA, 1000 bp, Homo Sapiens
agtccagcgtgtcctcattttattttatttatttacttatttttttgagacagagtctcgctctgtcgcccaggctggagtgcagtggtgccatctcagctcgctgcaagctctgcctcccgggttcacgccattctcctacctcagcctcctgagtagctgggactacaggcgcccgccaccacgcccggctaattttttgtattttttagtagagacggggtttcaccgtgttatccaggatggtctcgatctcctgacctcgtaatcccccctcctcggcctcccaaagcgctgggattacaggcgtgagccaccgtgccggccttcctgtcctcattttaattagttacatctacaatgaccttatttggaaataataaggtactgggggttaggacttcaacaaatctgttttgagggatgcaattcaatcataacatctcagtaaactgaataagccctacagttgaggaaattatttcctcctgatttggaggattttgcagaaaaaagttgatgttatttcttgttagattcctaagttccccagaaactgccaaggtttctagacttcctatgagcaattttttttctttttttgagacaaggtctggctctgtcccccacgctggagtgtggtgacacgatctccactcactgcaacctctacctcccgggctcaggtgattctcccacctcagcctcctgagtagctgggataacaggcgtgctccaccacacccggctaattttttcgtagagacggggtttcgccatgttgcccagggtggtctggaactcaagagctcaagcgatccgcccgtctcggcctcccaaagtgctggaattacactttgggagccactgctcccgaccagcacattttattaatacttatgattcccctacatccccactgccttccagacacaaacaatcaacccattgctgcctcataaaaacgcaaactcatcacctttccctccctcctgaattc

SEQ ID NO: 201239 - DNA, 1000 bp, Homo Sapiens
ggggagtctctgggtaatcggagggaggaggaggggagtctccgggggagtctctgggtactcggaggaggagggcagtctctgggtaatcggagggaggaggagggcagtctctgggtaatcggagggaggaggaggggagtctctgggtaatcggagggaggaggaggggagtctccgggtaatcagagggacgaggttggagtggccgctgtgatggtggattaccattgcacgtttagcccagaagagacaaagatggttaaacagtgtgtgcgcagtggttaatggatacacacagatcttgttgctgtacaagctgagggggcctagaaccagctatgcttgcagcagtgagcacacccaggcccagatcctggttcctagtgccctccagtccacggggccagggctctgaggagaaatggctgattccagcaccggggcaggaaatgcccaggatcagctgatcctggcagttccagaaagtgaggagctctgtaaacaaaaccccacagtcacgggattgcgtcccagtgaaagagcctcccagtggccaaagagcaacaaaataataaagtagtattagaatataacccagagtagaaaataaacatccacgagcccatagtgatataagtgattgagtaaataaacagagggaacaagaccaaccttccctgcagaaggttttcagtaaatgaggtagatccccccattccaggagctggcgtgagctcccggcaccgctgtgcgctgcgcgtggtgacctgacctccttcctgggcgtgcagcacggagagggcagtgggaggaggacgctgcagccgaggtgcccgcagacacccccaagcccagtggtcaggtcagcatgcactggtcatgttcatggcgtggccgacggggaggctgctgccccatcctcccaaccccgacgaccccagcccggccatgcagaggcatagtcgaccatctcactaaggaacattccacagaattc

SEQ ID NO: 201240 - DNA, 1000 bp, Homo Sapiens
cgtcatctaggagaaagtatctcaacttcagagctattgacatttgaggtcaggtaaattttttgtggtaggggctgtcctttgcattatagaatgttcagtggcatcctggcctcaacactcaatacctgtagcatgttgtcactccccgctaccctataggttttgacaaccaaaaatatctccagaattgccaaatattcccctaggtaaccaaattgctcccagtaaagaacaattgcttgagagggaagagtatattaaataaatagtcacagagaatgctgataaagaatatgaaagggtcataaacaggagagatgtaattgaacagaaacatataagctcaacatgggactacctgttccagcccagaaagtagccaggattattttcatcataatgcgttctctggttactttattgtcctttgtcttctttgatttcctacagcagcattcactgtttgtgtactatgcagccaggctcaacactaagcatttggcatgctcatttcattttattctcataactattctactgactacaagcagtacattgtcacatcttatacaactaccctataaccaacactggcaccacaaacaattgaagatttcctatataagtaaattgcctttctaaccaataacatgtcatattagccttgcaaactagaacaaaagctgcgatgtctatagtgtccactttttctttatctcttaagcaacagcctcctagttcatcagttatcacaatcctttttgtactattaatgtctcttcttcaagtccttccttctgggtctccaaatcactccccaaatttctctcttccaccaaactttttcttttgatcttcatgttccctggagctaattccccatcttctccttcccttttccaccaaaattctcaaattttcagagttgctcactaacatcatctccttgctgcctttgcactgggactccttcctgtaccctttcctgaaagaattc

SEQ ID NO: 201241 - DNA, 1000 bp, Homo Sapiens
aagatgtacagatggcaaatgagcacatgaaaagatgctcgacatcattagtcattagggaaatacaaatgaaagtcaccagagaccactactacactcattagaatggctcaagttttaaaaacaaaacaaaacaaaaaagtgatgaggccaagggctagtgagggtgcagagcaactagaactctgctgggactgaagaacggcttatccgctttagaaaacggtttggaggtttcctatcacatgacccagccatctcactcccgggtatttagccaggagaaatgtaaacatatgtttacacaaaagcctgtatgccaatattgatagacgtttcattcataattgctgaaaaatcaggaaacaacacaaatgtccttcaactggtgaaagtaaacaaattgtggtgtatccacacgatggaatgctactcagccttaaaaaggaacacgctgttgacacttgcaacataatgaagttctctgaaatgcatgacgccaagtagaaagaagttagatccaaaaggctacatactgcatgagtccatttaggtgacattctggaagaggcaaaaatataggggcagagaacagctcagaggtcaccagaggttaaacaaaagggaaacagggataggttgagggtagggtttaactacaaggggccaagaggctgctcaagggaatatggggaggtgatggaactctcctatggtgatggttacagatctgtgcatttcttaaaaactcgtggaactgtactccaaaagaatgagctttatgatatattaatttaaagaataaatttttaaaaatattcatgtcctttatcacctgagcaattctttttgagacagagtctcgctctgcagcccaggctggagtgcagtggcacgatcttggctcactgctgcctctacctcccgggtcccggttcaagcaattctcctgcctcagcctcctgagtagctgggattacaggcacgcgccaccatgccc

SEQ ID NO: 201242 - DNA, 1000 bp, Homo Sapiens
agtcccagggaaccactgatctgctttctgtctctactgattttccatctttagaaatatcagataaatggaatcatataatatttacttttttttttttgagtcagattctcactctgtcacccaggctggagtgcagtggtgccatctcggttactgcaacctctgcctcccgggttcaagtgattctcctgcctcagcctccaaagtagctgggattacaggtgtgtgccaccatgcctggctaatttttgtatttttagcagagatagggttttgccatgttggccaggctggtcttgaactcctggcctcaggtgatccacctgccttgccctcccaaagtgctgggattacaggcatgagccatctcacttggccaatatttccttttatgcctggcttcttgcacttagcatatttttttgagcttcattcatattgttgcaggtaacagtagttggctcctttttattactaaatactatttcattatatggatataccacattttgtttatccattcatctgccgatgaacatttgggttacttccacctttcagctatagtgaataatgctgctatgaacatggatgtaaaaatatttgtttgagtctctgttttcacttttttgggggtatatacctagaagtggaattaacgaatcctactgtaattctatgttcatacatcacgtcattttccacagctactgagccattttacatacccaccagcaacacactagagttcccatttctccatattctcattaaaatttcttattttctgtctttttgttagtagccatcttaatgggtataaagtggtatttcattgtggttttgatttgcattcccctaataattagtgatgtggagaatcttttcatatgcttattgatcacttgttatcttttttggagaaatgtttattcaagtcctttgcccatttttcaactgggttgtttgtttttttgttgttgaattgtaggaattc

SEQ ID NO: 201243 - DNA, 1000 bp, Homo Sapiens
gagccacacgcctgtaatccaagcactttgggaggccaaagcaggcagatcacaaggtcaagagatcaagaccatcctggccaacacggtgaaaccccatctctactaaaaatacaataacaaaaaaaaattagctgggcatggtggcgtgcacctgtagtcccagctactcaggaggctgaggcaggagaattgcttaaacctggcaggcagaggttgcagtgagccgagatcgcaccactgcactccagcctgggcgacagagtgacactctgtctcaaaaaaaaaaaaacaaaaaacgtataattatacagaaatcttggctgcatgtggtggctcacacctgtaatcccagcactttgggaggctgaggcggatggatcacttgaggtcaggagttcgagatctgtaatcccagctacctgggaggctgaggcaggagaatcacttgaaccaggcagaggttgcagtgagccaagattgcgccactgcaccccagcctgggcaatagagcgagactcagtctcaaaaaaatagaagtgcagttaaacgaaaaatcaaagttagaatgcatttacagtgtatcgtcattttaaagatttaggccacatttaggccttggtttttctttctttcaccagataccgaatgtctatgccagctctggagagaccaagacctgccactggggagtgtctaccctcaagaggacaacagcaaactcaccagaaagaacttcaggcttcacaggccaactggtttctaggggcgtgccctgctgctgtaccaaaagcaacttccacagcacacacatgaatggacgtggctgtgtgtcagtaaaactttatttacaaacataggcagtgggccacactttaccagccactgatctaatgcatcaacaaaaacaacaaaccaaaccaaaatgaatcccatttcacttaggaattctttcattggaagcaattctgaggacaataacctgtacatgtgtgaattc

SEQ ID NO: 201244 - DNA, 1000 bp, Homo Sapiens
aagggttataggttgctttttgggcagttggttgcggaggggtctaccattacttcaggatatctagatgatgctatagagaaatcaggtctggggagttggggtgaatagttttggcatgtaaagtttgagtgatatttggataaggtaaaggcagtctaacaaaggtcctgaactaaggtgagaggcaagcagataccaacttttacagacagcactggaaagtacaagtagataaagctgcttataaagttaattgttgaaagtgaattaagccctggagaacaccaatatttagtggatgactggccaaacatcagcctttataggtgtaacatggaaggtaaagaaaagttcaatcagcatgcacttgcttccttttgttaatggtagtgaaaccttagcagttatacctatacctacaaaatatgtaggtaataacaaaaataagataggtgacttcttgtttttgctattactggctctctagtatacatggatgtggtattaggacatggctgaacttttataccctatcagaatatcctgaatggagtttcctctggaggacaatgaagtccctcctatcatatctttctggcttaaagattattgaaatcgtatttaaaaacttgttagcggctgagcgcggtggtttatgcctgtaattcccagcactttgggaggcggaggcaggcggatcacctgaggtcaggagttcgagaccagcctggccaacatggcgaaaccctgtctctactaaaaatacaaaaattagccgggcgtggtggcagacgcctataatcccagctacacaggaggttgaggcaggagaacggcttgaacccgggagacaggggttgcagtgagccgagatcacgccactgcactccagcctgggtgacacagcgagaaatatcaatgttcaatgtgtcttcaaaatgtttatattctttcaaggctcaactcatttacataaccttacctaatcaaagaattc

SEQ ID NO: 201245 - DNA, 1000 bp, Homo Sapiens
tggtagctcacgcctgtaatctcagcattttggaatgctgaagtgggaggatcatttgagatcaggactttgagaccatcctgggcaacatagcaagaccttgtgtctactaaaaattaataaaatacaaaaacaagaaatttaaaaattcaatgcaacagaagacaaagagcctttcacaattttctgccagtcaaaatacttgctgccaaaatctttgaccctacctgaatcttccaatccttggtgtttttctgtctctgcaagggagtccagaagctctatgggtgtgtttcagggaatgtaactactcacctgtagcaattccaatttacttggtagctagattaaatcatttagtcagcatggtattgggaaaagagcactgggttcctgtcctgaccatgatactcacacgttacatgttctcaaacaatacacctacattcactaagcctgatttttctcatctgtaaaacaagagggttgaactagactagacaacacctaacatcctttccactattaaaattctacaatccatgatctcatatgtattaattaatcaagattccctaagtcaagtcatcacactctgggatacactaattatgatagaaaacttctgacatagctcccaatgttccatgactcctgatgttcattcccttatgtaatcccctgcccttcagtgtggggtggacctggcaacttacttccaatcagtagaatacagcaaacataatgtgatgtcactttcatgattaagtacaatactgcaatgccaactaatgctaatctgacgctaaccacctggggttagagcagactccacagatgtaaaagcacagtccccagactgccagcatgtcaggcaccagctacaagtttaggggtccccaggccaccgtcacttttgaacaatgagctacaagtatggggagatttcactccccccaccaccagggtcaataatttactagagcaactcacagaattc

SEQ ID NO: 201246 - DNA, 1000 bp, Homo Sapiens
tgattccttactgataaaagttagaatagtgttatgttaggagggatgggtggaaatcaggtgtgtgactattacattttcttattctggatgatcatagtattttaaaactcactaagctttaaacttatgtgcatttacccatgtgtatacaatactttaatagaagcttcaaatcaataagaaaacataaaactgtctgatggaaaaatagcttgaggaaatgaacaggtatagcagaaaagaagggctgcatatagtttaaaaacttgaagagatgtttaatctctttgcaaatagaaaaacatacgcatttaaattgaaataccattttcatgttccaaaattaaaattattagaaatatgatggtatacagtgatggtaatatgggagaaaggaaacatcctaggcaatttggctaagcttttctgaggaagatttaggcaatatgccattaagatttaatgtgaacaaatgggaaatttgcccacataaatcaatggaaagatactctatttttcaaaatttaatctgaaaatacctaagcccctgatatttttctaaaaactggaatgtccctgtggtcattgggttttagagacataattttcactgtgatggtcataattttaaaaggttacatcatccatttttagttaacatatattgtagtaacatcacatatctatgtaatagaaaaatagagtcaattcatgtagggacagacatgaaaatgacaaatacatatagagatagaaaggtatcttgtgcattatactgagaaagacaatagaaataaacaatttatatgggttgatttattttaattaagatatataagtggttagataaatgttaaataggtcagtatgtaattacagaaaatgacaaattgttatgtatggtacatttgcaggcataacacagacattacattttggaaaattgtgttctatgcaacagtgccaagtctaatgaaagtaagaggaagaggaattc

SEQ ID NO: 201247 - DNA, 1000 bp, Homo Sapiens
ggaccatcggcgggacaggtgccgggcgtgtggctctgatgtccattggcggggacaggtgctgggcgtgcggccaggatcctggcatgaactcagggtggggacgagctcaatgagcaggaacagacactgaaaccagctctgatggacccctggggctgccgccagaagtgtcccatggcgagaggcagcagcacccgcgcttgggtaaggggaaggggcacctccccagggtgacacccgcccgggtaaggggaagggacacctccccagggtgacacccgcccgggtaaggggaagggacacctccccagggtgacacccgcccgggtaaggggaagggacacctccccagggtgacacccgcccgggtaaggggaaggggcacctccccagggtgacacccgcccgggaaaggggaaggggtacctccccagggtgacacccgcctgggtaaggggaaggggcacctccccagggtgacacccgcctgggtaaggggaaggggcacctccccagggcggcacccaccactgacttccacgtcaggagtcagaagtgccaggaggagacgctctgaaactttcttcccagagtgggtgctcatggagttaagccacaacttccataaaagatgagcactcagcaaaatgacaaggcagctggacgtggtggctcatgcctgtagtcccagctactcaggaggctgaggtgggaggatcacctaagcccaggagttggaggctgcagtgagtgatgactgtaccacaatactccagccaggatgacagcaataccctgataaataaataaagacaaagcacctgaggaaatccaattctaggagcgtcagccaagaaatccaacaaaattggtgaatttaaacccaaagagacagaaaaagagagtaattaaagaggtcttaggacgactgttagaatttccaaaggcatgaaggaatgagagaaaagcattaatcaaaaacatgagtttatggatc

SEQ ID NO: 201248 - DNA, 1000 bp, Homo Sapiens
gtctctccactgtggactcgcacatgtcttgaaagacctgaggcccatctgaagctctttccacattctttacaattatatggcttctcccctgtgtggtctatctgatgcttataaagatcttgcctataaatgaagcgttttccacattcctcacatttgtaccgtttctctcctgtgtggaccatgcgatgactattaagtgctgatttcagaccaaagctcttaccacatgtatcacatctgaatggtttctctcgcatgtgaaccatggaatgcctattaagatttgctctactacggaagctcttacaacatatatcacatttgaatggcttctccccagtatggattctttgatgttcctgaagctgggaatcatgaatgaaggccttcccacatttctcacaaatatgaggtttcactcctgtgtgtaatttacgatgaacataaagtcctgatctacgactaaagcctttcccacactgctcacatttgaatggtttctctccagtgtggattctctgatgaatttgcagatgtgagctctgattgaattccttaccacacacatcacaattatagagtttctcccccatgtgaactctctgatgaatacgaagagctgagctataacagaaactctttccacattcatcacatgtatgagacttctctcttgactgtagttgttgatgaagatcaaggacggagacatcactaaaggactttttacacgtcctaccctcagaaggtttctgtcttacgtgaattatagatagtcctgcatcaacctggcagggcatatcatcttgtttggagaactgaaagctgtttaccatggagtcttgaaacctggttaagtcacttgaaatttgttcccaggtttgatgactgaacaagccttcatgtgttcctgattctgaaacagtctccatctccatttggatcttgcctcctataatgacacagaattaagagatgtgggcaagtaaagctt

SEQ ID NO: 201249 - DNA, 1000 bp, Homo Sapiens
acacacacacacacaccagacatgcaaacatggtgcacagtcacatgaactcacaaccatacgaccacacccaaaccacagacacccatcatacacatacacacaccagacatgcagacatggggttcagttacatgaactcacaaccacacccaaattatagacacccaccacacacacacacacacacacacaccccagacatgcaaacatgggacacatagttccccgaacccacaaccacacccaaaccacagacacccactatacacaccacacaccagacaggcaaacatggggtgcacaatcacaggaccacaaacacacggacacattatcacacacaaatgataccggctaataccatcacacacaagtgtgcaaatacaaacacacacacttccaaacacatgggccccaagtcacccccaaattacaaccaaccacttctcaacttctcataaaacacccacacaagcgcgcaaacatggacccacaaattcgcacacacatatacccactgactcatgcaaactcagacacacaaccatccccaaggagcaccgccgccttcttcccctttctcccttcctccttctgtctctttcacactccgatctagctttgcccatcgcccccgttttacagatggggaaactgaggcactaagcagctgaaggccccttgaagtggggaagaccgccccttctgactccgggcagaggctactgccgcgcgccccctgctggcctggcccctccctgcaagagcgcgcgggacggcggcgcgcgcgacgggcacgcgcctgacgtaaccatggcatcctcttggcacgcgcggcccgcgcgcagggagggcggggcgggcgcgttgccatggcgccggcggcccgcgtgaatggggcattgttcgccgcggcgcccgggccgggccgtcccggacccacccggacccacccgggccgacagagacggggagaccgggatggggagagacagag

SEQ ID NO: 201250 - DNA, 1000 bp, Homo Sapiens
ttcaccatattggccaggctggtctcgaactcctgacctcaggtgatccgcccgcctcggcctccactccctttgtaacctggtgccggtgaagtccttgagtgctgcacccttggcttcctttccccacacgccctgtggtttttaactgtgccattctgcctgcgtggtggtttctagggacgccgatatcacgttttggcagaactgactataccggctgtctgcggcgtgcggtttgtccagagcatacagcgagacctctctgaagacccccagatggcctcgaccccggcttttgagggagggctggacagcttggcctcccgtttcctgcgcacgcaccccgatgctgcaagctgccatctgggaagcttggcattcgggttagacacaaacagcgcccgatggtaatggtccttgagcccaactctgccgacccacgcattcggtttagtcctcttaaagcagatctagaaatggtttttcactgaagagaaaactacagaaacttctgccaccacaggaccaggacttgatcacaagcaagaaaagctgagtctgaaactggtaacttttccaaaccaaagaccaaagcatgccaggattccctcggaggggcttcggtggctggtgtggcaatagccttctttttctttttttctcttttagacagagtctcgctctgtggcccaggctgctgaagtgcaatggcacgatcttggctcattacagccttgatctggactgaagtgatcctcccaccgcagccctcctgagtagctgagactgcaggcgtgcgccaccacatctggctttttatatttttttgtattcttagtagggatggggtctcccatgttgcctaggctggtctcaaaatcttgggctcaagtaatcctcctgcctcagcctcccaaagtgctgggattataggcatgaaccaccactcccaggcagcttcaatttaacaaaaatatatttatcacctactgaattc

SEQ ID NO: 201251 - DNA, 1000 bp, Homo Sapiens
ccaatgcagggtatattctatagcaaatactcaaaatgaatgctgtcttatcttccttgttaatgtatcaaaataaaatattttttcactacatctacagaataaaataaaaccatgtatgctaccccatcaaaatttagaaaccatgtttaaacaaatgttttgacactagctaacatgaaaaggggatttaattcttgaatgtctagcatctatgaagtaattttcttccattaagtttacattatcacaaaatagagcaatcttagatacaggcaaaaaagcaagctacagaatccttgagttgagattccaggttcccaaaggaaaagattccaggttccaaatgtaggccttaataatctcccagctctctaaagttttaatggcatctaataaagtatcaacgggttaggcactgggtcatattttcttgagctgacttactgctcactgcattctgatggagggtaaagaatgtgaaatatttttatatatttttaaatcattagggatagcagagaagatgcttggaactctggctgcagactgatgttgggtcatagtaaccactattcctttgtctctgggcccaagcccaggaggggccagtgttttgcacccttctgctcttagaggcaagattttctttccaggcttaattcagaccattttgactaatagcttgcctttattacccattattttatagaacttccaggcaggaagataaagggtctttaatttactgtcaaagtctgataaagtctatttatcttttaacttctctgtgtaaactcaacatgggaaaagctgggattttagttgttaaatgcatgaattagggtttgaaagcctcctttactcaacttaaagagttttatgtgtggattcatgcattgtttctctgttgctcaatcaagtaatatctttctcttctccaatctttctgctgaaatttgatttttattttaaattagagttaactagtaataagctt

SEQ ID NO: 201252 - DNA, 1000 bp, Homo Sapiens
ttgtattctctacattcttttattaaaacaataaagttcatatatttatcttattttcatctgctgaatactagttttacttcttgaatgattcctaagccagaggtataggagagaaatgtagtgaattataacatcaaacacaaaatatctgtatttctgctgacctgtaaaaataagcctttaaattgccacttagcgcttgatttactttcacaaggaaattgtaacataatgcatactcaatcaaaatatgtgtttgaacttatcctgactaaaaatactgttatgaagttattggtattcaaattaatcagtcttcattgaataattttggtaggttttatattaacatttaaataaaacataataggtagttctcaataattgcatttacatgctcttattcagtttatttaaatgtctggaaaaatatgacgtgtgtgtgtgtgtggtgatattataaactctttagagataacctttttagtaaatcattttacacataaaattgaccatattcccatctcccaattcaaatcccttcatgtgggcaataactgcctgttagaattatctggggagctgtgagttaatacccattactggatttctcctctgggaattctgatttaattattctggagaagaatctggttgtgtatagttttcaaagttttacatgtatttcatatgtaccaaggttgaaaacattattctggatggtgggcctgggaagctcttttacagattacatgtcagattcacctaggagctgatacctataaaaatacactcaaggactttaatcccttactcatgggctcattatcctactggttataatacagcgaatcttggaagtggctttttggtgattccaaagtaaggtcaggtatgagaacctcagtttagatcatctcacttttcttacagctatttactagcaccatggacagcacccttaacttaaaaattgggagctgggatcctggaattc

SEQ ID NO: 201253 - DNA, 1000 bp, Homo Sapiens
cccgtctcggcctcccaaagtgctgggattacaggcgtgagccaccgcgcccggccaagacagattcttaattgccagtttttgctatggctgccttcttttggcttgattttttttccctaatttttaaagattttgcagtaaaatcagtcagctatcacataaagcgtcaagttattttaatgttaactgccagggtaatagaaaagtagaaaacattttatttgtgaagttgatatctaagaatggtgattttataatgtgatggcgttatactaaagaatttggaaagagtctcaaattacaacataatttgctaggctcccataacaactggatgggttgtgattacagttacaactgttgatggattctgtggaatccagagaattagattgcttagtgctgtcccaggcacatcatacataatataaagcaccaagaatactagtctgtatcctcttctcccttatcattttactcaggctgctgactgtccccagtcctaagtaatgtaaatggaattcctacctcctcctagtatgctaatgagcattggttgacttccctgaaggtttagagaaagagctcaaacactcatttaagaactattaggctgggtgcaatgactcatgctggtaatcccagcactttgggaggccaaagctggtggatcacttgagtccaggagttcaagaccagtgggcaacgtggcgaaaccccacctctactaaaaatataaaaattagctgagtgtggtggtgcatgcctgtagtcctaacttcttgaggggctgaggcaggaggatcacttgagcccgggaagttgaggctgcagtgaggcgagatagtgccactgtactctagcctaggtgacaaagtgagaccctgtttaaaaaactaaaaaacaaaaacaaaaactattagatgggccaggtacctcacgcttgtaatcctagtgctttgggaggtggaggaggatcgcttgagaccaagaattc

SEQ ID NO: 201254 - DNA, 1000 bp, Homo Sapiens
gaacttttccaggagagctgaacattgattttgcaattgatctgggtctgaaacgtaaatatcctagctggtaatttgaggtgtgttttttgtttttatgttatgttgttttatttatttttattttttgattcagagtctctgttgcccaggctggagtgcagtggtgcaatcacagctcactgcagcctcaacctcccaagctcaggtgatcctctcacctcagcctcccgggtagccggggctacaggtgtgcaccaccatgcctggctaattttttctattttttgtaaagacaagagtttcgccatttgcccaggctggtctggaactcctgggctcagctgatccacctggctccactcgtgaaattgctgggattacaggcctggaccactgtgcctggccttcggggaacctgccccgatagtcacgtaggttcttttctattttatctaagcatcggcaggtttgagaaataaagggacagagtacaaaagagagaaattttaaagctgggcgtctgggggagacatcacatgtctgtaggttccgtgatgccccacaagctgcaaaaaccagcaagtttttattagggattttcaaaaggggagggagtatacgaataggttgtgggtcacagacatcaagtacttcacaaggtaatagaatatcacaaggcaaatggaggcagggcgagatcacaggaccacctgactggggtgaaattaaaattgctaatgaagttttgggcaccattgtcattgataacatcttatcaggagacagggttttgagagcaacctgtctgaccaaaatttattaggcgggaatttcttcttcctaataagcctgggagcgatatgggagactgaggtctatttcagccctacagtctacagaccataaaagatggccacgcccgggggaccgtctgtagacctgcccccaggcgtgtattctctttcccagggatgttccttgctgagaaaaagaattc

SEQ ID NO: 201255 - DNA, 1000 bp, Homo Sapiens
gactttaattttgcatgcaaaatacacggtttctaaattaaatttttttgtaacaaagcgtttttgagttcccctcatggaattttaataaatcattaatttcttctttttctctttcatgcacaagcagtggataaacatttcaaagatccctacagaagtttcttcccttgaaatactgttcacatgacaatgagaaggatggaataaaacacaaaaaaggtaagcaattttttttttttgaggcggagtcttgctctgtcgcccaggctggagtgcagtggcgcgatctctgctcactgcaagctccgcctcccgggttcccgtcattctcctgcctcagccttcgaagtagctgggactacaggcgtccgccaccgtgcccagctaattttttgtatttttagtggagacggggtttcaccgtgttagccaggatggtctccatctcctgaccttgtgatctgcccgcctccgtctcccaaagtgctgggattacaggcttgagccactgcgcccggccaacaggcaaatttttcgttggggaagtagtagaccaaccatctgtgcttatttcttctaaacagagctgggaatgagtgacagcagttgaacaggaacacttgctccccaagcactacttgtttttcatgaagaaggaaaaaaggcaaaagccctgctacatttacattcgcaaaattgttttcaaatgaggattaacaagatgttagttccctctctgttgaacacataaaatattaaaaggcagtgctaatacatctatatacagcacatcaggaggaaggaggaagtcatttctcctgactttaccaacttgtcttatttgaaactgataccgtgccctattggctgataggagtttcactttatttagaatacaatagaatttggctcagattcacaccaaaagtatagtattttgatgtgcacttacacgatttcaggggaaaacaatatctggaatgtgaccctggaattc

SEQ ID NO: 201256 - DNA, 1000 bp, Homo Sapiens
acaaattcaatgcaatccccatctgaatgccaccatcattcttcacagaattacaaaaacaattctaaaattaatatggaaccaaaaaagagccatgtaaccaaaccaagcctaagcaaaaagaacctggaggtatcacactacttgatttcaaactgtacaataaggcttaccttattgttaccaaaacaccaacgtactggtttaaaaataggaacatagaccaatggaacagaagagagaacccagaaattaacccaaatacttacagccaactgatcttcgacaaagtaaacaaaaacataaagtggggaaaggacccccttttcaacacatgatgttgggataattggcgagccacatgtaggggaataaaactggattctcatctctcatcttatacaaaaatctactcaagatggattaagaacttaaatctgattcctgagctataaaaattctagaagataacactggataaacccttctagacattgacatacgcaaggatttcaagaccaagaacccaaatgcaaatgcaataaaaacaaagataaatagctgggacttaattaaactaaacagcttttgcatggcaaagggaacagtcagcagagtaaatggacaactcaaagagtgggacccctgaacctgaccctgatccctaacccctgaccctgatccctaacccctgaccctgaccactaacccctgaccctaaccctaacccctaaccctaacccttaaccgtaacccctaagcctaacccctaaccacaaccctcaccctcacactaatccaaccctaaccccttatccctaacccctaacctctcttaacctctaactctaaacgttgtctcttaactcctaactctgaccccaacccctatctccaacccctaaccctaaacttaacccctaacccctaaccctaacaccaaccttaaccctaggttctttactacgtttgtactatgtcaatgttgattattatgatc

SEQ ID NO: 201257 - DNA, 1000 bp, Homo Sapiens
tcatggtcccatggaagttcctagagattcaattttgtctgcctgggtgatgatattattaatattttcttggactaaaccgggctgattgatctcaaaaacagcattcttcttttagatataaacatgttcctctttgcccggctgggagaagatcccaggctctttgcttttgtcggactacagtgtccatggagtccagacattgttgaagtctattgaggccctctgctgcttgttgcggacccattgaggttttctgagatagtttatactggattcccaaggctccaccttatggtgacatttatgctgcaaaagtattttgcattaaaatggtgaaagcaacaaacgttttaagtattttctattttttgctaataagcaaaattttgtgcagctaagttggcagcagtcattcggtccatttgtggatggtacagttgaatggtggtcaaagttagagcctggaagccttcagtaaatacgctgaagttgtctgagggccatcagagttgttgcttatattggattagatcatttattgagagtagaacaagcactctgatggtcctctctccatttgggactttctgtaaggggagcaatttctctggccctggatggtgtgaagtcccactgtgagtaactgcagctgtgctggtctctattgtacctggcaaaggccgatggaaaggagcataaggaggaggtgaaacaagcttagattctacagaagactctgatagtgtggggatgctggggattctaaaagaggtgtggacccttgagggcccctgtctggagctggtgttgggctgtggggtctggggtcccttccccttaataagagatgatcttcccattgttctgaggggctttctggcttactaggctttagcccacaggtgctgcatagagctggattttgttgtcaggccagaaaggcttgcacataggatacttcagaccattttccctgattactacagaaaagatc

SEQ ID NO: 201258 - DNA, 1000 bp, Homo Sapiens
gatctgcctgcttcggcctcccaaaatgctgggattacaggcgtgagccactgtgccctaatttttatttttatttttgtagagatagggtttcactgtgttgcccaggctggtctcaaactcctgggctcaagtgatccacagccacctcagcctcccaaagttctgggattacaggcacgagccactgggcctggcctactcctgcattttaattaaaaggacaaaagggtcgagcacaagtgatggcaatttcagtatgcagttgggtaaattaaaaaggactatggctagaatccttggttttagaacaaaacctaaactgtttatgattcttgccatccttgctgttttggcataggtgtgtcttcctacctttctgccttttctttttcagtttttaatgggctcctcttcctaccctctataactacgagtgtccccagggatctagaccctctttactttttcatgatactcttattcatatgaaccttccttcttaacaattaaaaaaaaccaaaaactttgttttgaaaagggaaggtatttagaatgtcactccaacttcattcacacttagattccttcaggaaaatcctctaggtgtggagggattttcccctgctgtgaagagaatggtaggaacgtgaatgtgttaaaggcacacgagtccctgaagttttaatccgtgtaagattgtccaaaaattcttcttgttccagcacagatgccatccaagtagcccctgcatcgctgtctgactgagatctttttattcgcaatcatgcagacgtaggggccctttctgcagctgatgtttgagactgttagaacttcttaccaccgtagcttaagtagctgtttttcttttggaaaggaaattctcaggctccttctccttctttaaattttatgtatttctcaaaggattactttttaataaacagatttctatgctatttttgaatcatactgactataggtggtaagagttttt

SEQ ID NO: 201259 - DNA, 1000 bp, Homo Sapiens
ctcaacactgcaaatagtttatgggtctaatctattcatttattatattaacaaatacatttattatatccagaaatggaaacattgttttacaatccttaaacaagtacccaaaatacttctggatagacacttcaaattcaacacatccttactatctagtatccacatggagaaaacatacattgtatctctcaaattaccaaaatctttggcaataatggtgtcttctttcttgaaaactgaaagcatggccggtgcggtggctcatgcctgtaatcccagcaatttgggacacagaggcaggtggatcacttgagatcaggagtttgagaccagcctggccaacgtcgtgaaaccctgtctctaccaaaaatacaaaaaattagccaggcatggtggtgggcgcctgtaatcccagctacttgggaggctgaggcagaagaatcacttaaacctgggaggcggaggttgcagtgagctgagattgcagcattgcaccctaggctgggcaatgagcaaaaaaaaaagtaaaagcaacataatttcccacataattagaaaaaccaacagtatgctgggaaatacacaatgtttaagtcaaaatcatctcagaaattggataccagttatataactattccttatacacagttgcctttgataccctactccaaattgaagctgccagctgctgtcttagcaaagaccctcaaagttcttgctgtacttgttttaagaggttttttttttttttttttttttttttgagacggattcttgctctgtcgccctgtcgcccaggctggagtgcagtggcacgatcttagctcactgcaagctctgcctcccgggttcacaccattctcctgcctcagcctcctgagtggctgggactacaggcgcccaccaccatgcccagctaattttttgtatttttagtagagacagggttccaccgttttagccaggatggtctcgatctcctgacttcgtgatc

SEQ ID NO: 201260 - DNA, 1000 bp, Homo Sapiens
cagacaggtcgagaacatgcagtggcggtaggtaaccgctgacaggggtccctgaatgcaggagggctcctccccaaggaagtcaggctgttccctgtcctcaggtggctctccttgggcagctcccatgcccaggcactgagagacttctgggctgcactggcacagcattggcagctcaagttcagatttgggggaagaagagaaacttctggcagcccaccggtcagtccctcagggtggtctgtgcacaggatgagggcccactcataggtactggtagatcacgagcctgctgccttcggctctgtggcagcttgaaagccaaccagtatgacatgggagacagagatgagtttgagggtctgaaatgtgccctagttagaaggacagacacttgggagtcatctaagtctgctgtttcatgaatcacgatggccagactttcctcatttctcacgtcgctgcagatcttcccttttacccaggaacagtttagcttcaggactcctggtcaaaaggcccttcctgtcattggccgctctctactccccaaaggcccgcagttcacaggcagtctctgcccctaccagagtctctctccccagtctccacacattgcatgtaagtgggaccaccgcagccctttcccagcaaaggcctggccctcatttgttcttatagctggagttgtattaattgtgtttttgctatggcacatggtctggaggagaaggagctccctcaggaaaagctgaggcagcagagggtcagctccgatgtttgctgtttgaccgtgagcctttttcctcccccttctccagatctccttgtcacacacatcctgcaaatcacagtcttgtggagatgactctcattcgtcctcgtcttcctcctcatcatcctcatcctcgtcctcctcttcctgccctgggaactcgggagactgggatcctagctcgttcctgtcggcacataagctctcgggcctctggaattc

SEQ ID NO: 201261 - DNA, 1000 bp, Homo Sapiens
aaggtcttcatgaatggatcctttgataaaatggaactgtgttgtaccaacctcccagtggttttctggggactaatagaaaatgcttctgcatcacttaacaagacaactgacttgtgataagtgctcagtaaatattatctattttatcatatgcaaaaataatgaggggagcgtgcatgtaaaaacacagatacagccatttttcctttccaaatggtgtttatcaccaatactatttcagaatactttgcaagatatggtgggctactgaggccagggtgattagtattcaagttaagtagtactaagtagccttttctaggttaatgttggtgcattaataacataaccatttgtctaagaagattcatcctaaattgcaaagagaaaaaatatgaaatggatatataaaacactttaaagttgtactctccctctattttatatatgaggacctcatgactaggtatgagtacacatagtgaattgtaataatacgttcatttacacctagacaattattttcatgaatacaggatgaaaattattacatttgaatctcattataatctttatcccggaaaaaaaaacatattggaataaagtggatttagacttcatgccaaatatttatttagatgaatttgcaaatagacccatgcttaaaagtatgtgagatttaaattagcatattaaagacttaattataattaaatgctattgcattctatttttgattcaaaaagttttcagcattgcctccttggtttttatttgtttttaactgagcttacagaactaactaggaaaatatatgccaggcattattagcatatcataatataaacatttatttgacattcagatcttgtgtattttgaagggcagaataaaatagaaggggaatttttttttcagattttatgagaggtaagctaaatgtctatcttcttgtatatttttgttagcaaagaatctggatatccatcttgagatc

SEQ ID NO: 201262 - DNA, 1000 bp, Homo Sapiens
tgggcactggagggtatggagaggaaagacaacacgtgaggcggccatgctgctgtccccatgccgatgatccccctgccaggaaggccctctgccctgctgggagcctcactttcctctggtctgtccactgcagcctttaaaactatctgttctcctcattcatccctcgtcctcactcatagctgacgactttgcttccaatttcagaaaacagaatgaaatggaagagaactttccccagttccctccacaactcacctgccagcctctgtgcacagggactcaaggctgttccagcttctgtccgggctgactcccaccatccccatccttcagtatttccccccaccccacagttgggcccttcctctccctctcgatcagcgttcctctcctggagcatacccatgagcacacacaccctgaagtggctcctctctcaaaggaaaaagactccctggatcccacatccctcgaggctgtcacccttctctgctttctggcagacctccttccctttctctcccctcgtctctcttgaaccccttccgctcagactcctgcacccaccatggcacagagcagctctcactgaggtcaccagccacctcctccactctgttggtccagaggccatgctgggccctcatcctgtggacctgccagcagcatcttctttcgtaaaatgcccctgcttggggcagcaccctctggtcctccctctgcactggctgggcctctgtgtctgtgggttctgctcatctccccgagctctcaccatcggggcttctctggactcggtgcttcggcagccccccttttttaactccaggtgttccttggggcatctcatgtcatctccagcattaaaccacgtctctgatgattcctgaggctgtttcctggagttctctcctaaactccaggctcaacagcccagccatctacacagtccctccatgtggtggcctcagagctactgcaagcttccatgatc

SEQ ID NO: 201263 - DNA, 1000 bp, Homo Sapiens
tttgaataccagtcattgtcaatcctggtcctctttgaaaatactgttccttagttttgctctctgcctaatttacttggattgaggggaaacccaggaatcagttgatttgagtacgtagccaatgttgtaaagaactaattgctttaacttctaatagaaaaatatcactattttttttaaaaagttacataattcatgtgtaggaacataatccttttagcctagaagtaaaaaatgatatagtcttgccctatagcactgatcatggccatatataatttataataaccaaaataatgacaatattttggtacagcatgctctattaatttgaatgctcacgagttaacacataattcaatgtgatatgtattaggttatagaaaaccatgaggtaaaaatcataggctgcattgaactttctacttccccaactttgcctcattatagggagggatgcagccctagagttcaagaattccataaagaccaacctgaaattctggtgcctggcatcttgtcacaccttcttccaatacacaaacatcaaggagtgtagaagttgaacatggtctgttgtcactgcctcaaagaatccacttctagcttgttcacactagggtgtgaacatttaaagagggtagggaagaaccacctgggtggattttcactggggatcttataataaactctcaaaatcccagattgagacaagggaagggatgctcagtcgtatgtaattaggaaaaagagagggattttgaacccacccctgcatcatctaagtcaaatagagccagtgtaactgttgggaccgttgcaggtagggtgtgctaggtaccaagccgcagttaggtaaccaatgacttttacaagcttattttcatctcagtacaccacatgcttcatgtgccacgtgcatgtatgtaagttacacatctaagattatattattgggttacactaccatgaattatctaaggaaaacagaatgatc

SEQ ID NO: 201264 - DNA, 1000 bp, Homo Sapiens
ttcattagtttaagctgtataattcctttcccttcctacattcttgtttgtaattttttcgggggaagaggagttgctagtactggcattggttttcctttctctctctctttttttttttcctgagatggagctttgctgttgttgcccaggctgtagtgcaatggcacaatctcagctcactgccttttggcttcaagcaattctcctgcctcagcctcccaagtagctgggattacaggtgcccaccaccacgcccagctaatttttgtatttttactagagatggggtttcaccatgttgtccaggctggtctcgaacttctgacctcaggtaatccacctgcctcagcctcccaaagtgctgggattagaggtgtgagccaccacacccagccttttttttttttttttaaaattttgagatagaatctcgctctgtcgccctggctggagtgctatggtgcaatcttggctcactgcaacctctgcctcccagtttgaagcaattctgcctcagcttcctgagtagcttggattacaggtgtgtgccaccacattcggccaattttttttttttttttttgagacagagtctcactctgtcacccaggctagagtgcagtggcatgatcttggctcactgcaacctccacctcccaggttcaagtgattcttatccctcagcctcttgagtagctgggactacaggcatatgccaccatgcccggataatttttgtattcttagtagaggcggggtttcaccatattggccaagctggtctagaactctggacatcatgatccacacacctcggcctcccaatgtgctgggattacaggcgtgagccaccgtgcccggcccaatttttgtatttttagtagagacaggggttcaccatgttggccaggctagtcttgaactcctgacctcaggtgatctgcctacctcagcctcccagtgtgagccaccgcacccagcctggattgttgaattc

SEQ ID NO: 201265 - DNA, 1000 bp, Homo Sapiens
tgtaggatgaaaaactgtgtaaagggtgactgagccctgcttctagtatgagaaagcaatactagtattcaaaatggatgctgaagcaacataaactgataagaagtcattatacagacattgctgggaactgaatgttgtagtgacttcgacaagaccagtttaatgaaagattaatcccccattctataataaacatatgagtctttacaaataaatgtaataaagttattatgcatgttattttttaaatatatatttctctagtatctcagatttcagaaagctcaaatataaagtgaattcccaactgcagttaaccacacttgaggtgtttggatttttttcttttcccccctccctctctctcttcttccttccccatcttttttccttctttccttccttccttttgagaggttctcgttctgtcatccaggctggaattcaatggcacaattatagctcgctgcaatcttgaactcctgagctcatccagtcttcccacctccgcctcttacatgcacgtgcaaccatgtctggcaatttattattattattattattattattattatgatacagacagggtcttgctatgttgtccaagcaggtctcgaactcctgagcttgagtgatcctcccattacagcctccaaagtgctgggattacaggtgtgagctaacatgcccagccagatatttttctttaggttgtttctgattattcttgcaatatgatattctcttttaagtgttttagtattttaaatttccagagttagctcattttttcataaggattcttaaatcatctaaaatttttatctttaattttcagaacacaggaccgaagaggagaggtgaaacaaaaaggtttaggggaactccataacatagtgttgacaaagagctcactggggttagcaatcatagttaagatataagaaatgagaagagagaggatgagaatagtgaagcttctatgacagctgaattc

SEQ ID NO: 201266 - DNA, 1000 bp, Homo Sapiens
attactttctgagggtaatttgcttccctgtcttccattcaccactggactccttgacctcgacctccatctgtctacagaaaagagtcactgtggcctcctcagtgatcaagccaggggactgtgttcaccagggcccagctccctgcacctccctgttgggcactacctcctaccccaaacttactttcttagctcctgtgacctcatgctccctaggtcccccctgggccacctggcactctgtttttggcctactgttcttctaattctacttgcacatacatatttgaggtcctggctgccacctgcggccaaatcttcaggatttaccatccatccaagtacctattgaagagctccacccagtggtcctacagaccaatgtggccaaatctgaaccctcatcacctaactggcttctctttctgtccccagccatcacacctctcaagctgggcaccctaaatatctcaccagtctgtccctgacttccctacaaggcaagcccttgtcgtctctgctttcagagctcctgtgcccaagtcctgtccccttcaaagccactctactccatgccattgttttcagaatgccctattgaaaacaatgatcaaagcttgttatattaatgctcaaaaccactcatggcccgttggccccagtgggagaaagcccctacgccccggtggggtgtgaggaggtgctatggggttggcctcatcatcaccttcacctgccagtatattctgcttcagtagcacccagctttacacccgcagccacctcatgctgctgtgagactgcctgactttgctcatgccgcgcttctcccaagcagaccctgcagtctccttctaagctactgttttgtgagcacctgttatgtctaaagctgttctgcaggttacatacaggtggatctggtatctgactccaaagcccaagttcttggcactacacaatcttgcttcagatgatggtaaaaccacatgaattc

SEQ ID NO: 201267 - DNA, 1000 bp, Homo Sapiens
agttttccattcctgtacttttgataataatgctcaagttttcagaaatatttataaataatttccttttaactttagccaacttggtcacacataaaattcttttcacaagattaatcttccacaaactttctataaatttgtcatccagttatcttattcagtttttgtctatattttttctctttttctttttggaacaataagacattctacttttagacaaaaaatactctctttttcccttaacaaaaacacaacctcttacttataactttctttatgtgttttccttccctcacatacagatttgtttcccttcattatttctagtttaaattactctaatattaattttaattaactcttagtaaccttaatttctagtgaaaattagtaagcattttgaagtgcatcatgttagtattttgcagatgaacaccatctcataaaataatttttatgcctttaattaacaggcccaaatatgtttagcttttccataacatgtgaaaccaagatgccaaattacgtatattttaaacttctgttaagcaattgatatttcagtattttccttagaaatgactcaaatattaaatcagtaaagtgttacttaatttaaataacatgattttaagatttcaagtcacactaaattatttttgaaattctgacaactttattataaaccttttgtcaatttatattcacctaattcacttgttcttaacaattgtgcttcagttcctccttaaacacaactatgagtggatttatagctttaagacattcattatacatctcagtaatagcaagcttgtttcaccagtaactttaggtttaaaaactgtatctgtacattgtaattaatgctgacaattctgaaaatatttgtttttattttcccaacaaattttaaaactagctttatctgccaaagattatttcatcacataagccaaaaggcaattgagtttctgtttttctgagagaattc

SEQ ID NO: 201268 - DNA, 1000 bp, Homo Sapiens
gacccatctaatgcaaagacacacataggctcaaaataaagggatggaggaataaattaccaagcaaatggaaagcaaaaaacaaaaagggttgcaatgctagtctctgataaaacagactttaaaccaacaaagatcaaaatagacaaagaaggccattacataatggtaaagggattaatgcaacaagaagcgctaactatcctaaatatatatgcacccaatacaggagcatcccgattcataaagcaagttcttacagacctacaaagagacttagactcccacacaataatagtgggagattttaacaccccactgtcaatattagacagatcaacaagacagaaaattaacaaggatattcaggacttgaactcaggtctggaacaagtggacctaatagacatctacagagctctccaccccaaatcaacagaatatacattcttctcagcaccacatctcacttattctaaaattggccacataattggaagtaaaacactcctcagtaaatgcaagagaacggaaatcataacagtctctcagaccacagtgcaatcaaattagaactcaggattaagaaactcactcagaattgcacaactacatggaaactgaacaacctgctcctgaataactactgggtaaataacgacattaaggcagaaataaataattctttgaaacctgggtaaataacgacattaaggcagaaataaataattctttgaaaccaaggagaacaaagacacaatgtaccagaatctctgggacacagctaaagcagtgtttagagggaaatttctagcactaaatgcccacaggaaaaagccggaaagatctaaaattgataccctaacatcacaattaaaagaactagagaagcaagagctaacaaattcaaaagctagcagaaggcaagaaataactaagatcagggtagaactgaaggagataagagacatgaaaaacccttcaaaaaatcaatgaattc

SEQ ID NO: 201269 - DNA, 1000 bp, Homo Sapiens
tgaattggcatcagaagaatgggcttgcttgaccctggggtaatagatggcatttagctgggtaccatatgggaagaagggaagtgtgatatctggtcagtattctgttagataaatgaatgaatgaaagagtacagagtgtacccagagctcagtggctgtcagtgggcctgagggttaggcacatacaccccaccattgggagagatactgactttgtcttcatttcctctaaatgacaggtccatcaagtcagtccctgagaaggaccgtaccacttcagaagcccagacagaggttcctctggatgaccctgacagggcaggatggccagcaggaaaggacagcatccaatacggcagggtaaccaccagcttcacccacccctccccacccactgctgccacctccaggggcccaagtcttcccaccaaatgtagcacttggcagtgatactcacctttcttgagcacctactatgtgccagtagcattctagatgttcattttcttaatcctcacaaccaccctaaaaaatagatatgataggtctatttcagacataaagaaactgaattcttttaaaatttattttattttgattttgagaaagtggctcgctcactcacccaggctggaccgcagtgatgtaatcatagctcactgcagcctcgacctcctgggctaaagcaatcctcctacctcagtctctcaagtagctgggactacaggcgtgtgccaccatgcccagctaatgtttgtattttcagtagagatgggttttgccatgttgcccaggttggtctggaactcctgggctcaagtgatcctctggcctctgcctcccaaagtgctggggttacaggtgtgagccactgtgcccagccaagaaactgaagtcttaaacagttaagagacttgtttgtgttttcatatctagcctgggacacaacctgggactcaaatctaggccaatctgagtctgaagcttacactgtttc

SEQ ID NO: 201270 - DNA, 1000 bp, Homo Sapiens
tataatggagcaaaaaaaaagtcttttcttttcttttttttttttcagacagagtctcattctgttgtccaggctggagtgcagtggtgtgatctcgactcactgcaaccttcacctcctgggttcaagcgattctcctgccttagcctcctgagtagctgggactataagcacaagccgccactcctggctaacttctgtatttttagtagagacggggtttcaccatattggccaggcttgtctcgaaatcctgacctcaagtgatccgcccacttcaacctcccaaagtgctgggactacaggcatgagccatcacatctggccaaaaatagtcttttcaacaaatggtactggaaaaactggacatccacatgtaaaacaaacaaacaaaacccaaatctagataacagatcttaaatttttcacaaaaactaacttaaaatggatcataaaactaaatgtaaacctcaaaactctaaaactcctagaatataacataaaagaaaacttagatgacttgggtatggcaataaatttcactcacaggattagagtaaggattaaataaaataatactttaaaacattagaacagtgcctggaatgtttgctttgcataatcccatgatccccatggctatgaagaaatcatgttttggtatattcaattatattttaattgagccacagaggtcatttagcaagcccattagttagataaattttttgacatacaaataaattatctcttacttgatctgttcaattaaaaaacaaaacaaatagttcttcttttttttttttaacaatgctatcttgggaactgtgaggtctcctgtcactaggttgcccctgggtgggctccaggagagtgacacaaggagcctgaaggtcatctgacccagtgtcactcactggctgccagacggattcatagctgaggtttttggtcggaaaggaattcacaaaactttttttttttttttgagaccgagttt

SEQ ID NO: 201271 - DNA, 1000 bp, Homo Sapiens
attctaatactctaataagaaaaaacagcagaaataaaaaaatttcacttccataactagttaacgaaagaagtttgcacaacgtaatgctaaccatactgtcagtgtatcaaaataattcatatataaatgatggaaaatcatatatgtttccattttaaagcaatcactagaaaatcatggcgattactttgaagtttttctacatagaaaatgaaaaacctttatgcacacacacagaggtgcatggaaagaggataatgtgttacatatataccaagcattgaagtacgtatcaataaaaactccataaagcatggtgactgtagttaataataatgtatgtacttgaaaatggctcagatcttaaatattttcaccattaaacaagacacgtatgtgaggtgatgcctgtgctaaatatcaggttggtgcaaacataattgcagcttttgcattgttaaaatttgccgtttagtattggaatgcattcataaataaatgtggttatgttatacatcattttaatgcacatttctcactttatttttttttgctaattacttattacttgctgtttattctatatttattttagattatggaaatgaagttagacaaaaagcaaattcaagtgactttcttaatcgagttcaaaatgtgtcgtaaagaagcagagacaattcacaacaacagccatgcatttggcccaggaactgctaacgaacgtacagtgcagtggtgaggcaagaagctttgcaaaggagacgagaggcttgaagatgaggagtgcagtggccggccatcggaagttgacaatgaccatttgagagtcatcatggaagctgaccctcttacaactacatgaaaagttgccgaagaactcaatgtcaaccattctgtggttgtttaacagttgaagcaaattggaaagataaaagagcttgcacagtggttgcctcaagatctgagcaataataaaaaaaaattgttgttttga

SEQ ID NO: 201272 - DNA, 1000 bp, Homo Sapiens
cttgtgaaggtcttcattggaatggcacattgaatgcatgaacccttaaaatccttactccctttaacccaagccacatctcagtggctttaaagcatatcaaagcaaggaggggaaagtctgtgtgatacggtactaaaattgatcctgtagtaccaggcatgaggagaggaaggaggagtatcatcattatcctgttaaggatttgtcatgcctcagagcatctgcaaggaaatagtccacagataaagttcagcaagtgatttgcaattggtagaggtggtttggcattttgaaaagctttataaatgtgactgcagcctgagaagaatgaccaccactggaatgagggaaggctggaaggatttaaggggttctttatgaaatcaggcacacatccccatgtcgactaggctagactcaggcaccataatagccctggttcagggtcactcctctttccaggaaggtttggatcctacagttagaaaagaggaatcttggatctctaggtaagggttagagaaagtattctgggcatcccaagttagaatctggtgtctttgcttaacgagttctgaacatttcatgtgagggaatatgggctactgttgtaggccttgctgtttcacctgaaccatccctgcccttgaaggacttaaagttggaaggaatgtgaggaggcggagtagcacagttatatgacatctaatccaaagtagaatatgcgagccttaagagaagtgcagagggctgtgaggagtatgaagtggctggcaaatagattcagtattatatttcatttattcattctgcagatatttatggaccacccttttatgttgctattgctgtgctagtattggagatacaaagatgaatatgacacctctcgggccgttgccaactgtcgagtaccaggaagagcgcttagataaatgaccatgtacaatggggtacgtgcaattataggtccactgttatttgctgttctgaattc

SEQ ID NO: 201273 - DNA, 1000 bp, Homo Sapiens
agtataagttttctaatatacaggtagcttagaattattgctaaaggccttttcacattctttatattcataaggcttctactaatatgaactctagagcccaaccagcttcatttttgactaaaggcctttatacattcttaacactgataaggtctctcatgagtgtgaatcacaactgtgagttctctcatgaattctaagacttggaccactaacaaagcttttccacattccttgcaatgatagggatgcacatcagtatgaattctctgagattgaataagttggcactaagtctgaaggctgaccagcactactcacattcaaaggacttctttccagcatgaatgttctggtgcctagtaagctgagccagaacagtgaaggccttttcacagtccttacactaaatgagtctctcatcagagtcaattttctgatgttgcatgagatttgaacaattaaaggttttcccacactcattacattcatattgtttcacagcagcatgaataaccctatgccaaacaagagtgaaaacaagcttgaaggacttcccacattccttgcattcaaacatttctgacctgaataaattattttatggctcttaagatgaaaggcctctccacactctttaccttctcaccattatgaaatctctggtggcgaataagatgtatattaagtctaaagacttttccacatttattacaatcgaagggtttctttccagtgtgaatactcaggtgctcagtaaaatttgaacttctacgaaagaatttcccacattccttgcactgatacggtttttcaccagtatgaattctctgatgttgattaagtagggactgaagtctgaagtctgacccacacagctcacacttgaaaggttttacattagtatgaatactcagatgctcagtaaaatttgatcttcgacgaaagaatttcccacattccttgcattggtatggtttttcaccagtatgaattc

SEQ ID NO: 201274 - DNA, 1000 bp, Homo Sapiens
ggttgaggttgcagtaagccatgatcacaccactgcactccagcctgggtgatagagtgagaccctgtctcaaaaaaaaacccacatagagtgactttctaaaatgagatatgttaaaaattgtattaaactgggccgggggtggtggctcatgcctgtaatctcagcactttgggaggccgaggcagatggaccacctgaggtcaggagtttgaaaccaagctggccaacatggtgaaaccccatctctactaaaaatacaaaaaattatctgggcatggtggcacatgcctgtaatcccagctacttgggaggctgaggcaggagaatcgcttgaacctgggaggcagaggttgcggtgagctgagatcgtgccattgcactccagcctgggcaacaagaacgaaactctgtctcaaaaaaattgtattaaactgaagacagtgaatttaaatttttttattaaaaaaactgttaaattctcactgtttcaatttgtcaatacacttaataaattcctctgaatagaataaaaagacgcagaattacccaaaaagaaaagtaggcacaaatttctgcatagattaggaaaaccaaagggccaataaataagaaaactgctcagcctcattattcatcagtaaagtggaaatcaaaaccactgtgacatgatgttacaccttcagaatggaaaaaatggaaagatctgacaatataacatgtgggtgaggatgcagggcagctaatagggatgtaaattcacatagccactttggaaaagtttggcattatccaatgaaattgaaaacatgatcacattctgagagaatggaggtaaaaaaaatgaaaaaaaaaatcgaaaacatgaattcctatgttcaccacttcccactcttgcatatgtatacagcaaggacatttgtgtgtaagcaccaggaaacataggagaatcttcacagaagcatgcttcatgatttaaaaaaacatttgaaaagaattc

SEQ ID NO: 201275 - DNA, 1000 bp, Homo Sapiens
cctcgaactcctgggctccagtaccctcccacctcagcttcctgggtagctgggaccccaggccctcgattccttgtgaggagggcagcgggcaggggtttctggatgcagtctcatctgctgtgacccttctcagaggagcagccaccattcctccatcctccctcagagcaccaaatccctgcccctgcccggtctctgaacacagtgctgggctctgccaagccctttccagcacgctccagccctggggcaggcaggagggccatgggctgaacacaggtcaggaggaaggggctgccagggccgcatcctctgggacctcaacctgggggcagggacgggggagctaccctcacagtgaccgcaggaacagcggcagcccaacagcccaggcagtggcctggggaagggatggcccatcttggggtcagagcatgggccagcagaggctggcgtccatgcagggttgggcccaggttggggactcagggcctgagtaggggaagccagccctgagggctgaccacagagaccaggaacggggtccccatgggctgatcccacaaggacatccagcaggagacaggagccagacaccttgcggtgggggtgggtggtgatggccaggaaggcaggagaactgcggaacccctgtggggtgagtagaggtgctggtatcccctgggaaagcccaggagcaacgataacctcacagcaacgagcaccccaaacctagtctctgcctcagaaccccacgctccacttaacggaccggggctccccagagatatggctcatctcagccagaagcaggagtgcgggagaaccccatccacgatgggacaaatcagcgcctgacagctggggcacgcacctgagattccaccaaaggcactgacctgagcgcccaggctggggcactccatggtgcgtggctgcttccctcctcaagtatggggagggccagggggccacaagcccagaccaagggttgatc

SEQ ID NO: 201276 - DNA, 1000 bp, Homo Sapiens
aaaatacaaaaattagcccggcacggtggcgtgcgcctgtaatcccagctactcgggaggctgaggcaggcgaatcgcttgaacctgggaggcggaggttgcagtgagccaaggtcgcaccactgcactccagcctgggcagcacagcaaaactccatctcaaaaacataaaaaataaaaatagaaaaagacaaaaaaaaaaaaaaaaaaagaaaaaaatgttttgcaaatatttctcccagtctgtaacttgcctttcatcttcttaataggggctttcaaacagctaatgcttttaatttttgataaagtacaatttatggttcacatattttgtatcctaagaaatgtaacctaaggtcacaaagatctcctgtattttctttgagacattttattgtcttagatctatgcttaggttgatgaaccatttatagttaatatttatatatacagagaataagataagggttaagattcagtttttttccatatggatatccaagctctaagaccactgatggaaaaagatggtcctttctccctcgaattactcaggcatctgtaaaaacctgaagtgtccatatacttcacatgagtctatttctgaattctctattttctttggttaatctcacacagtcttacttgctactttacagaagtcttgaagtatgacaaggtaagtcttccaattttgttctttttcaaaatcccttgggctgttcctagatcccttgtatttctatataaactttagaattagctcatcaagttctattaagaaattgtagcctgctgagattttaagatggatcaagttgaatctacagattagtttgggaagaactgacttaatacttagtcttccaacccgtgtgtatggcatatcgttcttgggtcttcttgaatttctctcagtaacattcttagttctcaatgtacagatcttgcatatattttgttaaatttatccataaatttttcatcttttttgatc

SEQ ID NO: 201277 - DNA, 1000 bp, Homo Sapiens
cagagccaggccttgtgccacagaccttgcatgaatgtgactctgtagatccctaccttcagcgtgtctgagaaaagacacttgttcaacacgtgaattcttgggaccccttccagggggttaaatccgggaatctcaatttaatttcctggagggagtcccgagaatctgcatgtggaatgaacctgaactcattaattccctggcaggggtctgcaaggatctgaatgtctccaacggggtctgggaatctgattttttgaggcatctgtgacgattctgatacagaaagtcccagactcacctgagtccttcatctgcgttatttaacttgaatttagaatgtctgtagaggtaatggtgagctactgaagcctcatctgcaggggtgacacagggttagggttatagatgacagctgctgtggatcagggctcttcgtcttggtttgtacaatggtatcactcgaggagtcttgagccagacctttgtcaggctctccctcagatcaattgcgtctgaatctctgggggtggggccctggaaacagtattttatttttgctgattcttacaggtactcatatattcacacactggcacttacttattcagtagccttttgtgccatgctcaaagcactgggaatatagaagtgaacgcgccacaggctctgctctcattgaaattacctttactgttgtggtagacaataagcgaataaacacgtattaaatcagtatatttatttatgaagaaatatatgaagccatattgaacaatgaggaagtgataggaatgggaggtttatttttttaaaaatataagttttattcagatacataattcacattccatacaattcacccatttaaagtacacaatttaatagtttgtcgtatattcacagaattgtgcaaccatcaccacaatcgactttttttattttttagagacagggtctcacattgtcacccaggctggagtgcagtgatgagatc

SEQ ID NO: 201278 - DNA, 1000 bp, Homo Sapiens
cagaactaataccacatatctacaaccatctgatcttggcaaacctgacaaaaacaagaaatggggaaaggatttcttatttaataaatgctgctgaaaaactttttttagagaatctgtgaagggacatttgggatcctgttgtggcctataaggaaaaactaaatatccccagataaaaactagaaagaagctatctgtcaaactgctttgttatgggtggattcatctcatagagttaaacctttcttttcattcagcaggttggtaatgctttttttggagaatctacgaatggacatttggaagcccattgcggtctatggcaaactgaatatccccagataaaaactaaaaagaaggtatctgtgaaacttcatttttatgtgttttcccctgtcacagagttaacttttactttggattcatcaggttggaaactcatgattcatctcacagatttaaacctccttatggagaatcttcaaaaagacatgtagaagccctttgaggcctacaggaaaaatttggatatcccaagataaaaactagaaaaagctatctgtgaagctacttggtgatctgtagactcatctcacagagtcaaacttttcttttgattcagcaagttggaaatactctttttggagtatttgcaaaggaacatttgggagcccattaagacctatggggaaaaagcaaatatccctagatgaaaactagaaagaagctatctgcaaaactggtttgtgacgtgtggattcgtctgaaagggttcaatccccctcttgattcagcaggctgtaaacactctttttggagaatatgccaagggacattatggagcccattgaggcctatggggaaaaatggaatatcaccagatataaactacaaagaaactatctgtgaaacagctttgtgatgcatggatttatctcacagaagtaaacctttgtgttctttcagaaagtgaatctggtttttgatgtgtgaattc

SEQ ID NO: 201279 - DNA, 1000 bp, Homo Sapiens
agtgagactccatctcaacaacaacaacaacaacaacaaaaaaaaaaggagtcagagccgttgctatttccagggatgggcactaggcgaggcaagcccaagccctttacctgcatctgcaaatcctgcagggttaggagtgtgaggagacttggagaagttaagtgacttatgaggctccatccacaccttgtaaagcaaggcttcacagagcttgagagggttctggggtacttccactatttcagatttcagggttattaagaaagtaccatcaaaacagagttacagatatgtggtatatttactcttaggagactatttcaaacacaaaaacaatgccatgacttcatgttgacatcatatggaaacaaataccaaatgtctagatagactgaagagtggactctgccctcagtcctgtggaagctgcagaagttgccacagatctctcagagtcaggggaagggctatttcaatttttttttttttcttttttgaggagtcccgctctgtcgcccaggctggagtgcagtggcgcaatctcggctcactgaaacctctgccttctgggttcaagtgattcttgtgcctcagcttcccaagtagctgagattacaggcatgtgccaccatgcccagctacctttttttttgtatttttagaagagacggggtttcgccatgttggccaggctggtcttgaactcctgacctcaggtgatccgtccgcctcggcctcccaaagtgctgggattataggcgtgaaccactgcacccggcctatttccttgactctcctcctgcaccattcttctgggtcacctggcactgtgacccctatcttttcccagccacccaatgactcaggctagaaaatttagcactctccttgtgtccatagtcagaagcattcccagggagaagcacagccagagataggcctccttcagcctgaccggggccagggcagaagccaatctacagtactgaacaggatc

SEQ ID NO: 201280 - DNA, 1000 bp, Homo Sapiens
acgcattgcagaggacaccagcgagcttccaccttgctgggtttggggaatccccgcgctgactcagaggctcaaaaagcagcatctgcccccttctgggcatcagtgctccctcaagcacctgatcttggacctgcttcttctaaagaagaaaaggactttctccaggtagagggaaggacaagtgatgaaggaaggatggattcggttaccagatgggagagtagctgtgccacagctgctaggagctgcagttgtactggctgtgcaagaaaccacccatcgaggtcaacagtcattggaaaagttgttaggccggtatttctacatctcgagtttctcagcccttgccaaaacggtgaggcagcggtgtgttacctgccgacagcatgatgtgaggcaaggtccagctgttccgcccggcatacgagcttatggagcagccctctttgaaggtctccaggtggacttcacagagatgccaaagtgtggaggtaataagtatgtactagttcttgggcgtacctactctgggtgggtggaggcctatccagaacgaactgagaaagctcgtgaagtaacctctgtgcttcttcgagatctgattcctagatttcgacgcccttacggattggctcagacaatgggcctgcgtttttggctgccttggtacagaagacggcaaaggtattggggatcacagggaaactgcatgccgcctcccggcctcagagttccggaaaggtggagcggatgaatcagactatcaaaaatagtactattgtcttccccgctggatattgaaaacaacaccacaaggggcgtcaaaccacctgctaaatttgagggaatgttatcctctccccacctcccccggccccggatattagagacaataacacaggggtgatgtacacccactgctttattgggagtaatatcatcctctcccttcttggatattaggaacaatatcacactgtgtgtgtacgcctgtcgc

SEQ ID NO: 201281 - DNA, 1000 bp, Homo Sapiens
aaatcttgactgggcacagtggctcacacctgtaatcccagcactttgggaggctaaggtgggaggattgcttgagcccaggaatttgaaaccagcctgggcaacaaagtgagatggagtcttgctctgttcacccaggctggagtgcagtggcacaattttgactcaccgcaacctctgcttcccaggttcaagcaattctcctgcctcagcctcctgagtagctgggattacaggcatgtgccaccatgcccggctaatttttttatttttagtagagacagggtttcaccatgttggccaggctggtctcgaactcctgacctcaggtgatccacctgcctcggcctcccaatgtgctaggattacaggtgtgagccaccatgcccagccctttccttttttttttttttttttttataggagacaagggctcactctgttgccaaggctgtagtacaagtgcagtggcatgattctagctcactgcagcctcagattcctgggcttaagcaatcctcttgcctcagcctctcaaagtgctgggattacaggtgtaagccaggacacccggcctcctttcttttgaatgatattaatctgttcatcattcagcacaatttggagcaaaggaactagtaagtcttcaacaggctttcacttcatcctgctcccccagtagtagggtcatacaaaaagtctacgaaggtagaggccctcttatcacagcaacaatcatcacttaagtcaaagacataaaattaagggataccttagtttcatcacagaaccagtccaaatgtgtttgtttgcattctcaacatttcagtaacctctagggagtatttcttctaacaattatgggtggaattgggcagttcccctttacaagatatgttttatgtactgccacctttgtgcagctcaaccgatttggaatttgcccagctaaccacattccggcaaaagctgcagctaattgaagatcttcaacgaattc

SEQ ID NO: 201282 - DNA, 1000 bp, Homo Sapiens
cgcctgtagtcccagctacttgggaggctgaggcaggagaatggcgtgaacccgggaggcggagcttgcagtgagccgagatcccgccactgcactccagcctgggcgacagagcgagactccgtcccaaaaaaaaaaaaaaaaaaaaaaaaaaaagatttagttagtaatttattgactcaaatactttatgccttctatttcacattttttacaggtttataagtctagatacctatgtcaattagtgaattttctaccaagagttcatgttttgttgcttaaaggcagataatttttttatttaaataatattaaaaagaggaaaatatttcaaaataccaagattgggaggtgtctgggagatttatatgtattgcttttattaactgtctagcactggatttataaaccagcttatttttttaatttaaaagctctctgccttgcaatttaattcacatgatctgcattaaccatgccatattcaaaatttcattgataaattctatccagtagtcaatatcgaattgtaaactgatgtaatgtgctttaaaatatgaagatttaatctttaaaatatgaatatttgattgaataattactaccactaaaatcatgtttacttattagaattatcatataggaattgttttataatgtatatgttaattgaatgtgatttcttgatacttaggatatacgttaagtatacataaacaaattggaaataaagttctgatatactgttccatgaaagtttcaaatctttatattaaagattaccatttgagtcagaggcaatgataggattttctgtactttatccacatgtttatatatatacatatatatatgttttcatataacctttcataaggatagaaaagaactatgaatgtttctccatcaggcatctttcaaatacaacataacaataacttccttaagtattttatttaggcaaaaactataaaatgatggaatggaaaaagaattc

SEQ ID NO: 201283 - DNA, 1000 bp, Homo Sapiens
atcaatttcattgcctctaaaaagttgtgatgatgaatgttaccactactcaactgagtttatgaaaaggcaaatatacttttaaaaatgtaggggtgcttatacaaagacttatgtgtttacgtttactttttttataagctgatttaatcaaaagatttagttagtaatttattgactcaaatactttatgccttctatttcacattttttacaggtttataagtctagatacctatgtcaattagtgaattttctaccaagagttcatgttttgttgcttaaaggcagataatttttttatttaaataatattaaaaagaggaaaatatttcaaaataccaagattgggaggtgtctgggagatttatatgtattgcttttattaactatctagcactggatttataaaccagcttatttttttaatttaaaagctctctgccttgcaatttaattcacatgatctgcattaaccatgccatattcaaaatttcattgataaattctatccagtagtcaatatcgaattgtaaactgatgtaatgtgctttaaaatatgaagatttaatctttaaaatatgaatatttgattgaataattactaccactaaaatcatgtttacttattagaattatcatataggaattgttttataatgtatatgttaattgaatgtgatttcttgatacttaggatatacgttaagtatacataaacaaattggaaataaagttctgatatactgttccatgaaagtttcaaatctttatattaaagattaccatttgagtcagaggcaatgataggattttctgtactttatccacatgtttatatatacacatatatatatgttttcatataacctttcataaggatagaaaagaactatgaatgtttctccatcaggcatctttcaaatacaacataacaataacttccttaagtattttatttaggcaaaaactataaaatgatggaatggaaaaagaattc

SEQ ID NO: 201284 - DNA, 1000 bp, Homo Sapiens
tgccacgccaggatctattcaggctgcatttgaaattggatgggcacgtgattcaggcagtaaaatatcattgcattcggaacagcaggtccccacgagccaagcccatcgatgcaccattccaactgacagctcccgagaacatatttattacctaggccgtgaaggcatctggtttttagactacctagggtgtaattaagatgaaaacagattgatggagcatgcacccaggaggagcaggcatgatttaaaaccagctttctcaggtcttctaccccaagcagcctccccacttctttcctcttcttttataaaggaagttaagtttttgccttagtgcagtttttcagaagtacttgtttgtgggagagcattctgctctgtgatgcccaggctccttgaccctgtggaagtgaggcatggggagtccttgagagcaggtgcccagagaggtgtgtcaagctccatgcccagccctgggccacaggcgctggcctcagccaaggttcttaaaccttgggatgggatggctgggcaggcaggaaaaggcaccagccagtgttactggggtttctttgtgggttctgggggcatcatctggctgatagacgatgggtagggtagggaaatggcttcagtgtaagatgggagctgatgcccttccttgggacatctgggatgggctgtgtggactttggttctgttcccctccaagggccagttacaaggccagcaagagcccccgtcagtcccactagctcactcactagcacgtgttctgggggtgccgccttcttcatttctaggccttcccaagggacgcgcctgagcaggccaggcttttgtctctgcaggaggtcagcacctcccctgtcttcagctgggacccagcactgtgtgtaccaacactatgtgtaccagccccgtgctgggcacccaggaggcgagtactccgatcatcttcatcctgaggaagagtaaagtgaggcccaggatc

SEQ ID NO: 201285 - DNA, 1000 bp, Homo Sapiens
ggatagggggttgtgaattaaattcctaacatgtcctaatagttacatgttatgcctaatctgttagtgtacttgggtgatatgacacttattttaagcctgatgcacttagaagcatgttctactttggatatctgttctgaggatggtagctacaaaatgaacttgtgccctttcgcaaattgttggacttgtggtggttgtcttgtgtccctagtatctgatttggaagactcaattaagggtttaaaagcctgcagaaggcgcgggccgccacgcctaactggttttcatatttttttggtggagacggggtttcgctgtgttggccgggctggtctccagctcctaaccgcgagtgatctgccagcctcggccccccgaggtgccaggattgcagacggagtctcgttcactcagtgctcagtgttgcccaggctggagtgcagtggcgtgatctcggctcgctacaacctccacctcccagccgcctgccttggcctcccaaagtgccgagattgcagcctctgcccggccaccaccccgtctgggaagtgaggagcgtctctgcctggctgcccatcgtctgggatgcgaggagcccctctgcccggctgcccagtctgggaagtgaggagcgcctcttcccggccgccatcccatctaggaagtaaggagcgtctctgcccggctgcccattgtctgagatgtggggagcgcctctgcccggccgcgaccccgtctgggatatgaggagcccctccgcccggcagccgccccatctgagaagtgaggagcccctccacccagcagccgccccatctgagaagtgaggagcccctccgcccggcagccgccccatctgagaagtgaggagcccctccacccggcagccgccccgtctgagaagtgaggcgcccctctgcccggcagccaccccgtccgggagggaggtggggggcagcccccgcccggccagccgccccgtccgggagggagg

SEQ ID NO: 201286 - DNA, 1000 bp, Homo Sapiens
attactatgttagacaacaacattcttttttaattacttccagtgggcaattattttgatttctgaacaaaaaagcttttaagtaatcattccttttcctctcttaagttaggggaaaagtaagtcaatgatgaccagagttttcaagaagaatagagaaccagtgtcatcacacagagttgatgtgattcctacaaaaaagcacattaatctgatgtttaatttcgcccatgaaacttactgataggtaaagaaacgggtttaattaagctttcttgaatcctcttaaccatgtttgtgatatccttgtaaatcagatcccagagtgagaatctttacattagtcttccactttcaaactgcccatagttaccctactgtgcaccatgaccttcagtggcttcccaaggtaggagaaaagttcaccctctcaggggctgttttcgaggttcctcccaatgacactgatgtccaaatctgttgggctatttattagctattgctgagcactgccctacattctattctccattccttatacaattctctctaatgggaaagccctttctcctatttttttttttggtgcccattcaaatactacttgtctttcaagacacgctcaagcacttctgtatgccaataaaatgattatatctcatataggcatttatctatgtgaacttgaataatgtttctgagcctcaagattcttcctctacaaactgtagataataatggtattaatctcacaggatagtagccagtacaagtgaaacagaatacattcagcccaatgcctgctccatggtaactaccaaaaggtcttataaactttactgaaagcacttgccttaaatgtctccaagcacatttgggaaaacctggaattcaaaaataactattagtgcaagatagcatgtgataaaggtcattgatgggcagacatcaagtggatccacatggagaagaagagttgaggtagggttgtcaaggaatt

SEQ ID NO: 201287 - DNA, 1000 bp, Homo Sapiens
tcccaagtagctaggactacaggtttccactatgcctaatttttaaaaattttcggccaggcgcggtggctcacgcctgtaatcccagcactttgggaggccgaggtgggcggatcacgaggtcaggagatcaagaccatcctggctaacatggtgaaactccatctctactaaaaaacacacaaaaaattagccgggcgcggtggcgggtgcctgtagtcccagctactcaggaggctgaggcaggagaatggcgggaacccgggaggcagaggttgcagtgagccgagatcgcgccactgcactccagcctgggcactccagcctgggcgacagagtgagactccatctcaaacaaacaaacaaacaaaaaaattcatgtagagacttgggggtcaggagtcttgctctgttgcccaggctggtgtctaattcctggcctcaagtgatcctcccaccccagcctcccaaagtgctgggattacaggtgtgagcgccagactgttttgtcagttttgttggtcttttcaaaaagacaacttcagttttcttgactttctctatacttgttgtgttttctttttcagacttttttttttttttttagagagggtctcactctgtcaccgaggatggagtgcagtggtgcgatcatagctcactgcagccttgaccttccgggctcaggtgatcctcctacctcagcctcctcgggagctgggattacaggcacctgccaccacacctggctaatttttgtattttttgtagacacagggttttgtcaagttacccaagctggtctcgaactaataggctcaagcaatcctcctgccttggtctcccaaagtgctgggaatacaggcataaaccaccatgtctggccgacttgctttgtagtttttatatgtgtgtactaactggtgcacacatataaatatatatacattaactatcatgtatgtaacacacatacatgattcttgtataatacatacac

SEQ ID NO: 201288 - DNA, 1000 bp, Homo Sapiens
tacttaggtttaggaaggggagggggacttaaatgtaataattctacagaagtaaaaacatgcaagaatcaaaagaatcaaaatggttacagagtgataaacaacttaaaagacaaatggttacaagaagagcaacagtaccaggtgcaagattctaaatctttcattataattagatatagggtctacgccagacacgaactcaaggttttatgttgttatctcttggagaaaattcctgggaacttcatatattgttggtgttcgtaccttatcagttaattaggctcctttgaaatgctgaggatctgtttacccaggccaactccttacgaaagggggttgggtgaggagcccttagtgtcttgtaaattaaggggtcaattggggtttgtacggctttcttagctagagagagtcttattttacatgagaagcaaggctaggtgattaaagagacaagcaggacaaaattcaaagcaacgagttaaagtaaaaacaaggttaggcatttcatgaccaaagccccttcgcctggcagcaagagagaaattcatacctcaccaagacccacacctctaacccttccccactgacaatccaccgcccagaagaggtatgggtcttctgctcttgcggcccccaagcccactccctgtgctgctgaggcttgacctccattccatcacacctgctgcttttcctcccaagcaggagttcctccacctggcctaggtttgggctggaggaacacaccccctcagccctctctaaacctgcctttagggaacaccagacatgaccaagtaaacggcccccacacaaacttctaggagacccaactcaccttagctgtggaggatgacgttgcaatctgaatcaccttggccagaaggttcttgggaagtggaaactgggtcagagccctaatggcactgtcgtcatctgtcatctcaaaggaactccccctgggaggaccaaaagtttaactgaaagaatt

SEQ ID NO: 201289 - DNA, 1000 bp, Homo Sapiens
agaatgcctggaagcgccccaggagccatggcttctgggatgtccttcctgcagctgagctcagggctgctgggcaggggtaggagctgtggccccagccttggggctcatgaaagcctctggcagagaggatggcctggcagcgggcggggtttccctgctgggagggaggcagggcccgactcctgctgcagtggctctggggacgggcagctggcggccagcggggcgggcttagtggcaggccctggtcctcgcgctggcgctcagggctaagctggggctcctgccctctgctgcagccgactcctctctgtagcccccctctgggctgtcctgggacttcgcctcccacgcaggcagcctgcaaggtgaggggtgggtggtgcccagcacagcagcaaagactttgtgggaaccttgagacctgaaagaacaggagagtgggcagtgaaggaccacgcaggacagtagccagggctccatggggaggggctggggccggtggatggcgctggtcttccaaggcagaggccccccgaccccgtcagagcctcccagcgagcccgaacactggggagtggcctgggccgcagggtgtctggggtctggggaggagctcatttggccgggacagctgatggtggggtctgggtggaagggtggtgctccgttacctgttgtcactctcctggctctgatggtgccagctgctgcctcagccggatttgaggactcagcccctctgggaccctccgcctgccatgggtgagtcatgagctgagctctgattcttctccaggcgggcgtgaatcactggagctgggggagagaaagcgcgggtccatgtgagagctggctcagcaaactgcccctgcctcccacccggcccactctccccaatgcccccttccatgatgccagccccaccccatccctttggctaacttgctgggggcccaagcctcagtgggctctcctagaaaacagcctccggatc

SEQ ID NO: 201290 - DNA, 1000 bp, Homo Sapiens
ctgggatttcaggtgtgagccaccacgaccagccccttctctgtgttttaaaggcatttaagtataaattattaaactgcaggacagaacatattagctgacggtcatatgagtgaccttctctaaatgccaggaggatagaatccacttttcctttatcaatattttccttgctcaacttctggcatattaggtactcaataagtatgtgctgaaccaaaacgaacaaaaaaatgctgtcatcaaactaacttccatctactcaagtaggctgcaacttcaaactgcccaaactagcaaatctctaataaagatgggctcagaagacatatcagcatgaataaccttctgaggaaaagacaacatggattctaaaagtggacatcacaccacaccagttcacccaaattctctgagaaaataaatatgtgtggctgggtgacggtggctcatgcctgtaatcccagcactttgggaggctgaggcgggtggatcatgaggtcaggagatcgagaccatcctagccaacatggtgaaaccccaactctactaaaaatacaaaaattagctgggtgtggtggtgaggcacctgtagtcatagctactcgggaggctgaggcaggagaaacgcttgaacccgggaggcggaggttgtagtgagccgagatcgcaccactgcactccagcctgggcaacagagtgagactctgtctcaaaaaaaaaaaaaaaaagaaaagaaaataaatacgtgaatataatttatgtgagctttcacaaaactcttgataagattctaaattaaagtttttttttaaagacctgagtggccacaggatgagaacatttactgtagactggacataactgagacacagaaaattataggtagatgctgaggtacttccccaaatgaagaagtaaaaacagaagattgaaaatttttttagaaatgctatatttaacattttaatatattgtacaaaaaatatacagagaattc

SEQ ID NO: 201291 - DNA, 1000 bp, Homo Sapiens
cggaggctgcagtgaactgagattgcaccactgcattccagcctgggtgacagaggaagaccctgtctcaaaaaacaaacaaacaaacaaacaacaacaacaacaaaaactagcaggaaaaatctcccctctcttctaattccaaacactaagattcccatccccgtgtggtagtctccccagatggctgccatcaattttttttccttcgtatgcacatgctgttcgacccagcaagaaaccattctacctcccctggaatgtggcctgacatcttgaattgggttggccactactagaagtctgtataaatgatgctgtgccaattctaggcctggactttaagacgtctggcaactttcacattccctctgaaaacctactgccacataagaagtctgactatgcagagacaccatgctgtgaggaagcccaagctgtgatgtggagaggccaccagaagagaactaagtgtctgacatgtgaagaaagccttctcagtccttccagcctagcccagcccccagttcagtgcagtagaattagtgacctcagccaatgccacctggaacagaaaaccacccagctcagactagtctacccaaagaatcatgagaaatgatagttattgactgatgacaccaagttttgccaagtctgttattcagcagcaagtaataactgagatgccttgttctattttagaatattttcttagtatcttttttcacagcatttttagcagtcacacttatacaataaatataattggtttttagcacttttcacaatacatttcaggacatgtctcttctcattttatcaaaagtggaaggaatatttttagtgaccacacactgttcaattgtagggatgtattatcatctgggccaatcaaattctgtctgctgggaaggtagaaatgggacaaagtgattctgatcaacctttgtggttgaggtggccacatttggatattgtgcaagcagaactagaaaat

SEQ ID NO: 201292 - DNA, 1000 bp, Homo Sapiens
ctttcacctccttggttagatatattcctaagtattttatttttattttttgcagctattgtggaaggagttgagttcttaatttgattttcagcttggtcgctgttggtgtatagcagcactactgatttgtgtacattgattttgtatcctgaaactttactgaagtttcagtttcatttatcatcagatctatgagctttttggacgagtctttagggttttctaggtatacaatcatatcatcagtgaacagcaacagttttgtatacaacactgtggggggtaaggggagggacagcgttaggagaaatacctaatgtagatgacgggttgatgggtgtggcaaaccaccatggcacgtgtatgcctatgtaacaaacctgcacgttctgcacatgtatcccagaacttaaagtataataataataataataaaaggttaacccacttccacatcaacatttgttaatttaacaaatatttattgagtgctgtgtgtctgaaatacatccatgagaaaagataaaatctaaacaccaactaaaatgaagatccctgtttgcacaatagttcaattttagcagtaaatgttttatcattcattcttcagtggtaaagctagggtagtttgtttttgaatactggtaagtagtcataatccctgaacattatagactgcagagttcaacagtaactttgagaaaacataataattgagtctggctccctggtgaaaggaaaaatattacagagaataagtttttaaagaataaatataatacatgaaaaaaattataagtgagaactagctttattagtccatgtttattgcgttctcatataagggatatgacatggtttggctttgtccccacccaaatcctatctagaattgtaatctccataatccccatatgccaagggagggacctggggagaggtgattggatcttggggcagtttccctgatgctgttttggtgatagtgagtgaattc

SEQ ID NO: 201293 - DNA, 1000 bp, Homo Sapiens
tacttattttggataatatttatagttgtgaccagtgtaaatcaatatagacagcaaaataataaattttgccatataatttggtcaattaatattgagtacttttttttttaacaaaattgtcatctgtatggggttatgcaacagaaatgcaggggtggtaggtaggagggagacaagaacaagatacaaaatcactgttgcctggtaatacggttatagaaccactaagttttttgcagactcaactttattgcaattataagtaaggctgtaattggaatcagaatatctattatattatttcctaaacatatttaggagagtgcaattatataacctttcactcaatggtttccaatattaggcattaaagggaccatattagctgctcaagtttcttgacttaggttggggtcattaaacaagcagtcatgcttgcaacagtcaaagaatctaataaaagaatattaacagggaaactagacagagactttacaagcacaactgcagaacttaggtgtgattaaagttaggtactactaagatggaattattagcattaaccactatccttttcaaaggcttaataattgaaagtcctgaatatatatatgcacacatatgtatttgtatatattgttttgatacagaagcttaagaatatatacatacacacatatatacatatatatacacacatacacacacacacacacacatatatatatatatatatatatatatatatacatgtatgtatgtatgtaagcttcttaagcaggtgcagcagctcctggaagcacatgaaaagcttacagaaaggttgaggaagatctaaggcagcttgactaatggaatcagttcaagataccacagattcagtcctctctgtgttcagccttttcatctctccagatggcaaattgactgtgattggcttagcatgggccatgtgcttacttttaagtcaaagaggggcatggtaacttgatggagc

SEQ ID NO: 201294 - DNA, 1000 bp, Homo Sapiens
aaaggacatgaacagacattttttcaaaagaaaacatacaagtaacctataaacatatgggaaaaatgctcaatatgagtaatcttaagagtaatgaaaattaaaaccacaatgagataccatcttaccctagtcagaatgactattactaaaaagtcaaaaaacaacagatgttggtgaggatgcagagaaaaaggaatgcttatagactattggtggaaatctaaattagtacaacctctatggaagacagtatggagatttctaaagaactaaaaatagaactaccctttgattcagaaatttcactactgagtatccactcaaaggaaaagaaatcattatatcagaaagaaacctgaacttgtaagtttatcgcagcactattcattttttatttgtttatttatttttattttaaaaggttagttctgagtcagtatgactgactatgtaccgaggaacacaatctgaagagttcctgagaaagtgcatctgcagaagttagactgcactttggttttatacattttagaaagggaggaggttttatacattttagaaaggaaggagttacaggcaaagtaataaatcaatacatggaagttatatgttgatttgatccaaaaagatagatatctacaggttataggtggattaagagattccttaatttgcaactggttaaaggagtaaagctttgtctacaaatttggagtcagcagaaaggaatgttttaagttaagataaggaagtctgttaaccaataaactaggtcagagtgacctgtagggatgtgtgagttagcccttgtctggcatggccttaggtcctatttgtgattcagtatcttactgtcacgaagagtccacctagttagtctcatgatctctatttttattaattttttattaatgcgagtcagttgtgcctaaactccaaaagggaaagggtataacaaggtacgtctgacctcccttcccatcatggctgggaattc

SEQ ID NO: 201295 - DNA, 1000 bp, Homo Sapiens
tggggcctgaatgaatgaaagaaatctctttctgatctgagtaggttgctcattttgtaaattgtagccttattagttaggctattaagcaaatttcctacatttctgttggaaagagaaaagttgctacaattttttatttgttttgttttctaatctaccatccaggccaacccatggccagcacagacatgatggaataaagactgagcactacaaaacagatcttcattctccaagaggacaagcgtcggatagtataaaccccatgtctagggtgctaagccccctgagtcctcaaatcagcccttgcagctccaccaggtctttgacttcctactctctatgtaaaactcattctttgccttcagcgctagatacaaatgaagccaatttttctgacactatgtctgagagtatgaatgaccaagaagagtttatatcttcggtatggaaactttctgatcttagtaatttgttagttttttaagtttgctttgattttttattttaagggtgaagaaggtgatttttttttccttactgattcttttatcataagtactcttcattattcttaggtatccctgtcatacagtttttgcttgtgaagacactttcggccaagactacttttcaaaatgttctgaaatatgttatacgtattcatttgtctttaacccttattggaaattcccttcttgcccttttcagtgatgctcaattttcttctggaatggttagttcaagaactgtctctggatgccaagatagtcctgaggcacaggcagtgaaggaggaaaagaggaactgctggaaaggagaaagggagtgtggagggggaggaaggctgtgcctctgatgtgtgcagagcatggcttgggggtcacagatggtggccctcagggcagaatgtgccttggacaccatgccggtcccttgctccttccattgctgggcaggctgcaccatctttttgccttctgcaccaaagcacttg

SEQ ID NO: 201296 - DNA, 1000 bp, Homo Sapiens
catagagactggacatttgtcagttttatggtccccaaatatctagtacagtgctttgcacatactcagtaccccaagctgtttgttaaatgaataatgattataatgtattgatatatttatgtgaagtttgaaaaagtgtctttgtatgctttatcttagttgaacatcctaataatcctagaaaatagactggccaagccaacaaaagaagttgacctcacaggaaggtgagattcactgagcttgtctgaaagttgttggagtccagatttgtgttccctgtttgtgcttaaggcactctagtgttctgccagggtcaaaataacaaggcctaaacccaacagcttattatgtggttgcaaacactctaagtaactttacctgaattagcccctgcaacctgcacgaaacccttgtaggtagatggaattattttatcatttaacacaaatgtaaatgcccaaagtcatgcaatccagaggtggtacagccaggatttaagcactgtgctcttaatctttaggttaccctatagcaagtagctatttgtgattcactgaatgaataacacaagtcagcagctagaggaaccaagatttgaacttaagtcttctacaacattttgtcaatcaagaaatcctctgttctatatccctgaggttttggcattcaattttagcttgaaggaaaatgcaattatttcatcagtgttgtccaacagaacgttctacaatgatgggaatgtcttacatctgcacgtcctatattttagctagaagccctatggggcctttgagcatttgaaatgtagctaatgcaactgaagaaatgaagttctaattttatttttattttaatttaaatagccccacgggattattagctactatattgctcagcttaattctagtctcttctctgatcatttcatctgaacatggtctcatttctctggcagttagttgagttttatttcaaattttaagctgatgaattc

SEQ ID NO: 201297 - DNA, 1000 bp, Homo Sapiens
tatatcaaagaaatatattttgggtaaaatgcattaattttcttcagggtctgttatctgtcatgtgatggtataccagagtcaggttggaatttggcatcctattgctatgaagagtgttttgtatggcagtcttaagatctctattttaatgttaatgctggttaattctgtctaaactccaaagggaagggttataacagggtatgtccaacacctcccttctcatcatggcctgaactaggttttcaggtttctttgggatcctcttggccaagaagggtgtccactcagtcagttggaggccttagaattttattattggtttgcagtactcatcctttaactgttctccagtctccagtttcttcccactccaattgagccaactgatagcttccagattcatatttttaaaagccagccgtgatcaggacactttcctgcttgatgagcttcagtggctccctatgtgcctcatgggtaaataatattttcctagacagaggttcaaagctgccacaatctgttcccatcctactctccaagctttacttcccattactccttccacattctctgtgctctgaataatttttcatcatgtttccaggagcagcgggcaggtctgttttattccctgcatccctcactcctctaccactgccttgcatattgtaggtgttcaaaataaataccaatgggacaaatgaaggagccagcccttccttcttcaggttctgggtctttgctcacatcgaaagtttctttctccttttctgcctgtggagatcaaagctgcttggaaatgctcactcattttctaggaacaagggccctcattctcttcgaaactgcaggtatacttaatttctaacttggtcggggactagatccacaaaataatcaaagcacaaaagtttattgagtagatgaacatgaaggtgccagtgaggtagataactccatcaggaagagaccattgaggctgcagttgatc

SEQ ID NO: 201298 - DNA, 1000 bp, Homo Sapiens
aacatagtgacaccccatttctactaaaaaatacaaaattagctgggcatggtggtgcatgcctttaatcccagctagttgggaggctgaggcaggagaattgtttgaacctgggaggtggagcttgccgtgagccaagatggagccactgcactccagcctgggcaagactccctctcaaaaaaaaaaaaaaaaaaaaattgctgaacatcatcatcagggaaattccaatgaaatcacaatgagatcgacaccactgcacactcacaagaatggatgtaatcaaaatgagagaccacaagaaatgctggtgaggaagtggagagccaggaactctccactgcagctggtggaaatgtaaaatggtgcagctaccgtggaaggaggtttggttgtttcatgtgaagttcaacctaaatccaacctgtaaatcagcaatcctactccttggtattttttacccaagacaaagaaaaacacacgtccacaaaaagacttgaaaaaaaatgttctcggcacctttattcataacagcggatacggtttggatctttattcataacagcggacacggtttggatctttattcataacagcacatacggtttggatctgcgtccccatgcaaatctcatgttcacttgtgaccctcaatgttggaggaggggcctggtgggaggtgaccggattatggggcggagttccccatggcgtggctgctctcaggatagtgagatctgactgggccatgggtgtggagttcctcccggggctgctctcaggatagtgagtgctctcctgtgagatctgattgggtcgtgggggtggagttcccccggggggctgctctcaggatagtgagtgctctcctgtgagatctgattgggttgtggtggtggagttcccccaggggctgctctcaggatagtgagtgctctcctgtgagatctgattgggtcatgggggtggagttctgcccgggggctgctctcaggaggag

SEQ ID NO: 201299 - DNA, 1000 bp, Homo Sapiens
attccatgaaaccagtttttggggccaaaaagattgaggaccgctgctctataagaaactattactgaaataaggtataaagtctttatcttacttatatttatatcctctatggtgtccacacacaaggtgctttttacacttaagttgttaaactaaaatatttctttaaacttaatggaaaataaatgtaatcatgaaatatttttctctgatccacatgtactcattcttatggttagaaatttggtcagcttgtctttgtcgggggttttgtatggctacgcgttagttaactgcttaactttggcagaatgaaggtaccaatgcatgcaaagtggtaactttagctgtacaattgttgaatgagtgagcctaagtggaaagttagtaagctttgaaaaccacaatacatagagttaaatataagtagttgggatgacttacggtttctgatcagagatgtagtgagctggaaagacatcactcccaaatgtaaaacaatgaaaagctgaaaatcaagttcacagcttgccttgaccacttctctgagtgctgaaatttcagacccatggacagacccagaatctagagacaaatacctgcagggagaggcatcctacaagtactgacttacctggataagacacagctgtacacctctagaaagagatcaactaagatgatcgttacattgatagaagccaagtgtatactgatgagaaaggatgaatatcctgggagccacaaatacagagggaacccacaccctcttgcaggcttgtttatgaacccatcagtaaaagaaaatgccctccgtggtgaggaacagggggaatattacagcagccatagcctgagggggaataatctccacgtggactctggaacaaagctatattttgtcagaagcgctgcaacaattaccattccccttaagtactgatgaaatctttttgcagttggggtatggaaacagggaaaaaaccctcagcccctg

SEQ ID NO: 201300 - DNA, 1000 bp, Homo Sapiens
agagtaagtaataatgttctcactttcatttgtgattttggtgatttgagccttcattctttttaagtcaatctagctaaaggtttttcacattgattttttttgaagaatcaacttttggtttcattgatttttctctactttttaaattctctacatctgctgcctttgggttttctttgttcttctttttctagttccgtaagttgtacaaatgggttcttgatttaagatctgcattctgtttaaatggaagcttttataactataacttttctccttagcacttattttactatgtcccataatttttgttttgtttttgtttttattcatctccaagtattttctaatttccttttgtgatttctgtaatgatccattagttgtttagagagtgtttttaattttcaaaaactgaaattttcaagttctccctctgttactgatttttaacttcatcctgtggttgctggagaatatattttgtatgatgtttatatattaaaatctgatgatatataatttgttatgtcagttctattttaacttaaatattatgaaaattattactattaatataagtttaaaatcttttattgaattttttataaatcaaatgtgtaagactgatttttcttggatttgttttataaagatacttcacattaatatatatgttagttttaaaaatgtgtttttgctactctttatatttccatgaagtattgcattattaaatatttattttgttgttgttgttttgtttgtttgtttttgagatggagtcttgctctgttgaccaggctggagtgcaatggtgtgatctggctcactgcaacctccacctcccaggttcaagcaattctcctgcctcagcctcccaagtagctgggactacaggagtgcactaccatgactggctaatttttgtacatttactagagacgaagtttcaccgtgttggccaggctggtctcgaactcctgacctcatgatc

SEQ ID NO: 201301 - DNA, 1000 bp, Homo Sapiens
attgagtcactgcacaccattctgggtaaaagagtgagatcctgtcaaaagaaaggaatggaatggaatgaagtggaatggaatggaatggagtggagttgagtggagtggattggaatggaatgggatggaatggaaaggagtggagtggactggaatggagtggagtggtatcaattggagaggacaagagtggagtatagtggagtgaaatagaaaggaatggaatggaatggaatggtgaaatgaaatgtgagctgagattatgccactgcgcttcaagctgggtgacagagtgagatactctaaaaaaaggaatggaagggaatgctgtggaatggaagggaatgctgtggaatggaatggaatggcatggactcgagaggagtggagtggagtggagtggattggaatggagaggaatgaaatgggatggaatggaatggaatggaatgaagtggagtggagtggggtagggtggagtgcagtggattggagcgtaatggaatgggatggagtggaatggagtggagtggaatgcggtggagtagacaggagtggaatgcagtggaatggagacagatgtaattaaatctagtggagtggagtgcagtggaacggagtggaatggaatggaatggaatggaatggaatggaatggaatggaaaggaaagcaatcgaatgcaatggaatagaatgcaatgtaatggaaagttgacatgtaatatgagctggaattgtgccactgcacagcagcctgggtgacacagagatatactgtcgaaagaaaggaatggaatgcaatggagtgaaatggaatgcaatggagtagagtggagtgttgtggaatggagtggagtggagtggagttgaatggagtagaatggaatgtgatggagtggaatggaatggagtgaagtgcagtggagtggagtgaaatagactggaatggaatgggatggaatggaaagcaatagaatagtgaaaagaaatgtgatc

SEQ ID NO: 201302 - DNA, 1000 bp, Homo Sapiens
ccagtataagtgaccaaggcctgggttacactatctcaagaggttctgaaagcgtgcccaaggcaaccgggttacactttggttttatacattccaaggagacaaccaactgcaggtaattgcaggtaggtcagggtaggagcttgtacgtcataaggggcttttagggatcctttagttgacaattggttgagagagttatgctatcgtctaaagtcttgaaatcgatagaaaggaatgcctgagttcagataagagtgggggaaagaccaaggatcttattaagtagatgaagcctcataggtggccctcagagagaatagatggtaaatgtttcttttcagacctttaaaggtatcagactctcaatcactcctaggtcctggaaaggcatagaaaggggaagcatggctgcattaatgaagattctccatagatgcaaatttcctctacctcagtttgctggccttgcaacagccatttcaaaagacatcaaagaaatatattttagggcaaaatatttttatatccttcagggtctgctgtctgttatgtgatgctgtaccagagtcaggttggaaagcaagccacattatatagggttaataaaaaacccatgtaaagagatgttatcattcgtagggctgactcccagtttctttaaataggaatttgggcaagatgaaaaaaaaaaatcagaatttagtcctcaactcaaatattttattcattcaaacgcttattcaaactaccgaatcctccaataacagaaagtatagtgtccatcctgaagactttcatcccatctcacagcatgttttctcctagtacaccctgattgtccaaggacttctgagaacaccattccagaagaggtcatgatctcaacaactgtcacagaaagaaagaatacaggaagacaagatgcgaaagttatgtcagtggctttcattcatcacaccactacgtactggttctctagtactgtgctgttatgatc

SEQ ID NO: 201303 - DNA, 1000 bp, Homo Sapiens
actttataagttgaactcatttctgttctgctctcttgcatagtaaaatatcaatcacactaacctgcttactgagccgaagttcttccttacagttgagaaaccttctatgcgtctaaaaatgaacagtcgtatccataacagtgacagcatgcatttgatttgcatagtgccttttcagtcaaactgttatgcagcctagttagacctctgactttgaggatgcagacagaattgtttaacacaatgaccttgacgagcctcacagtaaagtctcattctgagaaaatcacacttgaaagataaaataatttacacctagcattctagagtataattacacccatgatagacattacttttcagggctgaatctatggctacattttataatgcaaggggaaagagagagatagaaatgattgtttgttgagtgcatatcactgactaagcacaatgctaattgatatataatatctcattgtattctctatgtcacatgcttatccttctgagttacctctgttttatacacgagaaaaccagagttctaaaatagtacattaacttgtttaaggtcacagatttaggaagtggtatttttgagattccatcctgagccatgtgtactgaaaatataggttctatacttgttaatatatgtcttccatatattcctatgagggtcctatttcttaaagttatataactttactgcttatttaaaatatgccctaattgaaataaaccactacaattttatttgccattacaatctttggattaattttccaaaaagctgacacctagcaaattgtgaaagggtgaaatgtgtagttgaataacacacctacaaaggcagaaagctgaatgtccctcagaatagtagaaacaattactggggctgtggagggggaatgataatagccagacctgcttctcttgaatacattttattgaagatatcaatattcaaaggcaaaagataataataatgatc

SEQ ID NO: 201304 - DNA, 1000 bp, Homo Sapiens
tttctaggcagaatcctctcacacttgtccctgcagttggaagctagaggggaagatactttcttgcaattatcacagacttgggacaagaaatctgcatcagctgctctgtcttttgtctatgtaaatagatttcctacagatcctatattgtaaactttgattttatctgtgagcatcaccttgtgttaagtcatgttagtacttgcagcaatcatcaagctggtagatggtcatggaatcacaaagacagtatgtaatacttcaaatcttaaaatgttttagaaattaatatttaatgtaatttactgtaattttgaagatctttctagaactattaatgaaaataattttatactggtttttgttattttaaaattatagatatagttattaaggatgctgaatagaagttagataaatgaaaaaagaatagtgaactatacaaaatctatctattaccatccgtattcaagtggtaacaaaacacagagaagtatgtatataaatatatgttcaatggtaattatgagttattattttatatggtatataaatgcagcaaccatagttaactataaatcaaggtaaaaaatctaattcaagctttataaaatataattcaaataagtatccttagagaagacaaatatatctcactggagctaattatataaaaagctttgtctataacattactatatttattaaataaattaacttgttatagtacaaaaatagtgaaatgcaataatccatatgatgtattagtataaaaattataaatgacactatgaagtaagttatttaatttgaaaaatgttatgttttataactttatgaatactgctgacattattcttataaaaaatggccatattactacaaagattaaaaattttgaagacatatatcattctgtatttttagattcttttctcactgttattttcactaagtcacaattttgtggaacttggaaaaatgcaatgttgaattc

SEQ ID NO: 201305 - DNA, 1000 bp, Homo Sapiens
cctagaattgtgggtgtccactgaggcagtccatatttgatggatgactgagtcctgatttctgagagtcagctgactctagtgttactgatcttatggaaaagtcaatccagtgagaaggttttgtgggtttcaaatacacatagatcataatctaaatatatcccagtttttgttttattttacttttcagccaatcctgaggcataagaaacattttaattcactgcacattccaaaagccttgcagaaagccttgccatttaagaacaagcccaagacccaagcaaacgcaggcaaggtgctgaaggacaggcagagaccaaccatcataagcaagcctcatgaaaggaaggtcctgtggccaattgactgccatttagagaggaaaataacactcttggcagcacactttgcatttctactgtaactcagttttgatcaggaggggatgagaccagagttattcacggcactagaactataggttagaggcagggctggagtctatttccagtcctttgcttggccgtgttctgccctgtgcattttaatgtggagtcataggcatggctggggagcccttcctcctggttagtggcacacagagcccatagaatgatgaacagaggtggttttgcggtaaaggtaaatgtgctcacacctgtatctccatgccaacaatgatttcctagctcgggatgcattttcaaggcgttaacattcatttggatcctggattgcctctatcttggattccatcagctgacatgcctggatgggagtgtgcggtgtctgtgagagtattctgatgctcgccaggttttgtccctgtcagatccttgcactgctggatgctctgagtacagtgtgcagtcagagggtgcagaaggccaagaagcagcagcacctgcagaataaagagcattttaaagcactcctcaagcagaaggagaagctgaagcagcaagaggacctcagaagaagctcttctgaattc

SEQ ID NO: 201306 - DNA, 1000 bp, Homo Sapiens
aaaaaactacaaaaatacaaaaaatttaaaaatacaaatacaaattaaaaattttaaaaatatatatttatttttatttacctaatggtgctgctgcaggaacaatggttaccactgtgcacttactgacctttactgtgtgcgcgtgtgtgtggatatttgtgtggatgtgtgtggatgtgtgtggatgtggatgtgtggatgtgtgtgggggtgttcgtatgtgggtgtctggatgtgtgtgtatatgtgtattgtggatgtgtgtgtgtggatgtgtgtgggtgtgtggatgtgtgtgtgtggatctgtgtgtgtgtatgtgtgtgtgaggatgtgtgtgtgcatgtgtgggtgtgtgtgtggatgtgggtgtgtatgtgtgcgtgtggatgtgtgtgcatgtgtggatgtgtgtgtgggtgtggatgtgtgcgtgtgtggatgtgggtatggatgtatggatatgtgtgtgtgtatggatgtgcacatgcctgtcacttagcccaggcttaaggacaagaataactagcatttcttaagaggcagctctgcagtaagctcttgacttgtgatctcattgaatgtcctcatctagcccatgaatctgaccacttagggacaaatgtcaacagtagaccctaggataaatcaaattatctaaaggatacagaaggacctgagtgttgttaggacatagatcagggattctgtgacattttccaggggagggacccccttccaggcccccagatgtcttgctggaatggagtcctacagacagtattggatggtgatgacgctccccaaccaggctcagccttgtatggtgtgtagcttgcccagtggtgcacctgcctcatcaatctcagagatagacggtggacactaaggcaaccaggacaaaggacacagtatgctcagatctgcacaaagtcctcatccatcatcctcagccctccaggccaacaggctttgagccaaggccctgcttgaattc

SEQ ID NO: 201307 - DNA, 1000 bp, Homo Sapiens
atccacccaacttggcctcccaaagtgctggtattacaggtgtgagccaccgtgccggccctaatcagcataatttgtgatgtcatggccctagatctaaatgccaggagattctcacagaaacaaaatttaatgagtgcctgtatctgaattctgttactcaggatttattgatagttctttttcttttcttattttttttttggggatggagtctctctctgtcacccaggctggagtgcagtggcacaatctctgctcactgcaagctccgcctcccgggttcacaccattctcctgcctcggcttcccaagtagctgggactacaggcacccgtcaccacacccagctaattttttgtatttttagtagtgatgggatttcaccatgttagccaggatggtcttgatctcctgacctcgtgatccacctgtctcggcctcccaaagtgctgggattataggcatgagccaccgggcccggccaataattcttgaatattgatagtttattgaaatttgtaggcagatttaggggagatcaaaggactgctcttcagactgggaaagaaatagcttttctttctgtattttgacttgttatttttgattaaaaaacatgttataccaatttaaaacgcttctcccctttcctccagtgataaatgctgctcattctttctacaatggaacaacaaccctaccaatatcagatgaagatagaaccccacggaaaagaattagcaaaacgttaaatatgaccacaagtcctgaagagaaaagaaaaatcattggggatacttttgttaaggtacctttgtttttaatatcctcaacatgtactatttttgatgtgaatcttagtatttgtttttccttgtcactatatcaaataaccaaattagctaattttaatcctttttcttatgtggctgagagttttattgtatattgtcattatattgaccagtagaaactgttttatgtttttttgttgttg

SEQ ID NO: 201308 - DNA, 1000 bp, Homo Sapiens
tcctggatttaagtatggaatcactgaacataacgtgtgcttactggtccaactttcccaccagtctccaggagagcaagagctgtgtccatattattttctgctgtaatttcaagacctggcacacatgtgcttttatgcatctaaataaatcaagaggagcagcacattaaatggagcccgtgggcacttggtgctactcattggcctcacatgtacctcagggcttattatgtgcgggacaagggctgagtcttctgaaaaacacaaagataaactagaaactaaccctcaaggacttatagcctagacagagaaaagatgcacatagaaataacctgtgctccaaagtacaaagctgaaagtgccagaagacatggacacatgctatggaaattcagaggcaagatgagtacttccagctgccttagagggagctggaaagcctcctagaagaggctggtagtcaacgtgaagatgatgaccagaaaatgggtataccagatcagcagaccagaataagcaagggcaagaaaatggaaaatctccagcacacctggctcaaacctggatttaattgaaatttagttaaaagggaagctatttggtatcttgaatgtcaagtttgggtttattatgcacacaggggaatgacataatcagactttgctctgtggtatgatttggtggaatgtggacatctgcactacaattgtaggaaaatctttagtctgccactttttaagcactcaatcagcgaatatcagtagtcatggaggattaaccgtgtctgctttccgggcgggggtgggggaggctgcgaggtagctcctacctcagaaatcatctaacaaaatgtcatcatggaaatctgtccttcttggacccacagagcccaggatcccacagaggcgcacaactaccaagctaacaaacaccatggattatgaagtctgaatattccaatttggaattctgaaacagaatacacttataccct

SEQ ID NO: 201309 - DNA, 1000 bp, Homo Sapiens; identical to SEQ ID NO: 114849

SEQ ID NO: 201310 - DNA, 1000 bp, Homo Sapiens
aaattagctgggcatggtggtgcacacttgtcgtcccagctacttgggaggttgaggcaggaggatcccctaagcccaagatttcaaggctgcagtaacctatgattgtaccaatgcactctagcccagcctgggcaatagaaggagacactgtctttcttatttatttgtttatttgtttatttatttagagtcttgctcttgtcacccaggctggagtgcaatggcgaaagctcagctcactgtaacctccgcttcccaggttcaagcaattctcctgcctcagcctcctgagtagctgggattacaggcacctgccaccacacccagccaatttttagtatttttagtaaagacagggtttcaccatcttggccagtctgctctcaaactcctggcctcaggtgatccactcgcctcagtctcccaaagtgctgggattacaggcgtgagccaccatgcctggcctaaaatttattttaaaaggccaggcgcagtggcttacgctgggaggccgaggcaggcagattacttgaggccaggagttcaagacccgcctggccaacatggtgaaacctcgtttctactaaaatacaaaaattaggctaaagcatgagaatcatttgaactcaagaggtggaggttgcagtgagccaagattgtgccactgtactctagcctgggcgacaaggcaagactctgtctcaaaaaaatttattaaaaaaaaagcatgagaatatagcatgattgctggtatcaagagcctactagaagttaataatcatgaactgaaagtaagatcagtcaataaggctatctattttcctccaatcaggttcagctattattggtacaggcacgaagtggagaattgaacttaacaaagtcggtttagcaaagcaaataaaaagggaaaagtaaggccaggtgtggtggctcacacctgtaaaaccagcactttggaaggccaagctaagtggattgcttgagctcaggaatt

SEQ ID NO: 201311 - DNA, 1000 bp, Homo Sapiens
atcatttggttgttcttagttttctgagtggttcttttcttgaatgactgtttaagataaacgatcacagtatcaactactgtgatatagatttatctaagtgtgtttcctttctcctgtatttgcaatgtctcaaccacgctccactaaggcatgacaacagactgaagtggagaatgagaccagcttttacgtagactgacggcatgtacccccatgccgctggcactaccgtttgatgcatcaccagatgataaaataagagccaggaatagaatcttaatgcatttaatctgtgttttcaataaccttggcctacagaccttccacacccattctccacccacaaaagccaaggtaacagaaataattaaacggtagtctttgcccaataatattccaaattcacttattcctaagagtcacttggggtgcttgtgaaaatggcatatccaagctactgagtctacatcattagatctgaggggaggcccaagattctatattttaacaagtgactcaggtaagcttgagacacaccactggtgctggcttcccctggtaaacctcgccctgctctgaccccatcaagataagcctggaaagcagcagtggagagtggagaaggcctcgagggttggcttcagctgagctcaggaggtatgggaagaccctgagccatttctcagtgcagcactccactctcctcagaggccacctggaacacggagcatcactgtcctctgatgccccaggatcatctcagtgccgtctgataggggtctctcctcctgggctttctcaggcttgcagccacaccactgtgcccaggctggactcacagctttagggtactggcacagggttatacttaccctcagaggctgctgcagacttgcactggctctgaccacacttaacgcagactgaagaaggtcaaaaggctgactattgacagaactagggcacacctaccaagcagcagagtggaaacgttcct

SEQ ID NO: 201312 - DNA, 1000 bp, Homo Sapiens
cttacttcctttggtggtaaggggtcaaactccactccttcgccaaaggacaggggacaaagcctcagcgcacagccgggagccagggggagagacgctggactcttcaaggacagagaagaatgcagttagagctcttacgggccatttcttttattttttatttttttttattttttatttttgtgagacagagtctcgctctgttacccaggctggagtgcaatcgtacaatctcagctcactgcaacctctgcctcccaggttcaagcaattcgcctgcctcagcctcctgagtagctggaattacaggcatgtgccaccacgcttggccaatttttttttttttttgtatttttagtagagacggggtttcgtcatgttggccaggctggtctcgaactcctgacctcagatgatccgcccacctcggcctcccaaagtgctgggattacaggcgtgagccaccgcacccggcccccacgggccatttctaagcattgcccacagaaggctgtgggtctgagcctccagctgatgggcccaactgggatctgtgtcccccatgctgggcacaccagagaaacgctggacagggagcagagaggtctgggttcaaatcccaggttgaccacgaccgtgccgtgagccctcagaggagccacatcacaagccctgtgaccctatcaacacagcaaagtggatgccccctttcactgctaaggttgtgtgaaaagctgcaaagaggaaacaaactcaagccagactgccacccctcgccctgcggtgagaaaccctggtgagccgaggctcacttcacccgaatcctcaattcgacagcgctccctctgtcaccgtctcagcaacactctagaaaaggtcaaaacaaaaaatatgctaccagggaattttttgttttctaactaaagattcaatctggccaagcgcagtggcccacacctgtaatcccagcattttgggaggtggaggtgggaggatc

SEQ ID NO: 201313 - DNA, 1000 bp, Homo Sapiens
cactgccaaattctaccaaacatataaagaagaactagtactaattctcctcaaactattccaaaaaaataaagaggagggagttctccctaactcattctatgaggctagaattaccctgatactaaagccagacaaggacatataccaaaaaaaaaaaaaaaaagaatatccctgaaggacatagacacaagaatcttcaacaaaatactagcaaactgaatatcatagcacatcaaaaagataacacatacaccatgatctagttgcatttatcccaggttgcaaggatgtttcaacatatgcatatgaataaacataatatatcacatcaacagaatgaaggacaaaaatgatatgatcattgatagatacagaaaaagcatttgataaaattcaacaatgcttcatgataaaaattctcaacaagctagcatagaaggtagatatctcagcataataaaggccatatatgataaacccacagctaacatcatactgatggggaaagcatttcctctaagaactagaacaagacaaagatttccactttcaacactctatgcaacatagtactggaagtcctagccagagcaatcgggcaagagaatgaaagaaaaggcgtccaaactggaaaagaagtaaaattgtccctctttgcagacaatttgatcttatatttagaaaaatcaaaagaaaccaccacaaaaaaaaactcttcaaactgataaattcagtaaagttgcaggacgcaaaatcagcacacaaaaatcaccagtatttttatacaccaaaaatgacatagctgaaaaagaaaccaagaaggcaatcttatttacagtagctacaaaccaaataactaaaaataaatttaaccaaggaggtgaaagacatctagaaggaaaactacaaaacactgataaaagaaactgaagagggcataaacaaagagaaagacatcccatgttcacagatcagaggaattttatggcaaagaatt

SEQ ID NO: 201314 - DNA, 1000 bp, Homo Sapiens
tcaaagagcaacttcagagaccagattatacaatttttagaggaggtatgcctcttttattagaaaacctaagaaagatcaaatcatacagatagcttattatatggattctagatccaatttgatacgcaatctggattacagataatgagatctagcatgcattaaatactttaaaaggtagaagaatagaaaatatcttatgtgtatataaaacaatatacatatttcagaaatacaataacgatctgctgatatttttcaaaacagcatgcaagtgtcacaatataccaaatatagtttaataacattaaacttaagaagaaaataaggaactatttgttaagtagagaagaaaaattgaattgaaatatgagtatacaggtttaatataacctcacagggaaagataagattattactaaaaataatggatgaaaagaagagaggagaaaagtcagaaagaaggaaaagtaaaggaaaaaggaatgaggggactaaggaaagcagaggagaacaagaaaaaaagggatgagaagaagtgggaggcagggaaggaaggtagagaggaaggcaggtagtcaggccagccaattgcttttcagaggagaattaagggatttgaatttgcagtagaaatacatgtgacaatgaatcctccatattttaaaaagagaaaaagatacaaagaaatagctctctactctatctatggaaataatttataatacttgcagtaaattttgttttattaaccatgattttttcctatcatttgatggtaataattttctaatctgtgattacaaataacccaagaaatcaccagtagagtacattttccattgtgtcctgatctggctaattgaagatgaatatgaaataatgcatttcaggtacaaaatgctgcttcatttgtggattaactagcattgataaacaatggctcccaatgaaaatgtacaaaattggggaaactggtttaattttcagtatgaag

SEQ ID NO: 201315 - DNA, 1000 bp, Homo Sapiens
acaatttagtacatcttcagctaaatcagagctaaaatgaggcaagaaaacatgcagtctatgtgagcaggatttgaaagctttcactgcactgatgtttcaatgatactttttattctgttgtatggaagtactcctagttttgaaaaacagagattctatatttctttctcaagacaagcatgcatggtcatatagtagcaagcccacaaatgtttcttttgtaactgtaaagagtaacattttagatttttacttttcagaatagaaaaacaaaatgatcctcttgaattcaagcatgatttatagatgctaaaggcttttagccttagttaatatgtggaaaacattgagtaaaattagtttgggagatattttttagaatttctaaataaaaatcgcttgagctccagggctaagaactcagtgaattggggaactctttttcttttttgggtttgtttttgagacagagtcttactttgtcacccaggctgcagtacagtggcacagtggcacaatctcagctcactgcaacttccacctcctgggttcaagggattcttatggctcagcctcctgagtagctgggattagaggcgtgcaccaccacacctggctaatttttctatttttagtagagtcagagttttgccatattggccaggctggtcttgaactctgaccctcaagtgatccacccaccttggcctccagaagtgctgggattacaggtgtgagcaaccatgccctgatgaactatggaactctcaacttcacacccccatagtcttatccagaagcaggaaactgagctagaagttctcctggggacacatctactctctaattatgctcatataccaccttttaagcaaagatgtcctctaagtgttatgcaactctaacactaacctaagtatatgtaaaagatttagaagctctgtttatcagttcaaactttgagactgcaggtaagcttaaaagcagggtttgggga

SEQ ID NO: 201316 - DNA, 1000 bp, Homo Sapiens
cacttgaggtcaggagttccagaccagcctggccaacatggcgaaacaccttctctactaaaaatacaaaaattagccgggcatggtggcatacgcctgtaatcccagctactcaggaggctgtggcaggagaatcgcttgaacccgggagatggaggttgcagtgagctgagatcgcatcactgcactccagcctgcgcgtcgagagggagactccatcaaaaaaaaaaaaaaaaaaaaagccgcatcctggaagacacgggatcaattaaatttcttgggttttccttcatttaaaatatttgccttttaaatcaaatgttaaagccatgtagacgttcttccatcacccactgcacatcgcatacaaggcataaatttttaaaccgtcgtccccagactgtagaacttagcatatggaaaacataaaaacacgagggatacttttagcgatagagagaaaatatagaaacaccagcgacacttttagcaaaacatttcacccaacaagtggtttgttttggtccttcccctaaaatccctcctacctgtcaagctcactttcccctcggtgatcctgcacattcggcctcccaggggcttcccacaacgctgagcacagccacgggcagcaaaagcacccaaatgccccttggccgggccgtgaaaggcgagttttcccgaccactgtcatcaagaatctggaaaagggggcccaggagcatcaggtgctttcagcaagaacttgcaccttctgcttctctcgcaggcggaggcgccaaggaccccgttccaggtggaagcccagggcggttcctctacagacagaaccgaaaggtaaccctggaggctcggctccaggctgcgccaagccgaaaacaaactttccaggcacttccaccccgctgggccgggtgacacctcccggcctcccccgccctccgcgcgtctgtcagcgcccccggccaggccgccgcccgccgcaacccaggcccggtct

SEQ ID NO: 201317 - DNA, 1000 bp, Homo Sapiens
gtatgagttagggatggagatctgtggttaatagctatagctgaagctaagagttcacagccagaatgaagagagctagggctgtggatgggccctaggagaagagcaaggtttaagagggggcagaagaggaggaacctgcaaaggagactaagaagtaagtgagagaagtggagaataaagaaaggggtcacagccaatggagaatgttccaacaaacaagactcagcaaagacactcaaatgccaagttctgtgaaacgagatcagaaaagcatccactccgactcagtaatgtaaatggattgaagccagcacagctactggggagtgctcagaagtaagccagtttgtaaggggaaagagtaagcgggatgtaaacaaggagacaccaagtagaggccatgcttttcagatgtgtggcaccaagagaaagaggatggaggtggacagggaaagggctgaggaagggtttcgtttggtttcttaatgataaacatcaatgtgcttaatgacgaaaaaagctaatttaagttggggaaacaagacagagaagtagaaatggagatgaggagaaaaaagaaagagaaatagatatccttctatcacagaagaaaacaagtgagggtgtcaagaaaggaaaagagaataggatggggtatacacaggatgggttagccttagaacagagagctccttctgtgaggcaagagagatggaggtaagtatggatgaaggaaagacacagtggaggagaccatgcagaaatgaaaggctatcaagtagaaaataaaaaggaaagtctgcgaacttgagtacaaacaggaaaaagctggaaaagctttcatggggagttcctggcagagtcagatagcaggactgacaagaaccgacagcaatgatgaggctgaaccaagaaagatctcctgactgtggggcagctcctacccacagtgctgtggctttccttagtggtgctcagcagaaggtgaagaaagctt

SEQ ID NO: 201318 - DNA, 1000 bp, Homo Sapiens
aagacttgttcatatccacattgctcgtaatagcctaaaaccaaaaactatccatcagtacttggttaaataaattgtggtatatttaacatgaaatacgacacaacgacaaaaaaaaaaaaaaaaaaaaaaaaaaaaaaaaaaacatagatgcccaaaaccacatgaatgaatcacagacaggatattaagtgggaaatggtacagacagaaaactacgtactgtctgattttatttgcatggagttcataaaacgaggcaagatgaatctgtggtaacgaatgtgcagccagcattctgtcttgactgagtggttgttgcttgaaggtgttaataaactgtccaactccactgggctaaaagctaagatttgcgggctttgctgtctaaatgctgtacttcaacagaaagttcacccaaagtccttatgctttggagtttgtagcattgaaaatattctcttcttttagcgggaacaaacttttctcacaaaagaaacccaataaatatctctccaaaagaagtttaaaatcaaagcgaacggagggaatgaataaaccaagcagaggccagttctcctcttgggtggttcgtgacaaccatttcacccccagaatcctgacaatgccatgctctttcggggatttctaatggcggcagctttaggcttttcctcaagggatcctatgagattcctggaggtgggactgtgctgcggcagctgtggatcctcccacagtgaagggggcttcctgcaacggcctcacagcaatccatggatccttcccacagtgaagggggcttcctgcagcggcctcacagcaatccatggattcttcccacagagaagggggcttcctgcagtggcctaacaacaatccatggatgcttcccaccgtgaagggggcttcctgcagcggcctcacagcaatccatggatcctcccacagtgaagggggcttcctgcagcggcctcacagcaatccatggatcctccca

SEQ ID NO: 201319 - DNA, 1000 bp, Homo Sapiens
aactgtcttgactgacttatgaggaacaatcaataacgtctgtccaggacccatcaaatccatgtctaaggaaaggccaagtctttaggacagaaacgtggcatggcagtttcacaaactagtggagatggctctctggaggacagtctaggtgggactcccaaggccttcactgctttgcaggcacctcttccccaggtgtgcaggaagagaccccagccaaagaaaacctaagaggctttgttggggaggaacaggggaccctgccggaccctgcaggtttccctttccctactggctgaaagggagggctgcacacatcagggaggagaaatagaggaagaagatgatgggcacaaaagcagaggggcaacaaagtacagatcacatcttgggggcacagggtacagttctcagaatagagaagaatgtccaggtcaaaggtttcctagaaaactcccttctctttaaaacagacacatgattttccttgggacatttttatatacaacttacaactgccagatcactcttggaaaatccgctgctcatcttggcagtggcagtggaaagaagccagtgtccttagacatatctctttgtgggccccagccccaacatgcaggtgtccatagcacaggagagaggactccatgcagccaaaaatcagtgcagttaccccctaagtcctccatctagaaaaaaatgagacttggtagtagccactgccctgtggattcagccagagcccatctctagaccccacctatccccctgctgttccaagttccagactggggctccaggatcaaaatggctcagggctttgtgctaagaagagctctgaacaagacataaggggatggtttaagactcaggatgctgaggattaagtgtctgggcagttagttccagaggtcacctaaaagactacagggttctgcgagagacctggaatgaggaactaacattgattgtatgcctatttaaaagccaggta

SEQ ID NO: 201320 - DNA, 1000 bp, Homo Sapiens
tgggaagggaacatgaggagagggccaatagcaagcaggagaaacacaaaatcaaaataaggaaagggatttaccaactccagcttaagtgatagaactgggtatctctctgtgtagaggaaacaagtgtttgtccaaagagttctgtgtttgccttgtgggtaactaccaccacgtggatcattcagggtttaagactgtgtcctctagttagggttatttccaccatatttacctaaaaatggggaaatgttaatacactgttcatctgagcactttaaaaatctaaatgtttattttacaaatatcacttatagctagaaaaattaaacattctatatcaaaacatcaaatatcctgtatccaaagcttaaaagtacaattatcttctcaggactaatttggccttctaatcactcatctgcatttgtatgagcaaatactgaattcgcctttgctgaaacctaagggcttccccaggttattttcctcatccgagatgcctgccctcacagtctcagccacttcatgtagttaggcactaatccactctatttttatgcattatcactggattttgaatggaaatttacttgtcttgaattctggacttactgaagaggagcaaaacaggctcagccactctcactgccactatcccaaccaggccatacaaagagaaaacagaaattcaaaaggagcacctaggaccaggcgtgttggtggccaccagaagtccatctgaatgcggggtccttaaggaggaacactggggcttaagccccatcctttctgtggaggaccgattgggaagcactccccatttcctataagtcaagtgaggaggactcccgggcacatcgggagcaccagcttcacacttcctgctaaacatttgctgaacaacagcagcctctagggccaccacagcctggccaccagagaaaataatagtgggagagaccctaggtaagacgggcttgtgtccctgcagtgtggg

SEQ ID NO: 201321 - DNA, 1000 bp, Homo Sapiens
ttgaagtcattgatgaacagttcaagcagctaagacttaaaaaaaatcctagaaacatgggaaacagctgtattttttcttgttgttgttgtttcgttagttagttagttagttagtcagttagttagtttttggtatgtgctttttattttattttaccaccccttggggtatttgccaattcatgtcatggggcatagaggccaaataaaaatcaatttcataaaccctgtggccatgctgaagggggacaaatgtggcagggacctgaagggccgcaatcctggagaaatgaaaaccatacataattgagccccaaatgcatgtcgtttcctattatgacatttgtcagttattcagtggtgcatgtaccaggaagagttggggaggggctcgaggcagtgccaagaaacagtaataagcatcatctgcgagtctaaaacaccgaacagaaattcagacagcctcatggaaccagagagatgaaaatgagttgagcctgctagggaggtcaggccactgtaaatgtcccaggcttttattgcgatcactccaaggagctataccctaggagtaaggacaaacagaaaatatatgagccctcaaaaagaaaagcctcaatcttggcaatggatgcttagattaaggtgatcctcctatattctacctgcctgccagaaaaatattaaatccactctagaggaagataaaatgttccagagtcccatagtatttttcatggataatacctagcattcaaattaatagcatgccgggaaactagaccagatgactaaaaggcaagagaaaaagatacaaataaaatagaaacagaccataggtaattatgatatcggagttatcagacatggattttaaaataactatgcttaatatgttcaagaaaaagataattagttcctgtgaactaaaatatatggaagaaaatcaaatgacaattctagaaccaaaaataatgcaaggctaaaatgaagaattc

SEQ ID NO: 201322 - DNA, 1000 bp, Homo Sapiens
aatgaaagcatgtggccaggggcttggcacccaccatgaaggcgcatctgagaggcgataggaacctgcagggaaggtgcagacaacaaactagagggatgacccaaagaccctggcactgacaggtgggaaaggaaccacgataatgtggaagccgcaggatcaggtgacaggagaatgaagggaaggctggtcccctttggcgtccttgctgacttcaagtggcagaggaaggcatgacctggtagacggaggggccaatgccctgaagaagcattcaccagggcactgcaactctgtttccagaaggggctcgcacacaccagtgtcagggtggccaaggtgcttccctgagggaactcccacagcaggacgcagagagcacaccctcctggcacagatgccctctgctcttccctgattcccagggagggcatctccaaggccagagctgacctgaaacaaaatcagctctcaggcactcctaggagttactgtcctgggccaataccctttgttgaagctgggaggatgctatcgaataacataaaaacttaatgcctatgctggagctatggagtacaacaggaactacaatcctacaaaacacagcaacccttgcggaaccacaaaggccaatcaaagccatttacccaactagggtgcctcatgttacgcataagatattaccagagaatgtccgaatgtatgttttccttccaacggctggatgcagggaagctctctggttctttcactagcatcaagtatactcaatttactcctccaaacaagccacacaggcccagcgctaagagtcttccctgtcagttctcaaaaggtggtcaaggggtagaaactctgttgccgtcttgcaccatacggctctcagcagctcgccttgtggtcctgaccttgccagccaagcccttttcattccgttttagttaagcagaaaatgaagctatcagctccatttccactctctctgcatgaattc

SEQ ID NO: 201323 - DNA, 1000 bp, Homo Sapiens
gtcatatatagacttctctacatcttggttttcttgaatgtatctcctggaaaattctgcaaaggggctgaaaaaactctagtttttattattattattattttttttcgtcctgagacagggtctttttctgtcccctaagccgatgtgcagtggcacaatcatggctcaccacagcctccaactcctgggctctagcgattctcctgcctcagcctcctgagtagctgggattactggcgaatgacatcatgctcagttattttcatttttggtagagacggggtctcactatgttgcccaggctggtctcaaactcctggcttcaagtgatcctcccacctcagcctcccaaaacactgggattacaggcatgagccactgtccccagccaggaattacctttaaaattttaggtgtgataaatatgttgtggttaatttttaaagagtttggtttttttttaaacaggttcattctgaaatatttactggcaagatgatacaatgtctaagatttacttcaaataatctggagaataaaaagtctggtggttgatggtatagacccacggatcagcaaactacagttacaagccacaaccagaccagactaacacctggttttgaaaataaagcttatggccgggcacagtggctcatgcctgtaatcccagcactttgggaggccaaggtgggtggatcacctgaggtcaggagtttgagaccagcctggccaacatggtgaaaccccatctctactaaaaatacaaaaattagctgggcgtggtgacgggcacctgtaatcccagctacttgctactcgggaggctgaggtaggagaattgcttgaacctgggaggcggaggttgcagtgagccgatattccacaattgcactccagcctggctgagagagctctcagcgacaacaacaaaactctcaacaacaacaacaacaacaacaacaaaaaagaaagaaaagaaatcttattagaattc

SEQ ID NO: 201324 - DNA, 1000 bp, Homo Sapiens
gttggcaaatttcatttctggttaagatggcataaatacatgctatgttttccactaagcacaattaaaagtcctgaacagaatatatgaagctgagaactctgaaaagtaaataatagcaggtcaactggaggagagaatttaaaaactcaaagaaaaacaactatggaaaaaagttcctgcttttttatatcctccgatattttctggcataaaatcaagagcagtctgaatcttgaaactgtgcaaaagctgttaacagaaaaaactgcaagataaactctctctcttgggccagaggactgggaaaggagcccctggaaagcagaaatcttttgcctatcacagtcctactccggacatgtactggtaacaaatggcattacaacgcggtggcaagagcagcagcagtggtggcggaattggggatagcagctacagcagtagaggctctgtagactctcttgtcttgcccacttttccctgaggtagacccaactgcaggaagttcatgacaatgcagggaatccaaagccacagttttctagccagagccaggaaaaggagcccatgagaatcagagtatgaagaggattcacagacgggtactagctggatagaggactgagaaggcacagcagtgtccagcactgggaattataagtggcatacagggtttgaaaaggaatttggatgggataaagccagataggggtgggatcatggggctttgtaggacaaggaagagttaagactacatcctgcatgcagtaagaactcattgaagacttttaaattagagaacagcacaatcagatttttggttgttttggtataaatatggatcagagggataaatgttagagaaaagaaatcacctagaggaatttggaaatcatctagctgtgagataaaaagggcagaatcaaggcagtagaagtaggaatgggaagtgaactgagggttttatataattttcttaccaactgtggaagaattc

SEQ ID NO: 201325 - DNA, 1000 bp, Homo Sapiens
actaatgcattacttagtaatacctgctttctaaagtgccattactgtcatgcaaaatgtttgtttcttactatgttatcagatttatatgtttctgtaatgtattactcttgctttatgagttccctgtatcttcatttcagaaagaattttttttccccctaatgaaatattagaagacaatagcaatgaaaaaagtgaatttggccaggcgtggtggctcacacctataattccggcactttgggaggccgaggcaggcagatcacctgaggttgggagttcaagaccagtctgaccaacatggagaaactctgtccctactaaaaatacaaagttagctgggcgtggtggtgcatgcctgttatcccagctactcgggaggctgaggcaggagaatcacttgaacctgggaggtagaggttgtggtgatacgagatcgtgctgttccactccaacctgggcaacaacagcgaaactctggctcaaaaaaaaaaaagaaaaaaagaaaaaagtggatttatttttattttacaggtttttaatgaagataccagatccttggagatttctcaatcttatactactacacaaagagaatctagtgattacagtgtaccttgcaaaaggaagaaaatagaactaggctgggaagtaataaaagatcaccttcagaagtcacagaatgattttgatcttgtgccttggtaaaatgttatcattttctcattcagtgtcattttaatctcttgtatgttatttttcagaaaactttcagtggaatcctttcatctcaaccagaactaagtcatttgtctacccccaaacctattactagcaaagggatatgtgattgccatgacaaattagattaatcattaatggctcatttgcttgggccaagggcagggccacctattttaatcatattgtcatagcaagttaagaaggaggactggctctctgataggcaattagaagtgtgcacctcatggaattc

SEQ ID NO: 201326 - DNA, 1000 bp, Homo Sapiens
ggcccctgtggcctgcatagagtggcgctgcctgcggaggcgatgggagagaataaggagggcggtggcgggggtgatgcggcggccacggagggtggcgcaggggctgcggccagccgggcgctgcagcagtgcgggcagctccagaagctcatcgtcatcttcattggcagcctgtgcgggctgtgcaccaagtgcgctgtgtccaatgacctcacccagcaggagatacagaccctggaggtaaggggttcggggacccgggctgggctccaggagtggcctggacacctccttcggggccccagttcactcctggctgagttgcatccttgagcccacgtcacccccttggaggcttcccctccctcctgcactcgctgacgcggcagccagaggacccgggaccagccctcaccttgggcaggatttgtggagcaggtgcgtggtgggaactgggatggaggctccagggtcccgtgggggtgggggtgggctgcgcgaggacatccccttaccccctgaatttccatctggtccagccctctcatcttgtaggtgaggaaaccgaaggcctgagggagaaatgacttgccaggaacccctgttaaggaaaattaacaaagtgtggttattaaagaagaactgagttgggagtcagacctggaggcccccacccttaggtaagacattataccaccttgagtctggcctgttgactgagggtgagccactccatcctcatgtgattgtggggtcttaacctcaaggggtttcctgcaggaagaagcaaatgggtttgctttcctagctctgtccagtacgttagggaccctgaggactgaagggattcttggagagccatctggtgtatgtcatgggtgggtcttttttgaaggtcagtctgcccagtgggctggctcagcccgaatgaactgtcttgaatctttggagttgtctgtgtacttttaagggcttctcagctgtgccccaaaagatc

SEQ ID NO: 201327 - DNA, 1000 bp, Homo Sapiens
ttgttggacatttgggttggttccaagtctttgctattgtgaataatgccacaataaacatacatgtgcatgtgtctttatagcagcatgatttatagtcctttgggtatatacccagtaatgggatggctgggtcaaatggtatttccagttctagatccctgaggaatcgccacactgacttccacaatggttgaactagtttacagtcccaccaacagtgaaaaagtgttcctatttctccacatcctctccagcacctgttgtttcctgactttttaatgattgccattctaactggtgtgagatggtatctcattgtggttttgatttgcatttctctgatggccagtaatgatgagcattttttcatgtgttttttggctgcagtctgtggctttttaattctcttgatagtgtatttcacgaagcagatgtttctaatttcaatatgacccagttatcaatttttcttttatggatcatggctttagtgttctgtctaaaaggtcatcaccaaacccaaagtcatctaagttttcccctatgttatattctaggagtcttatacttctcagttttagacttaggtccgtcatccattttgagttaattcttataaaatgaataaggtctatgtctacattcatttttcttttgcaggtggatgtccagttgtctcagcaccacttgtcgaaaagaccaactttgctacattgtattgcctttgcttctttgtgaaagatcagttgactatatataggtggatctatttctgagcttgctttctgttccattaatctatttgtttattgttttgccagtaccacactgtcttgattattgaaggattatagtaagactcagagtctggtaatgtcagttccccaacatttttctcatcaaaattatattggctattctgggtcttttgactctcagtataaactatagaatcagttgtcaatatgacagagtacttattaagatttgtgggatc

SEQ ID NO: 201328 - DNA, 1000 bp, Homo Sapiens
caggtcgtggcacctgaaagggctgtgttcccagctaagcgggttctgctgcgggctggcgcgggcatcatctcgggcaggttacctcacctcctccagactcagcttccacatgtgtaaaatggcacaacagtttgtcttcctcccagagtctggtcgaaggttaagtggcatgacttacatggagtctagtcagtagattgtctagtcattattcctaagctgagtgggccttgggggcattggaagctggacatgggggatccctatgtggcctgatgccctctcctgccacccctgcagccaagcagcatgagctgatgacactggatggcttcatgatgtacctgttgtcgccggagggggctgccttggacaacacccacacgtgtgtgttccaggacatgaaccagccccttgcccactacttcatctcttcctcccacaacacctatctgactgactcccagatcggggggcccagcagcaccgaggcctatgttaggtactgtagcagggggtgaatgtttccgggagccccacctggggagagacatgggctggcttcctggggccttcctggcccagcctgcctgctgccctgctctgtggcactctggcaacaccttgcccgtccacccatctgtccacacacagggcctttgcccagggatgccgctgcgtggagctggactgctgggaggggccaggaggggagcccgtcatctatcatggccataccctcacctccaagattctcttccgggacgtggtccaagccgtgcgcgaccatgccttcacggtgagcccctgggatgcccagccccagccccacagccttcccaatgacctccgtccgcactcacatgccagctgccctccgtccttccagaggaaacccttgcccagagaatcattcattcaccaagtgctgctgggataagtggccaatggggtggcataaagctgaatgagatgccaccctcatatttgtgggatc

SEQ ID NO: 201329 - DNA, 1000 bp, Homo Sapiens
ctctggaaaaggccagatagtaaatcgtttaggttttatagatcgagtcaaaattgaggatagtatgtaggtatttatacaacaaccacattacagcataaaaaccattcttagttcatggaacatacaaaaacaggcagcagactgaatctggctcatagcctggagtttgccaatgcctgccgtgcactattaataatagttaatttttatctgatgatcaagtgtactttacttctggcctgtggaaagaactgccaagagtcggagatgtttacactctgcaagctaagaaattagcctgtcccagattcatgggtgttaacagaagtcaagaggttatcggctcagagataaaacacagcctattactcaggagcaacagcggtagcaggggccacagtgtctgcagttttgcacaggttgctgaacgccagtccccaccaagggaacttgaaaagggatgatacctgcatcttcagtgggttgcattacaggggaggaactttgagcttgggaaaaccaaaatatttccctgagtcatactcagctattcagcagaaatgcttcctgtgtacttcccaatttgtcacagagaatgttagaaagatgtctactcaaaggtcaaaatttaataaaaccagtcatttttacagcttcattaaagacattcttaagagaagcgggggtttgtttttgtttctgttgttccagtgcaggtgtgtgaaaaacacaatgactgctggtacagtgtgtaccatgtcgtggctctcttgggcacggagagctgagcccatcactgactttgcaccatgagggcagtgctcaacacagagaagaaggtacatgtcatcctggcattgtgagacaaatagttttgacttcaaacatctccatactgtaagaaccacagctctcatcttttttgttcagggtactttaggttgcaggtgacagaaatccaacaagttggccaggcgcggtggctcatgcctgtaat

SEQ ID NO: 201330 - DNA, 1000 bp, Homo Sapiens
atatgagaaaaagctcaacatcactgatcattggagaaatgcaaatcaaaaccacaatgagacaccatctcacaccagtcagaatggctattattaaaaagtcaaaaaaataacagatgctggcaaggttgcagagaaaaggggacgcgtatacactgttggtgggagtgtaaattagttcaaattgtggaaagcagtgtgtgagtcctcaaagagctaaaaacagagctaccatctaacccagcaatcccattactggatatatacccaaaggaatataaatcaccctaccacaaagacacatggcgtgcatatgttcaatgcagcattattcacaatagcaaagacatgaaatcaatctaagtgcccatcaatggcagattggacaaataaaacatggtacatacagaccatggaataccatatagctataaaaaagaatgagatcatgtctattgtgggaatatggttggagctggaggccattatccttagcaaactaatgcaggaacagaaaaccaaatactgcatgttctcatttacaagtgggagctaaatgatgagaactcatggacacaaggaggggaacaatagacactggggcctacttgagggtggaggatgggaggagggaggggatcagaaaaaataactgttgggtactaggctcagtaccttggtggtgaaataagctgtataacaaacccccacatgtaccccagagccccctatataacaaacatgcacacgtaccccagaacctaaaagttaaaaaaaaagagtgtgttctttaattttcatggttgtatatttcccaagtttctttcagtcattatttctaatttcattccgctgcggtttgggaacatattccgtctatttttaatcttgtaaatttattgaagctcatcttatggcttaacatatggtctattctggagaatttttcatgcgcatttgaaattatttgctgttgatgggtaaattgttctgttagatc

SEQ ID NO: 201331 - DNA, 1000 bp, Homo Sapiens
aggggtgtcatggttggggaggtcagccttggggggtgtcagggtcgggtgaggtcagccttggggggcatcagggtgagggcaggccagccttgggggtgtctgggtagggggaggtcagcctggttggcaggtggggtgtccaggtgcagagaggtcaatctggatgggggttggtttcagagttgggggacgtcaaccttgatggagggtgttttgtctgggtgggggaaggtcacctttgggattgtctgggtgggggaggtcagccttgggggaggtcagccttgggggtggctggggtgtccaggttgtgggaggtcagcctgggggggacgccggggtggagaggtcagccttggggggtgtctgggttgagggaggtgaacctcggagggtgtcagggttgggtgaggtcagccttggggggtatctggtttgggggaggtcagccttgtggtgtctgggttgggggaggtcagccttggggggtgtctgggttgggggaggtcagccttggggggtgtctgggttgggggaggtcagccttggggggtgtctgagttgggggaggtcactcttggggggagtcagggtgggaggaggtcactcttggggggtgtctgggttaggggaggtcacccctggggggtgtcagggttgggggagttcagccttggggatggctggagtgtccggattgggaggtcagcatgtatagctgagcctgccccatggactcacatcccctgccctagacaccctcgccaccctctggtccccttcagagttgcaccgtcatggctgttccctgcgccagcttctgtaactcgtggccacagggatttcgggggccctcaggggtggtcttccacctcttccttgtgtgccctttgacctctgtggcttctgccacatccttgaagagccctcaagagcccctgggtcggtggtccttggtggcgatggagccagtggcagcagcctcacctggaagctt

SEQ ID NO: 201332 - DNA, 1000 bp, Homo Sapiens
tgggaggatcgtttgtgcccaggagttcgagaccagcctgggcaacatagtgagacactgtctctacaaaaaatagaaataaattttaaaaataaaataaaataaatacaaatttaaagagcctggcactcccctgcccccgccttgcttcctccagtgccatgtaatccgcacacgccagctccccttcaccttcagccatgagtgggggcagcctgtggcccttaccagatgcagatgaccaatcttgaacttttgcagacatcagaatcatgagcgaaataaacttcttttctttataaattacccagtctcaggtattccttgatagcaacactaaagggactcagacatcctacgaaccgggtgtttgatcctggacaatctcggcctgggaagcctgcaaatgctcacctttagcatctggccgagagccttaagcctccaatgtatttgacataaaaaacaggaatctgtaatgaaggaggtgagattagataattgccaagatcactttcagggacacagtgttgagattctgtgggaaacctcttttctttggacaaaaggaaaacgcccccctacccttactatcacagtgtggtattggctctatatgtggctagctgcagagctggtttatatgtctctatagttccatagtttcgattgtgcaaacatctggcacccttgctgataaaaccgaacatcaaataacactgcagttgctggtaatttagcactctgacgagcccgtccccattatgactaagaaagttcagtgttcatatctgcggagagagtgacaacaaacttaggccctcttttcatgtaataagacaataatagcagatagccaatgtcattaagtcttgctcttttgcaaccctgctccctgcctacccaagagtaatatgtggcttggaatcacttacactctgacctggcactgctgcatggagcacaatttctatgtgaaacactggaccaaaatgaaagc

SEQ ID NO: 201333 - DNA, 1000 bp, Homo Sapiens
tgatagtttcacatagatgtaccaactgaaaaatgacatacagatggtccccgatttatgatggctcaacttaagattttttgactttacaatggtgtgaaaacaatatacattcagtagaaactgtacttagagtacccataaaatcattccgtttttcactttcattacagtattcaataaactccatgatatattcaacattttgttataaaataagccttatattagaggattttgatcaaccgtaggctaatgtaagtgttcagagcacatttaagacagtttagactaagctatgatgttcaatcgcttgggtttattaagtgcattttcgactttaagatatttttaacttatgatgggtttatcaggatgtaaccccaacataagtcgaggagcctctgtcaacatttctgtgacttttattgatgaagttcgcaaatattgctaatacctctgtgtttgttacctaaattcataattgaaggccacgctacacttgagttagagatgagtggaaataaagacataatttattttaacatctaagattatggacccattgaaacctagaatccaggattctggagtcttgatttctagatttactagtgtattggtataaaggagtatgtaatataatattctccttttttatgggtatatatttgctatgttaaaaaattatttctagagaataagaattatacaattgccttaaatgtcttacttaataatgataatttaaattgaataaagattttaatggctttcttttttctacttttttaatcttatgcttttttctttattgcatgtgtacgtatatgtatatatatatatatatatatgtatatatattgcttcatttgagtactgaattgagtaattcttgcataaaaagtttgtggattttaagctgtcagagtctttttatgcccatgagtgttttcctttactcttacacatgattgataattttgctggacatagaatt

SEQ ID NO: 201334 - DNA, 1000 bp, Homo Sapiens
aaagaaagaaagaaaagaaattaatttagcaccataggaaaggttttttttaaaaaagcatgagctatgttatcctctttttttttttttgtataaggctacaaaatctggtattttgcacttatatcccatctcagttcggacaagccacatttcaagggcccaaaaccccatttggtgagtggcagccatattggatagagacagcccaccttctctggttttgtctctgcagatagccaaggaaacctaattatgcatccaactctctggcccattggctgagtcacctgccgggaagctttcagaatatttataggtaactgatctacagaaaacagaaagtgataccatctccagcccccacaacctttcttcagtctcaagtttgccgtctcagctactgttttctagaggcccagtgggaagagtatgcaaagtggcagtaaagtacatatgtaaacgtgtaggcaaaaggctgagaggattcttaccaaactactcacagtggaaaataagagtaatgtccaagcagagtttagttttgtcagtcatgccctaattttgtttttgttttttagaatgtattcattcacatattacttgtgtaagtgaaagtcaattgatatatatatagagataatagtaaagaaaagtaaccatgatttgcggtaaatccccaagaagtttaatggaaagcagtgagtgcagagattacaaggtggactctggggccggctgcctgcctttgcatcctagccctgctgtctactagctgtgtgaccttgggcaaggttctcttgctttctgggcctcagtttcctcatctataaactaaggataatgatgggacctatgttacaaggttgtcacaatgatttgatgagcaggtgtaaggtgttaagatgggatctggaacacagagtctcagctgtaataactaaaataattagtattatcactgtttttggtggaagagtaagtagcaagaaactctctt

SEQ ID NO: 201335 - DNA, 1000 bp, Homo Sapiens
aagcttacatagtagttccctggaataattcaggctgttaaataccaggatattaaatcctttacattttcaaatactgcttttaattctgtaattcagatttttaattcagacaggcccttccatgaattattcaaattagggggaagtttctcaagagctcaggatacactgagtttcttgccctatctggtctggaaaccctggttttcacagtcaggattataatgcagatagcgtagaactcatgcaggctgagttatgttttcaaactatctttcattcttgtggtagggaacttaccctcaagtgtagtatcttttactcttgagccatctggtagcgtggaattgtttttctatttttcacctgcctattttatagacctgtattgaccttttattcatcagggataaaggatgttgctttcaccctgcggtattgttttccctctgttgtatgtatagatatatgctacttgtcaattttccaattttgaaaatgatctgtatgtacttttagttgtattaataaagtgacagtgagtgtcagacaccatctctctaactcatatttacactgaggtcagtttcccaggtactaattttcatatctaagttgatgattgtgaaggggagaagtgcttattttttcctttcagttctatgatattcatccgattttcttttttgtttgttttcatgttacgttgtccctttcaggagcaattatgtttgcctctccacattttagaagagaaaggtttgagccaggttgcagtgacggtccaggctctcctggaacttgccccacccaagcaacagcagcaccagttatctgctgtttgaggatccccaggacggtgggcactggcctggccaaaacaaggaacaggacaccgtgattgctgctgccagctgtctgcttaaacaaagctcttgtgtgttctcagaagggaccgttcccatgattcctaacaggaatattttgcttcatttct

SEQ ID NO: 201336 - DNA, 1000 bp, Homo Sapiens
ggtgcttgagtgtaggcaaccaattaagatttacgggaaaaaaataagtgggcatttgtaatgaactgtacatggctaagagagatccaaagaaatataacatggtccctgctttcttaacacttaaaatccagtcagcaacataggacttagacccaagtgaaaaacaaaagcaagtaatagtacaaaatactaaacaggaagtgctttgtgagtagcaacaaagcaaaacaggaattcagaagatggtgaaatcacagtagaaccattgcagaaagacttcacagagggggcaagacaagagctgcaagttggaaaaaagtacgttaagctttaggtggacaaaacaaaaaaagtagaaaggccatcatagagtaaaatgcagaaaagacacaaaacactgagaaatgaagaaggatatgccaatgtaaaaacattctcagtatgttgggaccatcctgacaaaaatgaaagcatttttgttactggccagtggaggaaaaaactaggacaaatttatgagagaacctcaaataccaggctggaaagtctaaatttcaatctctaggcaaagtggggccaatgaaggttcctaagcaggagattgtctgggtaaaagcaatgctttaggaagattaatctgatggcaatgcataggacagatttgaggacagcagggtacaaattaagagacttctaaagtattccaggaataaggctgcagaggagtcatctaggcttttgagaatggtatagaactggcaggagcaaaaactactaagacaatacattgactaatgagatataatgggtaagagagaacaagactaggaattcttagatctaagataaagagtctgaaggataacaggagggaacaaagaatggctggatctgactggagcggacagacagtggcaagacgatgcttccagttccagacattcactgtgaggggacagagggatggaaacataaaaatgaggttaaaagtagagct

SEQ ID NO: 201337 - DNA, 1000 bp, Homo Sapiens
agctaattcagataaagaagccttcattattccctcacccctcagccttctctgtgtaagctccacggctctgcttccctcaaggctctgagctcccacatcttgcaggccctgctcttaattttctcccagttttcgcagagtaacaaaagggaagtcaccactctgcagccttgactcagttctgaagttccaaaggcaatgaaaattgttacttaaaggtgtgagcttctctagtttgtaaaacctgaagagtactatcctcttaacttagagctcggtcaccttgacaaaccaccactctgtggaaaagctaatgcagcagccactgtaatcccatctggggcttgccctctgctttgatttcctgagtacagcaataaaccaagtcaatcttttatgagaactgttttgaaggaagcaagggcattaagtgacttaaatgaccgcatgtgcacactctacggtctgcatttctttttgtttgttttttgtaaggtctacctttctgttagcacccctgaaatacaggacaacatcctccagcaaatccatttacagtcataaaccaggggcagacgcctgccttcccacagcaggggaagcagaagcctcaaccttggaaccactagagcttgggaagggctgtaacccagggtcttacctcccccagacagcagggaccacattcacatgtggtgagctcacacctctctccatcaccccatggcacccaccctgtagaatggagtaattcagactctatgtgtttccctgggacaaagaggcatttatttcagtgggaagcaaacttttttcatgagaatacagccctgaattttagaatcaaagcagataaaaagaaaagcttgattttataatattttatagctaacttttaagaaatatatttaaatatacactccatgcagattattcataaatactgtctacttctaatgaactgagaaattttaccaaattacctttaccatgaatt

SEQ ID NO: 201338 - DNA, 1000 bp, Homo Sapiens
aacaatgaaaaaagtccatatttatttttaacaccatttatcatatgccccaatttatctttactaattttgtaaataatttttataatgtattatatttccattacacttgagtctaatatacagtctctcaatcaattcctatgtcacttccacactgctttttaatttatgaaactttatagcacattcactattgatagaactaggcctcatatttttgtttttcctattattttaatattttttatatttattcctacagatgttctttcaagtcattgtttttataatgttaaatatgtcataatattcaaggtgttaaaaaaaagcacttgggtgaatttgattgaaattgattgcatagcacttacaggttaagtaagggagaactgacaaatttcaattttttcctatttgagaactaaatatatctatctctagcagtctttcatccataaaaagtttcagagttttagatgtattttctcatattgttctagcatgttttgtattattaataatagattttctatttttataatattttgattgtgtttatagataaaaagctactgaatttatgtctcaaatcatttaaatgaattcattaataaaaaccatcttcatagatttataaagcaatagtcctgatatttcattttctctgtggataatgcctggggaatgtatacagaaagaatcctcaggttcattgcaatagtttccaattcccccagcacttagatgtctacatgtttgtgagccactaaatgatcaaattatttaaattcactcttcctagatgcatctgtatttcacattcacattgagtctttgtaaagtttgtcaaagtataattcatatgagttgcagaatttgagaggtagatgaaactataaacattattgagtctaatccattaaatgtttcccatacttcaaaatatattggtctttaaaaaattgaaatattttagttttttaaatgaaatatgatc

SEQ ID NO: 201339 - DNA, 1000 bp, Homo Sapiens
acagtgagaaagggaaataaggccaaaagcagcaaagacctctgtgcctgttcctcctggagcactttcaccagggtccccagatctaggtctgcccattcctctccccacattctacactgggccctaggtcaacactgcttgatgaagttgagcagaccacaggcattgttatcctttgcccctgggaagatggtataggtgaactgtagaggccagactatttcccaaattgccctcctcctcctaccaaactggaagggtattgaaaaaggtggagaccttcctgggatgtccagtctacagcctacgtgctaaccaaaggcccactgggcatagagcagagtccccctctccttacaggcctagccaggaagagagtagctgtaggtttgggaacctgagggcatttgggatgcttaaacaccgcctggtaattactcagtattaattaaaatcctccctatcacctcccatacaggcttggcacacacccaggagctcaatgctgctgggagctgagcagctgggagcaaggagccctcatccccactgatgaagaggccagcccaggttctaggctaagcaggcctgtgattataaacagcagtgtctccctggacaagtttcttgaccctgagaagaatgttagaccatcaactttgtgaggggacaggcagtctccaacttttttcctgctcagtccttattgcatactcttggagaaggtctactgacttgttctcagatgccccacggctcagccaaccacccatccagcagagcattcaaaaggcatctggaaggaatgagggcgaccgttctgccaggcccctatttttttttgagaggagtctcactctgtcgcccaggctggagtgcaatggcatgacctctgctcactgcaagctctgcctcccaggttcaagcgattctcctgtctcagcctcccaagtagctggtactacaggcgtgcaccaccacacccagcaaatttttt

SEQ ID NO: 201340 - DNA, 1000 bp, Homo Sapiens
gcctcgcactccggccgcgggctcgtgccaccccgggagcccaggcgcggacgggctctcccctcctcctcttgcggccgcttccgcctcgccgggcgctgaatcaccccgcgccccctcccccagacaaccgcccctcgcgcggccccgagctccgcagggcgggttgggggctcctgacccaccctccctcccctcgccagaagggagggcctccctcgccctcagccgcccgccgggagggcaggccgcggcccccgagccccctccccgctctcttgaggcgatcagaggccccgcccgggccggaggagggggcgcccggcagaccactgagggcggaacgcggcgagggaggcgagccggcggggcggtgcgcggcgcgctcgcccgggtccctcagcgccgcacgcccgacagcggcggaggaaactgcggcgaaggaaaaggaggtggcgtcggggacggctccgcggcggctgctctaatagcatttatcggccgctgcctcccctttcgccgccgccgcggcatgtggacgccgctcattggccgagagcgcccagcgcggcgcgggcggcgcggccccgccccctcctcccggctccctcctcccgcgcgcctggcgcccacgctgccgcgcaggccccgccccctcccgcgcgccgcccctaggaacccggatcgaggccgcgcgcgccgcggtcgcggggctggcggaggggaagctgggtaccctcttctgtgcctgcggttctctgacccacccacctgcagacgcagggtggggcgctcacagtgggcacgctgctctggggccggtgggcggatggttggaaggcgaggccgaggagctgggagcgcggtccacgcggggcgtctcgaggcgccctcgggctgatgtccttggctcgcctcctcgccctcggtcgcccgggctgcgctctgcatcctaatctggctccttcagagcccccctcagaaaccaaggggaggaatt

SEQ ID NO: 201341 - DNA, 1000 bp, Homo Sapiens
tctggcacagttgttcacggtcaattgtagcccctatgctgatttccccattatcctcgtttactacaagtagaggagaatttcccctctgcatggctcgaaatcgaacagtagaaggattaggaagcttcaataaaacatcagccacatcctctgatagtcttgcaattactgatccaaccctctgttcctcataaatcctgtatttcaaattcttgcccagtacatcgtggttgaaagatactatcagaagtgcaaaaacaaacctaaagtgcattttagcattcatttggtgcattggtcagtttatgagatttccctcacagagcaagttaaaacagcaaagcaattgcctcaacttcctttggcaacgtaaagctacatttggtacttgaaacttgaaagcgtctcttaataacacagcacagcaattaacagctcgcaaacttttgttttatacacaccgtgtcacgacttccagataccttcggcatggagtccagtccttgcgtttgtttggtcgttcgtcctctttccaggcaggagagtgtcacctccgcgttttctcccttgtgtagtcggaatccatctattgcagggtgccggtggagtctgcagtgtgtctttcctgagcgattctttctccctttagctgctcggctgcagactaaacacccgtgattgctgactccagtctaaaatctgtacaacttcacttcaactcagacaaagctcttgcccagcgtgtgttgaatcgcttccagccaatcagcgtgcttccaaatcaaaagctgatggagtcacccaaggagggagggcgagagtggagggtgggagagagaaagagacggagaaggaggaaggcgggggtgggtgcgcgagggagagaaggggagatgggctggtgggggctgggggaggagatgggagccagtccttccctgttccttccttcttcctccccactccccctccgcctttcaatctactgcattcactt

SEQ ID NO: 201342 - DNA, 1000 bp, Homo Sapiens
tcctttcattatctctaactccagtgtcagccctcaagcagtcccctgctttgtcacccctggcaaggtggggaatgttctcttaacctgcagctttctccttcgggaacaaagcgcagcctcttagcagctagcaatcaactcctgtgctcggggccttccagccagaccttctgcagtacaccctggtagggggtaaattatcctgagcttggaaaatgtgactgaaatcacctccgacagagggaaatgggttttcataaaagacgtttcctcaccttcggttgcaactcaattcaactgaccatttcccaccctggatctcaaaagaaatttctgctttgcttctgggtatgagcctgggtgataatgaaaggtacttaggaagccaggcctattgaagcagcgtagccctcagaggggcatggctgacttggctaagagtaggacagggtgtggggttgaggaatccatggggactcagggcatcctgtcgcagacacaggagctgacccagccacagggtcacaggacagcctgtgtcaccacagtctctgtgcagagtccagagttcacaaatgagataaatggacatttgctgactggggtaactcagcatctattcaccctatttctgggaaaagcctcaatttacatgtgggaatggaccacccccttattgttataggagttattaagaaattattttaggcagatagagaggaaaagaggtccttgggaagtttttgtttattttaaagcagatccagaaacctttcttgtctaacaggagagcgccagctctaagagccactggcaagctttgatatgcaaacgcaggccactggaaactgagtccacccaaacatggagattccaggtttcttccttgccccaacaggtggctggcaacatggccgcccccacatatccccacgtgtgtagaacatcatggcgccctgcatttgcatcttaaaaggctagactgtgagggccagct

SEQ ID NO: 201343 - DNA, 1000 bp, Homo Sapiens
ctgatggcgtctgcaacctctgggctgtggtctccgggagccttgacggcatctgcaacctctgggctgtggtctccctgagccctgatggcgtctgcaacctctgggctgtggtctccctgagtcctgatggcgtctgcaacctctgggctgtggtctccgggagccttgacggtgtctgcaacctctgggctgtggtctccctgagtcctgacagcgtctgcaacctctgggctgtggtctccccagtcctgacggtgtctgcatcctctgggctgtggtctccctgagtcctgacggcgtctgcaacctctgggctgtggtctccgggagccctgacggcgtctgcaacctctgggctgtggtctctgggagccctgacggcatctgcaacctctgggctgtggtctccgggagccctgacggcatctgcaacctctgggctgtggtctccctgagccctgacggcatctgcaacctctgggctgtggtctccccgagccctggcaacccctatccctctccgctctccttcgggcacacagcccggcatctctgctctccaagggctcgtagtgcctgaagccgacactctctctcctgcacacacacaggtcgatgccttcttgttcccagtgcttcagaacagagctggcagcggctgcggcaggagcagctcccactgacaggctcctgcagcctccttcccacctgcacaggaaaaaagcccgcatccattctgtaaggagctagagcagctctttggcatcctgtacaggccttggaatgcttcagggaaaaaagatgattccgcatcagaatggctgtggtcagacttgctggcagaagcctcccccaggctcttgacatgtggcttctggtcccttttcctgccacacccctgggttccgcgcagacctgggtccttgaagaactgaaattctagctcaacctcggcaactctgtagccattcgctggaaatttcctaagagtgggatc

SEQ ID NO: 201344 - DNA, 1000 bp, Homo Sapiens
tgcggcgggattcaggcggcggcgacccccgagtccctcccctggggcgcctcccgacgcgtcccggccccggtcttagctcataaatctccttcacacagaggcccataaatcaggggcggtggagggaccccccagctccccgcccccgccccactcctggagaggcggggggggggcgcaggaagcccctgggatggggaccgcggcttgttaattacaggtcgcggggcctgatttatggggggggcgggccgcatgctgcgcgggggctgggcatgtctgggggagcccggacgggttccaggaggcctgaggggctcccaagttctcagggccttgttgaaatgacagtctggagcgtgatcaaccgtaacatgttcctatgtaaataaaatataaacgtaataatacgcatggctaaggcaatggagagactgtgtgcccagctgtgctaaacgctgtatcaactctccaaatagttactgaatgcctattgggtgccaggaatcttgtgtgtatatatattctctcccgaacctccccaggcagctctgaaagttagtccttacggttcccattttgcagatggagaaatgaaaagagaagtgatcgacttgcccaagttcccttgattaataagtagtgggttcaggaatcatacacctcgtctctgtcctccaagcttaacctgcttggactaggttatcctaccacctgcttcgctgtcttcctgctccacccatgagctgtgtgacgttgagcaagcgtcttagcctctctgagcctcagttctcctcactgataaaagagcattctgccctatctacctcacaaggagttaggaggatccaatttaaagggagtttatgaaagtgctttaaaaattctctctaaagttctatatgaggctgggtgaggtggctcacgcctgtagtcccagcactttgggaggctgaggcaggcagatcacttgaggtcaggagtttgaggtgggatc

SEQ ID NO: 201345 - DNA, 1000 bp, Homo Sapiens
aggcagtggcaggaaccctatgaaggtctggaatgaactgaaagtgcaagtgttttcagagtagtgtggaggtgacgaggaagaaaagactaaattcatgagaatgatacacaagatgatagctgaaaaaacaagtgactaacagttgttctactagggtcaactggggaaaatagtggaagagcctgcagaagagacggagtcatttgaagattggcaggtattgactggagggatacggccccataagtgtaagattaaataaggagagactggaaactgtgtaaagggagaactatacaaagagtaggtaagcgtaggtggagtggcatggacaggtaaaatgaggaaagtgtttcccagaatgggaaatcttgtaaacccttaaaaaatgtgggtttattcagtcaaatgttggctcttaattgcagactttgaaaagcagtagatacaatggaagaagaacaagtgcttgaaaagtaatgcgaagcttttgtgagaagtttaatgagaaggattagaaggagatggattaagatgagccctaatagggcagcacttaaagacaccaggatagatctttgagtagtttgtagaatggatgactaatattggaagaggagtggctggagatcatgttggaaacccatctcaagggtgaaacttctttgtttccaggtacagatggtagatgaaattttactctatataattaagggagggcaaatcaccaaaggggagaaacaaatgaatatcatgtaagtgcggtattaaagttactcttagaagttactctgtcatgtgaagattttctacagatgagagacagacactagagagaatttggctaggaagtgccattcaggaggagacagagtccatctgaatgaaatatggacagcagctaaaagaagggaggctgaagataaggtagcgtacatctttagggcaagataggtaacaaggagaaaaggaataggagaaaacattaaagttgact

SEQ ID NO: 201346 - DNA, 1000 bp, Homo Sapiens
ttttgtagagactcagttttaccatgttgcccaggctggtctcgaactcctaggctgaagtgatccacccgcctcagcctcccaaagtgctgggattactggtgtgagccaccatgcctagctgcatgaccttgtacacaggaaatcctaaggaatccacacttcagaaaacccaaaaaattattagaaccaataaatgagttcagcaaagttgcaggatacaatctcaatatttaaaaaaatcaatggagctgggtgcggctggctcatgcctataatcccagagctttgggaggccaaaacaggagcatcccttgagcccaggaatttgagaccagcctgggcaacacagcgagactccatctctaccaaaaaattaacaaaaaatattagccacgtgcagcagcatgtgccagtagaactgcattcaaaatagcatcaaaaagaataaaactcttaggaataaatttaaccaaagaagtgcaggactttttcactgaaaactgtaaaacatagatagaaattaaagaagatctaaataaatgaaaagacaacccatgctcatgggaaataatattgttaagatgataatactctccaatttgtctatatattcaacaaaatcaaaatcccagatggctttctgcagaaattgacaagctgctattattcatatggaaatgtaatgaacccaaaacagttaaaaaaatctcaaaacagaaaacaagtcagaaactcacacttctaatttcaacactgccaagttacagtaattaaaacagtatggtactagaataaaggcagacatggagatcagtggaatagaattcatagaccagaaacaaacctttacttttatggtcaactgattttcaattaaaacaaaaaagtgccaagacaattcaaggagaaagaacaattttttcaacaaacagtgttgaaacaactgggtatccacatcgaaaagaatgaagttgtacccctacctcacagtgggatc

SEQ ID NO: 201347 - DNA, 1000 bp, Homo Sapiens
gccaggactcaaggatgcaaacagacagtgacaatgatgcacgataaacaggaggataaagtgagatgtgcacagtgccctgagaaggggtacatggtgggtgcaggcaggggagatgtggggaactcaagcccacgtttctctctatgcaaagctcatattctctccactgtattgttctgcctctggatttcaggaagcactgggatatcttgtaatacagagtattttcccagggtaagaatgagacatacgcctgaaacatcccataatttgagccaggaagagctgaagccttaggctgggccatgagcagctgaagcacccattgggctggtcccaacgctgggctgaggctgaggtggcaggggaactgagagcaaggacggagctcaaggagctgtgtggaggcccagcttccagggcagtccaaagcagccctctctgctgctagaaaggatgctaagcatgtgacgtggattaaaaaagatggtggcaggaatcattatcagtggtgcttacagaagtttgttctaaaccaaccattcattatctattgcattagcaaaactgattttttttttttttttttggagacggagtctcgctctgttgcccaagctggatggagtgcagtgttgcgacctcggctcactgcaacctccgcctcccaggttcatgcgattctcctgcctcagcctcctgagtagctgggactacagacacacgccaccatgcccagctaattttttttttttgtatttttaatagagatgaggtttcaccatgctggccaggctggtctggaattcttgacctcgtgatctgctcacctcagcctcccaaagtgctgggattacaggaatgagccaccgcgcctggccagcaaaattgattttattttctattttgagactggctctcactttgttgcctaggctagagttcagtggcacgatgtcagctcactgcagcctgtatctcccaggctcaagcgatc

SEQ ID NO: 201348 - DNA, 1000 bp, Homo Sapiens
tcactgcactccagcctgggtgacagcaagagtccatctcaaaaacaaacaaacaaaaaaatacttggggatgcatttgaacttatctgtgctttcttttgcccccaaaggcactatagtcaacacccaaatccattgtgtcttcagccatctctctttcactagtttctaaaatgttgttggttcacgagagtcacctagtcatggggtgaattggtgcccatccctgtggtgagatgcagggaggtggggacttccaggaggccctgttcaggagactgacgggagggctggacacctggcctccagatccctgtgcctgctcactgccttggtctgacctgcaagcaaagtggctagcctggtcggggggccagccccagctcagggcccacacagctgtgtgctggggctcaaattacccaacagccttttgaaatgctcaaagaagctctcaatcaccatgcttgtgcatctgactatcccagctttgcccataaactcccaaccagacgcctctgttcatcacttggtcttggcaagagaggccaagtggaattccaacagtcactgaggagcagagggaggcttccagaaggaggtacatgactaaatattttggaaatttctcctgccagtttctctgtctcctctaccacccctgtttcaagacatagaggacatcatcctgtcacccaaagcaagaccgcattttaaaattaaacttgaaacaagtatatatttctgatcttcaactcactctcacccagccagagcatttacactccagccaaaccctccacactacctgcctgcagcatctgtttggagagggatcctctagaaattaagaggtttaaccccacacagacactcactgtaccccaacatgtgtgcacacgcacacacaaaatcctttgtcagcccagccaaaggctggtcatcatgtctttgtgcccagagtaagaaacacagcagctatttctactaaagtgggatc

SEQ ID NO: 201349 - DNA, 1000 bp, Homo Sapiens
tggggtggtagaggttttaccgcataagcagcaggtgcctctccagggtccacaatggtatctccaggcacagcacttcaggggctggaaagcagagggaacagagaggaaagtgatggggcgcgcccaggacacacatggcgtcctcacgactctcctcaccgggacactccagctgaaactcaagggctgttgagaggacccatgcaagtgctggcatgcaccgtggggagagggtggccccgggagcagcccagcctgcccagcccctgcacgtgctgctcaggtggactctgcccaactcccaccaagcaaactgaagccattcgctagggctggaaacgagacgtggctctcattggagcagcccggcctttcctggggaagcgctcaggcagaagccatcagaggaagccaggaagtccgatgctgggcggacccaagaacaaacctcccacccgcccagcctaagcttcttgctgtaactgctcgctgggctgcctgagcttctcaaatcccttattcctccctgaggagcagaggcaggggtggagggatgcagggaggaggaactcctcactaccctccccgccaaagatcttacaaaccccatctggagcaggtctctaaactcctctctccgacacagagcgccaaactgcctctagaaaagaaggcattagaagtttctctagaacagcaggcctcaagctcctccaagggctaggaggtgctgccagtttctcaatcaccctctgacctccctgactgcacacactcagatgcgtctacaaggagccgcagcagacagacagctgtgaccattccaggcctcttccagaggggacccctcaagctcagctcagggtaccctgccccaggcagccacactgagccgctggtctctgaaaccccaggctctagtgctgcccgcccacctggctccacaaccacggcagggccgcagagcctgccagacatggacggacacggtgggatc

SEQ ID NO: 201350 - DNA, 1000 bp, Homo Sapiens
aatcctttagctagacacaaaagttctccaagtccccaccagattagctagacacagagcactgattagtgcgttcacataccttgagctagacacagcatgctgattggtgcatttacaatcctccagctagacgtagtaagttctccaagtacccaccggactcaggagcccagctggctttgcctagtgcatcccggccgcgggcggagctgcccgccagtctctggcgcgctgccgcactcctcagccgttgggcggttgacgggaccgggtgccgcgtagcaggaggtggcgcccgtcccctcggggtggcgcgcgggagcctgcggttggggggcggggggcggggggcaggggacgggggcggggaggagggtgagggctccagcatggcaggctgcaggtcccgagccctgcccccttgccccgcggggaggtggctgaggcccagcgaaaattcgagcgcggcgccggcgggccatcactgttggaggacccagtgcaccctccgcagctgctggcccgggtgctaagcctctcactgcccagggccggcggcgccagccgaccgctcaagagtgcggggcgcgccgagcccgcgcccacccggaagtcgcgccgagcccgcgcccacccggaagtcgcgctggacctgcgagccccgcaggcagcccaggttccggcccgcgcctctccctccacacctccccgccagcagagggagcccgctcaggcctcagccagcacagagaggggctcccacggtgcagctgcgggctgaagggctcctcaagcgcggccagagtgggctgaggccgaggaggtgccgagagccagcgagggatgccagcaagctgtcacctctcagaaatacaggaagaacatcaataatgttcgaagttataaagtagtaggtttctatcaagagtaaaacataaacgaagttataaagtagtaggtttctatcaagaataaaacataaacgatcaaagaattc

SEQ ID NO: 201351 - DNA, 1000 bp, Homo Sapiens
tacaggcatgagccaccatgcccagccctcttatcaattcttataatttcagacctggaagggactcaaggttgacctgtccttaaatttcttggtatcagaagctctttacactctgaaaaattattcaggaccccaaagagctgttttttatgtgattatatctattgatattgatatatcatgcatatttacagagggatttgactatggtttctttctcatagtcttggcctacctgaccatcctgtcttagctctgaccacactctgacaagacaataggaatagcatgtaaatcagcaaatgaaatccccaaagcccaaatgttatggtgttttgcgtagtcttgggataaagagcaacgacatacttggataaattccatttcttcttgagacacaagtttccttctgtatttctgaggtaatgtttttattatttctgcagtgtctggtggaccctgatacatcagcaaatctggtgatttacttcctttagaatgttgtgaaattacagaagagtgagatggtagccctgctgatctcaaagcttctgatactgaaattaaaaaaaaaaaagaccttattagagaaattgttcagatgtcaaaatactgagtcttaaaatactatcaaataatcaagtcattcttgaaatgaagtcattcttcaaataactcttgaagtattataattccaaaaggtaaatattgtagagtaactcagttggctatatataatttcataaaggtttttaaaaacaaataaggaggtagctttaaaatttttatacatttattgtttacagatggggtcttgctttgttgcccaggctgatcttgaactcctgggctcaagcaaacatcctgccagccatcccacctcagcctgtgagtagtcaggattataggcatgtgccactgcacccagctaaggggcagtcttaagtaaatgaattacaaaaatgtaaaataatgaaatttctagttagtggaattc

SEQ ID NO: 201352 - DNA, 1000 bp, Homo Sapiens
cctgtgcctatggtcccagatactcaggaggctgaggtgggaagatcgcttgggcccaggaggttaaggctgcagtgagcagtgatcgcaccaccgcactccagcttgggtgacacagagagaggcggtctcaaaaacacataaaaatttggatttcttagaaagaccacttgggcacgggtgataggaggctgtctggaaacaaggccagtaaggagtccacctttgaggaccaagcgagtggggcagaggcctgcctgctggtgagaagggaacgtggacagggtagcgggaggtgagcccaaagctgaagcaaggggagcactgcagtgggcgcagggcagggtgggggaggcaagtggcatctctgcccagagagaatacacaagcagaaagttcaacaccgcttacctggtgaagccctacaagcgtttccactccatacgcgctctgaataatgggattgtgatgtcttacaccaattctcaaactgggcggccagctgcagccgaatcaactccaggtgcccgtagttgcgataccaagagtagtagctgttcacacggatcacatccacatacagagcctaggaccagagcagcagagcccgttcagcaaccacaagaccgcatgactcagtactcacatgctgtgggggctcctctgacagagaaggtaagaaggggatgtaatcccagcactctgggaggctgaggcaggagggtggcttgtggccaggagttcgagaccagcctgggcaacacagcaagaccccagctctacaaaaaatagtatcaagaaaatcagcacggcacagtggctcatgcctgtaatcccagcacattgggaggccaaggtgggaggatcacttgagcccaggagtttgagaccagcctgggcaacgtcgtaggactccatttctacaaaacaaaacaaaaagcctagaacgggaagagctgcctctcggggctgagaacatccaactgcaccaatttagatc

SEQ ID NO: 201353 - DNA, 1000 bp, Homo Sapiens
cttttaataaagatggggtttcatcatgttggccaggattgtcttgatctcctgaccttgtgatccgcccgcctcggcctcccaaagtgctgggattacaggcgtgagccaccgcgcccggccaagttttactttttttttgagatagtctgtcacgcaggctggagtgcagtggcgcgatctcagctcactgcaacctctgcttcctgggttgaagcaattctcctgcctcagcctcccgagcagctgggattacaggcgtgcaccaccacacccagctaagtttttgtatttttaggagagacgggtttcaccatgttggtcaggctggtgtcaaactcctgacctcaggtgatccacccgcctcggcctcccgaagtgctgggattataggcgtgagccaccgcccggccaggagttttcctttttgttgtgacttttggaaccaagttcaggtttcacgtttctaaaaaaaaggaacataggcggggcgtggtggctcatgcttgtaatcccagcactttgggaggccgaggcaggcggatcatgatggcaggagttcgagaccaggctgtctaacatagtaaaaccctgtctctaataaaaatacaaaaactagctgggcatggtggcaggcgcctgtaatcccagctacgcaggaggctgaggcaggagaattgcttgaacctgggaggcggagaatgccgtgagctgacgtcgcaccattgcgctccagcctgggcgacagagcgagacttcgtctcaaaaaagaagataaaccaacaaggatgggaggagaatcctagaatggaatgaaatcagaaaaaatgaaccaaactgtatttgaaatgagtgacatggtctgaccaatgggatgggatagtgaattccagtaacttctgaacccaaaatctggactccacggcctcaggctacaaatgacaagaactacagacaaatgttacactccagttaggaggcatcgtctccacgtgggatc

SEQ ID NO: 201354 - DNA, 1000 bp, Homo Sapiens
atttgctaatgttttctccagttctgtgggctgtctttccacttcgttggtagcatcctgtgatgtgcaaaaatttttcattttcatgtagttcgtcttatttattttaatttttgttgcttgcatttttggtgtcatagccaagaaattattgccaaagccaatgtcatgaagctttctcccatgtcttcttttacaaggtttatacttttatgtttagatcttttatctgttttgagttaatttttgtatatgctgtaaggtgagggttcaaattcattcgtttgcatgtggacatccagttttcccacatttgttgaaaagactgcccttttcccattgaatggtctcagcacccttgtgaaaaaaatcatttgaccatatacataagggtttcatatgtaatataatttattttgaaatgacatcaatgtatattaatggaatgtgtgtgtttccacttccccctttatcccacatttaggtagtatcacattgtttgcagtcattaccatcatcctgggatgccttaaaattagatacttcattggattttcagaatgtttatcagccactgaaggagttttccctgtcacccattcagtgcatactttgttgcaggtaaaccactgatgtttattcatgttgtctcattcctgtggagtgtatcccaggttgtgtagaaacttgtaacatcgagacatgtggcaagtggagacagtgtgcacagctgtgaactgcagtgaactgaggtgaactgaagtctatctttgaggcttaattcttcagctgcctccattgcaaaataaaactctgtgtccccatggccatttttgcagggatcctatgaggcagaacttctaatgatgaagagtcaggaaattctgccaagccagggtctacagtaaaagcttgagggagttttattttctgggtatgtaacaggtttattgagagaattcacatggcatgtaattcagccatttaacatgtggaattc

SEQ ID NO: 201355 - DNA, 1000 bp, Homo Sapiens
ggtattgtcctaggctgttacctcagacctgctctgtgtgcatagaggacagagggtagtttgtgtgcaggtggaacatggtgatgtgtttggtttgtttttttgtttttgtttgtttgttttgctttaatgccttttttttcctgagcgaagtgggtggatttttcttcttaaaaatatgtcttgatgtctaatatataatgcgatgaattcctgtctgtgttgtggttcttcatattttctttgcttggtttttaacttcttttttctttggaatcatagtactgatagactttttatactcttcttctcttgcctccccaccccctggccatcctaacacacgggcacacgtactctggacttcttaaactttgttcctgaactacttacggagagtggggttgggggatattggaaagaagtctgtgaaatatagcctgactcctgatcttcacctctgcccccacagacaagttcaccgattcagccattgccatgaactcgaaagtgaatggggaacacaaagagaaggtgcttcagcgctgggaggggggtgacagcaacagcgacgactatgacctcgagtctgacatggtatagcctccttccctgagaacttgggagctggacagacagaatgggttgttgacagtgaggttcatttgagtggggagggaaatatttactgttgcccattgatggtagtcagataacaaatagaaaggtatagaaaatagcaaagtaaaaatatctattcttagctgggtgcagtggctcatgtttgtaatcccagcactttgggaggccaaggccggtgggtcacttgaggcaaggatttcgagaccagtctgggcaacatggtgaaaccctgtctcaacaagatatataaaagctatcaaggtttggtggcatgtacctgtagtcccagctacttgggaggctgaagtggaaggatcacttgagcccagggaggtcgaggctacagtgagctgtgatc

SEQ ID NO: 201356 - DNA, 1000 bp, Homo Sapiens
gcgaccatcttggctaacatggtgaaaacctgtctcttctaaaatacaaacaattagctgggtgtggtggcgtgtggctgtaatcccaactacttgggaggctgaggcagggaaattgcttgaacccgggaggtggaggttgctgtgagctgatattgcgccactgcactccagcctggcaacagagcaagactctccatctcaaaaacaagaaattgtcacagccaccctaaccttcagcaaccaccgccctgatcagtccagcagctatcaatatcaaggcaagaccctccaccaacaagaagattatgactggtgatggctcagatgatccttagcaatttttttagcaataaagtgtttgtaagttaaggcatgtacattgctttttagacataatgctattgcacatttaatatactacagtatagtgtaaacataacttctttttgagaggttctcgttctgttgcccaggctggagcataatagtgtgatcacagctcactgcagcttcagcctcctgtgctcaagcaatcctcccacctcagcctcttgagcagctgggaccaccggcatatgccaccatacccagctaatgtttttaaatttttttgtagagatgaggtctggttacattgtccaggctggtctcaaattcctggccttaaacgattttcctgccccagcctcctaaagtgcttccccaaacaacattctgttttcttttttcaggtagggtgtcactatgtcacccaggcgggagcgcagtggtgtgatcacagctcactgcagcctcgactccctgggctcaaatgatcctcccacctcagcctctcgagtggctgggacctgaggcatgagccgtcaggcccagctaattttttttttattatttgtagagataaggtctcgctatgttgcccaggctggtctcaaactcccaggctcaagtgatcctcctgccttggcctcccaaagtgctgggattacgtgggatc

SEQ ID NO: 201357 - DNA, 1000 bp, Homo Sapiens
ataacagtgaagtggctgctccagtaatatttaatatacatttatgtacagcatcttatgcacctgactttgttctaaaatgtttataaatgttaactcatttactactcggaacaacattggaggtagactctgctattatctgcatttttttttttaaaggcagggtattgttctgccacccaggctggagtgcagtggtgcaatcacagttcattgcagccttgaccacctgggctctcaaaggatcctgtcacatcagcctcttgatccctggtgttagctgggaccacaggtgtgtgccaccatgaccagctaatattttgactttttgtaaaggagaggactcactatgttgccctgggtggtcttgaactcctgggctcaagggatcctcccacctcagcctcccaaaatgctgggattacaggtgtgagccaccatgcccagccttattacctgcactttgaagaagaggagacagtgactcagaggggctcttgtgcaggtcatgcaatgggaagatatgccactgaggaggaagtggctggaggacttcagcacatcaacagatccaaatgacagccatgcagcagcaagagcccggaaaatccaagagtagaggacatctcgtagtccaccccatgagattagctttaccctgattccaaagccagacacagacagcacaagcagagagaactgcagacatttgtctgtcagtgggtgaggacaagggccagggaaagcgtgtctgtgggcgcatgtgtgttaggtgtgcatgtgcgtttcagctgtgggacagactatggatgagagatggagacaaggtgtgagtgtgacagaaagactggaacagagagtgggagagtgtacatcagagcgtgtgtgacagaaggtgtgtgtatgtgcctgtgttggagaaagggtgtgtctctgtaaaagagtaaaggttacatacagaggaaatgcatttttgagaaagtgaattccgcggatc

SEQ ID NO: 201358 - DNA, 1000 bp, Homo Sapiens
tcgggcaccagaccctggctgtctgggcaatttgggtatgagaccgcagatctcacaaacttcagccatccaccctgtctccctgcgagaccccgggcatttatacagcactgcagatagacccgctgagacccacactgtagtagcttcagcagagggagctgattaaattcctctttcctttgctgcttgcattgttttggcagagattatcctaaaaatagcacagcccagtcctgcctggatgccttctgcctcatttctgcagggttgtacgatgtgtattattcttccacacttactgtctcatggaagaggcaatattctgtggaggaggaaaatgaaaaaccctgggctttggagacagaagactgcctttcaattctggctctgcctctgtccaacctcgttttctttttttcttttttttttttttttttggtgacagtcttgttctgtcacccagactgagtgcagtgacgccatcacagctcactgcatcctcaactacccacaccatgcctagttaatttttgttatttttagtagagatggggtttcatcatgttgcccaggctcatctcaaactgctggctcaagcgatccacccgccacggcctcccaaagtgctgggattacaggcataagccacagcgcccggcgggccttgtttactttggataagtcacttaaccctggcgaggcctagttttactagcttgcctataaaatgggcatattctaaaaccaatctcatggaatcattttgaaggtaaaatcagataaagtatgtatcagctcttcaataaacaatattatgagtattccctattctgagcagaccatgctgtccatcatctcaattatggcttaggtgtctttgtttagcccaacaccattcctggtacatagtaggcagcatgtgctacaaagttaaattcattatgtctcttcttgtctttatttgattaatagctgtcattcctgctagaattccgcg

SEQ ID NO: 201359 - DNA, 1000 bp, Homo Sapiens
attcttattagtgaaataaagcactaaaggatacaatatgtaaagggaaaaaataaaatttcaactaaaaaatattctagtgtttaacatattaaatgacaaccaacttgtaagctcttggacccaacagagataaattagtttaagaaaggcaaattttgctgggttcagtggctcaggcttataatcccagcactttgagaggccaagtaggagaatcacttgaggccaggagttcaagatgagcctgagcaacgtagcgagagcctgtcactacaaaaaagtaaaaataaaaaaattagccaggcatgggtgcaagcctgtagtcccagctactcaggaggctgagatgggaggatcacttgagtccaggagttcacgactgcagagagccatgatagccactgcattccagcccaggtgtcagagtgagactctgtctcaataaaataattaaataaatataaaaaaaagaaaaggccaagtgtggtggctcatgcctataatcccattactttgggaggctgaggtgggcagatcacttaagcccaggagtttaagatcagcttcggcaacatggcaaaacctcatcttctaccaaaataaaaaattagccaggcatggtagtgcgtgcctatagtcccagctactcatgagtctgaggtgggaagatggcttaagcccaggacacagaggctacagggagctgacatcgcaccactgcactctagcctgggcaatagacccagaccctgtctccaaggggaaaaaaaaaaaaaagaaaggcaaatttcatgcagcattgtttcatttgttccccttgtaaacacatttaaatgtatcacaggatctgtaactatcaaaattgcccacagcatcaaattaaaaatacagttctaatccagacacggaggatgaaagggatcatggctaactagtgaaacagcactgatagtcaaatgaagggctggaaccttgaagtaaaaagaagaaaaggatc

SEQ ID NO: 201360 - DNA, 1000 bp, Homo Sapiens
agggtcccggcgtcgagggccccgtgggaggagggtcctggcgtggagggctccgtgggaggagggttctggctgaggtcatccagcagctgcactgtgtggcctggcctggggatggtgttcttggtaagcccaagtgtggtcaggaggctgcctgcctgtttccaggagggtgagcaggaggccttaggcacagaggagcatctgtgaggggcgcgtgcgtctggctgagtgggcacctggcggtgtgtgcaggcttcccagctcttacggcctctcaggcaccgggtctttttctgcctgtctggcagggtttgggaggtggtggttttccataatgcatgaatggttggtgtttgacccacccctctttgggcctcagtttcccatctgtgcccaggggcctggggcggtcctctgtgctgagcaggacacccaaggactccatcctccggccccagcacccgcccctgcccagggttccgcctgatggtttgctgttggtctctgccgccgacccggcatccgttccgtcggcctcgtcgggctgtccctgctttgtgggacacgctgagccggggaaggcatctgcctccctcatcagactggacgcccctttccctgctcggccgccggcccagctgggtagcagcgggagcaaggaaggacagtggctctttgctgacgccctgagctgcctcctctgcaatgcttcttggaaaaacctcgggggacaccccactccccatccacctggagagggtgggagtcggtggccctgggtgagcagaccttgtggctacctgtctgttctcccatgtgtccagtggagagaacgcggcccagccccccacctctcagaccccgtccagggacatcccgtggctccacagagccgtctcctccctggacagagcaaccctcacacctgcacgcgtggccctgggtcactgcctgcactggccatctccgtgactgtagagcagggggtcccgaaggt

SEQ ID NO: 201361 - DNA, 1000 bp, Homo Sapiens
attaaaattagaagagaaaatctttaaagtagtcatttaaccattgtttctaaatattacaaaattatcaagaagaaaccataaaaaagagcttcaaataaatttaaggaaaatcttacagaattttacatgtataagaattagtttgcacatattaccttcactgagtttgaaactatccaacaagaatgctatctacataacacagaagacacaatctttatattctggaataaaatgtgtaataactttacatttctaaagagaagagacacaaataaatacctatatataggcaaagatttcctgcccaaagacaattttaagataaatactagatatattattatacttattggtgtacttacgataaaaaaagtactcattcaaataatacttactgagttcttactacttcagataacttaatgtactgggcaggataaattttacttcctaaagacatgaattgggttcccaaattactagctctatggcttttggcaaattacttagcatctccgaatctattttcatctccctgaaaaaggggaataataatgcctactttgtggattccttgtgaatattataaacagataatacatgaaaactacgaagttcccaatgtattcagcacccataaataacacaccattaactaaactactattatgattttatctactatgtcctcatgatgaggttcatttatgctaaaattgattattatttacctttcagagtatttcattcattcaaaaaatgtactaagagcctactttatgccaagtaccctgtcccaaccttggatcatggatatataaagacagacaacatatacacactcaaggaagtttcactagagaaacagttatgagaacaatagagaatatctaaaatacagatttgagagtaataaaagtaattactataagtaacagggaaagaaagacaaatagagaagaaagactatcatagaagtattcactaaaagaat

SEQ ID NO: 201362 - DNA, 1000 bp, Homo Sapiens
atttctttttcttttctttctttcttttcttttcttttcttttcttttttttgagacagagtctctctctgttgcccaggctggagtgcagtggtgcaatcttggctcactgcaacccccacctcctggatttaagtgattctcctgcctcagcctcctgagtagctgggattgcaagcatgtgccaccacacccagctaatattttttatttttcgtggagatgagatttcaccatgctgtccaggctggtcaagaactcctgacctcaggtgatccacccacctcggcctcccaaagtgctgggattacaggcgtgagccaccacacccagcctctagctctgaattcaagatgaaacaatggacttctggcctaacctcttcttgtctttcataggttgttaggtattcatgtaggaatgaaagagagcagcgaaatagtaggtgtgtctgtgtatgaacattagagactaattcatcaattcttcaacatatgttttcttagtacacactattgtcagactctgctttaggtgcttgagatacaagagcaaacaaaacaaagttcctgcaatcttttaatttttttgaatattttattgagataaaatttataatataatattttatagaattgtacaattatcactactatctaattctatcatttttatcacccctatgggaaaccgctattcattaatagtcactctgcatccctcttacccacagccgctggcaaccactaatctattttctgtctctatggatttgcctgttttggacactaagtataatggaaccatgcaatgtgtggcctttatgtctggtttccgccacttagcataatgtttttaaggctcatccatggtatagcatgagtcagtactttgtttttcctgaagtaaggatgactactgaaggagcaagctggggattgcaggtgggtcagagtttgtttttggacatactaagttagagtcatgcttaatggaattc

SEQ ID NO: 201363 - DNA, 1000 bp, Homo Sapiens
tactcagatttcagaaaacaggtgaaaacaggctgagcgcagtggctcatgggtgtaatcccagcactttgggaggctgaggagggtggatcacttggggcaggagttcgtgaccagcctggccaacatggtgaaaccccatctctactaaaaatacaaaaattagccggacatggtggcgggccctgtcatcccagctacttggggggctgaggtaggagaattgcttgaacccaggaggcggaggttgcagagagccacgatcgcgccactgcactccagcctgggcaacggagagagagtccgtctcaaaaaaaaaaaaaaagtgaaatggagtactggtcgcacacgcatgaatcagatacgaatggcaccggggaacacgccaactgcaaagacccagtgaggcagccttctccacgcaaacccggaaaggaaggcgtaagagacaattcaccgactcccacacccaccctctcgctgctgcagatacttgagtcgctaaatacatcttaacactaccaaggcgaaattacccatttggggaaactgggtcataaagtagattaataacacggaaagcctgcccagggagaggcctggtttcagcagcattgcaggatgtactaaactagcttaattgttatgtaaattgcactctccgtcccatctgtttatcccggatggcccattcatcacaagagttttccctgaaataagcactgagccagacctgctctttatcagcgtcccctccaccagaacaccaccccgaacgccctgagctctccgcgcctcttccctctccgttagcgtttgggcaatgtctgtgtccaccgcaccaggggtggtaacaaagagggcaaggtaacatcatgggaaacccggaggggagacatcgctgcttctctaagattggaaggtggccattacggacaaaggcaggaagcaaccgttagtttttagtcttttattttaagaagaaaatgcaatggaattc

SEQ ID NO: 201364 - DNA, 1000 bp, Homo Sapiens
ctatcagctctccatatccatgggttctgcatccatagattcaatcaaccagggatagaaaaatattttttaaaaaaaaaccaacgcaattaaaaaaaccatacaacaataaaaaatataataggaaatacagtataacagtgatttacatagcatttacattttattaggtgttagaagtagagataatttaaagtatacgataggatatgcatagattatgtgcaaatactgtgccattgtatatcagggaattgagcatcagtatattttagtatcctcgggagtcctgaaaccaatcccctatggatacagaggaagcagcatacttggaactacattatagtctgcttttaacaacattctatacaaaagttagaatctaggaaacaataatgtagggggcaattatgcattacccttcaagtgatttgcagaaaagtagatttacagatatagccagtgcatgcctgtgttttgcctataaaccgcataataaagtacgataggtggatgagagggcagagaaatttaaaatattatgaccctttgccaagacgaagccaatgaaaaataaatacagtatcagaaatcacaatttacatcaccgaacacgtcattggattcacaaaattttccattgcatttaatttttaaaaagcccattttatggtaaggaatactagaattgcaaatgtaacacagaactaatatggcacgtgagatggagaaggtccaatccagtgatatctgtagaatgaatgaatgaatgactgactgaatatgcatgtttaaggaaggtgctaatggtggtcacaggcttccctcatcaaccccaacttataattgcattttaaaatttataaaccattagccaacaatgggagacagttagctagattcccggagtctctcataataacaaatgtctttataattttgtaattctgtgtgaaatcagatgcaaaatcatggtctcatatacttatgggaggaattc

SEQ ID NO: 201365 - DNA, 1000 bp, Homo Sapiens
gccaatcctgcggtgtgcccgcactcctcagctcttgggtggttgatgggacagggctgcagagcgggcggcggggctcgtcggggaggctccggccacgcaggagcccatggcggcagcgggaggctcaggcatgggggcctgcagatcccaagccctgccccacagggaggcagctgaggccccgcgagaattcgagtgcagtgccagcaggccagctctgctgggggaccccgcacaccctccacagctgctggcccagttactaagcccctcactccccaaggcctgcggcccccagcggccacttggagtgcagggccgccaaacccacgcccacccggaactcgcgctggcccacaagcgcctggcgcagccccggttcccgcgcgtgcctctccctccacacctccccgcaagctgagggagccggctttggcctccgccagcccagaaaggggatcccacagtgcagcagcgggctgaagggctcctcaagcgcggccagagtgggcgctgaggccgaggaggcaccaatagcgagcgagagctgccagcacgctgtcacctctcactttcttatcttccaataactttatttctaccatttctttggacattcctgtttagatatgtcacaataatttcaaactcagtaattttcactcttaaaccagcttgccttagtgggttttcttgtccctgttaaaaataccattaaggcccaaagcctctgggttttttttggatttttttctactttgcctattaaaacaactcatctgcaaagccctattgagactgcatttgaagtatcatttttgtcgtctttctttccattccaaaactaacaatattaatacaaatttcaaatacctcaaatcttaccagagcttcttcacttccttgttctcaggtccattttccccaaacacaccagattgaaatttcaagaactctaatctcatctcattactatttaaaggcatttaatgaattc

SEQ ID NO: 201366 - DNA, 1000 bp, Homo Sapiens
actgaaaataaggacttctgtgctctgagactcttaatgctcaaccatatacataatttcctatacttggaggccagaacaataggtagaaaagtatacctgttgggctgttcttgatgtctgaaacccagtgagtaatgagtgtctcctttacctcctgaattaacagcctttgatatctgcttctgcccgtgggtgaagcacaggtcttctccatgtgtctcatgctggggcccatgccagagaggcagcagctccctggggcatgtttttctcatgatagaaggtatcgatgctccagaagggcaagcagaaatatacaatgcccctgaaggtccatacttggaagaagtacccgccactctgcccatgttccattggccaaagcaagttccatgcctaaggccaacttgaatggaggaaagaatgctccccctatggtgagaggggagagaaaagagggaatatgtactaaaagttatccaatctaccatagtatccaactcttgactaagttgtgattccaaaagctcattttataagtaaactatttggcaattaaactaaattttcttgcagaaacaatattattaacacaacgttttttaattaaccctcaacctgtcaaccttgttcctgaagtagagcaataatagaacttaaacacctttttttaaaccatatttctataggacaaaatgtattaagacttccaacttgagattctcccacacccccacatttggctaaggtgttctccttctctccaccctcttcccagctttaagccgtcagtgtagctgtgaggaaagggcttcctctcacataatcctctagagacatgtctctgtattgtgaatgtattcccacagctcttttctcttctttcctatgtcctggagattaaatgccactacctaattttctccttcttggactctgggaaaagagaactcaggctcaggaattttgcccctgctttccggtcctttgggaattc

SEQ ID NO: 201367 - DNA, 1000 bp, Homo Sapiens
ggggtccggggacagcttgtaacgagagtggagtgcagagcagaagaacattgtagaagacaacgacgagatgatttatagctgcagtgagtggtcttcttctggaatgctctaacacacaggagagggccatggtcagcctgtgctgtgccccaggccaccgctgaccaatggagaggtggacacctcactgcagctgagcccggaatgtgggcatcatctaagactcttgcaggcaagaggggttggagccgaatctcatcaacatcagggctccacagagcaagtctacgtgctttatcatgtgacgtcctgggagaaggccctgttctgaccccaggattattcgttcatcctttccgtagatactgagagcttctcaaatatctttccaataaatctctacctttttgaaggaaagtgggagagcagagttgttttcagctaccttatgaaaagaacccaaaaccaaaaaccaaaaacaaaaacaaaaaaacctgcttaagtagtacagaggattgatatgttgcaaatgctttaattgttttaaattgtggccccctctacattcagagccatgtttccagatagacctctcatgctgggagtggacagtgccttatgtggcaacagccctggtaccttgacaatcccagcccagtgcttgttgaaccaggacacccaggtgagagatgtgacacagtctttcaggtcttcctctttcacagtcactgggatccccagtcctgcagaaaaagctgtggtcacagagctaatgccggtacaaagccctgttcaatgaggcagaacgaacccagctgtcagcaggatggcacagtctctcttagctcttttacttctttaaagcttccactaagatttccaggaaatgtcaagttgcttttctgcccagtctccctgttactaatacttgagcacaaagagacgaaacacttggaacaggacagactagaagtaggagaaaatccgaggtgaattc

SEQ ID NO: 201368 - DNA, 1000 bp, Homo Sapiens
attaagatccaagacttataaatacattactagtctccaaacacaccacaacctgaactatgcatgtgcactagcaggggcatgtgcgtacacacacacacacacatccctgcagcgaaccaagtttcatacacacacgcacacgcacacacacaaacatctttgcagctagccaagtttcatacacacatacacaaatgtgcgcgcgcacacacacacacactcatccctgcagccagccaagtttcatacacacacacacacacacaaaaatccctctagtcggccaagtttcatacacacacacacacacacacacaactctctctctgtctctctccctctctcatccctgcagccagccaagtttcactccttcctttctgctttcttagaaacccctcagtctttatttgtcctattgtggcttatttttcaccccaaggatacttctgatggtcatttagttttcaatgatgtgaagtcacttctcggaaggagaaaaggaaggcatctatagtatgatcgtcctgttactgaggactcccttaaacattaaaaaatacttctttctttggcagagtgtttacattaatgaatcagagcattttaaatattgcagtattccttagaaaagtttcattgatttgattctattcacagactgttcgtgatatttcgtgtgttttagctacaaacacttatctaaggtaattatatcatcattttaaaaacatactgtattcaattattaaataacttactgtaacattaatttttcaaatgaatatgcattaaactttagcattatgattaagacaggagatatgaaccaaacagatgttttcttaaaaatattattcttacagatttcttatatgtatttggacttgttttggagatatttatatttgtgaaataactcaaagtttaaagtgataaattataatttatcattagaatttaaagtcagtaagctaaagatttatttttggaattc

SEQ ID NO: 201369 - DNA, 1000 bp, Homo Sapiens
atacaaaattagcctggtgtggtggcgcatgcctgtaatcccagctacttgggagctgaggcaggagaatcacttgaacccgggaggcggaggttgtggtgagccgagatcgcgccattccactcaagcctgggcaacaagagtaaaactccacctcaaaaaaaaaaaaaacaacacaaaacaaaactctcagttctcaccaattaacatgtcctccccaaatggtggctagaaaaaggtttatcatgcattcattttgaatggcatttgtgattcctcaacccatggagaaattttaggagttaaaaatctgccaacaaggtaaaatcataaaaaaaggttatgagtcaaagggaaaatcactctttagtaactaaaaaaaagtaaacattctttgagagtagcaaaaagagagcgagtataaaaaataattttggattttgctttaactggaaacactaatggaccagcctctgggcaccaatgtttgttgactaaacttaacaaatgaattataactaaaaataacactgctaaactttaaaaccaagatgtttttgctaagcaaactcttcccacaaataggtatttctttctatgtattaactatgcatttatgactgtgatcagcctggctaacaaatcagtgaccattttggggtaataaccttcaatactattacccaaagagggatcctcttctatcagttatagttggggtgggggtacagggcagctccttcctttacccaggggatatatcgagagcatcatctctcaggaggaggtgagatttttaagttgatccaaagggaccatgggttttaaatgtttcagaaatatttttatatgtcattcctcagaggtatattcccagcagaataaaggaatgtaaagaattgtggtgtctatcatatagtagtgcaggagaaacagcaaagtaaaagtgaaatgagctgggaagaagcccctactgacttcatcatcaaggagtgaattc

SEQ ID NO: 201370 - DNA, 1000 bp, Homo Sapiens
gcagaatgcctgatatcacagtaggcacttgataaatattttgcctccccttggtttctgctccccatcctgtgccctacacaacaggacgaaggccaagtcgttctgtgagccaattcagcaaacaaaggcacttgtctctccaaggcacagagaagaatttcgaatatttgtgatttgaaatttgtcctggtcacaccaactattctttacttctcagatatgcttatctgagtgcttttggcatttaacttgtctaaagatagatgctgtttctacttcccaaaacagaattgtgatggactttgtaaggaaaaaaaaaaagtggcaggaagtctgtgaaatgaaatcattattaggccatggtacaaatggctgtcgggccctgggttcagcccagcgcaggaggaagggtgaggtaattagcatggatttgcaattctgtagctcgcttttgttccctccctccactggctgtgtctgattctagtcactgggtttattctcttgtgtttgtttttttcacttggccaaaaatagagagacaaaaaaagtttcctcatacttacttcagctttttacttttttccttgtgtgtttggtttcctcttacgtgatccttccttcttcctgccacctgctagtttctctatggtggggctcagaaaccaacatcccacaatatggcgcactgacatgccgcactgaggaatcctcaaggtctctctgaccttccgaccttcccccgtcacctccaatctctaccaaagaaattgaagttcttttatctgcctgagatcagtcttaccaaggagaacaattgttttctttccctctttggaagaccaagaatgtaaccacacatgaacagaccctttcacaagataatgcctgtctttccactcatttattattccaatgaaaactatttacaagttaatttctagtccccatcctatcattctccctagtaatcatttattgcccctcaacagaattc

SEQ ID NO: 201371 - DNA, 1000 bp, Homo Sapiens
ccaccaccacgcctggctaatttttgcatttttggtagagacggggtttcaccatgttggccaggatggtcttgaactcctgaccttgtgatccgcctgcctcagcctcctaaagtactgggattacaggtgtgagccactgcgcccagccaaagttttatttttttaagagagaagatctgggggcatatttatctgttaattattccccagttagaggggtgctgccgaaatctgaggggaaaaacacaaagtcctttactaggcagaaggagattacattcaaagcatcagatggacagattattcctacatattttactttggtttgttgttgttgatgatgatgatcttttcttccgttatgtcttctgattgaattgttatgtgaatctataaagtctcttgttactttgctccgtatgttagcatcaatgccattagatataataaattaattaaatgtaaaaaataaaaccataaaaattctagagaacacacgtggaataattgtgaaggaggtgcggtccacctaacaatgagacaaaacccagagtccataaaagaaaataccaataatttaactatgttaaaaaaaatcttcatagtacaaaccataacaaagttaaaagtaaatggcaaagtaggaatgatattttcaactcataatttccctaatatgtgaaacactcctacaggtcaatatgaaaaagaccaacaattaaatagaaaaaaggggcaacgtactacagtttgtagaaaatatctcttttacatatgaacatttattcaacctaatttataaagacagcaaattaaagacattttgaaaaacctatcagattgggaagggtcagactgtgtaataatattgtgttggtgaggctgtagaaagtacatgctagcttatggaagtataaagtggcaatgaatctatagacagtatttgggtagtatctatcaaaattaaaacggaacgtattctttgacctaggaattc

SEQ ID NO: 201372 - DNA, 1000 bp, Homo Sapiens
aatgaaagttctggccaaagcaaacaggcaagagaaagaaataaagggcatccaaattggaaagaaggaagtcaaattgtccctgtttgcagatgacatgatcttatatacagaaaaccctaaaggctctatcaaatactcctagaactgataaatttagtaaagttggatacaaaaccagcatacaaagatcagtggtatttctataccccaagaatcaaccatcaaaacaaggaatcaagaaaacaatcccatttacaatagctacaaaaaataatatgtaggaataaatttagccaaagaggtgaaatatctctacaaggaaaactatacaacactgatgaaaaaaattgaggaggatacaaatagacatctcatgttcatggattagaagacttaatattgtgaaaatgtccatactatccaaagttatctgttcattcaatgcattccctatcaaaataccaataacattcttcacagaaatggaaaaaacaatcctaaaatttgtgcagaaccacagaagaccccaaatagcaaaagcaaatcctgagcaaaaggaataaagctggaggcatcacactaccagacttcaaaatgaaggcaatagtaatcaaaccagaatggttaaaaacataaaaacagatatgtagactaatgagacagaacagagaaccccaaaataaatctacttatttacagacaactggtatttgacaaaggtgccaagaacattcataggggaatgataatctcttcaataaactgtgccaggagagctagatatcaatacacagaaaaatgaaactggactcctatctctcaccataaaaaaggtcaattcaaaatggactaagaacttaaatgtaggaccccaaactatgaaactaccagaagaaaacacaaaggaaatgcttcaggacattggtctgatgaaagattttatggagaagacctcaaaagcccaggcaactaaagcaaatataggcaaatggaattc

SEQ ID NO: 201373 - DNA, 1000 bp, Homo Sapiens
tagaacaagttactgggtgaatacgttcactaaaatgctatgccagagttgcatcaaaactctcgtgcttgaagttttatatttaggaaatattgccaaactacaaaacatggaagtcttcaactccagctactgctttttttaaaattaagaaataagaggccaggcatggtggctcatgcctataattccagcactttgggaggctgaggcaggcagatcacttgaggtcaggagtatgagatcagcctggccaacatggcaaaatcccgtctctactaaaaatacaaaaactagctgggtgttgtggcgcgtgcctgtaatccactactggggaggctgaagcaggaaaattgcttgaacccgggaggcggaggttgcagtgagccaagattgtgccacagcactccggcctgggtgacagagcaagactccatctcaaaaaataaataaataaataaataaaataagagcttaattataaaatatgattaattatgtgcatttagctatgattcccacatatttttaaaagatttaaggaagcataatcaataacttctttccaatgcaaataatagaaaagcaagttgtcttgaaatttgtcttttgctaaagatgtttaccaactttgctcccttttatgtgaacctctaccttacttcccataaaccctaggctcaaaaagtgttacagcatactagttggaaaactgattcattctgctaattattttttatttctaaaaaatctcttaaaagagaagccataaccataaaaactccaggtttctaaatttttacatctttattcaggcactatcaatgtaaattaatattgattttttacttacttttttgttcaaagtaaaaatataaaggagttctgcagcttctgtattttttaaaactaggtgaatattcagtttcaggaatatttaaaaacttacaagacctagcatttctttcattttatatatattgagcctaaatttgaattc

SEQ ID NO: 201374 - DNA, 1000 bp, Homo Sapiens
cggccggcacacacgggcccgctgaaagggaaagtaactttgaagggccggcggggaggacgcgagggcgcacttcgcggaccagcccccctcagccgcctgactccatggtggctttaccccttcgggaaatagaacccccagatgacacaggaatccccaggctccagtactggccattctccaccagtgatctgtataacaggaaaactcagagtgctcggttttcagacaaccccaaagatttactggctttactagatagtgtcatgttcacccaccagcccacttgggatgattgtcagcagctcctccgaattttgttcaccatggaagagcgagagagaatacagatagaagctagaaagctggtcctgggggacgacggtcaaccgactgccaaccccgacctcataaacgcaacctttcctctgaccaggccggcgtgggactacaacacggcagaaggtaggggacggctacacctttatcgccagactctaatggcaggtctccgggcagctgctcgcaagcccactaatttggctaaagtatattctgttctgcagggaaagacagagagcccagctacctacttagaaagattaatggaagcttttagacagtacacccccatagatccagaggctccaggaagtcaggcagctgttgtaatgtctttcgtaaatcaggcagccccagatattaagagaaaactccagaaattagaagacttggagggaaagcggattcaggacctccttcagatagcccagcgggtttacaataacagagatactccagaggaaaagcaatttaaggccactaaaaaaaaatgaccaaggtcctggcagcagtggtacagaaagagcatctacagccagaggtaacatatctagggtacctgcttaagggagggcagcgctggctaacagatgcccggaaacaaactgttctgcagatccccaggccacaatccacccgacaagtgagagaattc

SEQ ID NO: 201375 - DNA, 1000 bp, Homo Sapiens
aatgcaaattgatcgaagcagatcaatgaaaattaaaacatattccttttacaagtcactttagaaacctataccaatgattttagaaataaattctccagcaattttattctctgggaaaaaaataaagcaatatggctttgagattttaaaataagtggtatctctgacaatcttaaagaactgcactcctattgctctgacctaactacaagagtatttgggtaggggaggtaagaatgagtaagagaagacatagaactataaaaagaatgaaacagataattcggaaattcccatatttttttcttttaagaaaaaaagaattaaaaagcataacttggctttaatatagttctggaaaaaaagacaatactatttctttaaaagctgacaaatggtcttcaaaatcatatctgatcaaattaaaaatttagaaagaatacctataaactttacccatttactacatgtattccattctatcttatgatgagagcagaaaagaaaggagaaaagaatgaaataccagaattaatgctttgtcacccatgaagttcaggcatacatagaagggctacatttatcttactggaatgaaaattttaaaaatgacccaagataatgactgcaaaattgtactaaaggtaaaaaccaggtaagactaaaataataatctgaaaaaaaatttaaagtcatatttaagttcaataaatctgaacattgacataaaatgttaaatgtgctactattctctttacttacttgtgagactagttaatgaatagaattttatttaaaattcaatagagaatgaagaaattcagaataatgccaactacaatacaatattgctgctagtactattataaatttattattctcaattggaattttaataaactttaaagagtccttgagttactatttttataacttcattatagaatagattagatttgaaatacaatggaaataaacttttgcttcaggagaattc

SEQ ID NO: 201376 - DNA, 1000 bp, Homo Sapiens
agctagttttcttcccaaataaggaaaggaatgtgagctggtactgataagccattggtgctgtggcatgcctgggcatgtagtaaaggcagaaagaaagaaaaagagaagaaaagggaaggggaggggtactgtggattaaagaataaaggattaataggctatttgaagagaaatcttgtcatatcccacacggaacaaaaaaatgaaaccaaaattctactgagtgtgaaggctgagactaaagagaggctcctgacatagctgagtggaagtactatgtgtgataaagaaggaaatggagaaatatctatttggtcagcataaactgagtatgtttagttatccccaactctttatcttctagtaattgtgatataaggaagactgggaagtacaagtcaacaattcattgtcattaaatcagaaaggcactgaacgctgaatttataaatcagaaagcataaatgattgaataacaagggaaaattcagcttatctgaaaataatgcaaaataaacattgaaactgtgagggaagaaaatttataaatttgttatgctaatttaggatagacaaacaaaaagagaattcactttgtttcatgcctttccataatggtttcattaaattgatgtttttgtttgctttgttttttgagacagggtcttgttctgttgcccaggctggagtacagtgacatgatcatggctcactgcagcctcaatatgtcccaagctcaatcaatcctcccacctcagcctcctaagtagctaggactataggcacgtgtcactatgcccagctgattttttaaaaattttagtagagacaaggtctcgatacattgcctaggctactctttaactcttgagctcaagcaatcctcccacctcggcctcccaaagtgctgggattacaagcgtgagccactgcactcaaattgattttctaaggcagtcaagagatatctaatatccagagtcttctattagaattc

SEQ ID NO: 201377 - DNA, 1000 bp, Homo Sapiens
gcagctcttttcctcccacccttctgccatctgacacatccacaagcctgtgaggggaggtacagtggcgaggggcccacatacctgttcctgaggccagggacacgcctagccatgggtgctgccccagccagggcttcagagtcggtaggcaccctccacactcgctgcttgtccatatcctgttcagttaaagcctagtgaggccacagcccttcctcacccatccctcctcttcatccccatctgagttttgggaagaactgtcactttgcccataaggcatactcatcccatccacatgagactcagttcccagaactgtggatttctgagcagaagcaactctaacctctaaagagagagaccagaagtactttcagaatttttttttttcttttcttttttttttttttgagacagagtcttgctctgttacccaggctggagcacagtgacgcgatcttggctcactgcaacctctgcctctgggttcaagtgattctcctgcctcagcctcccaggtagctgggattacaggcacgtgccaccatgtctgactaatttttgcatttttagtagagatggggtttcaccatattggccaggctggtcttgaactcctgatgtcaagtgatccacccgcctcagcctcccaaagtgctaggattacagacatgagtcaccgcacctggccactttcagactttttgagatgcaaatggagtgacctccctgtgacagccataagttctataacctcagctgtgtcctagcaaaatctgcttgcttccaagaagccaaggaatcttttgtgatttagcaaggggaggcatgttaagtgggcttcagagatgctgtcattggtttttcagcaattctaaaatggttacttgtagaggaaactgtttctgatgccaaggtcagtttagtctggcagctggggctggtgaattcctggactcatcagaacagctggtccctggagcccactgaattc

SEQ ID NO: 201378 - DNA, 1000 bp, Homo Sapiens
agagcagttcattacccagtgtcaagtatttctgcagtcatcttttacaagctaagccttagagaggcttagccctcaggtttataacactgctgtaaagacaggacagtccctccggcctcacagttcaacagcaaagcagtcacgagctgcacgtgactaatcaccagacaggcagaggggacatcgctgtggggtctggccctgaagacttcgagagggatgggtggagctaggatgctgctaagagtgctttgggaaactgcagatttccaggaatgcatgctggtgacaggaggtgggcaagccacagaaagggtgtagaaaaagatgcaggtcccaggggacagagagggtgtgtctgcttcaggaaaaggatagccgagctgcacgaggcgctgggcctgacaaggtccctgagaatgacagagatgcactggagggtgggtggcaagcccaccttgctgctgagttgcgtttcctgaaccaccaggaagtgggcaatggcttccagaagctggggctcccgcaaccggtgccgggccaggtgctgggccaggagcaccatcacgtggggagtcagttcctctggccttgcctctgtgaagaacagcctgtcacgcttggcctcagccggacctccaggtggctcaattccacctcaacccagccaactgagcccaccttcctcctcctgtcaaccctccccacccccatctgattttaaccccctccagcacctgccaggctgctgatcagatgctgccgtggataccgcagaaaacgggggcagcttagagcagcttccaacccttgcccacctcggagaaggggctgtaaagggggaggtggcttcggagggaggcggagccttcgctcctgttccagggcacacaccaggggaccatcagatggaaagcctgagggggagaggtaaaaggcagcctggtaacaacagagctgtgctgctgttcttatcatggggttacttggtgaattc

SEQ ID NO: 201379 - DNA, 1000 bp, Homo Sapiens
atggcatcaatccttacgaagtgtataaaacctcttaccccttcccattgagggcagtctcagcttcctctctcaaacacctggctggtggatttttaggggggcatttcttggagcaaaggaagctgttcatcctttcctggggaaccattcttttcaagtgagggcagagaaggagaaaaatacctttggggtgtttccctccccacccccaaccccgtccagtttcctgcagcagttagaacagaaattagtctctcagaagattatcctgccacattcacttaaatgtgatgcatagtatgacctgtaggataacagtggaaaaccctaatcagttacttaaacctgccacagactaatttttagaagtctcagaggtgggtgtgcatattaaaagagaccaggtcctttccgtagaaccctgagcaaatgtgtattgattaacttaattaaaggaagattatgacttgtgcactgcactgtgtgttatcttactgtatggtttaagggatctttaaagcatatgtgctaatggccttctcttttaaaccagcgtgaatctgaggttatttcattaatgtggtaagcaaataattgccaagaacacagaaggtaaaaagcattttcttctgtaaataaattaaaatactttaagctgttttttagtaatagttttatatggagtttggttcaaagagatcctttttatttttcaaatattaaggaaaggagttctttaccttttatttattcttctcatcttacctcttggcttgagctagggtcatagaaccatgaagatttggctgggccatttatttgcaaaacctccaatgtcagtatgtttaggtcttttgtcttagaccagactccacagagaatgattctctaatctgccttctggagattgaaggtctggctgtcagtatgcaggaaaccaaatgagaagagggtagaagagaggtgggaatttttggcatccagtatatgtgaattc

SEQ ID NO: 201380 - DNA, 1000 bp, Homo Sapiens
catttagcagagggcactggctaatagcacaggcatgaccttcttgaggacacgcagggtacccaagcccatgtggctccaagtcctcaagagacaatcttgctacttgtctctggttccccccaccttcaccaagtcttggggctggggaagaggatggcacaaaatgggcacagagcaagcacagggcacagtgtcctgggttctgggccacagttccaggagtcaggaataggcactggctgctcatctggagcccctgccggaagtgctgaggcaacagccccaacccccagggaggtgatcacaagatgcaccccgcagggtgtctagcctggtagtcaggtgaccctggcttttgagcgggtgtagaagaagctggaagtcagctaccatggggagacaaaggcccaggttgcggggaacacacttggttcgttacattgaatcagatgcagctcaggctgagcacaggatcaggaactgcccaactccagggggcaccattcacatccttggtgggcctggtgggctcaggaagagctgggaacatgaatgtgtccatgtggactgtgaaaactgtagggtctgggcaaggggtgctcagtaaccatcttagcacctgtctccagagaactggcttggggttagaccagggacagaaagcaaagggaggactgccatagaaccagcatcacccctcaggctggcctagggcgctggctgccagcatgaagtcccagctagctaagaagggtaggtggggataaccccactagccagggaggtcactgtgttcctgacccagtgctggggagctgaaggaacctggaacccagaccacaacctggagccaggagtgtggaactggaagttggagcccagaacccggaagctggagccaagagcctgaagctcagaacctgcagtgtggaatatggaatcagagcctggagcccagaatttggagcccagtgtctagaaccagagccccaagctt

SEQ ID NO: 201381 - DNA, 1000 bp, Homo Sapiens
tgacttggatagagaccagatataacactagaacaaataatattggcgacttaaaaaaatagtaactgatgaaaaaaatctaattgcgctaaatattttaaagtacctaaaaataccaaggattttgtatcttttgtccttttctacttgaaatttcttaatcattttggtgatcatacaagataaatctttaaaattactgtgtgagtattcttaaaataaatataattctttggttaaactatacttctctaaattacatgcagtcttaataaaataattcctatggatgttaatgttcattctaaacaattttgctcaatccacatttttgtaaactgcattgctttgctttttttaaaagctactgtttatatagtcctatttcccagtttttcatatatactgtattgtgtctttaaaattagaaatgctgctgaaacataaaatatattaatccttgatgaaatgggacctctctttgagtataggactgttgcctgtacaactaagtctagtctttcagaacagaataggatgctgtatatctgttccctggaacttagatcctttggcctttgttctacctgactgagaaattacaatccctagtttttatacatgttttatttactttctgcatacgatttctggcttacttgactcttaagttcttgctgccagtcttgcctctgcagcagtccacattctctcaccaccaaagacataatgtcttgtggcttccccacttttatctctttgcctgctactcaacatttgttctgcaccagatgaaagtcattgttttaggtactttttaggggtacataaataattatttccttcaagaagccagcaatctgcataggaaaggttcacaaagcacttctgaaataatttaataagtctgtataatggattatcacatgagctttgtaatttatactattttgttggaattgtatagcaatatttataagttgttactatttgagaattc

SEQ ID NO: 201382 - DNA, 1000 bp, Homo Sapiens
ccccggcccacctccgctgccgccaaagcaacggcacggttccaccgacggaaaagtttctgcgccccgacagtcggagcatcataaaagacagacccgaccgccaaggccgccaccgcccaaattcggggatagaaccgcggcccatctctcacaaaatatgcgagacatgtacctcgatatgtgtacatcttcgggccacaggccacggccgccagcacctccgcggccgaaaaaatgtcaaacacacgcccctcaccacgttcatcattgaaagtctctccagtccatatgttgtcaggacgtactgtcgttctccgcttgctgcgaagcccgttcttccgagtcgtgtcgctgcgtccagcgtcgcgcccaagatgggaatttgggtctcttcacgcgtagcctcctccaccacggctgctgatcgccgtcactaaggaccgacacggaggatgacgaggagcttctccccgactccgcggtccgcgaccggctacgtagcgcgtgtccctgccagtctccgcagttacaccatacgtcgtgagcagcgtgcacctgctgccgccactgggcctcggcgtgctcaggccacccgccggagcccggtctgagctccgacgcaggatgcgcgtactcaacgtgcgccttccagtccatacagcaacaccataggtcgtgcgagtcgtcggctacccgccgccaggccagttcccgcatgggaaggctggacacgccaaccgagaggtcaccgagcccggacgccatttcttcttcctctccgtcgctgtcatcaagcagccaggtcacctcctccgctccgcggtccgccggtctcgacggaccgcgccgccgtcggcaacacggaaaacagcacgccagcccgagccgctaaggccgcatgcccctgccgcccaactgaacacgcataccccgctcaactgcgttttgccacccctgccagtgctctcgctcgagcaccaccccgcatctcccaacc

SEQ ID NO: 201383 - DNA, 1000 bp, Homo Sapiens
tctgtactatccaaaaattctgaccagtaggaggttccagcatcatcttagtaatacatagtgctaagaaaatagttactaatggaagaagaaaataataatatatttcattaatcactctcaaccttttcccaaaaaatgaatgaaaagttctatattaatgggttataaaactgttagaatctctgtcatcaataccaattcagagaaaaataaatctaaaagatagtgacattcatactggcatattcgatacagaaaaatattggactatttttatctccccttttcttaaattcatactctcctggccctgaataaaagcactttagatttttaaatgatactattaatctcactccagatttttgaaaataagagaactattctgttaatagcagctattgattgttcattttttcaaagacacttgaatctatggaagaaataagcctcattattttcacttgtatttgataatgtggatgcaattaaagttacataattcctgattatacatatctcaacaggctaattgaacaccagtgataaaaaattacttcctgatccaaaaacatcttttttgtcattgagattaaaacagtgaaggatttaagctaaattacatttgaattctttatggctaggtacccttttatgaatcaattttacattgtctgtaagggtaaaaaaaaaataaactttagtaacaatttagttcagcactccaaatccaaagtaattccaagaattaatatatacactaaaaccaacatacttttaaaagttttgtagaatgtttctcttgggtgagggttttctatttgagggtgggtggagagggaagaaggaagagggactgcctcactacaaactgataacagctgttaaaattacttttaccgatggcctttgcacttaacttgtttagaaataaaagaaaaaacatttctgtgagtcactacattttgtcctttctagcttggcaggtcaccttgtt

SEQ ID NO: 201384 - DNA, 1000 bp, Homo Sapiens
atcgcccccaaagaaaactctgtatccactaagcaggccctccttctctctccaccccactccatgcccagcccctgggatacaccaacctaattggtgtctatggatttatttgttctgactatttcctctaaatggaagcatacagtttgaccaacaatgtatgaggtttcccatttctcatcaacacttttctatttttaaaaaaattatagccatctgcttaatttttttttttttttttttttttttttttgagatggagtctcactttgtcgcccaggctggagtgcaatggcgtgatctcactcactgcaacctccgcctcctgggttcatgccattctcctgcctcagcctcccgagtagctgggactacaggcacctgccatcacgcccggctaatttattttttatttatttttttagtagagacggggtttcaccgtgttagccaggatggtctccatctcctgaccttgtgatccacccgcctcagcctcccaaagtgctctgattacaggcgtgagccaccgcgcccggccagccatctgcttaatttttatgtacattgcttatttttgtttcttgagataaaattcatgtattaataattttatttatttaaatgaaataaatgaagacgaacaccagctcatcttcaacttatcccaaatgtttaaatctcctcttaagtcattcagacctaccagatatctcatcattttcatttcttgaaagagtcatcattttttttttctttttcttttttttttgagacggagtctggctctgtcacccaggctggagtgcagtggcatgatctcggctcactgcagactctgcctcccaggttcaagcaattcttcctgcctcagcatcccaagtagctgggactacaggcatgcaccactatgcctggctaatttttgtatttttaatagagatggagttttgccacgttggccaggctagtttcaaactcctgacctcaagtgatc

SEQ ID NO: 201385 - DNA, 1000 bp, Homo Sapiens
gcagcacctgcccaggggccctggcatcactcaggggttaacgggaaggaaggggcctgacaagccttgtgggtcccccacagtcagtcccagccttctggggctgtctctgtcacccccacccccatcctgcttggaaggaagctccagggtgcaagcaggagagaggaggctgggggagccatgggaaggggtggtccaggacagctgggcatccaaccttgctccttgccagctcaggacaagcagacagtcttttgggatgctccactttcgttcctgctataaataaatgccccccgggcacactggcacactggccagcttttctactggaggggattagagaggggaaggagttcccattaaatacagcaattatttaaaaatccttcgaggcaacgtgcaggagacagtatgcaaaacactttaggagactccagcacccaaccacgatgacactgtcaagttgcagatatggtgggagaaagaacgccccatgtcagcactcacaaaacacaacacacgtggtttagagcggcagcaacagctattaacctgatatgtttgttatgagataatgagagcatgcagttctttgatttccgctaactaccttgggagcttaacccttcctctggaacggtctccgggctgtaatgtgttatctgattgtaggtcttcctggcaggctccccggtgtgctacaatttcagatgtttgtgtgatagactctgatctcagtgaattactgagatttcttcaaagagctgggggagcagctgagctgaagggaaaggaagcgtcaccactggtagatggagtatgggaacaaaccctctgtccgttgtaatcacctgccacagtgaacctgcagttttgtcttggtcagagaaggaggttgggcagggaaaggcaggtctgtagggccccatgcagtccttggtgtaaaaacacaggctctggtgcccctcctctattccacagcagataagaattc

SEQ ID NO: 201386 - DNA, 1000 bp, Homo Sapiens
gggagaagttgagatttctcggtgctgtatgttcccatttgcaagatcatctggaggaagtatacaggaccatctacaaggaaaagctaagacttgtcttacttagaaaacatggccttgtctttttcagctgttcttcatattatcatcatgtcagcagaattcttcacagggatcacagtaaatggatttcttatcattgttaactgtaatgaattgatcaaacatagaaagctaatgccagttcaaatcctcttaatgtgcatagggatgtctagatttggtctgcagatggtgttaatggtacaaacttttttctctgtgttctttccactcctttacgtcaaaataatttatggtgcagcaatgatgttcctttggatgttttttagctctatcagcctatggtttgccacttgcctttctgtattttactgcctcaagatttcaggcttcactcagtcctgttttctttggttgaaattcaggatcccaaagttaataccttggctgcttctgggaagcgttctggcctctgtgagcattgcatctgtgtgtatcgaggtagatttcgctaaaaatgtggaagaggatgccctcagaaacaccacactaaaaaagaggaaagcaaagataaagaaaattagtgaagtgcttcttgtcaacttggcattaatatttcctctagccatatttgtgatgtgcacttctatgttactcatctctctttacaagcacactcatcggatgcaacatggatctcatggctttagaaatgccaacacagaagcccatataaatgcattaaaaacagtgataacattcttttgcttctttatttcttattttgctgccttcatgacaaatatgacatttagtttaccttacagaagtcaccagttctttatgctgaaggacataatggcagcatatccctctggccactcggttataataatcttgagtaattctaagttccaacaatcatttagaagaattc

SEQ ID NO: 201387 - DNA, 1000 bp, Homo Sapiens
tatttattgagaccgagttttgctcttgttgcccaggctggagtgcaatggcacgatctcggcccactgcaacctctgcctcccaggctgaagcaattctcctgcctcagcctccctagtagctgggattacaggtgcgtgccaccacacccagctgatttttatatttttagtaaagacggggtttcaccatgttggccaggctagtcacgaactcctgacctcaggtgatccacccgcctcgacctcccaaagtgctgggattacaggcataagccaccatgcccgacctatttatttattttttgagacagagtcttgctctgtcgcccaggctggagtgaagtggcgcaatctcggttcactgcaacctctgcctcctgggttcaagtgattctcctgtctcagcctctcaagtagctgggattacaggcgcacgccaacatatccagctaatttttgtaatttagtagagacggggttttgccatgttgcccaggctggtctcgagctcctaacctcaggtgatccgcctgcctcagcctctcaaagtgctgggatttcaggcgtgagccaccgtgtctggccaatatcccgattttgaaaaaaaaaaaaaaattcagcaagaagaggaaaaaaaattaaattgcatttacaagctattgtctaaaaaatatatttacatactatatatctttaataatatatgcaaatgtatagacatgacttttctaaacacaaagtaaaggtgaaaagcataattggtaatggtgataaactattcctaagtaaagcggttggggtgtgttttggcagaggcaaataggactgacagtaaaacaaaatttttacagcctaattttataattaccaaatgagggtggtgatattatgggatgttactatcttctagtatttttcagtattttttaagtgcaaaatagtcatttatgaaaaatgttgcttttattcaagacagaacttggaatcaactgaattc

SEQ ID NO: 201388 - DNA, 1000 bp, Homo Sapiens
tcttgctgagaactcacacactgaattacattacttctaagaagcagtgcttttggttaagctataacaccaactaccactcatatttctctcttctatgttctttcattcaaatgttttcagcctttgtgactgggactgtaaaacactttttcaaaattaaggttgtgcttttagagaacacttgtttcacaacttattaccagacttgcttaaatcattaattacaatagatactcggctctattactttgatagcagtaataagttattaagaatatatataaaaatttataattattttaaggcaattattacatggccattccagtgtatcatacctttgtggaagatacctttggtctaagaaaagtttttgacattataaactgtaatagttcccatccgtagtttaggacttgcagtacattaaactataattcacctgggggggggggggggaagaagccctcaaatgaagaaaaactgtaaatgcccaattatagtaataaatgtatactgatataatcaacaatacaataaaggctcaagaactagtgaaaaagaacagtaaatttaagtgatacaagaaatcaaaattctaaaataattttaatgactataactgtatcaaataatctacttgtggtgttaagagtttttcacatgaactcaatgatgtattagaaaaaaaaaaacaaaaaaaccacacatactatgtacttaccttttgtcattaaaatcaggcaattctatttgagcaatttttatactgaaaattaaagttttccttatttcaaattacagttgcaggtcttcatttccagtatttcccaaaaaagtaaaataccatgaattcacttgctgtggacgaagaatttaagtcttaaactgtaaaatttttgtcttcatttgaacatgttattacaaaatttcttggtaacactgtttttcaaccgtgttttcaaattcttaaatgtttatgcaaactagtgaattc

SEQ ID NO: 201389 - DNA, 1000 bp, Homo Sapiens
cattccattccatctcattccattccattccattccattccatctcattccattccattcccttccactcaactccactacattccactctactccagtccactacactccattctattccattccatttcattccaatccattccattccattcttttatttcgtcaggaactcactccgtcacccaggctggagtgcagtggcacaatgtcagcccacatttcatttcaacgtgccattcgattccattccattccattccattccattccacaccactccacgaaactccactctactccactccactgcattcctttccattacatcccattccattcctcttcattccactatactccactacactccactctactccaccccactccaccccactccattccattccactctaatctgttccattcctttctttcgataggatctcacctgtcaaccaggatggagtgcagtggcacaatctcagctcacatttcatttaaccattctattccattctattccattccattcaactacactcctctccactccactccactccattccatttgaatccaatccactcaactcctttccatcccatcccattccattccactccactccattccacttcactccattccattccactccatcccatcccattccattccactccatttcactccactccaatccactgcattctacgccgttccattccacaccattccattctattcctttctgtcgacaagatctcactctgtcacccaggatggattgcagtgtcataatctcagctatcatttgatttcatgattcctttccattccattccattccattccattccattccattccattccatcccttcccattccactccattccactccactcctctccattacattccattccattccactccactccaatccactacattccactccactccactccattccatcccattgaattc

SEQ ID NO: 201390 - DNA, 1000 bp, Homo Sapiens
gctgagacagataaccctgtgcaatgagtcagagaatctaaaaccagatctgcatgtatatatagtcactcaatttacaataaaagtgctacagcaattgtctcaaaccatttgtacaaaaaaaaataaacactttagattggataattacaaacaacataaatttatttttttcatggttataaaggctgtgaattccaaggtcaacatgctggcaatctcagtgtctggtgaggactgttcctgcttccaagattgcaccctgtggctgtgttgtcacatgttggaggtggaaaggcaaaagtggcaagtctgtgtaaagccaccttattagacaggaatctcactcaccagtgctgagccctcatgacctaatcacctcccaaagggtctactttctaatactgttgccttgagattcagttttaacaggaactttggaggtgacgcagacattcaggccatagcagtgatgtagtagaaaaaattctaataactgaattatattggatcaattagatatccatattacatcaaaataaatcttaacctcttcattttacttctacactgatacaaatatcaactctaaattagaaactgaaatgtgaaaggcaaaagaagaaagcttttagaaaatagtataaaaagatatttcatgaatatgcatgtaggaaagatttcttgaagagaatatgcaaagcactaagcatgaaagaaaagactaataaattagtttgcattaacatatttttgtagctttaaagaaataaatgacaaaatgttatttgatacatacatataaaagaaataaactgcattaggagataggaatgtgcgattgtggataacctcaaatgagatataagttattgccccaacttgcattttgtgagttagagtcacaggagcttatcacattgctactaatcaccaaatgaatgactgagtttcgaataaataaacaacaaatagccatagatgaaactgcgtcatgatc

SEQ ID NO: 201391 - DNA, 1000 bp, Homo Sapiens
gacaacttggaagctctggccagcttagagtttttcctttccttattagggccatttcttatctcccttccatcaaacacgtccttccatgggccacccacgatgctatctcagcaccaaaatgctgcaggcactggctggacatgcagagctggcttggattctggagatgccctgatccctggggtctcttccaaatgctggtaggaggtttggaaaccaccacccaattcatcttaccgagcctcctaatttccaggcttctaagctgccctattcaatcatacgttgcattagagcttcattgttatgaattcttattcattcattacttgtctgtattaatgccatctgccttatatttttaaagttcttagaaaccaaaataccctcctggtgttgatttaaccatgtgcagtgtccacagggcacagttacaattatatgcataataaattattctgatgataattattcttcgaacccagtaatgatttaaggaccacctggtttgggattacctttcaagcttctttactactttaaaatgaccccaaaggcctaagctgtggtaaaccggagctgaggacaaaaattacagagacatcgcactccttcacaggaaccatggaggcacttggtgcacggccctgcacctgtgcccagaggaacctggaggcgctccgagcacagccccgcacctgtgctcggaggaaccgtggaggcgcacgcacgcgcacggccccacacctgtgcccggaggaaccatggaggcgcaagcacgcgcacggccccgcacctgtgcccggaggacccgtggaggcgcacgcacgcgcacggccccgcacccgtgcccggaggaaccctggaggagcacgcacgcgcacggccccgcacctgtgcccagagaccgggaagggagggcctccagccatgcaggctgcacgggtcgtcgtgctagacttcaccttttgtcctggctgaggtcagggaagtcgct

SEQ ID NO: 201392 - DNA, 1000 bp, Homo Sapiens
taagtcaaaacatcatgtctgtatatcatgaatgaaatataataatttgttaacattacaccatataaagcttgtgtgttgctactaagagcaaattaatattttatagtgtaattgtgatatatagtattgtatcagagttttgcaaactttgctcagaaatttatttcaatggaagaaatatttttggcattaaaatggaaggaacgaaaggaggaaagaaaagagtgtcaagaagtttgcaaactttattacatattataccctttatatagatggggaaatttactattggagacattaagtaacttacccaagaaaaagagcttgcatttgaactcagtatatctggactgcccaaaccaagagctttcatgagaaatcatctacacattaccttttaaaaatattttttatcactatagatagctttttgtgaattttcccaaaaaccattatgttaagaaattctaatctttctgctttacttgaactctcaagcatttgattttaggcatgtcacttcattttacattgaaatcgcccaaatgaatctctgactgtgacttgacacacacagaggaaggtctcattgaaacctcttttccctattttgggtagaagagtggtcatagatattacctgacaatctgtttcaactaagtttattttttcaaaaaaggaactcctcccccagattttagactgccttaaagtacaacaaacatctttactcttgactaactccaagtatttatttcttgctgcttgtgtgagagcaaatataaacatagttttatcagtgggcggctttcttggtctttggttgcaaacaatgatttctttttgattctcactttgtctctgactgttgaaaagaaaatggcaagatattggggctgacctttctgcctccaagtttttgctgtagtcacaaggaaaggtgacctttaaggcctctcccagccatgagcttgagtaaaccacacattcttggatc

SEQ ID NO: 201393 - DNA, 1000 bp, Homo Sapiens
caaatggataaacaaattatggcatacttatacaatggaatactatacagtgatcaaaattaacaaagaagactgacatgtttacaacaggataatacaacaaaggaaatgaacaaatttgagctacatagataataatactcacagatgtgaaaggaattatcaagatggaaaaatacatttagaatgatcttttacataaagtttggaaaaaaaatttttaatacattgtaatttgttacattggtgatgaaactctacagtgaaatatatgaatgatcatcataacaattgggataatcaggagggaggaaataaaagggaaataccaacaagaagacgtatattgggagtatctggattgctggcaaattctattttctgaccaaggtttggtaacatcaatgttaatgttataattttttcttactgtttttaggttttattactctctgtatgttatattccccaataaaaaaatgttaaaaaagcaaaaacataagtacatttctacgtataaattcagggtgatacagcatattctcatagataccattgtaattagagtttttgctgaataaaggagaatagagcattatggtactaagaaatacaagttaaaatttaaaactttttttattttgagacagggtcttgctctgttgtccaggctggagtgcacaagtgcaatcgcggctcaatgcaacctctgccacccgggctgaagtgattctctcagttcagcctccagagtagctaggacaacaggcgtgcaccaccacgccctgctaattttttctatttttggtagagatgggattttgccatgttgcccaagctggtcttgaactcctgtgctcaggcaatccaccgcctcagcctcctaaaatggtgggattacagttatgagccaccacacctggcccaaaagttttcttaaattaattaaaaaagaagataagcaagaactgtaaatccaccttcttaatgctaatatgaa

SEQ ID NO: 201394 - DNA, 1000 bp, Homo Sapiens
atttacaggactggcgctagtcagaagtaaacgtggtggattggcatccaagatggagtaacttttgtctccacactcttgctgaaggctggaaaatcagcatgtgagtctgtcttgtaaaaggtaattgggcatgcgctactcaaaaaatcatttggggcccggtgcggtggctcacgcctgtaatcccagcactttgggagtcccaggcaggtggatcacctgaggtcaggagttcaagaccagcctgggcaacatggtgaaaccccatctctacaaaagtacacaaattagccaggcctaattgcaggcacctgtaatcccagctactcgggaggctgaggtgggagagttgcttgaaccagggaggcagaggttgcagtgagccgagattgcgccattgcattccagcctgggtgacagagtgagactctgtctcaaaaaaaaaaggaaaaccatttggtaaaggagaaagtggagtcctagacgggggagttcagtgtcagcctgcattgaaatcatccggtttatgggacttggttgccttgtgtgctggcttggactccatggtatccaaagtgcacagtgcatgaaacatgaagaatttgcaacttaacatcagtttatatgttgctatccaagtttatctaccatgaggcttaactcatacaaaaacctttacttagggaatgtgcctacttgagaaagcaagttcacctactcatcatccagctattttccttgctagttatcatagataacatgaaaagattttttagagtttacccatgtccttcaaattatcccacacaaaactgcttagaatgtgttaaactatattgatgatttaaaaacaagcacaacaacataaagacagaatcttcctctatttcaggagaaatgatttactgtgaatttaaccttttaacatctttggtgttaattgtgggtgaaccaggatggctgcttcctgtctcgttctatgatcctcaccctgatc

SEQ ID NO: 201395 - DNA, 1000 bp, Homo Sapiens
tttcatcccatttccatcttgtttcagtgaaggacacatggaagggacctctgtgagctgacattacagaggggccttgtcataggtcctctctggcatgctcctccatccccagtcttaccatgaactaggagaccacgagctcacagaggcctacacgaggtacttatggctcagctcttcctgccatctatctctgtaaagattgtggtaaaatatccatggtacaagttgatactttcagattttgaagtgcacagtcccatggcatcaggtattccactgttgctgtcacctgtctgcagaactcaccttgtgaatacaactctatccttcttaatttaaaaacatttacaaagtggatacaagcttgttttgtatgacgtttaggtctggcaatttagttatgcagttttggggtagagtgggtggtcatgaaaacatgtatccaacttaaaacatttttattcttagtttagtctttggatttttggacccaaatcttttaggtgttttaaaattccaggttggaattcatctcttctctctccctctcggtcactcccttttcctcccttactccctcccttccttcttcccttcttccctctctctttctaccttcttgcctttcttccctattttgtttcctggttctgaagatgaaccatgggcactgtgcatgctaacctgctaggcaaccactcctcactgagctacatttctagttaatgcaggtttttttttttttgtttttgtttttgttttttttttgtcatctgtcaatatttatggagctggtgtcatgctcagttagatgctagaaatatataaatcaagagactttgatttatatattttgctaatcaatatcaatagaatgtaattaacggcagtggttatattttaaatatgacagtgatgaaaatgctctcttgtgattggtactggcacctgtttccatgatactgccaagaggaattgctttcagatgtgaatt

SEQ ID NO: 201396 - DNA, 1000 bp, Homo Sapiens
tgaggcatctgagcacctgattattgtgcctgtttcaggctttcttgtgggagttgcccattgtgttagtttcttggaggctgatataacaaattatcacaaagtattgaataaaaagaagataaacttattctctcagagttctgcaggccagaaataaaaaatcaaaatgttcatataatttcttctttctagaggctctgaagaagaaacttctgtgctttttccttctttctttctttcttttttttttttttagatggaatctcgctctgtctcccaggctggactgcagtagcgcgatctcggctcactgcaagctccgcctcccgggttcatgccattctcctgcctcagcctccccagtagctgggactacaggtgcccgccaccacacccggataatttttttgtatttttagtagagacggggtttcaccatgttagccaggatggtctcgatctcctgacctcatgatctgcccgcctcggcctcccaaagtgctgggattacaggcatgagccaccacgcccggccacttttgtgcctttttcttagactttggtccttgctggcatttcttggcattccttggtttacagacttctcattctaatctctgcctccatcttcacatggcatcctattcttctctgtgtgtcttcttcatgtcttataaagatgtgagcaatattggatttagatcctgcccgaagccagcatgaccacatcttaactaattatacctgcaaagatcctatttccaaataagttcatattcacagctacgggaggttaggatgtcaacatacctttttggagacacagtgcaaaccccaaccccagtcatggttacctccagctatggagaattcatcactgccacagtgaattatctaagctgcccaaccaccctctcttcaccaaatcctcctcctcatcgttaaagaaaattacccaggccagtatgatatctttctccttacctgctgatgtact

SEQ ID NO: 201397 - DNA, 1000 bp, Homo Sapiens
tgagttctctggttggaatctcaggaagccaaaattaaggcgttggcaggttacactcctttctggaggctctaggaacggatctacgtccagctcaatggcagaattcagttccacacaattgcagggctaaggcccccatttgcttgctggctgtcatctgggggtctttctcagtttctagaggcctgctgcatttcttggcttgtaggccccttcttccatcttcaaagccagcaacatcagatcttgtccttctcacactttggatctctctgacctccctttctacctctctctcataccttcctcttctggttttaagagctcatgtgatatattagatgccgtcagataatccagggtaacttcctctgtttaaggtcaattattggccaggtgtggtggttcatgcccgtaatcccagaactttgggaggccgagatgggaggatcacttgagcccaggagttcgaggccagcctgagcaatatagcaagaccctgtcgctacaaaaaaaaaaaaaacaaaaaaaaaaacaaacaaaagaccaggcacaatggctcacacctgtcccagtactttaggaggccaaggtgggtaggttgcttgagcccagaagttagagaccagcctgggtaacataatgagacctcatctctaaaagtttttttaatttaaaaaattataaaatataaggtcaactaattagtaaacttcattccattccacaaagtcccttcacaacagtaactagattattttcaattgaatagctagaggacaggaatcttggtgggggacatcttaagagttctgcctaaaaacttttcctaaaatcaaggtgggccaaagagatgtgacacgtggcattcaaggtatgtattacacccattctatcgattagaatgtgtgttcagccacaaataagaaggaaaacagctaaacatggcttaaagtgcttctcaaactttagtgagcatgtcagtcccttgaggatc

SEQ ID NO: 201398 - DNA, 1000 bp, Homo Sapiens
gtgactttcagggtgaaagtcctgaggatgtacaacctctatgctcaacgccaatgaagctgaagagtccagactaacattcttcctggtaatggaaaataagcatcaataggaacacgtggaggagaccaccaaatccacattctcctcttcctgcgaggcacacagtcagattacatttcccaccccacttgctgcaggtctgaccagagactcaggtcacggtgagaaaatgtgagcagaagggatgggcaccacccccagaccaggccagaaagaaaatctatgcaccatcctcatctctttctttccccatctacaggttgaatggggaagggcagtggagggcagactggcagggtcaaaggagccagagactctgaatggctgggcagagcagagcccctgctcaccctccccaccgcccactttgacacaaatgaaaaacaaacttgtattgtatgaagccagcaaaatgttggggctgtttgttacagcagctagctaacagtcagaaaggaaatcatgactgttacataaatacacctaagtttacctagtgtaaccaattaagttaaatcactcccctgggtgtggtggctcacatctctaatccctgcactttggtcaagagtttgagaccagggcaacataacaagaccctctcccaatctccttaaaaaagttttttttaattagctagacctgtagtcccagctactcagaaggccagggttggaggatcacttgagcctgggagttcaaggctgcagtgagctatgatcgcatcactgcactctggtctggccagtagaccaagagcctgtctataaaaataaataaataaaataaaatttaaaactgaaacaaatcactcaggatggcataaaaatcttgcatcacactcctcaggagatgcagcaacaaatcataggtctaaacagcaactgcatctagataaagactcaaggtaacatttctgatgagagatgtagagatc

SEQ ID NO: 201399 - DNA, 1000 bp, Homo Sapiens
tcatgaggtcaggagttcgagacctgcctgaccaacatgataaagccccgtctctattaaaaatacaaaaattagtggcccatgcctataatcccagctactcaggaggctgaggcaggagaatcacttaaattggggaggcagaggttgcagttagctgagatcgcaccactgcactccaaccttggcaacagatggagactccatctcaaaaaaaaaaaaaaaaaaaacctcactgggcagggtggcttgtgcctgtaatcccagcactttgggaggccaaagctggcagatcacttgaggccaggagctcaagaccagcctgggcaacatggcaaaaccccatctctacaaaaaaaaaatacacaaaagagttaatcaagtgtggtggcataagcatgtagtccctgtagtcccagctacttgggaggctgaggtgggaggattgcttgagcctgggaggttgagtgtgcagtgagctgtgtttgtgctgttacactcagcctgggcaacacagtgagaccctgtctcaaaagaaaagaaaggaaggaagggaaagaagggaaaggaaggggaaggaaggaagggagggagggagtgagggaagaaagagagaaacaaagagagagagacaacgaaagagaaaaagaaagacaggaaggaaggaagggagaagggggaaagagaggagaggagaggagaaaagaaagagagagagagagaaagagaaatctcatagatggaacatgttcttggctttgtaattggtcactgagccaagatcatcagaatgtggtgaaagttgagtgtcagaaacaaaggtaaaatcagtctcctctaagaaaaattcaggaagtcttataatctaataatcactaattgattaaactggaggagaattagatgcctaggaaggttaaccagtgagtgcttttttttttttttttttttgcgacagagtctcactctgtcacccagcctggagtacagtggtgggatc

SEQ ID NO: 201400 - DNA, 1000 bp, Homo Sapiens
gccaccatgctggtcagctctgatgtggccaaggctggtgccagggtgaggcgagggtgacctggactttggaatccctcagccctgggcaggtctcttcatctccccaggtggccacttaatcatctgaaaaatagggctagccccggagacggtggggaagttgcaaggaaggaatcatggctgcgcccccgctgggggctggcccaaaattagtgctccagagcactcatagtccaccctgaataatgatgctaactgtaagcacttactgtgcacggggccaagcccctgacctgcagtggcacaggtaagtgtcacaaaaagtggacacacgtgctgttggacgccagctcctctctgggtcaccatgagagattcctgaacctcagctcccttgtcagcgcccttccaggagggagggaggtagcagcactacccccatctaacagaggaggaaactgaggcacgagagatgaagacactgcccacgtcacgctgctggtcagtgacagagtgggaccgggtgcagttgtccagcagtgcacctagatgggggagaggagcttggtgaatattaaaagaggttttgtctgggaacagagaggcggctgctgggtgaccccagcctcccatccaaaggcgggctgtggggtgactggctggacctcctccagaccctcccatcacacgtgtgctcagccggctcagccagcagcaggcgcccacccaccacgggccccttctctgagccagcgtgcacagcttcctggaagggacacggagcgcacagatgtgcacagcaggtggcctgttctgctctccctccagccagacagggccgggacccaggactggcaggaagacctggccagccatggctgtgaacactgaggaaacacttcccggagcagccagggccctgggagctggagtcgatccccacatctgggctcctcctggagccaaccagggctgtctggaagcctgtagggagatc

SEQ ID NO: 201401 - DNA, 1000 bp, Homo Sapiens
tctgcaggaaccaaacatgaggcaaaaactatctgacaaccatgatggctaaggtaacatttttttcccttcaaactgtattagttatctatatgtagcttgaccctgttgctgtaccttcactggctgctcataggatgtttgctcaagtgttctttttgcactctcaaaaacgcaattggttgagctttacaactcaccctgtgcctgagcccattattattggaaaatactcctgttcatcgacaagccatgcctgccagtagattaggtaatttgaccaaagtcctacctcactatctgttactgcagaccctaatatcagtgcctgccagtagactaggtaatgtgtccaaagccctaccccactatctgttactgcagaccctaatataagtgcctgccagtagactaggtaatgtgtccaaagacctaccccactatgttactgcagaccctaatatcagttgcccttaccactggacaaaataccagtacaagtttcctctccccctgtgcatgcctcctatagctaccacagataatccccacctacccttcctttcctgcctcatccttctgctcagcccccacttgggcagacacatactgctcaacctcatgccatgcctgaaaggacacaaagtaagcttccatagatctaccacactatgtgctatcccagatgtaattttcacagttgtccctagcactttaccaaacagcaaaggcagcttaacatctctcatgtctatgtctccttgtgggttgctaagatcatctctttctgcctgcctctttttccaccttccaacattagtaagcattccctcttgaacataccctccaaacaggaccgttaaagaggcaacccttagtcaacactgtgaaaatccagttatcagcgggcatggtggcgcacacatttaatcccagcacttgggaggcagaggcaggcgtattttgagttcaaggccaacctagtctacagagtgaattc

SEQ ID NO: 201402 - DNA, 1000 bp, Homo Sapiens
gggcaggggcggcttctccaggtccagggcccccttctcaggcccaggctggcgcaggggcagcttctccaggcccagaggccccctgggctcctgtgtccctgagggggaccccggcgtcccccttggctcagttgctgggatgacaccaccgaaggctggcagcctcccggaccaagggggttctgcttcaggagggtcagcgtgggaggacgtcctgggctcaggtatctccctggccacctgggcctctccagggacaaaggccacactgccatccgcttctgcaggactttgggagagggcgtgtgtgggaggagctggggtgtctgtcctgcaggaaggctccggttccctgttcatattggctgggggctgccaagagctgctcaacgctggggccctggggccctgggccgcccgagtctcagtcaggggaggcagcagagtggccagcagccctgcggggccaggggtccctgctggcctgggaaggctcaccacagctggtacaggaacagggagaagcccctgggctgtgagcacccaggtgacaggcagggggacactggtcgccacatgtggccctcctatgtgcgtcaggctgaggggctggacgggcagtggggtggggctgggggctgcggggagaaagggtggcgcctcaggcaggccctgcttccgggatgcagcgggggcctgagactgtccgagaccactctcggggcagctcacagagatctggccggggcccagggcaggggcttgggaagcagcaggggctgtgccctcggcctctgagaagacaggagcgaggggcagggcttgcatggtggagagtctcttgtccttggctgaagtcccagcctcctgccaggagccagaagtgccaggtttggctgctgcgggggccccaggcccagagagcggtacatttaagacggtgggacccggggctgggcggccgtgtggggtgtgtggtagagggggctggaggatc

SEQ ID NO: 201403 - DNA, 1000 bp, Homo Sapiens
cttccccatcattcatccttctctctccctagactgaatatcctgagctccacgggatgactcagaacaaggggctctctctctctttaaaaaaaaaaaaaaaaaaagatgtgttatggaaatgttcaaatgtaatcaaatgcagagtcagtgatgtgaggtgcctccgtattcccattgcccagttccaggacgtgcccaatctcatcacctccacgtccccacccatccccgctccaaaccccacactggattattttaaagccaatccaagacacgatgtcctttcatctgaaaatacttcagcatgtatttctgacagatgaggagggtccttcttttttgttgaggctccaagtttgttgggggcagaataactgaatttgtggtacagttttaatgtgcacatttaacaagccaatgtttttaacacacacccacatccatacacacacggcatagtgattgtatgtctaccctcatttggagagaccattgaggaatctctatttgaggcccttcttaaacgtgaagccttggccagcccttccctcccgcagcaccttccattgaccttccatccctgtggatggccctgtttcctgaatcctccaaccactttcacacctttgtgccttgtgtcctttgtggccacttctgcctggaatgtcctttcctctgtttggcaaactcctgcatgaccagcaaagcccagtgtaaatttcccctatgcactgtccatgatacctcttccaacaacctcctgtcctccacaggtcatcactcactcttctttgcttctatagcattttttcttcgtaattctcctgaatgtttatatttctgagttgaaatcatttgcttacagatctgctgcccccaccagcctgggaacgcttcgagggtagggtctgggtcctttctgtgtcccccagagaggcaatctggtccccaagcatggattctggcttcagccttgcctggacaagctattgaattc

SEQ ID NO: 201404 - DNA, 1000 bp, Homo Sapiens
acttctttttttttcttttttagacagggtttctctgtatagcccaggctgtcctggaactcactttgtagaccaggctggcctcaaactcagaaatccgcctgcatctgcctcccaagtgctgagattaaaggcgtgcaccatgcccggcgataactctcttaagatattaaacagccagttaacccctgccaagaagctctggctataaccatagcctgagctataaccagtcctgaagggaatggcagctcaaacaactgtggctatttcctatcaccaagatggctttaaaacacacaccacattgtctctagctgcatatgtatcaaaagatggcctagtcggccatcactggaaagagaggcccattggacttgcaaactttatatgccctagtacaggggaacgccagggccaaaaagggggagtgggtgggtaggggagtgggggggtgggtatgggggacttttgggatagcattggaaatgtaaatgaggaaaatacctaataaaaaacacacacacacagatcctggtacactgattggctgcagtgattggtccctcatccacgaatatataagcagcacaaattggactcagtaggttaaaaaaagcattaagagttgcatagaggcctggtgtagttatagagagaagtggtggagattgtgtgcaaaccacattgtgtgtgtgtgtatgaagtccctaaaattaataaatattatatttaaaaataatacacccacatacacatactaagagtaaccaatgctagagagactatgcagaaactggaacctcacctattacactggtagaaatgtaaaacggcccagtgctttgaaaatgcctgacagttaccctataggttaaacacagttaatctttgaccacaatgacttcactaggaggtaaatctccaagggaaatacaagcaaatacgaacagctatgcatacacagtcgccgcatcacagctcatacaaaactctgatc

SEQ ID NO: 201405 - DNA, 1000 bp, Homo Sapiens
ctggagtggtgcaatcatggctcactgcagcctcgacctctcaggttcagtcgatcctcctgggactacaggcgcatgccaccatgccgggctcatttttatattttttgtagagacggggtttcgtcttcttgcctagggtggtcttgaactcctgggctcaaaagatcctcctgcctcagcctcccaaagtgctgagattataagcataagctactgtgcccagcccagaatgtctttatttttaaaagacacgtgctgacatgtttagggatgaaatgtcctgagatctataacttactttcaaatggtcccagaaaaaatacaaagcaaaagaaacccaaaagccaacaattgccaagttcagcaggtggatatataggacagtattatgccattcttttaatttttctgtagagactcaaaataaacacacacaaatatttgtgtacacattcacacaatcacacacacactctcacacaatcaccccatcatctgttcttaatccttcagatcatgtcacccaagcccccagtggctcccgtcttaccatgaaaacccaggccaggcagtggccttacgagccccccacacctgaggcgctgcctgctgtctgaccccgtattattattaactttttaaaatttttctgagacagagtcttgctctatcgcccagactggagtgcaatggcacaatttcggctcactgcaacctccgcctcctgggttcaagtgattctcttgcctcagcctcctgactagctggaattacaggcacatgccaccacactctgctgatttttgtatttttagtagagacagggtttcaccgtgttggccaggctggtcttgaactcctgacctcaagtgatccgcctgcctcggcctcccaaagtgctgggattacaggcgtgagccaccgcgcctggtgcccatcttattttccagctcctcactcactcttacctctgcccacactgctctcctcccagatc

SEQ ID NO: 201406 - DNA, 1000 bp, Homo Sapiens
taaattccgattttacttaccagctaacttgcaatgttaactttagccaattactttaagcctcagttttcccatctataaaatgagcatataatgtcttcttcataggattattgtgaagatcaaaagagaaatcacatgtaaagcacttagtgcagtgcctgacacttagttgactttgaagaatgctagtcattaatattatcatttgttttaattacctgttgtgtaattattctagtttctgtaggtcaggaatctgggggtggtttagctgggtgttctggctctggttcactcacaaggctgcaatcaaggtatcagctgagactagtcatatcatgggtaacttccaagctcagtcaagaggtattggcaagactcagttccttttgggctgctggactgagggtctcatttccttgccttgtgggcctctccacatggcagctcacaccttggaagcctgcttcatcaaagcgaggagttaagagcatgaaaacaaggtagaaattacagctttcataactgcatcttggatgtggctacacatcacacttggtatatctgactccttagaaataagtcactgagcccagcctacaaacaatgggaagggattacacgagggagtgaacccaagagggtaggaatcatcaggaaccattctagaaatgcactgccacatcattgtccaagttttacaggaaaatactaaattttgagaactatggtaggtgattttgtagactttcataaatccaaacaaattgcaaagtgtccagttggagctaatgggtcattttatctgaattattatctatgttaatatggtgatgagtagttcacagagcaactcccagtaagcaaaagagtgggtgctgtagaataggggtccccaaaccccaggccatggactggtactggtcactcacaagatgaccactcacattactgcctgagctccacctcctatcagatcagcagtggcattgaattc

SEQ ID NO: 201407 - DNA, 1000 bp, Homo Sapiens
cactagaattcttcactttattaattgactatgggctgagccagccttcttgcacaaatgtatcttgggttcccttgaaagtagagactgagacaagtgcttctgtgcagttaagcagtttatgctttggggacaagattccagggagcagcagtaaaggacaggaggagaacagggaaggagggaggctgaatacaaagatgcattttcaggttgactagcaccaaaggcagggatgctccatccagcaaggatttcagaagaagcttatgaaatgcatctcaacaccatctgtactttgagtaaaagggggaagcatttctctgctggcatccatttgtaaaggcagcccacaggtgtcagctccacatgtttccaggctgcacatgcatgagtcccaaataagttctgtcccgtgggtagaaagcaagagagaatacattgcagggctgaagtaggggttgccagagcccatcagaactggtcactgcaacagtggctggagtaagtggtgggctgagaggattgggggttgagtgtggtgcacaagaggtgtcttaatctatatacaatttgcacagggcattttgggctagaaggtgtggatggacctgggtaaaaagctccagtgttggatagaaactcaagggcatgttgcataacaaaacaagcagcatcaaacttgggggagaaggaaggcagcacgtcttctggaacactgttggcttctccactctcctcaaacatggttctgtgctggattactgattaactgtcttcccaggggctctagaatctgaattgcagttctgtctacccattatcctgtagcaggaatgaatagtttctgcattttctctcttattctccatgccactgattccagtcatttgtggccttctgagggcaaaaaccataattacctgaatgcttagagctcttcatgtggtgaggcaatagcccaagtcacttccagggttgagccaagcatgtggaattc

SEQ ID NO: 201408 - DNA, 1000 bp, Homo Sapiens
cactttaattcttttggtgtttaagatttctgagccagcatttaaagctggctggctgtggcaagaatctacagaaagataagtaatcaggactcaggccaggggcaatctgtaaaagtagatggggctatttgctattgactgtaattggaatcgtgtttgcttttttgaggaccataatgggagagggctagcagccaaaacagtatataaggttaaatgtacacttttttttttttaaaaagggtctatcctacaataggacggctggtggattctgtctagcacatccacagtgactgcaagccatgtcacctaatgtcaagctatgttctgattctctgatacaggagtttaagacagaattcttgttctcactttttacagaacccagaaccactagcctgcagatagcacagcacacaataggctaggcatcccccatccattacaaattaggaaaatgttctacaggcttgtttgcaatcccatcttaaggaaacagcttcttaactcagtgtcttagggttttactgctgtgaacagacaccatgaccaaggcaactcttataaggacaacatttaactggggctgccttataggtccagagaatcagtccattatcatcaaggtgggagcatggcactgtccaggcatgatgcagaagctgagagttctacatcttgttctgaaggcaaacagaagactagcttccaggcagctaggatgagggactctaagcccacatccatcatgacacacttcctctaacaaggccacacctcctagtagtgccattccctgagacaagcgtattcaaaccaccacactgcggtcccctcctctcagatgactttagcttgtgtcaagtggatattaaactatccaactcaattgcaaaggacccagaacccctgttttgagcaagcagctttaaatgatttcaacaatattctaaatgtcagcaccacaccaatatttactgtacccctttggatc

SEQ ID NO: 201409 - DNA, 1000 bp, Homo Sapiens
atcttgccaaaaactggtaagtgataacctgcctaccggtcaaaggatcacattctagatagtgctagtgcacagtctagcactgtgcaagactgttagcagcttgcaggagtcaaaacaccctgttgttcatgcctagcgaacaattaggtcctgtgttcaagctgtgtatccaacaggtgtgtaccgggcgctgcttgcaaaataggaagaccaggagatgatggttctgatctccgctctgattttaaaaacaaaatcagaaacagaaacaaaacccatttgtgatcttggatagctcatttgttgtctctgccttcagttttctcattttcttataattaagtaatgcgtgcctcccactctcaaaagggttagcaggaagacgaaacaagataaactgtgcggaagcattttgaaaaccataaaaacattatgcagctgtaactgtgttatgattcacatatttaaaggttctcattctcattgttttcagaacggaatggcttaagtgagagctggttaccacatgcatccatttaacgttagaaatgatttagtatttactgagcacctattatgttaaaagcactggcttagatactatggtgaatataaaaatggattgcacatggactctggcctcatgagtctccagccttaggaagagggatgacatatacatcaataaattataacataaaataagaagtgaaaattgccagtcaccagctgcctggcaggtgctcacatggatatgggaagaaaggggcttaagccggtttttattttccctttctgacctttgtgcgtatctgtatatgttatttccaaaaactccctcccaatagtccgcgtggcaaataagaaattaagagattgacaaagtcagaagcatgcgtttggataatgtcccaacacctgttagcaagggtctttgggccaagtccttctttggtttcctcctctgcaaaatcgggataataatacgacccacctc

SEQ ID NO: 201410 - DNA, 1000 bp, Homo Sapiens
aggcacatgcttagaaggcaatttgataaacatgtgcatcaatgtaaaaaaaaaaaaaaccatagcagtagactccactcaaggcctatagcctctcctgacacaggatcttaccaacttacagtaccgtaccagggttctcccctgggaagctggctttacactcaaccagaaatcagtcagatgtacccacagctgtacccctgtcataccagcaggacaatcctggcctgtcatgtgctgacaacaagaccatttgccacaattctcccccagaatcttgcacagcccttttctgacactctaaatgttaaccagtagggaaggagttttcacccttgcctgatctcctcatgtcttatcaaaaataaaaataagaaagctcaacataacaagcaagcaacagcagtgtcaatagtctgtattgtgtggagacacagagagctcctgactaatggagatgcctctgtcctcacactgggataatcacccaacaaccatgtgactagtgggagtgtcctttcccacccacatgagcactttgattcaattttgtttatttctctctcgttttatttatctaaaaattgttctcatgcaatctattttaatcatgctttttctctcctctagctcctcccagatccacctgccccaatgcccaaccaaccttcatgggtttttccccctgtgtgtgtgtgtgtgtgtgggggggttatcttgtttagttttgatatttttttgtcttattgtttacttgttttgattttttgttttgttttggagaaagagggagggagggagggggaggggaaggggagagggagagggattgttcaaattgtctaaactgttgtgcttcccattcctccaggtgcttttacaaatctgtaatacactccagtgcatcattataaaactacatctcttatcgtgggtcagtcaaatctctgaagggacacttgttccttctaagcaagctccatctggcattggaatt

SEQ ID NO: 201411 - DNA, 1000 bp, Homo Sapiens
gaagaaaatacgaatcaagtgtggaatttagttaataataatgtatctggctcattaattgtgacaaatgtactctacttacataagatgttaataacaggaaacagtggatgtgaggcctatggaaactctctctactatgcttgcaatttttctgtaaatcgaaaattgctttgaaattaaatttttattttttattttatacttttatatttttatttttttttaaaggccagatcataccattaagtaagtgacattccagattgattactgtctgtattggttggggaggcagtatagaaaatggaaaacaaagctatttacggttctcaacatgagctgtgtttccataacagatgcattttatagatggattgttattctaataataagtactatattttcttgcctatattaggtcattatatcctctaaagagtataagttagtacaactctccataggcagaggctcttccttgagaagaaccaatatgagttcatgaagagtcttcaactcagtttcccaagaacatcctagaggagaattaacgaaaggtgtggccctcttagtggccgtcaaaggccttccagttgcatttctaacccccagcagaaccacagcactgccccaggtagtcaagcacggtggtttctgataaaggtctgcccgtgacttatctgtggttttcttaactttcaatttttatttttttaattttttatttatttatttatttattttttgagacaaagtctccctctgtcacccagcctggagtacagtggcataatcacagttcacagcagcctccaactcctgggctcaagggatcctcccacctcagcctcccaagtatctggggccacaggtgtacgccaccacacccagtgatatatctatgttttaaaggtcatggattatcaccctcaagcaataaaatggttcagatgaaagcatgccatgaagtaggtgcgtgaggtgatggccagaattc

SEQ ID NO: 201412 - DNA, 1000 bp, Homo Sapiens
tttaagatttattttatttctatgagtacactgtagctgtcttcagacacaccagaagacacaccattacagatggttgtgagccaccatatggttgctgggaattgaactcaggacctctggaagagcagtcagtgctcttaaccgctgggccatctctccagccccagattactttattcttaagttaaattccgcggtcactaacttataatacgaaagaaatcccaacccagcatcctggcaacatggttaaaacctcaagggccactcacttcatggttgatgattccagacatgcactgattcagccccagcttgttgaactcattgagtccacaggccagcactttgcctgactgagtgagcagaaaggtcccatcacagccacattgaactgcaacaatgattaaggcctttggaacatccacctgcaaggaatcccaagtagataattcatattagaaaataagcctcaagttccgccatcctgctgcccagcagcctggagctcatgcttcctaatgcagagctcaagtcttctaagacacaggctgcagatgaatggacggatgctcccggttagtctctttgaggaatggctcctacacctttggagaaggcttctgtagagggaagactatgcagacaagcagggaagggggtagctctgatctctagctggctttgccttctgagaggaagggctccttgacagctttagaagaaagacagcagctggaggatctcgatcttctagaaagtgtagctaggacttccatatccttctacagctcacaggacagggttgtagaatgaaagatgtcagatagggccatggatatgaataaaacctcaagccttagtttcttttcacaagtagaatggttgaatctaaagacaatctttatatgcaccatttaatcttagaatagaaataaaatttggcaaccatcagtcgtatagtgctgtagttagtggtagctgactttccaggatc

SEQ ID NO: 201413 - DNA, 1000 bp, Homo Sapiens
taactgggcacctactaagaatcaggccctgtggtaagcccttgggtgaaggatgaatcacaaatgtccctgctcctaagaaggtacacactggtgattcagccacttctctcactgtccatccctactaccatggtctgagctacaggtaactcctgcctggattactgcaatagtctcctactttatttctcttctcctcttgtctctgtagtctgttctccatatagcagctagaggaatcctcttaaaatataaatctagttcacccagctcatgtttgttccctattcccaaccctccaaagacttcctagccctctcagtataaaatcccaagtcctacaaagccctacacgatgtggctctgggctacctctcctatttcatttcatatcattcttcccatcacttgctgctttccagccaccttgccctccttgctgttcttgaaacaggtgaagtatgttcccatctcaaagccttgaacttgctattccttttgcctgaaatgttcttcccccagatactcatgactggtatagtttagttcattcaggcctctgttcaaaattcacctcttcagagaggccttccctgaccactcaacctaacaatctaaaatagcatctcatcactctctccttttcctgcttcaattttattcatagcatttatcacctctttaacagtttcatttgtttctggtctgtatcccctagaataacactacctccatgagggcagtgattgttggctcattcactcacatccactagctctagtacataagagattctcaggaggcaagagagaaggaaagtctcaaggaaacagacaacgactgtaataccatgtgataactgctctcacaagatacgcacaagatgccaaggattacagacaaagcatttctatcattccagcaagtcattaaatgctgctcaccctgtttcttcatctaggatgtgaagtggttagagaaaattatcactgaattc

SEQ ID NO: 201414 - DNA, 1000 bp, Homo Sapiens
atcagctgggcatggtggcgggtgcctgtaatcctagctacttgggaggctgaggcaggagaattgcttgaacctgggaagtgaaggttgcagtgagccacgatcgcaccactgcactccagcttgggtaacagagagaggctatctcaaaaaaaaaaaaagaagaaattcaattaaaaaaagtaataaatttaacaaaaatacaagagttgtacaataaaaactataaatcttggctggcggcgtgatggctcacgcctgtaatcctagcactttgggaggccgaggtgggcggatcatgaggtcaggagatcgagaccatcctggctaacacggtgaaaccccgtctctactaaaaatacaaaaaaattagccgggcgtagtggcaggcgcctgtagtcccagctactcgggaggctgaggcaggagaatggcatgaacctgggaggcggagcttgcagtgagccgagatcacgccgctgcactccagcctgggcaatagagtgagactctgcctcaaaaaaacaaacaaacaagcaaacaaacaaactataaatcattcctttaaaaatttaaagatctaaataaatggagtggcatcccatgttcatggtttggaaaactcaatgttagcaaaatggcagtactcccctaattgacctaaagagtcaatgcaatctttatcgaaacctcaactggcttgtttttttttttttgcagaatttgacaagttgatcctaaaagtcatgtggaaatgaaaaggatgcagaataacctagcaatgttgaaaaagtaaaataaagttggaggacttccagttaccaatttcaaaatttattcctgattacaaagctataggaataaagacagtgtggtactggcataaggatggacgtatagctcaatgaagcaaaattgaaagtccagaaataactttcatatttatggtcaagtgatttttgacaaaagtggcaaaaccattcaatgtgaaaaggagatc

SEQ ID NO: 201415 - DNA, 1000 bp, Homo Sapiens
catttatagcatcccagcttgaaaaacgaagcaacagagacgtgtagaaagttaaaaggtttctactccaattgtaatttctccaattccatcgtggtatgtgcattcttctggatttttttcagtgtgcatacacatgtgtacatacagacacatacacatacactcgtacgttttttatattgatgggaccattactcacatctttaatttggaacttattctctgctctctctccctgtgtctgatagaatgctggcaatgctttgtgatgctttaggagacacatttgtcagatgtgaagacttaggcttaggaattgatgggtggtgactgaggctggtcactctgtggtctggtgcactttcccactgccccactctgggtaggggtggaagggcccctgcagagaagcaccagcttctgttttcccatgagtgactcccctccctccaatactcactaggggactttccataagccaggctgtgtgatttggcccctgagatattcctggttggatgagaaatcttggggagactccagccttctcaggcacaaaactcccagagtagagagctccctctggactatctctcctgcccttggcctcaatttcctgttctgctacctggtccaggaatcaggacctcagtgatgaaacttggcttctcccaggctgcagagtcctgctggggtgtgagtccttgctcatggctcatgaaagttcaacatatgcttatggcttcaatattgggccagatttcacttcccaccttggccttcccaaggatgaattgtgtggtcccatgtgttggtgatctcagcatgaactgcaaaggaagaagaactcatgtgcatttttgcgcagctgggtgccgcatcccatggctgcccttggagggtctccctcttcattcatgtctctgctaaaaggtcacctcctcctggaagccctccctgattctctgatttattggattgtctgatttattggatc

SEQ ID NO: 201416 - DNA, 1000 bp, Homo Sapiens
ttgcagtgagctgagatcacaccactgcactccagcctgggtgatagattgagaccctgtctcaaaaaaaaaaaaaaagaaaggaaaagaaaagaaagaaagaaaagagaagtgggtgtgaccacaaatgatggtgagggaaggtgtacacctgtgagtgccaggctgaggagtgcagactccacccctgggtgctgtggagtcatggaagtttccaagcaagggaagatcagggtcaggtttgttatttttcaggaagattcccctggctgccttgtggagggtgtatcagaagggggacactgaggcagggagccaagggggagcaaaggacaggaccaggatgggtagagtagggaggaggtgggtgggagagacactcgggaggcctagtggacaggccatggggttggtgggctgggtaggggagggagaggggtatccatggtgaggtacagggagggacttggggacagtgaggcgacccttgagagggaggcttcaggcccaagtcgggggttcaggagagaggctgggcctgaggagagttgtggacgtgatccgtaccctctgcatctgcccaaggctttgctgcaatctcagctactcccttccccaccctcactctgtctctcctctgagctatgtttgaatccctgtgtctcctgggcttctcaggaagtccctggactggtcaggcaagttcccaggtgtcccctccaggctctgagcactagagccagagctcccaccagtcagaaaggcagagcaaacacctctcaaaggtaggaggacagcgtaacatcatcacttcctcaagttctgtgatgacgggaggcagccacaggctaactgggcaggaaggtgggcctagatctcatttcccgagggggaaaaaaaagcccaaacaggatgttttaggtgaaatctcccaattttggctgggtgcggtggcttctgcctgtaatccagcactttgggaggctgaggcaggtggatc

SEQ ID NO: 201417 - DNA, 1000 bp, Homo Sapiens
aggaaagagctaggagaacccaggcgtcaggctgcccagtccgagccccgtggtgacaagggcccctttgtgcccccctcccccgggggtagggaggagctgggccctggaggcaggcggcccctggcacccagggggaggggaggggctggcaagtgggggcctagaccctggaaggcaggggactgcgagctgggctggcggagcagaggtgcagaagcaactgagtccaagtgagtatggtggcagggaggccagggcaaggggagcagggcaccggggcagtggcacccagacgtgagcagggtcaggtgctctgggtgagggagcatcgctgtgcaccgctactgatttaggatgcaggagtgtgtggcttggggctgctttggggatgggctcggaccatcgctggggcagcgatggggctctgggaagaaaccacagagagaaaaaacaaagggccccccctcagcaccccttgtgggtgaagattttgcaggagaggtttccttggggttcccgagtgcggggcagatggggtggaggaggtctgcatctggccgaagaatggaaggatgtccaggtgatcagacacctgcaggctgcaatctgggaggtggatgggggcagtgggctgttagtgactgcattctagcacctgggcacatagcaggtgtgtgtgtgtgtgtgtgtgcgtgtgcgtgcacacacatggctgcccatgcaccttcctctgtaagcctcagtcgacttttcttcattaatccccactaaggacactttttatttttcgttacttttttttttttaagagacgggactctcactatattgcccaggctggtctcaaacttctgggcacaagagattctcccaacttggccttccaaagtgctgggtttacaggcgtgagccactgcgcccggccccaactacagaaactttttagatgcatttgtcctcatcccatccttcccttggcattttaatccaacagatc

SEQ ID NO: 201418 - DNA, 1000 bp, Homo Sapiens
gactcccagtcttgcatctccatctcttaatattaacaacttttactctcactgcaatttggttacccctggggagggattcttggggagaaaatgaagaggctggaatagtgtgccttggtggttgggtttgggaggggctcaaggaagccagggacaagcaccagctctgtccccatctctggctaggccaagtggcacctcttgaccttggagcacaatgcctgtctcgacatgtttgagcacatgaacctcatgaccttggatagtctgcagaaatgtgtcttcagctttgacagccaatgtcaggagtgagtctttgcccagtggctgggaatttgagccatggacccaaaggagtaggctgggggagagagaactgatgagggcaagcagaagtgcctacctggaggagttgtgtcacagtctttgaatgactggtataaacattatcatgaggtttccagggagatattgaaggggtttgagctaatgggcatggtcagagctgagttctgtgagggactgactgtagtgtggacactaaatggagttgacattggatgcagggaggctagggtagggtagagacagttggaagaggatgaggtctgatctttgtgaacagtttcaggaaggagaaggggcaggattatataccgggggcaggggagagagaataaatgcatgatgttcaagttatgctctgggtgcctaggggcatgaaggcatctcacagagatgggatgcagggagataagggcttggagaatcaatctcatagctgaccccctctctgtatgtgtggggtcatctgtttctgtatactctgtttcctgataggaggtagctcctagctgctgatgggaggtgcttctggggcttcagacatgttaagttgttgcctccctttctgcccttatccttcaggaagcccagtgaatatattgcctctgtcttggagctcagttcccttgtggcaaaaagaaaccagcagatc

SEQ ID NO: 201419 - DNA, 1000 bp, Homo Sapiens
aggagagatggatggccacaaataccatgagggatggcattgccggggaggcatctccactgtcactagaggtggctgtcactactcagtgacattgatggtgattgattacccatgtggccttgttagcttcctcttccacaggaaggcggaagcagtctacccagatacagtggcactgaccttcgaccccatccaccagtggctgtcctgcgtgtataaggaccacagcatctacatctgggatgtcaaggacatcaacagagtgggcaaggtgtggtcagagctcttccacagctcctacgtttggaacgtggaggtgagccccccccccacccccttgcccctgcttggcctctgcacagttccccacagtttgggaacccattcagtaattccttcagaagatactcattgactccctcctatgcatcaggccctgtcctaggtgctgaggacacagacacaaaatccctgcccttaacaagctcacatttggatgggaaaggaaacctggaaacatcatcagtgaataacacgccaagcagcagtaaccctctgaagaaaaatgaggcggggaaggggaaggggaatgcaggtggtattctagagaggagaggggtcagggaaggcctccctgaggacatatgagcagagacctgcaggaaatcggggagtgagacctgcaactgctggggagaaccacaagcacagaggccctgcggcaggaacatgcactccacagagagctttgctgtggaggtcgtttatgtatttcactgctttttttaaaaaggagttgaagacggggcatggtggctcacacctgtaatcccaacactttgggaatctgaggcgggaggatcacttgagtccaggagtttgagaccagcctgggcaacacaagaccctgtctctacaaataatttttaaaaattagccaggcatggtagcacacacgtgtggtcccagctactcaagaggtggaggcaggaagatc

SEQ ID NO: 201420 - DNA, 1000 bp, Homo Sapiens
tgtgttatttgttaaactgttaaacactttagcatagacactttgcaatgctaattattaaagcggttacaataaattgtaattgaatttgattattttagcgggatttgtgttagctggctctattccattcattgaacaaaaatcgcgtctggctttgatttaccgttgtgctgcgacgaatttcactttcgactcgcgaacgatttgaatttggattgatttggttttgtggagggggctatgttattcgatttcgattccgtgttttgaacgcctgcagttctccaaacgagcctcaaacaatgcgcccgtacagaaaatattgaacctcgctggttattccaactcgtccgctccgcacaaccgcacaagcgcgataatttgaaccgaatggcaagacagaaaccgaaaaccgagtggagcagctgcaaagcaaaaccagaaagcaaacgcaccccgagcgtcagagatgcgtcgttgcggcgaaaaaacccgtttctggcggagaaatgcacaagcaaaagcttaagaaccaagaattgcgtgaaactgacctatgtttggttttgataatatgctgtatactttaaatacgtactctggggtttttctttttagttatctgtcattatgtttcatattttgttttttgtccatacaaatatataaaaatatttatatatacatagatgtaaatatatgcatttacaaataatacaataaaatcttagtacagtaatatgaatgtattattattctaaaatattttgtattaaatatgttttagttttccttgtaaaagctattaataaatgcacttgatctagtaattattattagccttctagctggttaccgccaaagaattgccattactgctggctgagtaataacaaactgagagaataaaaattggagagtggagagtgttatgtcttttcagaaaatgttgcttgagcaatgttaacttaacagagctgctgtcatggagagttta

SEQ ID NO: 201421 - DNA, 1000 bp, Homo Sapiens
aaatatcgcctatatgtttacttgtctctgactggggcgggtccccagttgaggcagggcgttggcgcttttcttgttcttgtgcggagtgcggcggtgagatcatgtttcgtccgctctgggaaagcggggggacatttccaataccaatgactttagaacctctcaagctatcagcatgcttgcggtcgcgtttcagcaaccatcctgtacctgtcattttgcacaacttgtcgagattcaaacggcgcacccctggttcactggtgaacattgctgtacccatctcatcgcaggcatagcggcgcacttgcttagtgggttcggcccatccaagggcgatcataatttttaggctacgccgagcacgcgcaatgtcagcggccttctggcttccgtaggccaattgagcaatatcggcaagcgtgtagcgatgccaacgtccgccgactggatttggtttaccgatgaagccggtacgcacatcaaccaaattcatgagcaagacggccaaagcaagcaacgattcagcgccatcagaacgcaaggtgcgtatacgatcaaaggcacgagcaaatggataagcggcaatgatggcagccttaccaaggatcaaccacaaagaaccatgccgctgctcaatgctcttgatgagctggccggtagtcgcctcaatcacaccagggcggcgctttccacttggtggacgccatttgacgcgcttgtgagcgcgactcccatcacttatttttgccatgtcccgcgcccgtcatcggctgcgagacagaatggcttttttgttgccagttcattcttgtccctattgcaagggcttacaggaagaactacaatggcgtctctcatctcgccagtgtttgtttctttttttgttctttctgtttgttctttctgtaagcactggtttctgaaaaaaccgtctcctttccagaggcggttttttcttttatatcaataataatatctgtcgataatatgtctt

SEQ ID NO: 201422 - DNA, 1000 bp, Homo Sapiens
cgagactcagtgaaattgaaatcgctgtgaagatgcagcgttcccgtggcaagacggaaagaccccgtgaacctttactatagctttacactgaacgttgagttcgtctgtgtaggataggtgggaggctatgaaaccgtgacgctagttgtggtggagccatccttgaaataccaccctgtcgtgcttgacgttctaacctagttccgttatccggatcagggacagtgtatggtgggtagtttgactggggcggtctcctcccaaagagtaacggaggagcacgaaggtacgctcagcgcggtcggacatcgcgcactgtgtgcaaaggcataagcgtgcttgactgcgagatcgacggatcaagcaggtacgaaagtaggtcttagtgatccggtggttctgtatggaagggccatcgctcaacggataaaaggtactccggggataacaggctgataccgcccaagagttcatatcgacggcggtgtttggcacctcgatgtcggctcatcacatcctggggctgtagtcggtcccaagggtatggctgttcgccatttaaagtggtacgcgagctgggttcagaacgtcgtgagacagttcggtccctatctgccatgggcgttggagatttgagaggggctgctcctagtacgagaggaccggagtggacgaacctctggtgttccggttgtcacgccagtggcattgccgggtagctatgttcggaagcgataaccgctgaaagcatctaagcgggaagcgcgcctcaagatgagatctcccgggatgtaaatcccctaaaggaaccatgtagactacgtggtggataggtcaggtgtgtaagtgcagcaatgcattgagctaactgatactaatgatccgtgtggcttgaccatataaccttaagttgcttttttggtatgtcagtgttttattttgataagcatgaatgcttcgctacgtcatcatttcatatgcgagaaggtgaatcttc

SEQ ID NO: 201423 - DNA, 1000 bp, Homo Sapiens
tccgaaagtgtttgaggacccctgaaaatggtccgtagagacgggcatacaaccggccgatagacacatcaatgacacgattggaatgaaccaaaagacgtgttgcggagtgtgttgcggaaggacaacaacacccaagcgaccgtatcgcctcgccattttttgcgtctttgtcaaaaacgttgtcgctgaaaacccctgaaaaatggctttggtgtgctacctctggcaggcagtggtacaactggcgttgccgcgttacgcgcagggcaccgttttataggcatggagttgtctctggggtatagcgacgttgcaaagcagcgtttgcccgatagggtttgtgggtttattcgtgatgtgtatctgtgaaggtctgtagctgagccagtcattcaccgtggctgcggtgatcgcgtccggcttaatagacacgccgtacacgctagcgctgattcggaactttatcgtgctgaagctgggcatcggcggaaagtgatcatgatcagaaaaacgttgcgtcgtatcgcggcctatcttgcctatcttcctaacatgcgactgcttgttgaatacgtgatgatcacggcgttagtagcgctagccgctcatgcggtgctatcgtgggttaatcacgaaaaattaacacaacgcgcgacgcatattcaggagcaagtagccagcatggaacgcactttaaatgagaaagcggcgatgaatgcggaacaagatgccgcaatcgcgccattacttttgttacgcaacagcgactgccgccccgtggcagtaccgaggtgcacccgtgagctttaaacatgaagtagagattgacccatacgtcgaagcgcacgagccgtatccgtttattcttgctgaaaacgtacaaatcgattgttacataaggctgcgcgtaccgcgcacgatagacgcatgtttgtcttcccttgagttaacagggagggatacaacgcacgttgctgtggagttaaaaaaaccacaa

SEQ ID NO: 201424 - DNA, 1000 bp, Homo Sapiens
tgcgacattgtgcgtggtggtactccgttgtctattgccttggaacgtcagcatggtgtgttttcgaggttgtatgtgacgatggcacgtgctggtgagagtggtggcaatatgcctgagacgctgcagcggctggctgattatctggagcgtaaccaggtggtgcgtgccaaggtgatcaatgcgctgatttacccggtgatcctgatttttgtggttggcggtgcgcttgcctttttgcttggttatgttgttccgcaatttggcgcgatgtatgagagtttggatgtggcgttgccgtggtttacccagggcgtgctggcattgggtcatttcatcggtgattggtggttcttactattagcggtgattggcatcggtgtgatttttgtcgagcgtaagcggcgggatgttgcattccgtgcgcggttcgatacgtggttactgcgtcaacgtctgttgggtacgctgattgttaagttggagactgcccggttggcacgtacattggggacgttgctgcgcaatggtgtgccgttgttaagcgcgttgaggatttcccgtaacgtgttgtccaatgcagcgttggtggatgatcttggtagcgttgccgaagatgtgaaaaatggtctgggattggcgggagcgttggggcgtggcaagcgtttcccccgcttggcggtgcaaatgattcaggttggtgaggagtccggtacattggatacgatgctgctcaaggcggctagctcattcgagcaggagagtacggtgatgattgatcgcttgcttgctgcgctggtaccagcgatcacgctggtgatggcgatgattatcgctgtggtgattctgtcggtcttggtgccgttgtatgacctgaccaattcgattggctgatcaacgcagtttcttaatggttgcctgctcgttgtgctggcgctagtcaccgcgctggtgatggctattatcatcaattacgttgatagtgttggttctggcgttg

SEQ ID NO: 201425 - DNA, 1000 bp, Homo Sapiens
ggacgctgagttacgtcatgcgtgcactggacgctaagcagaggctggcggtgtcccgcgtgttgattgaggcggggattgcggggtttgtcggcttattcgtgatgtgtgtgtgtgaatggttggagatgagccaagcgttcacggtggcggcggtgattgcctccggtttaattgatacaccgcagacgttagagctgattcagaacgtgattgtgcccaagctcggcacggggagaaggaatacagatgatcgttaatacactgcgtcgtgtggggcgacgtttgcccagtgtgcggctgttggttgagtacatgatgattggtgcgttggtggcgctggtggcacatgcggtgctggcctggtccgagcgcagtcaattagcgcagcgggcggcgcagctggaaggccagttagcggcggtggaaagcacgttggatgcgcaagttgcgatgaatcgcgatcaagatgcggcgattgcgcggctacgtgcgttacgtgagatcgacaggcaggcgattgcggggctgcatacggatttaaatcggatcacggtgcgcgaccgtgtgttgcggcagcgcatcacgcatctggagcactttcatgatgaggcgaaagcttttttggatagggatgtgcctgacgtgcttgggtgcttgctcgacagggacggctgtcaagccggtcacggtgaggcagacccgcgttgaggtgatcctcccgccgcagggggtgttgcagccgtgtgaggccccggaattagggcgtgtggacacggtgcgtgacttactgaatcagacgttgggatggcgttttgcctatgagcagtgtgcggcgcaagtgcgctgtgttgcggcatgggcacaggcggccagcgtcgggcagccgtggtccgcagatggctgtggtgaagaggccgaatgaggcgggtgtttcctcaatttttttcgccccctatatatagagaaacgaaaaaaattcaccggatattttgttttc

SEQ ID NO: 201426 - DNA, 1000 bp, Homo Sapiens
cgaagatctctggttgttcatttggaatcggcggtactggcaggcgggggagtcggttgcagaccgcttctgagggcgttgttggcagtatcccgagcggcgctacgctcgtgcacgatgcgaggggcaatgacactgcaatcagtaagtacacgaataatgcggatatgtctggtgttttcatcggtggcaatcctgttgtgagtgatcgctgcggcggctgatccacagcagtaatgcaacgatgagcaggaaggggggaaaggtcatcacgaagccctgccttcacacagggcgcgttcatcggcacggcgcaacaccaggccacgcacttcgtcacctacggcgtgtttccagcggtccagttcggcgctggacgctgggccagtcgtgcatccaggtgacttcagggcgcttggaccaggcgtggtagagggggaggatggcatcgaccagtgattcaacgaggttgccgtcgacgtcgcggggggtcgggacgatattgatgccgctggggccgatgatgttctggactaaggtggataggccgccgctgatgatgtcgtggttgcggtccaggtggcgtgcttggttgcgcagggccgttccggtcatggtcacaatggtgttgccgctgccaaagtcgcgggaggcttggcgcaggtgggttttttcggcggcttcataggcctgtcggtaggcaacggctttgacgcggctctgggcacgggaggcggcccaggctggggcaagctggaggaggctgcggtcgaaggcggcaaccaggcgatgtaggcgcggggaggcggtggtcatggggtgtctccgccgctgtctctgcggaagtcggcaatggcaatgcgaacggggccgcttgtggagggggcggcttctgcggcggcgcgacgcagccatttgtccagttcatcgctgatccatttggcatcggcgcgggtcacttggcgctcgccataccggacggattggcccagcaggactt

SEQ ID NO: 201427 - DNA, 1000 bp, Homo Sapiens
tcacgctccatacggacagcctccgtcccagccaacttttctaagcgtttgatccggctttgtgcctgcttggcttttgatgctttggccttgaaacgatcaatgaagctctgcaagtgaacacgctcggcctgctctttctcaaaagcaatctgttgctgacgtagttgctcggcacgttgacgctcgaagtcggtgtagccgcccacgtatagtttggcgttgccatcatgcaaatgcaggatatgcgtggcaacgttatccaaaaactcacggtcatgactaatcagcagcaacgtaccagggtacttctgcaaccattgttctaaccagaacaccgcatccatatccagatggttggttggttcgtccagtaataacagatcactgggcatcatcagtgcacgtgccaggttcaagcggacgcgccagccaccagagaaggtcgagacggcacgccgctgcgtctgtgtgaggaaacccaggccatgcagcaatttgcctgcacgtgcttcggcgtcgtaaccgccgatctcggctaagcgctgatgcgcagcggctaccgcctcccaatcttcgcgtgcattcgcctctgcctcgacacgcaggacctcggccactacatcatcaccactgagtacaaagtccagggccagatccgacaaggagggtgtttcctgcgcaacactggcaatacgtaattttccaggtaactcaacattgcctttgtccgcttccaattcgccacggatcgctgcaaacagactggactttccaacaccattgcgaccaaccacgccaacacgatcacccgcatgcaaggtgatatcaacattggacagcaacaaccgcccaccgcggcgcattgcgaaatgacgtagagagatcatgcaaccttcctttgatagagaaacagctcagataaacagcgcttgtgagatgccattttatttaacgttatgattgtttgggtttggaaaacagcataagaccctcatta

SEQ ID NO: 201428 - DNA, 1000 bp, Homo Sapiens
atctatccactgatctcgcaatggtcagccgactacaacgccgccactggcaataaaattaactatcagtcaatcggctcaggcggtggtattgcccaaatcaaagccgccacaatcgattttggttcttctgataagccacttgacagcagcgaactgacccaagcgggtctagggcagtttccatcggccataggtggcgtcgtgccggtggtcaatctagacaacatcgaaccaggcaaactacgcctgacaggcccactgcttgcagatattttcctagggaagatcagtaagtggaatgacgcagcaatcatcagcgccaatccggggttacatcttcccgacactaaaatcaacatcgtgcatcgttccgatggctctggcacgacattcaatttcagcaactatctatccaaagtcagcgcggaatggaaacagaaagtgggtgaaggcacttcagtgcagtggcctgggggcgtcggcggtaagggcaacgaaggtgtagcctcatatgttcaacagattaaaggctcaatcggctacgttgaactggcgtatgcgcttcagaacaaaatgtcatatacagcgctccagaacgctgctggtcaatgggtacaaccaagcgcagaaagctttgcagccgccgcatccaacgcagactggagcaatgcaaaggatttcaatttggtcattaccaacgctactggggaagcagcttggccgatcacagcgacaaactttatattgatgcgcaagcaaactaaggatgcagcgcaaagaaaagccactctagacttcttcaagtggtcctttgaaaatgggcagaaacaagccaatgaattgcactatgtgccattgccaccaaatctggtgaagcaaatcgaagcttactgggcaagcgaattcaagtaatgtgttacgcatccacacgtattaagaattctacttggtacgttatccgtacagcgtaacagctatggcgcatctcactcctcca

SEQ ID NO: 201429 - DNA, 1000 bp, Homo Sapiens
taaaaaagtattgggattacatgcagccagtaatccacgccgcagtggcccatattcggacttgcgttactgcgtgaatcgttacgatgcggctgcacgcaaatacctaggcaaaccaagcaacatgctgaaatggggcaccaagatcgagttcaatggagtcatggacttggtaacggttgaagacgccatcgccgcattcgaacgctaccgtgctgactacgcacaccactgaacagcgaagagaaacattcaaagcgtctcggctgatcgataatcctgataagacttttcctcaacatatggggaatccaacgcgagattgatctcctttttaatccgcgcacgctcgtcattctcaaaatacacactgcgcgccagatgaatgaactgcttatcgaaggtctgtgccttctccttgagccgaatttcatcctctattccccacaatcgctcattgaccgctttcaactcagtgcgcaaacgtgggatttcactggaggaagtcggatatgccatccaaatcttttccagagctgaaagctcattacggacgttaaccagtttcactacatccgtgatcctttcggacttgatttgcagaatcgcgatcttatcgagcaactctccgaaagacacgggtacgaagattcctgacataacaagcaccaacaaaactaagagatgggattataatgccagcggattaaaatcgcattaccaataccttgctctttaccttaatatacaagcaaaaaatataaaatacatctcatcaacagagcattaaacgcattatatttccatacctatgttcacctctaaaaacccacctcattaaaactccattcctctttataaaaaaagaaaaggcatcaagcagtttttttcaaatggatatacataatcaaaataaaaaaataacaaggaaactcatttcaaaacaagacaaaccctcaagaagtcttctcatgaaacaataggtagcatgagttataca

SEQ ID NO: 201430 - DNA, 1000 bp, Homo Sapiens
ttcgtcacattattttaataatccaactagttgcatcatacaactaataaacgtggtgaatccaattgtcgagatttattttttataaaattatcctaagtaaacagaaggatatgtagcattttttaacaattaaaccgttagtgcagtcagaaaatagtttagccttttttaagctaagtaaagggctttttctgcggcttacgttaagaatttgtaaattcgcaccgcgtaataagttgacagtgatcaccctgttcgcggttatttggtcaagaagagtggcaatatgcgtataacgattatcctggtcgcacccgccagagcagaaaatattggggcagcggcgcgggcaatgaaaacgatgggttttagcgaactgcggattgtcgatagtcaggcacacctggagccagccacccgctgggtcgcacatggatctggtgatattattgataatattaaagttttcccgacactggctgaatcgttacacgatgtcgatttcactgtcgccaccactgcgcgtagtcgggcgaaatatcattactacgccacgccagtagaactggtgccgctgttagaggaaaaatcttcatggatgagccatgccgcgctggtgtttggtcgcgaagattccgggctgactaacgaagagttagcgttggctgacgtgcttactggtgtgccgatggtggcggattatccttcgctcaatctggggcaggcggtgatggtctattgctatcaattagcaacattaatacaacaaccggcgaaaagtgacacaacggcagaccaacatcaactgcaagctttacgcgaacgagtcatggcattgctgacgactctggcagtggcagatgacataaaactggtcgactggttacagcaacgcctggggcttttagagcaacgagacacggcaatgttgcaccgtttgctgcatgatattgaaaaaaatatcaccaaataaaaaacgccttagtaagtatttttc

SEQ ID NO: 201431 - DNA, 1000 bp, Homo Sapiens; identical to SEQ ID NO: 114748

SEQ ID NO: 201432 - DNA, 1000 bp, Homo Sapiens
tcaagtgcacctaagagcgggagtctggctgccctcagcactcgcgtcccgccctgcagcctgataagcttgacgccaaggcattctcccgagagccggcccagcagctgctggcaggagagtggcctcagggcagcgggaaggggacctccggggagagaatgaggcctgcgcaagggtcctggaaggacccaggagtcgccccggcttccctcccccaggccctggttgggcgccgtgggccgcgtcccagttgagcccggcgtggccgtttaatggcgtccctccgcgaccgaggacgaaggggcctagagaggctgtgcccaagcgacgctgcgaggccaggccgcgtctcgggccagggcggtccccttgccaccgccgctcttggccgccaggaccaagcacagcacgcagcgtcgcgaaaggggcggtcctggaaggcgcgaaggggtctccgggtctcgcgaacacggcggggtcggggcggagtcgtgggtcctcggtcgagcggccgcccagagccccgcgggacacggacggccccagcccggctccccgcgagccccacgcgtctgtgacgccgctgatgcgcagacgccgcggctgcaggccccgcccctccgtgcccctcgcaaggccctctgggagttgtagttccagctcctcctcgggccgccccactccctgataatcctggagcgcggcgcctcccggggaccgaggcctcgggcccggccgtctccagcagcgagggcaggagaagtggcccgggcggtcggcggactgggagggcgccacccgaggactacaactcccggcctgcctcgcgcaggcaccgccccgagcttccgccccgtcggcgccgcgcagccctgtgggagccgtagtccgggcgcgcgattcacagcgccgcgtgcgccccgggcgcgccgtagccgcggggcccgggccgggcgctacgctacgaaggcagcgtaaggcgggcgccggacgcggg

SEQ ID NO: 201433 - DNA, 1000 bp, Homo Sapiens
caaattcgccaaattcaccaaattcaccaaaattcaccaaatctgaatcactctaacgagctacagcataaaatcacttgaaaaggtgtgtgctgacttgatcagaggcacaaaggaaaagaatctcaaagtgaaaggaccggtttgaatcctaccaacactttgagaatcactacaagaaaaactccagatgaggccaggttacagctcacgccggtaatcccagcactttgggaggccgaggcgggcagatcacgaggtcaggagattgagaccatcctggctaacagtgaaaccccatctcgactaaaaatacaaacaaattagctgggcatggtggcaggtgcctgtagtcccagctacttgggaggctgaagcaggagaatggcgtgaacctgggaggcagagcttgcagtgagccaataccgcgccactgcagtccagtctgggcgacggagcaagactccatctcaaaaaaaaacttataaaaaaaaaaactccagatgagcatccataagcaactcattgacttgcacagtccttctgagattgttaagcagattacttccatcagtattgagccaggagttgaagtggaagtcaccattgcagatgcttaagtcaactattttaataaattgattaccagttgaaaaaaaaaaacaaaaaaatacaaaaatcagctgggcatggtggcgggcgcctgtagtcccagctactcgggaggctgaggcaggagaatcacttgaacccaggaggcagaggttacagccgaaatcacaccactgctctccagcctgggcaacagggcaagactccatctcaaaaaaaaaaaagaaaaggagggactctgaagcccccagagctgggaggagtcgcctcccaaccccagctctgcacagaaggatgcacactgagggcctggcctctccctgctgggcccctaaccacagtgagcacagaagcccatctcgctgggaaggggcctctgacaccccca

SEQ ID NO: 201434 - DNA, 1000 bp, Homo Sapiens
gccggggaactacaagtcccatggtgcatcgcggcgccagcgcgcagacgcagccgccctcggcgtcctctgtagcgggcgacctaggccgcgggacccggacggaggtagaggccagggcagcgcgtccgggagcggagtccgcgcccgccgccgccatgccggacagctgggacaaggatgtgtaccctgagcccccgcgccgcacgccggtgcagcccaatcccatcgtctacatgatgaaagcgttcgacctcatcgtggaccgacccgtgaccctcgtgagaggtacgaagccccagcccggggctccctcgccggcctctggggacccctggatcccacaccctgcctggatcctccaatgcctccggggtcccgtctccctgagaccgcccccccggtgcaccccggggacaactccccacccccggagacctccgagctccgtcgcctcctttggcctcccactgcacccaggacctcacctcccaggatcccttactctcccctgcaccccgggatgccccgcttcttcccaggactcttccctccctgccgcacccagcgcccactgccccaggaccccgcactgctctccgccccccgccgccccgggaacccctccactgcaccgctggcctcaggcctctctcaaatgtctctctgccagatgaccaagtgtcggggtgatggccgagatgcccaaattcaccatctctggaacgaaccgggaaaatgcccagttcagtttttgttgttttttttttttcctgagacagtctcactctgttgcccaggctggagtgcagtggcgcgatctcggctcactgcaacctctgccccaccccgggttcaagcgattctcctgcctcagcctccccagtactaggattacaggcgcaccaccaccacgcccagctaatttttatatttttagtagacacggggtttcaccatgttggccaggctggtctcgaactcctgacctcaggtgatc

SEQ ID NO: 201435 - DNA, 1000 bp, Homo Sapiens
gccgatttccttgctgtcgccaaccggcgtggaggtgccgtgggtgttgatgtagtcaatgtcacccttgacggtggcaagcgcctgacgcatgcagcggatcgcgccttcgcctgaaggagccaccatgtcgtaaccatcagaggttgcgccataaccgacgatctcggcgtaaatcttggcgccgcgcgccttggcatgttccagttcttcgagaaccagcacgcctgcaccgccggcgatcacgaaaccgtcgcggttgacgtcataggcgcgcgaggcgacgccgggtgtttcattgtatttggacgacattgcgcccatggcgtcgaagaggttggacatcgaccagtcgagatcctcatggccgcccgcaaacatcacgtcctgtttgccccactggatcatctcggcggcgttgccgatgcaatgcgccgaggtggagcaggccgacgagatcgaatagttgacgccgtggatcttgaaccaggtcgcgagcgtggccgaggcggtcgatgacatggccttcggcacggcgaaggggccgatgcgcttcgggctgttgttcttgagcgtaatatcggcggcttcgacgatggtgcgggtggaagggccgcccgaacccatgatgatgccagtgcgctcattgccgctgatatcgctctcttcgagaccggaatcggcgatcgcctgcttcatggccacatggttccacgcgccaccctgcgacaggaagcgcatggcgcggcggtcgaccagatcggtcgggtcgagagagggcttgccccagacctggcatttgaaaccgtgctcggcaaaatccggcgaaaatgaaatgccggacttggcttggcgcagcgacgcggtgacctcagcggcatcaccgccgatggaggaaacaataccgaggccggtgacaacaactcgtctcatgaaagggaccttttcttaagatttcggccggacgaccgaagccgcccggcgtttgtctgaactattc

SEQ ID NO: 201436 - DNA, 1000 bp, Homo Sapiens
gctgatgccggtgatcaccacgcggtagacaccgggcacgcccgaatccacccgcttggcatagcgcttgaccaacgcatcggcagcgccgtcggcaccggccgccatggcgcggcgtgcgtcgccgtcgctgctggtccagctggacagcacattgccgttgtccacgaacacccagtccgcagtccagccggcggcgttgcggtagagcttgccgatcaactgcatcggcgggctgtatttggcggaggcgcgcgacaccgcggcggtgtccttgcgccagatcgcgccagccagtgcctgctcggcggcggcgccgctcggcagaccgagacggtaaccgcgttcgatcgcacggtccagcacgctacgcgcggcattggcctgggccacgccaaccagacgtgggccgctgccgtcgtcgatggccagccacagcaccggcttgggccgcggcaagggccacaccggcaaacccagcgcggcgatcaggccatccacatccgattgccggaaacgtgccaccagggtcgtacggaaggtcggcgcgccggtgcgcgaggtaccctgatcctggcggtagtcgtagtgttcgacgtagttgggcgcattgcgcagcgcctgcggcacgccgggacggctcatcacgccgcggtcgccggagaccttgcccagcacggcgccgagcgcacgtgccagtgcgccggggcgatcggattcgctctggctattgaccggcacttcggcgtcgtaggcactttgcgccttggcaacgtcgccttcggtgcgcagatctgcttgcgcaaaggccggagcgacgggcattgcgaccacgagggcgagaaagaaagcgagactgcggcgcatcgacggttccatgacataagcgtatccgggtgaattgttgcccgaatggggcgctagcgccaacgtggctgctaaaatcgccgccttataccgccgagccacccccgcccgtgaccagccagacgccttccag

SEQ ID NO: 201437 - DNA, 1000 bp, Homo Sapiens
cgcgaccgggccacattccagcgtgggcttgctccagccggcagcacgccgaagcagcgcattgacgcgcgccagcaactcttcgacgtggaacggcttgaccagataatcgtcggcgccctgcttgaggccctcgaccttgtcctgccagctcgagcgcgcggtcaggatcagcaccggaaacttcttgccttcatcgcgcaaggccttgatcagctccatccccgacatcttgggcaagccaaggtcgatgatgccgacatcgaatggcacttcacggcccatgtagaggccttcttcgccgtcctgtgcagcgtcgaccgcaaagccttcgcgcttcagacgcgccgcaagggtttcgcgcagcggagcttcgtcttcgaccaaaaggatacgcatgcactctccctagttacgttgtcggccagtggccggggaatttataagactgaacgaagaactatctacgttcagtggttatcgtcgcgtggtggcgcgtcggggggcggcaagttgcgcgcaggcgcggcctgcgtctgctccggctcatacacggtgtgcacgcgcccgtctttcatgtacttgacccgattgagattgccgccatcgaacggcacacgctcggcacccagaatctgtccaccggtagaccgttgcacatgccgaatggtgtccgacagtgtgcggctattgccgcgcgccgaaggcggcaatgcctcgcgcccgctctgcaccatcggatagccctggccccaggccgacggcgcggccatggcaacccagagggcgaccagagcgacttggcgagcgcggcagagcgattgggtcacaaacagatcctagcgggttgttcaggaacatccaaaattcgtgaaatcgaccaggcacaattgaaggtcgagcatcggaatcgaggcaaattcttgatttttcggggtgaatccgatctgaactttttagcttcacgttaacggcgttcagtgaaatgaataccgatcag

SEQ ID NO: 201438 - DNA, 1000 bp, Homo Sapiens
cgcgcgcgcaccggcgtgccggcggcggcgatcacccagggataatcgcgcagttgcgcaaacgcgtagccctgcccggccaaggggtggccgctacgcgccacgatcaccggttcgtcgtcgaacagcggctcctgcagcacatcgcgtaccggcaacgggtcgcgcagcgcaccgatcaacagatccaggccaccctcgcgcagatgcgccagcaattgctcgtacgggccctccaccacctggacgctggcgcccgggtgcgcatgcgcaaaccgcgccagcacctgcggcaacagaatcgcgcgcgccagcggcatcacccccagggtgaggcggccggcgtgctgcgaacgcaatgcggccacctcgtccagaccggcgcgcaactcggccagcgccagccgcacctgccgcaacagccgcagcgccaccggcgtgggctgcatggtcttgccgcggcgtaccgtcagcggcacttcgatcacatcggccagcgcttgcaccgcgcgatagatcgccggctgcgaaacgccggcgcgcaccgccgccaacgcgtaactgcctgccacatccaccgccaccagggcctgcagctggcccagcgacacccgccgctccaggccagcgcgcgccggcaggcgcagcgcgcgacgcgcgaccccgatcccccggcccagatgcgccagcacccgctcgatacgcggcaccagcaacccggcagcctcggtggccgacatgccgcctgggtgccggtcgaacaggcgcacgcccagttgctgctccaatcgcgccacggcctgggtcagggccggctgcgacaaattcacccgcggcgccgccgcgctgacgcttccggcctggtgcaccacgaccagcgcgtaaaggtgacgcagattcggttccgggctcggctgcatgctctaactataagcaaaaccaatatgcatacctcaaatgaatcttgagccagctggctctgcccggccagactcggcgc

SEQ ID NO: 201439 - DNA, 1000 bp, Homo Sapiens; identical to SEQ ID NO: 114810

SEQ ID NO: 201440 - DNA, 1000 bp, Homo Sapiens
  misc_feature (999)..(999): n is a, c, g, or t
aaaaatagtccctctctagaagaagctacttttactcttgaagcactaaaagaggccctgtgggcagaggcttgtggagttctggatgaccacgagctggacactctgcatgtggaaggaagtggaaggtctgctgcccaggagattttcctaacattttaataaaagggaatggcatatgcaaaggaaaaggaagaaagtcaaccaaatgcaggctttcggcttcattgataataatgagtctgaaaataaagacactttttagtacatattaacataatcgaggaccattttttattcaaatcactgaaaactaatacaacttgaattttttaatagtatacttaaaacattctaaacttgctgtggtgtgtgtgtgtgtgtgtgtgtgtgtgtagtttttgctaacttcaatcaacagggaaagtcactgagcacaggatattttcatattatatttctcaattttattcgtttatggctttgaactgaaatcttactgttatcttattttccctatttttttttgagacagagtcccactctgttgccaggctgaaggttagaacaagaagtagccttagagatgatttaaaactaataatcccattttactgatcaacacactgaggcccatggaggttaggtaatttgctaagctcacggctaactggcagcagctctcagcctgatttctcttctcctgatgtggtgtgccaggacctctccatcacagctctgtacttctcagaaggccttggctacaatgcagaagagtggccattatactctctccagagcatttctggaacatggctatctctcttttcttgttaagcacagtccatttttttttctatgcagctatacatactattattaaatgctctgagttggatatgaattactgcctccaatgtttgcaaaataggcctcgcttggacaatatattcataaaaacataattttcagaaaggtttacctcttgggttatatgana

SEQ ID NO: 201441 - DNA, 1000 bp, Homo Sapiens; identical to SEQ ID NO: 114812

SEQ ID NO: 201442 - DNA, 1000 bp, Homo Sapiens
ttttgtatcctgagactttgctgacgttgcttatcagcttaagaagattttgggctgaaacgatcgggttttctacatataggattatttcatccgcaaacaaatacaatttgaatttgtttctttctattttaataccctttatttatttctcttttctgattgccctggccggaacttccgacactgcggtgaataggagtgccgagacagggcatctttcacttgtgccggttttcaaggggaatgcttccaacttttgctcattcagtatgctattgtttgtggctttgtcataattggctattattatattgaggtatgttccttctatacctagtttattgagagtttttaatatgatggaatgttgaattttatcaaaggccttttctgcatctattgagataatcatgtggcttttgtctttagatctgtttatgtgatgaaacatgtttattgatttgtgtatgtcgaaccaatcttgcatcccagggataaagccaacttgatcatggtggataagcttttttgtgtgctgctctattcagtttgccagtattttgttgagaatttttgcgtcagtgttcatcagggatattggcctgaagttttctttttttgttgtatctctgtcaggttttcgtgtcaggatgatactggcctcatagaatgagttagggaggagtccctcctttttaattatttgtgatagtttcagaagaaagggtagccgctcctctttgtatttctagtatgattcagctgtaaatccatctggttctgggctttttttgtttggtagactatttattactgtctcaatttcagaatttgttattggtctattcagggattcaacttcttccttgttcagtgttggtagggtgcatgtatccaggaatttatccaatttttctagatcttctaatttatttgcatagaggtgtttatagtatcctctgatggttgtttatatctctggagggttagcagtgat

SEQ ID NO: 201443 - DNA, 1000 bp, Homo Sapiens
gaaagtgccgctgtacccgcacccattgcgtgggcagaagatctggaacgtgctgggctggttcctggccattggcttgttgtccaccgcctcggcgtggatttttgtacgtcagctcaaccagccgctcaaacgcttggtgttcgccgcccgccagcttggccaggggcgcagtgtgcgcctgccgatcagcgatacccccagcgagatgaccgaggtgtacaaggcgttcaaccagatggccgaggatgtcgagcaggccgggcgcgagcgtgagttgatgctggccggggtttcccacgacttgcgcacgcctctgacgcgcctgcgtctgtcgctgtccttgctgaacagcgacaacgagctgagcgatgacatggttcgcgatatcgaggacatggacgcgattctcgatcagttcctggccttcatccgcgatggccgtgacgagccggtggaagaggtcgaccttgctgacctggtgcgtgaggtggtggctccgtacaaccagccggaagagcgtgtgcgcctgtgcctggagccgattccaccgttcccgctgcgccgggtttcgctcaagcgcatgctgggcaacctgatcggcaacgccctgcaccatgctggcaagggggtcgaggtggctgcctatgtgtcaggtgacgagagtgcgccgtatgtggtgctcagtgtgctggaccggggcaccggtattgacgagtcggagctggaaaccatcttcaacccgttcattcgcggtgatcgggcacggggcggcaagggcaccgggctggggctggcgatcgtcaagcggattgctgcgcaacatggcgggaacgtggagttgcgtaaccggtctggcggcgggatcgaggcgcgggtcaggttgccgctggggctgctgctgccgcgtaatgctgtgtgaggctcactggcctcttcacggctaaagccgcacctacagggattgcgcagtacctgtggcagcggcttggccgcgaag

SEQ ID NO: 201444 - DNA, 1000 bp, Homo Sapiens
ctgcatgccgatgacccgcgagcgttgcgaaacgctgaagctgccgttgatggcgccgcgcaacggctcgggcttcggcaccaagttcaccgtgtcgatcgaggccgccgagggcgtcaccaccggtatttccgccgccgaccgcgcacgcactgtgcaggctgctgctgccaaggacgccaaggccgaagacattgtcagccctggtcacatcttcccgctgatggcccagccaggcggtacgctggcgcgtgccggccacaccgaagccgcctgtgacctggcgcgcatggccggtttcgagccaagcggcgtgatctgcgaagtgatgaacgacgacggcaccatgtcgcgccgcgccgaactggaagtgttcgccgccgagcacggcctgaagatcggcaccattgccgacctgatccactaccgcatgatccacgagcgcaccgtgcagcgtgtttccgagcaatcggtggagagcgagctgggtgagttcaacctggtcacctaccgtgatgcggtcgaaggcgacgtgcacatggccttgaccctgggcaagatctgcgcggaagaaccgaccctggtgcgcgtgcacaacatggacccgctgcgcgacctgctgctggtcaagcagccaggccgctggagcctgcgcgcggccatggccgcagtggccgaggccggcagtggtgtggtgttgctgctggggcacccgctggacggcgacgtgctgctggcgcacatccgcgaaagcgcgggcgatgcgccggccaaggcaccgaccacctacagcactgtgggtgccggttcgcagatcctgcgtgacctcggtgtgcgcaagatgcgcctgatgagttcgccgatgaagttcaacgcgatatccggattcgatctggaagttgtagaatacgtgccctccgagtgacttgaggcggcattgacgccctctgctcgagtccagacccctgtcgaggccgcttgtatgcggcctcgctcttga

SEQ ID NO: 201445 - DNA, 1000 bp, Homo Sapiens
aaccggccaagcgccggttttttattgcctgcaatcagctcacaggctcagtcgcatcgacaggtccaccgctttcacatccttggtcatggcaccaatcgagatgtagtccacccccgtctcggcaatcacccgcagggtcgtttcgttgaccccgccgctggcttcaagtttggctttgcccgcggtaatgcgcacggcttcgcgcatttcgtccaggctcagctcgtcgagcatgatgatgtccgcgccagcggccagcgcctggcgcagttcgtccaggctttcgacctcgatttccaccggcttgcccggcgcaatgcggtgtgctgcggccaccgcctcggctacgccgccgctggcggcgatgtggttttccttgatcaggaaggcgtcgtacaggcctatgcggtggttgtcgcacccaccgcaggtcactgcgtatttttgcgccaggcgcaggcccggcagggttttgcgggtgtccagcaggcgcacctgggtgccggctaccaggtcggcgagaaagcgcgcacgggtggcgacccctgacagcagctgcaggaagttcagtgcgctgcgctcaccactgagcagcgaacgggccgggccttccaggtggaacaacggctgattggcactggcctgttcaccgtcggccacctgccagtgcactgcaacgcgcgggtcgagctggcggaatacggcatcgacccaggcggtaccggcgaccacgcagttttcacgggtgatgatggtcgccttggccaggcgctcggccgggatcagttgcgcggtgatatcgccactgccgatgtcctccaacagcgcgcggcgcacgttggcttcaatttcagcggtcaggtcggcaaggcgtaggttcggcatggtcggctccacaagctaggtgcccgcgattatagggcagggggccggtgtgtacagccgccttggcgctgacctttggtcgggcgtcgtgagtaatcggagcagatcaggg

SEQ ID NO: 201446 - DNA, 1000 bp, Homo Sapiens
cgggcccggtttgaacctggagcggctacgtcagtcggcccaggcccgtggggtcgaactgattgaagtcgatacgcaaggcaaggcctggcaactgcgtgggcaggtggccgatgagcgcatgctgcaaggctgggtgcagagcctgcgtgcagaaggcgcattgccgttgcaatgggggctggagcagcagggcaaggctttgcgattcgacctggtggtgcagccatgagccgcagtgcagcaatggcctgggtgctattggtattcgtgctcacgctgtttatcgagcttccggccaattgggtggtgcgtgcgttcggcctgccggtacgcgatgttggtggaagcctctggcaagggcaggcacaacaatgggggccggtcgggcctttgcgctggacgctgcagccctggcgcttgcaggctaatgcgcaagtggggttccagggccaggcctggcagttgcgtgcagaaggctggccttggcattggcggctggaggcatcagccaagggggctttggcgacggtctcgacggattaccgcctggccggccagtggcagggtgtgttgaggatgcagggggcagggcgccaatgccaggccagtgaaggccgcgtgatcgtaaccgacctagccctcagcgacccttggtccctgggccttgggcacggctggctggaaatggattgccgcagtggctggcacctgcgcgggcagttggcgcagcaagggcaacatcaactgaccgtggatgccgacctgccaggacgccaggtgcaggtggtgttccagctgcagcctgaagcgcagttgacgccattgttgcgtggggctcaatggcttggaccgcaggccctggcggggcagcgagaccttcgttggtaagcaacaacgtggcgcggccccctgtagataggctgttggcggtcgagcttttctgaggtgcttggggctgaaccgcttggtcttatcaaatggtttaaaccgcgaagca

SEQ ID NO: 201447 - DNA, 1000 bp, Homo Sapiens
actggcaccgacacctgggcgtactttgctgtcgcaggtatgcacggtgttgtacttcgcctacttcctgctgatgccgttctatacaaggctcgagaagaccaaaccggttccggaaagggtgactggctgatgaaaaagttgattgcagtatttttgctggcagtgatgcccgccttttccttcgctgccgaacatggcctggagctggacaaggtcgatatcgacctgactgacaaggccgccatgcaggacggcgcgcgtaccttcgccaactattgcatgggttgccacagtgccaagttccagcgctacgagcgggtggctgacgacctgggtatcccgcatgaactgatgctcgagaagctggtgttcacaggtgccaagatcggtgaccacatgcagatcggtatgaagcccagcgacgccaagacctggttcggtgctgcgccgcccgacctgacactggtcgcccgcgtgcgcggtaccgattggctttacacctacctgcgcagtttctatgaggacccatcccgcccttatggggtgaacaacaaggtattcccgaacgttggcatgcctaacgtgctggtgggtctgcaaggtaaccaggtggtgggttgcaagcaggtgcagacggtggtcgatggcaagaagcaattcgacccgttgaccggcagcccgttgacccatgaagcttgcgatcagctgaccattacgccgaattccggtaccctgacggccgagcagttcgacgagaaggtcaagaaccttgtgaccttcctggcctattcggccaacccagtcaaactggaaagccagcgcatcggcacctatgtgttgctgtatctggctttcttcttcgtattcgcctacttgctcaagcgtgaatactggaaggacgtgcactgatcacgcagtagtttctggttgttgaacgcgcccggggtggcctagcagtattgccaggccaccccgggcgcgttttcatttaaagttg

SEQ ID NO: 201448 - DNA, 1000 bp, Homo Sapiens
gtggtttcgtcaaggcagccctggctcagaagaacaaggcctgatcgatgacccagaagatcattcgcgtcggtaacatcgagatcgccaacgacaagccgttcgtcctgttcggcggcatgaacgttctggaatcccgtgacctggcgatgaaggtctgcgaagagtacgtgcgggttaccgagaagctcggtatcccgtacgtgttcaaggccagtttcgacaaggccaaccgttcgtcggtaacgtcctaccgtggccctggcatggaagaggggctgaagatcttcgaagagatcaagcgcaccttcaacgtgccggtgatcaccgatgtgcacgagccttaccaggccgagcccgtcgccaaggtatgcgacatcatccagctgccggctttcctgtcgcggcagactgacctggtggtggccatggccaaaaccggcgtggtgatcaacatcaagaaggctcagttcctcgcacctcaggaaatgaaacacatcctggccaagtgcgaagaggccggtaacgaccagttgatactctgcgaacgtggttcgagcttcggctacaacaacctggttgtcgacatgctgggcttcggcatcatgaagcagttcgagtacccggtgttcttcgacgtgacccacgccctgcagatgccgggtggccgcgccgattccgccggcggtcgtcgggcccaggtcactgacctggccaaggccggcatgagtcagggcctggccgggcttttcctcgaggcccaccccgacccggacaacgccaagtgcgatggcccatgcgccctgcgcctggataaactggagccgttcctggtccagctcaagcaattggacgacctggtgaaaagttttccgacggtagaaaccgcgtaaagctcatttctcgggtaaagtaccgcccgatccacccctgaccagtcggtcaggggctcccttcatcaggcctgcccaaagcaagttcgcccggtgaacggcaagaa

SEQ ID NO: 201449 - DNA, 1000 bp, Homo Sapiens
gttgttcaagcccggataggtataggttcgctggaacgcaggttggccaccgcgcggttcgatgacgtgccgggtcacgcgcggcagggggggccgggcgtcaccggggaacagatggccacggtcctggtagtagagatattcacgggcaccggtcgggggctcgaccttgctcacgcacaacaacccgttcaccagggcgtattccaggcgccagctggccagctcatgggttggcagcacgatcgatgtgacccagtccgtgttgatcaggttcatcgcataaagggcaacgggctggccgttgtcgccctgataagggcgctcgcgcaattcgatgcggctatcgtcgcgttcgatttccagcaggatctcctcacgctcgtcgctgatcgagctgagcatcatgtaagacgagttgaacggttggtactggaggtcgatcctgtgccccgtggccgcgtagatctccaccggcagggcgatacgcccgttcgcgctgcccatttcttcgaggatctccaccaggcctgaacggtgcaccacgcgatagcgcgcgttgccgcctggcccggcaggctcgcggtagaagtgaaagtgcgccagccgttgttcctgcatttgcaagcgtgagcccgaactaccggtcactttgaatgattcaccgctgtacgtggttatgacctgtgtatgcggtgcgaactgcgtcagtgacagattccatccccgcccccaacccgaatcaatcatattgagcgggttgaagttcaggctgagctcaagctcggggccggagaagtaattggcgcccaactcgggaagtttgatggacagtgtgtattgtccggtgcggctatcgacaccgctctccatgaaactcatgaagttaagggcgttggaatgcagtgaagattccgtactcataatgaacgttctcactctgcttgtcagggggcgggcgctgtaatacaggggctgcgcgtgccgaatacgtgtcgac

SEQ ID NO: 201450 - DNA, 1000 bp, Homo Sapiens
tgctggctgaagcaaagaccaatcaggtttggatcgctgaccgtctctactgcacgctgcctgtaatggaggcgtgcgaacaggtgaagacatcatttgtcattcgccagcaggccaagcatccacgcttgatccaggaaggtgagtggcaagcaccgatgcccgtcgccacaggcactgtgcgcgagcaatccatcgaagtaaaaggcgggcaccgctggcgacgtgtcgagttaacgcttcattcaccaaacgactcaggtgataacagcttgatgttctggagcaacctgcccgagagcatcagtgcgcaacagatcgcagacttctatcggcgccgctggagcattgaagggatgttccagcggttggaagcaattctggaaagtgaaattgaaaccctcggcagtccgcgagccgccttgcttggattcaccactgccgtgctggcatacaacgttctggccttgctcaagcgaagtgttgaacaggctcaccgcgatgccttgcccgagaattgggaagcctcgatctatcacttggcggtgcagatcagagggggttacgaaggcatgcagattgccctgccatccgagtacatgcccgttgttccgatggaaaacctggctcagcgcctgctggagctggccagaaacatccagcccagacaggttgcgaaaagcccacgaggccccaaggtgctcaaagcgaaggcctgggtgcaagggacggctgtacatgctcatgtttcgacggatcgggtcatcaaagccgccaaaaccaaaagaccttgaaagggatggccgtaagggcggaaaggtgactgtgcgccacctgcgtgaatgaatacctactcgatgtgaatgcccacatccaagaagcaagaagcaagaagcaagaagcaaattcgtctgttttgactcagcgaacagtccattcgcgatggcgacactgactcaccttttcgcccttacggcgagtcactttttgtcaaacgcga

SEQ ID NO: 201451 - DNA, 1000 bp, Homo Sapiens
ctcggccggggtttcgtcgtactcgccgaaggcgttcggcaggccggcgttggggtgggcggacacgtgggtatcggccttggtggccagctcttccaaatacgggcgcaggtccttggcgccgagggcgcagttcaggcccacggaaatcggcttggcgtgacgcaccgagttccagaacgcttcggtggtctggcccgacagggtacgaccggaggcgtcggtgatggtgccggagatcatgatcggcagttcgacgttgtcgtcctcgaacacttgctgcacggcgaagatcgccgccttggcgttgagggtgtcgaagatggtttcgatcaggatcaggtcggcgccgccttcgatcaggccgcgggtggcctcgatgtagttttctaccaactcgtcgaaggtgacgttgcgaaaccctgggtcgttgacgtccggggaaatcgagcaggttcggctggtagggccgagcacgccggcaacgaagcgcggcttgtccggcgtctccagggtcttggcatcggcaacctggcgagcgatgcgcgcgccttcgacgttcaactcgtaaaccagcgactccatgccgtagtcggcctgggaaatctgcgtggcgttgaaggtgttggtttcgagaatatcggcaccggcatccaggtaggccttctcgatggcggcgatcacgtccgggcggctgagcagcaaaaggtcgttgttacccttcacatcgcttggccaatcggcaaaacgcgtgccacgatagtcgtgttcctccaggcggtagctttggatcatagtacccatgccgccgtcgaggatcaggatgcgctctttgagtgcgttctggagtgcttggagacgagcgctgcggtcggacataggaactacctggtcgggcgaatatcagaaggtgccgaatcataacaaagctgcgcggtttttaggcatgtcgcccatttgcatgaaaactgctcatgttgggcgggtggaggcagcgcga

SEQ ID NO: 201452 - DNA, 1000 bp, Homo Sapiens
ccagcagctcgccagccttgtagccatagccacgcagcaggaagtcggcttgatacaggcggtgttcgcgcagcagcggtggtgcggcgaggggtacgctgccggggctgtcggggatcgggctgaaggcagagtagtacacgcgcttgaggccgtagccctggtacagcgactcggcattgcgcagcaaggtactgtcgtcggtgctgtcggcgccgacgatgacttgggtgctctgcccggccggggtaaagcgcggcgccctgggctcgttggccacggcctgctggccctgatgaatcacgcccatggcctggcgaatggtgtgcccttgcttttctggcgccaggcgcttgaggctggcgtcggtgggcagttcgatgttgacgctgaggcggtcggccaggcgcccggcctcttctatcagcagcgggtcggcatcggggatggccttgaggtggatgtagccgcggaagctgtgttcttcgcgcaacagccgggccacacggatcaactgctccatggtgtagtccgccgagcggatgatgccggagctgaggaacaggccgctgatgcagttgcgccggtagaagtccagggtcaggcgcaccacttcctcggggctgaagcgtgcgcgcggcacgttgctggagcggcggttgacgcagtactggcagtcgtacaggcagaagttggtcagcagtaccttgagcagtgatacgcagcggccgtccggggtatagctgtgacagatacccatgccgttggtggcacccaggccgtcagcgccgcgcgaattgcgcttgggcgcaccactgctggcgcaggaggcgtcgtacttggcggcgtcggcaaggatgccgagtttggcgatgagttgcatggtggctgacctgcgatactgagtattcatacagtattttgagatgtggccgattgcaagtgtttgtgcgtcgtcatacccgactaaacgcgtcggctaagcttgtggctgaaccac

SEQ ID NO: 201453 - DNA, 1000 bp, Homo Sapiens
cgaccttgaaggtatcgccctctccggccgtgacgctcatcaccccacgtacatcgcccttggccagcatatggccgctgaatgcccacttccccggcagtacgtccgccttgggtttggccttctgccattcgtcccaggccgcgctatccatcgggaagcgcttggcaaggtccggcaccacttgctgcagggcgatcggcagccagtcgcggtcacgcgcctgggcctggtattcaagggacggccattggccaaggtggaagtggaccaggtgttcccactccttggccgggcgccgttgcaaggcgacacgggcacccgagtggcaacggccacaggtctcgctgagctgggtgtcgaagtgctcgacagtattgagccgacgctccatggcgtagcgcacgccatcggtttcgctgggcgccaggccctgtttgtcggccaggtatttgaccagcgtgcgacgatcgtcgtcgctgatctgaaggccatgcatcacctgcatgcgggcgatgctcatcagccagccttccggtgtcttgcgctggtggctgatgcggctataggtgtcgttgccttcggggatatggcaccccatgcacttgttctgcaacaggctcgggccctgctcggccgccatggcctgggtgctcagcagcgcggcggcgaccagcgccagtttgcccgcatgccgccggagtcgagtcgtcttcaaggtcagacctccacggttgttgttcttatcgttttcgcacgctttggtacagcaggtgtgcatgtgacggttgtgatacaggaactgtgccagttagggtaaaagcgttttctttcaaccctttaagcggttttcggggcttggccaggagccgggatggccatttgcagcgtgccatttcgcgacagggtgtttcatgttgagacagggcccgcgaagaggccgaacaggcactgtttcaccaccgtctcacagcgtctcaatgtgcaacagcgcaacccg

SEQ ID NO: 201454 - DNA, 1000 bp, Homo Sapiens
gagcacccatggctgttctcccgcgccctgctggcctcggaaattttctgggtcaacccggtcgacctcggcagcccacggcagttgactgccaaggtgcgctaccgccagagcgaccagcgatgcaccctggaacgcaccgccagcggctaccgcgccgtgttcgacgagcctcagcgcgccgtgacgccgggccagtcggtggtgttctacgacggcgaagtgtgcctgggcggcggcgtgatcgaggctgccgagccgtggagcccgcgcgcatgagcaacctgcaggagcagctgatcgcgttgggtggtgtgttccaggccgccgtgcttgtcgaccgcatcgcccgcaccggccaggccagtgaagccaatatcggctgcatgctgggcagcctgctggtgcgcgaccccaaggacaccctggaggtgttcggcggtgatgacctgaacctgcgcgacggctaccgagcgctgatcggcgccctcgagcgcgaccccaacagcctgcaacgcgagccgctgcgctacgccctgtcgatgctgggcctggagcgccagctgaacaaacgtggcgacctgctggacaccatcggcaaccgcctgccgcaaatccagtcgcaggccgagcatttcggcctggttcacgaaaacgtcatcgcttccagtggagccttgtatcaggacaccctgagcaccttgcgccagcgcatccaggtgcatggcgacatgcgcttcctgcagcagcccaacaatgcctcgaagatccgcgccctgctgctggccggcatccgcgccgcgcgactgtggcggcagctgggcgggcaccgttggcagctggtgttcagccggcgcaagttgctgaacgaactgtacgacatgatgcgcagccccaactgacgggctgggcagcccgcttccacagggtctgccaccagatccaaattgggccgacctttggtcagccacccgacccaggcgcatttttcatgtatgat

SEQ ID NO: 201455 - DNA, 1000 bp, Homo Sapiens
gaccatgatcagcccttcctcgttcaggaagcgatgctggttggccgcccgcgtctcggcggccaggccggcgtgatacggcagcgcggggaacccctgactacagaggaaggcggcggtttcgtcgaccttcttgcgcgacaggcagtagacgatgccagcgttgccacgacgttcgccgaggaaggccatcaactgcttgcgcggtgcctccttgggcacgatgcggtaaaagatgttgggccggtcgaaactcgacaggaagcgctcggcgccttgcaggtgcaggcgctgaacgatctcctcgcgggttcgcatgtcggccgtagcggtaagcgcaatgcgcggcacatgcggaaacagttcggccagctggcccagctgcaggtactctgggcggaaatcgtgcccccattgcgaaacgcagtgggcctcgtcaatggcgaacagcgagatgtccagatcgcgcaggaagtcgagcatgcgcggctgcaccaggcgttccggcgccaggtacagcatcttgacctcaccacggcgcaggcgcccggccagttcacgctgctgctccgccgtcagggtagagttcagggcggccgcagacacacccagctcgtcaagggtggcgacctggtcgtccatcagcgcgatcagtggcgataccaccaccgtcaagcccgggcgcagcagccccggcacctggaaacacagcgatttgccgccaccggtgggcatcagtaccaaggcatcgccgccattggccacgcattcgatgatcgctgcctggcgcccacggaaactgtcgtagccgaagatgtccttgagaacgcgctgagcctgttcgagcatgtgcaactccaaatcgccgtaccatcctggataaaggctggacgaaaaacccgccccgcacacgccaaatgcgtaagcggtttttgccaggcagccattgaaacctgcccctggatgaaaaatcgcggagtataccgcagcaccgtgctgc

SEQ ID NO: 201456 - DNA, 1000 bp, Homo Sapiens
agatggcagcggaaatcaccacgacgttcagcacggcagcggcagagccaatgcccaggttgctgaagatctgcacgaacgggctgccctggctgccgatctgcggccatgggtacaggcacatcagcacgaacagggtgagcacgtagaacagcaggatacgcagtggcaccgcgttgatcgctttgggaatgacgcgctgcgggtcttttgcctcgccggcggtgacgccgatgatctcgataccgccgaaggcgaacatcaccacggcaaacgacgcaatcaagccccccacgccgttaggcatgaagccgccgtggtcgaacaggttgctcatgcccacggcatgcccggtacccacctggctgaaaccgaaagccatgatgccgaggccggccaggatcatcgccacgatggcgccgaccttgagcagcgacagccagaattccatttcgccgaataccttgacgttgcataggttgaggccgccgatcaggaaaacgatgcccagcacccagatccagcgggctacctccgggaaccagaagcccatgtagataccgaacgcggtgacgtcggcgatggcgacgatgaccatctcgaaagcgtaggtccagccaaggatgaagccggccattgggccgaggtaggtggtggcgtagtggccgaaggagccggccaccgggttgtgcacggccatttcgccaagggcgcgcatgaccatgaacactgcagcgccgccgatcaggtaggccagcagaacggccgggcctgccatctggatggccgaggcagagccgtagaaaaggccggtgccgatggcggagccgagggccatgaaacggatgtggcgggcacttagcccgcgcttgagaccttgagcttgttgcatgtcacgtccttgaattgtttttgtggtcgtgagattcagggggctgctgcgcagccccttcgcgggcacgcccgctcccacaggggatggtgttttgcacctacttct

SEQ ID NO: 201457 - DNA, 1000 bp, Homo Sapiens
catttaccggattgggaaaccgttacatccatgcctagataagcgacaaaggcgtcgctgttcttgaactcgccgcgcatgaaggacatcaccaggccggcagccgttaagaaaccaacacccggaagcctctgaacacggcgcatctgatcggaaagccccgccttcttgatcaccgcacgcagctgtttttccagcgaaagctctatgcgttcgagcacttcctcaacacgtttgagttctgaggcaaacaatttgtcgcccgacaagctcatccgcagcatgccgcgcactgctacaagtttggcgcggcggcgcagcagcacctggatctcacgatgcccggctggtggcggagtccaagccttcaaagagccccgctcgttgctcaggaagcgggcgagcaaagcggcatcatgggcatctgtttttgcccgtatagcaacactttcccggtacttactcagcctcagcccatcgataacgtataccgcgaagcccgcagcatgggcttgctccgccatttccatgtgataggtactggtcgcttcgatggccagcgctgagcctttgggcagcgtcttgagccaggctttgattgctttcggagtgttagggatggcgaaggatttggtattcggagcggcttgaatcaccagttcatctttggaggtgtccacgccagcttcgattgggattgcggacattgccatgaatagctgctccttgtagcgtagtgtgacttgaagggcacaccctggcgcaggcttgcttctattgtcgcttgctcgcgaggcattccttatcggcgcttgggtgttgaaaggaggaggggtgatttctcctacggtctgtactgcgcgaacagtcagaagcgagttatggccctcctcctcccttcaagtcctaccatacaagcgggtttacccgcgaaagggccagatcaggcggcacaaaaaaaggcgaccctctgaagaaggtcgcctttttcattcctggg

SEQ ID NO: 201458 - DNA, 1000 bp, Homo Sapiens
agctggaaccgggtcataaccaccgggattccacgggtgacagcgacccaggcgacgaattgacagccagccgccgcgcaaaaggccatgattatcgatggcttcatacgcgtagcaggagcaactggggtagaaacgacagtgactggccatcagcgggctaatggcatagcgataaaactggatcggaacgagtgccagtttacgcatcggtactgtctacccctgcaggttcggacttttcttccggagtgggtcggctacgcgccagacgcttccagagcttgccgaaatgctgaatcagttcagggttttctacgtcacccaaacctttacgcgcgacgataacgatatcccaaccgaccaaactgtcttggtgttggcgaaatgattcgcgcatcaggcgtttcaaacgattgcgctcgacggagagcttcacgctctttttacctatcacaagccccagacggggatgatcaaggtcgttgttgcgcgcaaggagcaggagatttttccccggaaccttaccggtaggggagtcaaagactgccttgaaatgccggggagtcagcaaacgcttttcccgactgaagtctcgactcacctcctgtgccgatttatcaaactgccagacgcttacggcctttggcacgacgacgcgaaaggacggcgcggccgtttttggtggccatacgtgcacggaaaccgtgggtgcgggcgcgcttgatagtgctgggttggaaagtacgtttcatggcgtgttacctggttcgtccactacgggccggaatggcccccgttttaagagatcggggattctagagaaagcgcgcccttaggtcaatttccaaccagcttttcttcatatacgtcttttacaggccattcatccttgaaccgcgcttttgagccgacggcttgcgtcatttatagaaataaaaagaaagagaggatttaaagcttttttataaagcttataactcttacgcagcagctttct

SEQ ID NO: 201459 - DNA, 1000 bp, Homo Sapiens
ttgcctcgggggtgcccggcactgggtcgtacccaccgtgggaccatggattacatcgcagaatccgccagatgatcatcggcgtcgcgcgaaagaccccgtgcacctgtaacgcccgcaggccgtacgtcgaacaactgggttggtacttacagacatccccgtagagcggcgagatgagggctcgccaccctttgacaaatccaatagctagccaggtaaggggacgaaaacgccgcaccgttgcccatacgccaccgtcgtcgttcgggtgccgtgagggaatcgccgcagctatcatcgcagtttccgcaatgcctggtgccatgccccgtcgagatccttggcaacccgatcaggttgggtcgctgcagccggtagagctcgcacgacgaccacggtgccatcctcgagctcatccacgagaggacggcagaggtgacgcagtcgacgtttgacccgattacgtgtcacggcattgcccacggccttggacacgacaaaaccgacccgcggcgtaacgtcaaggtcagatcgggaagtcgtcgttgacactaatggttcaccagaaccacagttacccacaggtgctgtggataactcggtcttatcagctgagtcgaacctgaattgcgcgtgtcgtccggcgtgaacgacaagagtaggacgacccgacctgacgcctccgcggaccgcggcacgatagtcaccgggacggtgcatccgcgaccgggcaggcagcataaaaactcaggccgacaggttgacgcgacccttgcggcggcgagcagcgaggatgctgcgaccagcgcgagtgctcatgcgggaacggaagccgtggttacgggcacgacgacgattgctgggctggaaagtgcgcttcacggggatgttctcccttgtgtcttggggatcacccgggggatcgacgcgagccggtccctccggggcgcccggatgggcgcaggggaagtagacgctgaagacagcgacttaacaa

SEQ ID NO: 201460 - DNA, 1000 bp, Homo Sapiens
  misc_feature (881)..(881): n is a, c, g, or t
tgactgtgagactgacaggtcgtgcagggacgaaagtcgggactagtgatccggcaccggcaagtggaagcggtgtcgctcaacggataaaaggtaccccggggataacaggctgatcttccccaagagtccatatcgacgggatggtttggcacctcgatgtcggctcgtcgcatcctggggctggagtaggtcccaagggttgggctgttcgcccattaaagcggcacgcgagctgggtttagaacgtcgtgagacagttcggtctctatccgccgcgcgcgttagaaacttgaggaaggctgtccctagtacgagaggaccgggacggacgaacctctggtgtgccagttgttccgccaggagcaccgctggttagctacgttcggaagggataaccgctgaaagcatctaagcgggaagcctgttccaagatgaggtttctcaccccctcgagggggtaaggcccccggcagaccaccgggttgataggccagaactggaagtgcagtaatgcatgcaggtgactggtactaataggccgaggacttaccacaaagaagctacgcgtccactgtgcggtatctgaaacaacacacagatactgatgagaaaccctgttttctccatcccccaacaccagaaactggtgttgacgtggtgaaaccaggtgatcagaagaaggttactgtgacagtttcatagagttacggcggtcatagcgaaggggaaacgcccggtcccattccgaacccggaagctaagcccttcagcgccgatggtactgcactcgacggggtgtgggagagtaggacaccgccgaacacacattagagaagccccccaaccagtgatggttgcgtgttctcgtacccaaaacnccccaccaccaccaccatcacccgaaagcaccgccgccggcacccccgacttcgagcgaacggcacgttgtgcctcagatcgacccaacgcaccgttcacaccatcaaaggggcgggca

SEQ ID NO: 201461 - DNA, 1000 bp, Homo Sapiens
ccacaaaactctctgttcctactgagcatcagggtagtttgctgtgtttgtgaattacagaccaggaagcatctttctggaaataaattctgctgcccagaggcagaatcccaatacaaggacttcatctgtgaaccccaaagctatttctctaaatacccataaggggcccttacagggctggatgtctgactgttctcagctccagccagggcccaaggcaagagtctgcccagtgcagtccgacaccctctgattagacaacctgggtgcagagcagggtgtggggtccctgtaaagataatgctgggagagcttgtgggacaagatgttgctcaggtagggagaggggaccatgctggtgaagacaccaaggcctcctgacctctggcttcatccttcagtctctgaacagattccaggagattctctttttcatcaagttcactttccaggaaggcatttctttcgatggcctgattcaagcgctgctcaaagtcttcgagagacatgatcgtggcgctggcgaagagaaaagcagagttatccaagaggacaaaccgcagcatccctccagcaccgcggatccaggaggtgcgaagggtcagacacacctgggcacaagtcccagccccaaacttcctagatgccacagagtgggccaagtcccttaaccttctggggcatgggctctttacctgcagaatgggactcatcatagctcatggggtgcacgaggctgtcatgaggattaaataagatgctgcccacacagcactcagcaataagccaaagccctatcaggactgcatgtggcatttggtggtttgagaagaccactatgctccatcttctcttgcaagctcacaatgccaaccagcattaaaaataacctaatatgactgggcaaggtggctcatgcctgtaatcccagccctttgggaggccgaggcaggtggaagacctgagatcaggagttcaagaccagcctggcaagctt

SEQ ID NO: 201462 - DNA, 1000 bp, Homo Sapiens
gatactatttacatgtacacacatgcaggcacacacatttcaacacattttctattctacatattttcgattggcaagtgtttttacaaatacaaagaatcggccgggcatggtggctcatgcctgtaatctcagcactttgggaggccgaggcaggcggatcacctgaggtcaggagttcgagaccagcctggctaacatggcgaaaccccatctctcttactaaaaatacaaaaattagtcaggcatggtggcacgtgcgtgtaatcccagctcctctggaggctgaggcaggagaattgcttgaacccaggaggcggaggttgcagtgagccaagattgtgcctttgcactccagcctgggtgacaagagttagactctgctaaaaaaaaaaaaaaaagaaaaaaaaaaaaaagaatcacgtctggaagttcacatacacaagtgctgcctttggagaagtggagaaagaaatagtattttaaggataagaaggctgtcaaagggatttttaaccacatccataagggttttacttttaataacgagagtatgcattatttatgtaaacaaaaagtaatcatttttaaaagaaatttgtttgcatggaggagaaactcgaaggtggaagcttaattggaaactattgtaattgtctaggtttgaggccatgggtagcaatgttagagatggaaatgacaaagaaaattacagtgtatgagtcaacagaatgtagcgtagcagaaaagagaggccacagactgagattcaagggagagagtgagttcagctttataaaccaaagtcctgaggaccgctattatgtaaacctctattgcttgcatgtggattgctttctctcgcataataatgaccaattagatcagttaattttgtcgattaattagttacttggtccacagctgtgttaacagctttatgaaacaaccacaaagaaacccccagacagctgatttgatattgagtagctacaagctt

SEQ ID NO: 201463 - DNA, 1000 bp, Homo Sapiens
tgcagctatatgagctcctgagcagaaaactcagcttagctgttcctcaactccggaccaaaggaaacagtgggataataaatgggtgttgccttaactcagagtttctgatttttgttatgcagcaaggaaactgacacaaggaagcagaaaatttatgaacgggtaaaaggtccactgaaaggacaagatagtcccacggaaccaagtgtggaaagttcactgataagagtttcacactccacactacgcttaacctgtaacaaacaaccgcttttgttggggccaagttttggtgtcctatccgagaagattatccacaaggatctgaaaagtctgtgaaaatattcctccctttccccactgcctatgggtgtgaggccagatttccttcatatacttcaaccaaaacaacatctcacgatggaataaagtgcctgtgagaagccagctgcttccatccagccagacatgagagaaatctgcaaaaatgtaacagcgtgccgctctcctcaatacaagtttttgtcttgccaagcatagttatttctcataaaaatgttatttatgttaaatgtatgggtttaatgttgttcattttagattgattaataaagtctttcagttttaaattctaagatgatgagtattgataaacgtgacccacataagcaaaatctctcttgagatctcaatgatttcaggagtccccagaccaaaaaagtttgagtaccaccattatagggttctccagtggcttgaagtgcctccagctctgccaggcccaagctggctctggctctgtgggatgatgtaattaatgagacagaaccagaccaggtgggactcacctcctcctccagcaattggtttcctgcggccatcatctcgatcatttcgatcatccagggcatcagccaagtcaaaatcatttccttcatggggtcccaaaataaaagaaatactcaattagttcatctatgggtagctcatttggatc

SEQ ID NO: 201464 - DNA, 1000 bp, Homo Sapiens
ctattttttagagtaaagtgagagcaagtttattaagaaagtaaagaaataaaagaatggctactccatagccctgagggctgctggtcgccttcttatttttatttttatttttatttttattttttttttgagacagagtctcactctgtcgcccaggctgcagtgcagtggcgtgatctcggctcactgcaagctccgcctccctggttcatgccattctcctgccccattctcccaagtagctggactgcaggtgcctgccaccatgcccggcaaattttttgtatttttagtagagacagagtttcactgtggtagccaggatgctgtcgatctcctgacctcgtgatccaccccctttggcctcccaaagtgctgggattacaggcgtgagccatggcgcccggctggttgcccatttttatggttatttcttgattatatgctaaacaaggggtggactattcatgagttttccaggaaaaaagtggggaattcttggaactgagggctcctcccctttttcagccatatagggtaacttccaaacgttgccatggcatctgtaaactgtcgtggtgccggtgggagtgtcttttagcatgctaatgcatataatgagcagtgaggatgaccagaggtcactctcattgccatcttggctttggtgggttttggctggcttctttactgcaacccgttttatcagcaaggtctttatgacctgtatcttgtgccgacatactgtctcatcctgtgactaagaatgccttacctcctgggaatgtagcccagtaggtctcagccctattttacccagaccctgttcaagatggagttgctctggttcaaacacctctgacatttccctcctcccttttatctgagaacctttattcctaagggttgtagagggatgaagatccatcttctgtaacttcttcaggctgaataggggtgatgatattactgcctaattatgagagtcttttgaatt

SEQ ID NO: 201465 - DNA, 1000 bp, Homo Sapiens
ccttgctcactggtagcgcagcagtctgagatccaactgtgaggtggcagcctggctgggggaggggcgtctgccattgctgaggcttgagtaggtaaacaaagtggtctggaagcttgaactgggcggtgcccaccacagctcaaccaggcctactgcctctagactctacctctgggggcagggcatagctaaacaaaaggcagcagacaacttctgcagacttaaatgtccctgtctgacagctctgaagagagcagtggttctctcagcacgacgtttgagctctgagaatggacagactgcctcctcaagtgggtccctgacctctgtatagcctaactgggagacatctcccagtaggtgctgatagacacctcatagaggtggctgcccgtctgggatgaagcttccagaggaatgatcaggcagcaatatttgctgttctgcaatatttgctgttctgcagcctccactggtgatacccaggcacacagggtctggagtggacctccagcaaactccaacagacctgcagctgaggacctaactgttagaaggaaaactaccaaacagaaaggaatagcatcaacatcaacaaaaaggtcatctacaccaaaaccccatctgtaggtcaccaacatcaaagaccaaaggtagataaaaccaaaaagatggggagaaaccagagcagaaaagctgaaaattctaaaaatcagagtgcctcttctcctccaaaggctcgcagctcctcaacagcagcggaacaaagctggatggagaatgactgacaagttgacagaagtaggcttcagaaggtgggtaataacaaatttctccaagctaaaagaggatgtttgaacccatcccaaggaagcaaaaaaccttgaaaaaagattagacaaacggctaactagaataaacagtgtagagaagaccttaaatgacctgatggagctgaaaaccatgccacgagaatacgtgacacatgcacaagact

SEQ ID NO: 201466 - DNA, 1000 bp, Homo Sapiens
tggtcaagtaaaccatcatggtgattgcagggggctggaattgggaggagactaaagacatttgacttcgtgcaaaagctaaaagcagtttaagaccattttttttttggcgggggtggggggaggtgatgaacattcccagtttctccaatcaatagcatttctgtgagaattgtaacactatgaaaagtcatttctaatctggaaagtcttggtggttgaaaagtttctcttacctttattttcagttatgtgattattgaattccctggtgttgttagatgggctattttttatttaaaaacatctcttttttctaagatgatctggatagactatccagtgcccatacataacactcatcagtttttcaatctctcattctcaggtaagaaaacgatttttgtctttcagactttacttttgtacttacctttttatattttactatgtacttgtaatggaagtaagattcctctgtaatttgaaacggatcatcaagttgtaagtggggaaaatctaagtaatgagctggaattttttttttcttttttgagacgaggtctctctctctctctgtcacccaggctggagtgcagtggcataatcatggctcactacagcctcgacttccagggctcaagcaattattccacctcagcctcctcagtagccagtgaatagctgggactacagacatgtagtgccatgcccagctaatttattttttatttttaaaattatttttatttttatttatttattcttttgagacagagtctcaccctgtcacccaagctggagtgcagtggcacagtcttggctcactgcaacctccacctcccaggttcaagtgattctcctgcctcagcctcccaagtagctgggattacaggcacctgccaccatacctaatttttttttttttttgtatttttagaagggatagggtttcaccatgttggccaggctggtttcgaactcctgacctcaagtgatc

SEQ ID NO: 201467 - DNA, 1000 bp, Homo Sapiens
agaacattgttcccttcccccagctacgggatcaggccggatatgtgaccagtggtgtggccaccgtcgttctatgcttgtgaagagagcaacccaagcaagcaggcttgtagcttaggctcctgctagtgtatatatagtggttttctctttctctccatatcaaccgttttatattgcgcacgcgtcattgaagagtgaaatgatggttgcttcttccgactaacttactgtgtgatttgactgctcctttagtggccccttgaaagtgcgttatatcgactagagcgggggtgaataggcgatttttatgaattcttcactgaggaatttgagggtgaggaaattccttagcgaagaactacttgcagcggaataagtactcagaagtaaacataacagaacacaagcatggtcatcatgatgaaatgaagacaggcacagcgtacaaaaagcataaacacaggataacacaggatgaagacaaacagacttaagaaattgaactgaggaaattgagaaagtcttcagtcaaagtcttcaaacacagatatgaacaagcatacaacacagttatgaggaaatgaaagagttgaggaaataaaaccagtaagcttggtgaagacaatgatttggtagaccagttccaactgctgtctcagttgtacatctggttggagcggctaggtatttaaacctgaggacacacagtcctcaccatattctgcttgagctaaggtcacacagacctcgcccaatcactcatggtaagtcttcaggtgacttccgaaccttcacaaactcggtcactcggtgatccacaattccycttggatgctctagaccatgacgcctaaccgtctggaagaagcacagtcttcaaaggtaacaagcgtcggatccacgcaggatcaatctcttcagtgatgctcaatcactttgggtttagggtttagggtttagggtttagggtttagggtttagggtttagggtttaggg

SEQ ID NO: 201468 - DNA, 1000 bp, Homo Sapiens
aattgttttcaacatagctcaaccaggaagattgttaggcattggaggccttcctggctttcataccctggtaaacctcaccccacatgtgctaaccatagataagatggagccttgtggttagaagacccccaagacactgtctagctgctgagaaacatcacttagactcataagctccttctccaatttccatctcccccagcagttctcttgccttcctccccatttgatggtgatcccacacccataaactctagacagtcttttactctgaggatgtccccgcttctgctaccctatccaagcaccacccaataaagttgtttgtgtggtactgcccctggttggtcatagcatttttcttgatcaaccccctaatcctgcacagtgtgcaatgaactctgctgaacttggagtctcgcacttagaggttgatgattatctgagctgaggtgtgtgattttagggggtctgtttggactgttaaactgataaggccagaaggccttagaaaagcacaccaggcaggcttctcactgggacatggaatgctgctgttgtctggtcttgaagcatctcagctttcctgctgcagtagaaaactctctgactgttttggaacccagaagtcacaaattacaataggcttgtctcgactctaagctaaaacccaaaaatgtccactctgggctgtttcagactcatgtcaagctgtgctgaacagaaagcaggcatagctcgatgcactggaggggtctttgaccctgtgatcctggtaggttttgaacacccctctctggagttagaaactgtcacaacctagatgctgtcctggactgtctgcatctcttgcagatgcccatgatgaggggattgttctctggtggggccagcgagagtggagctgttcatgaacactgtatttttgatgtagacaggttgcattttttactggtaatgctgtcaaaagctgcacattgagggagggcacccaaca

SEQ ID NO: 201469 - DNA, 1000 bp, Homo Sapiens
ccacacgaatatacagaacactccgaactgtccccttaaaatggcaaattttatgagatgtacattttaccactattaataatttgttaaaaactaattatcaactgcagggaagggtgatggatttgtttcttttaaaacttcctcagacagatcatagtctgcagctccaataattagtagagcacaatggtggtggcagagggcgtcggactgctgggatgctgggaatatttccacaatggagggttagacgagagctcaaagtttcacttttttttttttttttttttttgcatttgagctaagattttaacaatcctgtgaaaataggtaatatagtcacgtatttgttgaatacattatttcaaagaaccacaaacacacagaaaaaatatttaaaaagtccatggtgggggaaatgatccagaaacaacagctcttctacttccagccctaaccgtctgggatgctagatggttgtgggcaaaccgtggaaaaagataagcttctgtttttcaagattttattttgttagagagtgcagaaaatctaagtgatgtctctgtttttgctttctagcaattaatatatgacagcagtctttgtgatttattttaactttctgcaagacctttggctcacagaactgcagggtatggtgagaaaccaactacggattgctgcaaaccacaccttctctttcttatgtctttttactacaaactacaagacaattgttgaaacctgctatacatgtttattttaataaattgatggcaaaaactgaagtttctctttgttctaccgtagaaaagaggcgttagagggcctcacatattttacatacacacacacacacacacttacttattaaagaactcatggtcatgggttgaggactctgtgaagcatttgtttcctcagtctgacctctaagccttggtactctctctgaagagtgtttccctgtccccatcccaccacctcccccgtcgac

SEQ ID NO: 201470 - DNA, 1000 bp, Homo Sapiens
tagatgcacagggaaacagagtaagattctcttggactttgaatccttctacatttgatacgacttttcaaaccacactccctctgcagttctttttcaggtgggcagtatgtttcctcactaggtgaaataattgctgttctaaagatagaaacaattggtggatttgattttaaagatttactgaaaatttttaaaaaatgataatggaaagcatttgttaaaaaaaagaggttatttcccagaaaaggtaattgttcatcatctctggcaggtgacatttacctttgggaactcatgagtgtctaggttctgtccctgaaatctctggctccaaaagtctctctcactaaggtgccagagatgatcatgttgattaatactgattcatgctaacaaagctcacaagagactgataaagccaaaatggcaaagtattgacttatagtgaaaaatgtaattgtcagatatcctggacacttgctccgtccagtttggaagccagtaaatccaaggcataggcacctcacaggcaggcaaagattaggccaaattcacggcagattgctcagtgagcatatcggagcagtcaccacctagatgccaatggcctccaaaacgatctctctagccaagcattatcctaccttctccaccaccatcctagtccaagctgccattgttctttctcctggacaaatacaaaacacttcttgctgttttcccagcctccacactttctcccttccaattcattatgcacaatgtgtccagagtaaaccctttgtttgtttgtttgttttggagacagggtctcactttgtcagtcaggctggagtacagtactacaatcatagctcactatagcctcaaactccagggctcaagcgatcttcccacctcagcctcccaagttgctgagataatgtacaggtgtgcactaccatgcccactcattttttattttttgtacgagacaacggtcttgctatgttcccca

SEQ ID NO: 201471 - DNA, 1000 bp, Homo Sapiens
acccctgctatattgtaatgtgcctgcccaagacttctgcccattttaaaattaggttgtctttttaatttattcatacaagttctctgtaagttctaaattccagttttatattcttaatcatttatcatgttttgaaaattaaaaaaaaaaaacagttattatgttggaccattcctatagcttttgccctgtgtttctaccatagtcccctaagagatgagatcactcttgtgaaaagagcttcctgctgttacccaagagagctgtctgctgccatctttgccccagcatgacagtgtggcagcccagcccagagcactgtggctctgcttgtagccttggggagtcccactgcctagaccaggctgggtgaaaatagcctgacttcttggaatggacacagttttcaaaaggagcataaatttagtctgccaattcatgtatatgccatgatggtcaaaattgagggatctgggcaaagattccttttccattcttagccaaatgctttctaggttgggcatcagttgatggtgcaattggaggaaattgcccaattattttgttgcttcactaacaaaatgcttactgtctttgcattgtaaaatctttttttcatttataagctccccaagggagcaaaagccatgcacagtggtgtgccaggagccctcatgattgttttgcctgttatcttatttgagcaaatattagtatctcattttgcagcaaggaaactgagggtcagagtagttacatgaattgatcgggatcaagagattaaataattgaccaagccagaaatgttttactccaaagtccatgatcttccccatgggcccatactgtggtttccctttcatatagagatggggctggaagggccattattgaatatctggtcaagttccctcacttgatggatgaacgctgagatctggaaggagtcaaccaactcatcacccaagattcccccaacaagctagcagcaaagctt

SEQ ID NO: 201472 - DNA, 1000 bp, Homo Sapiens; identical to SEQ ID NO: 114824

SEQ ID NO: 201473 - DNA, 1000 bp, Homo Sapiens; identical to SEQ ID NO: 114855

SEQ ID NO: 201474 - DNA, 1000 bp, Homo Sapiens
ccttctaacaagagtggagcctctttttcttaattctctgaaagagtttgtgtaaaattagaactattgcttcttgaatatttgatagatcttgctgatgaagtcatctaggcctagagtttggtttgaacggaagatattttattactaacaaaaaatttataattatatgactatttagggtctttgctttttcttgagtcaatactggtaatttctttttctaggactttgttcatttcaactgtattttcaaatgtattggcacaaagttattcacaatagccattactttaaaatcctgtctgcatctgtggttatagccattttccattcatagtatagtttccatgtgccttttctcttgtttctctcaatgaggactgtaaatgtcattagtcctgccagggaagcttctgcctctgacaggcgtcactgctttgctccctgctctaaggagtcacctgtgtgaagtttttccttttcccatcaatcatgtcgccatcctcctggcaacagtatagattggtgtctgacgtaggaatgacacaaagaccccatccaaaagtagccaaactttatttcaagcttaagaaaatgcatattttctccaaacttaagcagaacattgttatgagaaaaaaactggactttcttgcactgtatttcttttttagggggaggggggaaggggagatggagtctcgctctgtcgcccaggctggagagcagtggtgcgatcttggctcactgcaacctccgcctcctgggttcaagcagttctctgcctcagcctcccaagtagctaggattacaggcgcccaccatcacgcccggctaatttttgtatttttagtagagacagggtttcaccatgttggccaagctggtcttgaactcctgacctcatgatccacccgcctcggcctcccaaagtgctgggattacaggcgtgagccaccgcacccggcctcttgcactgtatttctgttggaagatc

SEQ ID NO: 201475 - DNA, 1000 bp, Homo Sapiens
ttaattcctttccattctattccattccattccattgaaatcgagttgattccattccattccattccattccattccattccattccggatgattccattccattggattccattccattccattcccctggactggggttggttccattccattccattccattccattctattccactccattgcattggggttggatccactgcatttcattccattccattccatttcattccattcgggaatattccattccattggattccattccattaaattcccctgcacttgggttgattccattccattccattccattccattccattccattcggttcggttcggttccgttccattccattccattccattccattacattccgttccgttccattccattccattacattcggaatggattctattcaattcccttatactcccttacattccattccattcgggtagtttccattccattccattccattcctctccattccattggagtcgggttgattccattccattggattccattccattccattcaactccaattctgttccattccattccattacattcggattcattctattcaactcccttacactccattacattccattccattcgggctgttccattccattccattccattccactacattccattgcactcgggtttattccattccattccattccattccattctattcaattccattccattccattcccctgcactcgcgttgattccattccattccattccggaagactccattccattgcattccattccattccattcccctgcagtcgggttgtttccattccattccattamaatccattccattccattccattccgttccattccattccattccaatcgagttgattccattccattccattccattccattccacyccattccagtcctttccattccattccactcgggttgatcccgtcgag

SEQ ID NO: 201476 - DNA, 1000 bp, Homo Sapiens
tgtctctaattatccctcaaaaaagttgattaaaaattaatacctatgtgcatactgccctaccatttaaaaaataagaaaagtcggtggtttatgcctgtaatcccagcactttgggaggccgaggcgggcagatcacgaggtcaggagttagagaccagcctggccaacatggtgaaaccctgtctctactaaaaataaaaaaattagccaggtgtggtggcgcacacctgtaatcccagctcctcaggaggctgaggcaggagaattgcttgaaccaggaggcagaggttgcagtgagccgagatagcgtgactgcactccagcctgggcgagagagcaagattcttgtctcgggggggaaaaagtgtactttgaaaagaaaatcaaaagttggtcgagtttagcattctgccttctcagaaccttagagttgtggggttggaggccaaggccttcctctgaagactctgaggcagcctcagctgcccacccagtgaattcactcattttatctaagactccatctgaagagggggctgcctccatgcacaaagtgagtctaggaaccactgcactggataatttaaaactcaaactgttttggtagatcacccgtggccaacgcaccctgggatgaattccatcaaacctgcagagctatcaggggacacaccagatacacagcctgcacatggcctatagaatcaggtgtccaaagtgagaaaggaagcgtggaaggaggaaaccagcaggcgtgcagaggagcagctgctttcatccccagcagcgacacttccagcccgcgggcctgatggggacacctgcccacgaaccccctgcaggggacacgagttctccttcctctccgagtccatctttaagatggtaacagagctctgaatcgtcaccattttatcatcagatgatttcatgtcaacatggacctagaaatactgtctcaagagaaacttcctccagaacttcattcaagaggatc

SEQ ID NO: 201477 - DNA, 1000 bp, Homo Sapiens
atgatgaaaccccatctctactaaaaatacaaaaattagccaggaatggtggtgcacacctgtaatcccagctactcgggaggccgaggtaggagaatctcttgaacctgggaggcagagtttgcagtgagccaggattgcaccactacactccagcctgggtgacagagtgagactccatctcaaaaaataaataaaaatttttaaaaataagtaaatgtacaaagtcaagctgtggtgagtgctgttaggaaataaagtaagaagataggagtgctcatgtttggaggtcacgacaggcctccctgaagaggtggcacttcaggagagactgggacagtcaggaggtgagtggggcatcatctgggggcctcaggataggagtgaatttgagatggggcttgaggatgtagacagagacagacgagagagagaaacagtgagatagaaggagacaccgagagacagagatagagggggagacagagccactgacacctccttggaagggcaggatcttgctagaaggtgcgcagagatgtccccagggtgcctggcagaaggtccctcaagggggtctgctctcacctcaaggccttgtcccctgccctggggccccctctggccacacagctcacagggcactcctagtgtccgggctgtcttttgtcccaagggcccaaggcccccaatgtcccccgccggatcccactccaactctgtggaagtggggaggctactgggtgcccagggcccccagaccccaccaggtcctggccagtccgagtctccctcgacctccaagtcctggtccagcgtgttggcctcctcgaacacctgggtcaaaggacagaggtcatggaggctatgaggttggggcctgggttgggtggggggtatcaagatgggccctaccaggctgtagctgaccagctgggcctgcagctgccagagccgccggaagatggagtctcggtaagctcccagggcccgcaggatc

SEQ ID NO: 201478 - DNA, 1000 bp, Homo Sapiens; identical to SEQ ID NO: 114846

SEQ ID NO: 201479 - DNA, 1000 bp, Homo Sapiens
actcacacataattgttcactgcagtcagtggccatgggcccagggcaccccagggtgggcacagaggaaaaaaactgaaccacctcatgccaccgagggaggaaccactggtgggaggatgggaggggtgttagagaagtttcctggggctggagaccacacctgggctgaggtttatgcaaatagctgcttttgtctttctttttctaagaggttgtcacccaaagaataattattttatggagaccaaatataacagcattaaagaaagatcttatattcaaaacacgtatatgcccatcccacatccccagcagaactttttcttttggtcacacagccaatgacataaacatctccgtccttctgaacagcactggtgattttacattttagtggctgtataatattccttcctgttgaggtgggccgtcaggaactgttgggtgaatgaatgactagtgctttccttaggcacaggacgtggacactcacaaagcgcttagacccacacctctgtgggtgtcctgacaccacccagaaaggggattgattaaaactgtccctgttggggaaggagaacatcacacaccggggcttgtcatggggtggggggaggggggagggatagcattaggagatatacctaatgtaaatgacgagttaatgggtgcagcacaccaacatggtacatatatacatatgtaacaaacctgcacgttgtgcacatgtatcctagaacttaaagtataataaaaaaaaaaaagtccctgttggctcacacctgtaatcccagcactttgagaggccgaggcaggcagatcgtttcaggccaggagttcaagaccagcctaaccaacatggtgaaacctcatctctgctaaaaatacaaaaattagccgggcatggtggcccgcatctgtaatcccagctactcaggaggctgaggcatgagaatcacctaagcctgggaggcagaggttgcagtaagccaagatc

SEQ ID NO: 201480 - DNA, 1000 bp, Homo Sapiens
ctgatgctgcgcgcagagcagaatgacttcattcccctgctgtccacagtgactggggcccgggtaatggtgcacgggcaggatgaacctgcctttatggatgatggtggctttaacttgcggcctggcgtggagacctccatcagcatgaggaaggcaaggatgctgactgggaggcctggaaggagcgcctcagattgcagaggggcagcggggaggcatgggaggctggagagggagagcatgtggggtgggccttgagcatgtggaggtcttcaggagcaggaatgaggggcagaggggctggcactgggaagtaaagccctgcagggtggaccctgggggacaagtgctgagaaggcattcaaggcatgcttagggtttctggggatgctctgggcctagtggccttgaaatgagcagtgggtgggcatgggggtggctggaagcatgtgttgagagggcgaggccagtaggaggggctggcaggtgtgagatacaacctggaactgagggaaggcagagaacccagaggcacttgctctgtcctctgatctcttggtgtatgtgggttcataggaaaccctggacagacttgggggcgattatggcgactgcaccaagaatggcagtgatgttcctgttgagaacctttacccttcaaagtacacacagcaggtgaggcccaacctgattccgtggcagccactcccagccactgccctggctggccctgcaaagctggaggggttgtgtatgtgagagagagagagggaaactggggggtggtggaaagaggatggaggctctgtgcagagaactgctgagttcaggcctgaaccccctctcctctccaccctcctcccttccaggtgtgtattcactcctgcttccaggagagcatgatcaaggagtgtggctgtgcctacatcttctatccgcggccccagaacgtggagtactgtgactacagaaagcacagttcctggggtgagactcc

SEQ ID NO: 201481 - DNA, 1000 bp, Homo Sapiens
gaaccctagactattttaggagattccattctgtagacatgggttaagtacctactgtgtgctgggaaaccacaaagatgaataagattctttgtctttaaggaattcataatgtaattacaaaattagaaaaaatcggaacagaacatattctcctctggggtatgtatactaataatcttccagcttaaataaacagttaaatacaaagattattattgataatttttatttaaaaacacgttggaaaaacagacaagggtgtcttgcttcttccattttgctgccttatttgttattatgtattttggagttgtttttccctcatctcaggtaaaggatttatcggatgtgaaaacaacacagttagcaggagggtcaggtttcagctgggccttacatatttctgtataatccatttcagatcttaaagagctgcatatttgaaagcagaacaaaatgaagaaaaaagagaattaaaaaggtttattatacttttccaaattaccctgagaccactaaagtacagttacctaaagagttcatcagctaggaaaaagcagtcaaataaaatccccagctggaagagatatttagttgagtgagggataaaatgacctctgaattagccattacccaggcaggatgaagtcatgtgagggctggtaaaggccttcacccgggatgctaagcaggaccagtctccaggagaacaggaccctttttaaacttgaacttcctcctagggccatgattaaacttctgtagacgaacttgacttccactgcttcacaataggcccattatgtgctggagtaggccctgtggtttttaaggcagatctggtcgggttctggactaggtccaggctccagttctaacctggttcaaggcctgcccagacccagttctgatgcagtcactacttcctcccgcagatctcttcatgccgctgtaagctcggaggccaaggatgcggagtaggcttcccccagcgctt

SEQ ID NO: 201482 - DNA, 1000 bp, Homo Sapiens
ggagcccgctatctccggcaagatcatggagctgcaccacaagaaccaccaccagacctacgtcaacagctacaacaccgccatcgagcagctccaggaagcccaggcaagcaacaacattgccgctcagattgccctcaagcctctgatcaacttccacggcggtggtcacatcaaccacaccctcttttgggagaacttggctcccaagaacgccggcggtggtgagcctccttctggtgctctctccaaagccatcaacgagagcttcggtagcctcgagaatttccagggccagatgaacactgctctcgccgctatccagggaagcggctgggcctggctggttcaggacaagcaaactggcagcatcgccatcaagacctacgcggtaagttgatactgggtttctcgtggtggcagagacgtagttacttatccaagtcgcatttcagaaccaggaccccgttgttggacagttcaagcccctccttggtattgatgcttgggagcacgcctactagtaagtgtctttggtcccctcggttgttcttctccgctaacccgtacgcagcctgcaataccagaaccgcaaggccgaatacttcaaggcgatctgggaggtcatcaactggaaggccgttgagaagcgctttgcgtaagggttgagcgcatgtcgtattgaattgttggatataaccccatgtaacctgtagttgtgacaatcctaaattatgatacgtacttgctttcctatgtatgatttcgtttgcagcaatgaggtatactttgatcttttgatctagctggacgtctcttttctctttccatgcagtcatcctgtagtagaagctgaaaggtaccgcgttaattgacccacgggtcgaccgtttatggttgtagttggctgatagtcggaaccgccggagtcggcaaccgtccatctcgaccttgaatggatgaaaaataaaagtcgtgatggacatatccattatatcct

SEQ ID NO: 201483 - DNA, 1000 bp, Homo Sapiens
  misc_feature (766)..(766): n is a, c, g, or t
  misc_feature (770)..(770): n is a, c, g, or t
  misc_feature (817)..(817): n is a, c, g, or t
  misc_feature (891)..(891): n is a, c, g, or t
  misc_feature (939)..(939): n is a, c, g, or t
  misc_feature (989)..(989): n is a, c, g, or t
aatttgttgttgttgttgttgttgtttgttgttatttttttgagaagagtcttgccctgtcgccaaggcgggaatgcattgacgtgatctcagttcactgtaacctctacctccccggtttaatcgattctcctccttcagcctcctgaatagctgggattccaggcaccccatttttagtggagatggggtttcaccatgttggccaggctggtctcaaactcttgacctcaagtgatctacctgcctcagcctcccaaagtgctgggattacaggtgtgagccactgcacccagcgttttttgttgttaagacagggtcttgctctgttgcccaggctggagtgcagtggtgtgatctcagctcactgcaacttctgccacctgggcttaagccatcctcccacttcagcatcccaaatagctgggactgcaggcacacaccaccacacccagctaatttttgtattttttgtagagacgggatttcaccatgttgcccaggctggtgttgaactcatgagctcaagtaatctgctggccttggcctcccaaagtgctgagattataggcgtgaaccactgcatccagctcactcctcatttctttctagccccaaaggtgttgagtcagcaaatcctgcagcctttgtgtgactttgagcatcactttcccctttcagcattaaatatatgacctctctgccttattttagaacttactacatttcaataaaactttttaaaaaatccagacattgcctatgntcgnttataatcggcccttaaagaggcagggatttttctaaaatgacactntaaaatttcctcatttctacttcagggcctcttgaaacttcagataatgagagcagccaaccctgcaagtcagngctatagagtccttctgatcttaaaactgagactgaattcacatcagntttcgcttttacttgaaaaagagactcttaagtgttttggtttctttatncaggacaacaa

SEQ ID NO: 201484 - DNA, 1000 bp, Homo Sapiens
tttcctcagaagttgctcttacccagccttgcggggctgcagccagatctcccacgagtggtaatgtaacatgaaaacaatgagccacatcttcaaaattccaaaggaaaatgaccctcaacctagagtttcctatctaggcaagtattaatcaagtgtaagggcagaataatgacacttccagatgagaggtatacaaatttaccttacctgcacccatttacaagaagctagtgaaggttgtgctctttaaaacatgatggaatttaccaagaaagaggaggacttggcttaggaaagagaagatccagtagagaaggggagtgacaggaatctgcaggaaatgatgaagggcaatcccaggatgttagctgcacaccagagatgaggagacagactaggacccctgctccattagacctccaggtcccaaacaccaggtgagccagggccttggcctgtcttgcccatggctgatgaagtgttgtactctctatcaaaccctgcagtctgggccagctgaggactctccttggaacccaaagaagcagtttgtttccacctactcccaagagctgaaggtaagctttggtgatcttagaataggaaaatctgggcagcccgttctcttggccctagctctcttgggcctgcccagaagagctctgccagatgccatggatctgagggtttttctatctcccaggatgattcaggacctcacccactgattgggcccttgtatattcaagggagctgaagctggggtcctttttctggaagtctttattcaaaagtggtaatattgccctttgctcagctggatttgaataatttgctactcagtttttcaaagctgaatatattatttaaggatactattatgaaatgaatgtttgtattccttcctcccaaatttcatatgttgaagccgtaacccccagtatggctatatttggagactgggtctttaaggaagtaattaaggttaaatgagatc

SEQ ID NO: 201485 - DNA, 1000 bp, Homo Sapiens
cttctactcgttttttatgaagtggaggtcgtcctttcttattccttactgatgaggttttgctgctgctacttccactgttcacagacattctatcatcttcacccccagtgactaatgaatttctataggagatgagtggaagccatacatcctccctcctttccatcatctgctcggtaaggaatttctctaggtatgaatgactagaaacacaatagaaacagcagtgattttcagagaagcagttcatacatcacttactttttcttaatctgaggctctctttctgcaggttctgaagaatacctaaggacacacattaaactattaacagtggtcacctttggaaagagagggactgaggagttaaggttttgtttcacttattcttgggatactttaaagcaagtgagtgtattacctaagggtgtgtatgtatgtacggtctttcctatatttcttcctttgcttttaaacaccaatgttaaaaaaaaatcagaagtttagctcaaaaagattattgagttttcttataaagtgttcaagccaaagcaggatttctaagatggtggagtaaggaggctggcatgccctctttccagcaaaacaacattttaactagtaaaaattataaaataccgtaatttaaagtatttgccaattctcttaagggcatacagcaaatggagaaatattcattcaagaaaatctggccgggcgccgtggctcgcgcctgtaagtcccggcactttggggggccgaggtgggcggatcacttgaggacagcagtttgagatcaacctggcacaaccctatccctacaaaaaaaattagccgggcgtggtggcatgcgcctgtggtcccggctgctcgggaggctggggcaggggggtcgcttgaacccgggaggcggaggttgcagtgggccgggaccgtgccgctgcactccagcctgggtgacagtctggagactccattcaaaaaaaaaaaaaaaaaa

SEQ ID NO: 201486 - DNA, 587 bp, Homo Sapiens
aaaaagggtaaaaagaaaaaggagggaattgtaggaaataacctatatgtgattacctattttcaattctaagtggcttggtataggtttaggcaggctacctggaaataaagaaataaagaagcagaatgtactgagccaccccctccaccttccttctttccctttcacccagtggccaggcatctatcggtgggggccccctcatctaccccttccccactccacagagaaatttagtttaagctagcttgcaacatagataattgtaccctttcttatcagctaagtgcagccactagagccgtaagtcaaatgtttgaaaaatcctgagagtcataatgcattgtatgctgcaataaaatgcagcagaaagaccctaaagaatgtacttgaagaacaatcaataggtgatgtctaggaagattgtggaaggctagtactcagcctatgaggaactgagggagggacctgtgcactagggcgtaaattgcttgttgaaactgtgctgggtgtgcctgcatgccagacacccgatcttgcaagaccgtcattaaaagtctcactttcgctgttcaaaaaaaaaa

SEQ ID NO: 201487 - DNA, 436 bp, Homo Sapiens
gaatgcactagttactgggagcatggttgtgataaagccaagccgtccctcgggtttggctcactgcccttgaccttctctgccctgtttgacacagcaaatagtcctcaccagaagcaggtcagatgccagtgctatgcttgcacagcctgctgaaccatgagccaaataagcctctttctaagttacccacagcctcagatatgtagcaacacagacagactaagacaccaagcatgatggaaaactgggttatgggcaggactgcaagtactggttaggcagatacctgtatttctcttcctaactctcagaacgtgttctgtgtcacttagggcaacttatgccctcctgtgtgaaaatctccactcccaatgtctgagggttcctcagagtaagataaaatattaaaggaccaattgtattaaaaaaaaaa

SEQ ID NO: 201488 - DNA, 334 bp, Homo Sapiens
gagaggtttgcactgttacagatgaaggcaacatatttacatatgtacatgtatatacatatatatatattcaaaaataacatcggctctttggggtgtctgtttccttggttgtctcacgccactggaacattgaacccagacagaccctaggatgtgaggttcctgactgcaccttacagaccacagagccacgtgtctatttctgtagacctatctccttagatttgtacatgcattttttgcggacttgaactttgttttctgaaattagatgccatttatgatgatgtgatgtcaatcaaataaagcatcattattttcaaaaaaaaaa

SEQ ID NO: 201489 - DNA, 1000 bp, Homo Sapiens
cctgtcctccaccttcttctttacacaggtcaattgcaaatgccaaatccattgctgagaaaacagcatcagcatctgagctctgagacgcgaggattagttgccgcaaactctcatacattacaggatcaaaaaagcaaaatcatgccaattgacttttctaccaagcaatactttaattacatgtctattcaatgtgataggacatagttcattctgtaacagacatagtccaagaatcctgccaatgtttctgaaacaattcaaccttgcttctgtgttcttgccaggccttggagtataaaatcctcttttcccaggttggtaaaacaaaggggcattgtcatcaccatcatctgtatcatctaaatccatatctactacacttcgactagagccatggcgctttcggttttcctgctgtaccttttctgaggagtctactaatccaagatccaggatactatcagctccattttccctaaaaacaaaaagcctttcacattccagataacggagacttctagaatttagcgtataatttaaatttaaaaggacttacttacaaaatacattcaagttttggagtcaataaatatccaatgcacctgctagtactaatgcagtatgagcagagaagttggtaatacaaatctttaaaaaagtgtatcactagatccttcatgtatgattcaagatagtggactaaaggctccctgacaaaatgaatgtggtcttcataggggtgctggaacacttctacaatgctcagagggagcactacagaagaacagaaaaatgttcagaaagcaatccaaattcactagcaaattctctagcgaatttaatgattctagaacaccaataaattcactgtttactccagaaagccaggtgaaagctgtcaatattgtacattggttgcattcaacagaaaacatgactaaatacgcaactcttaacatatactcacaaaaaaaaaaaaaaaaaaaaaaaaaaa

SEQ ID NO: 201490 - DNA, 1000 bp, Homo Sapiens
tgccttcctccttagtaggaaaactgctaaatttctcaccattaaatatgatgttactggttggggatctttggtaaatattccttaccaggttgagaaagttcccctccattccttttttatggagaattggagaatttttttttttttttttttttgagacggggtctcactctcacccaggctggagtgcagtggcgcaatctcggctcgctgcaacctccgcctcctgggttcaaccaattctgccacagccccccgagtagctgggattacaggcgcctgccaccaagcccagctaattttttgtatttttagtagagacagggtttcaccatgttggccaggctggtcttgaactcctgacctcaagtgatctgcttgcttcagcctcctaaagtgctaggattacaagcatgagccactgcgcctggtctagtttatggaaaatttttatcatgaatgggttttggattttgtcatatttttctggatctattgatgtgatcatatgatttttcttgagtttctttatgtgatagattctattagttcattttcaatatctgaaccagccttgcgtatctgggatgaatccctcttgatcctggtgtataattctgtatactattgtatgatattggatttgctatatactttattgaggatttttacatctatgttaattaaagacactggtttgtagttttctcgtgatatttttgtctggttttggttttaggcctcatagaatgagttgggaagtaattccctctgcttctaccttctgaaagagtttctacagaattggtatcgtttttagaattcaccagtgaacccacctcagtctagcattttctgtttgggaaggcaatagattcaatttttaaaatagatacaggtgttatttggagtatctatttcttctggtgtgagttttggcaggttgtgtttcaaggacttcttcgtcatgtaggttatcaaatttgtaggcatacaa

SEQ ID NO: 201491 - DNA, 1000 bp, Homo Sapiens
atgtcagtactcatttttttcagagatataacactgtcgagtgctaacacaaatctctaaagtaaccaagtttgtataagttcatgatgttcttattgtcagtgtgttctttttagattttacttgtctggcccttaaacattttggtcagacattttacccatttagctctggtggtctctgaagaaaatgacttttctgagaaagctgtgtatgctaagagcggatagttatgtatacttgccttttatttgtctttacttgggagctaagactcaatgtttaccaaactcttcaaaataaaagtgcaaattttatttaatagtgggattccagaaaaacgtaaaactggaagcctttgaataaggaaactgggcatctgtggcctgatttaaataaagtagatcttaggggttatagcaaataaagatgtcagtggaggttttgtgactgagtagaacaaagcaggactgtgttaacttgaggtgtagtgttagcttctcaaaaaagtcaaactcacttcctgacaagaatccttttgtgtctgtagtggcttcagtattgaactggcatctgccctcactgtggtgattgcatcaaatattggccttcccatcagtacaacacattgtaaagtaagtgtaatgccaatgtgtgtctttcaaatggttcttctaatatgtagggtttttagttttacttctctgagctttgatttagaaagttttgtgcagttggagtcttgaagagttcataagttatttcttgtgtttattcttatttaagcaattaaatagatattctccccaaataatagaaacattgttttatatacagcttactgtagtttctggctactaacctcttcctttgttactttatcctccctcattgtagtctctttataataattttttttttaatctcaagagtcatttctacttggcaccattatgttttatttatttatgtatgagttggagtcttgctgtgtcacctg

SEQ ID NO: 201492 - DNA, 1000 bp, Homo Sapiens
  misc_feature (785)..(785): n is a, c, g, or t
  misc_feature (793)..(793): n is a, c, g, or t
  misc_feature (823)..(823): n is a, c, g, or t
  misc_feature (841)..(841): n is a, c, g, or t
  misc_feature (888)..(888): n is a, c, g, or t
  misc_feature (922)..(922): n is a, c, g, or t
  misc_feature (952)..(952): n is a, c, g, or t
  misc_feature (973)..(973): n is a, c, g, or t
  misc_feature (982)..(982): n is a, c, g, or t
  misc_feature (988)..(988): n is a, c, g, or t
  misc_feature (992)..(992): n is a, c, g, or t
ctgtcatttcagtttttcttctcgattaatggctttattgttacatttgactggtttaaaatgttggggtcatctctggcttctttgtattactgtgcacactcaggtagagcctgtatgttcatttccctttgacatgttcttctagtctattcctcctccgacttctctaattgagtctcctttgtcagactactgtgataacttcttaatggggttcactggcccccacctcaccttctgtttttcaaatctcaccagttataggacacttctgaacatgtcacactcagaattgttgatgtcttttgagttcaacctatgctaaagtgcactttttagcatagaattaacagcaattgatatttggcttcatcctgcttttctgactggattgtctaccataaccttttatctcctttttgctttagccagtccggactgctacttttcctgaatatggctggaatgtcccactgtatctgtttcaccgcatctatgagtctaagtcctatcttatctattgcacaaatatatcatgcctactatagaccaggtattgcccttgacactcaggctaaaaaggtaaatgacagggccgggcgcagtggctcacgcctgtaatccagcactttgggagagcaaggtgggcggatcacgaggtcaggaattcaagaccagcctggccaacgtggtgaaaccccatctctactaaaaaatacaaaaattagcctggcgtggtggtgggcacctgtaatcccagctactcgggaggctgaggcagnagaatagnttgaaaccggaagacggaggttgtagtggngcgagattgcaccactgnactccaacctgggcaacaagagcaaaactctgtctcaaaaaaaaaancaaacagtaaatgacataatcagaaaagactaanttagaacatgatgggaagtggcagggcatntctggagagacaactggtttntgaacagtncttatntttnttaagcta

SEQ ID NO: 201493 - DNA, 1000 bp, Homo Sapiens
cccctttgcttccttgtggcaaaatcacatgtcctccttgattcagtccctccttcttcaaagctactccactgttgatatgtggaaaatatcttgtagcatgcagtaaagacacagctattttccaagtgcaaagatttatactgaatgcagcctaacacagcttggcacagtgttcaagctgttactaatatgattttggcatcactttttaattctgactttgcccttaacgcttccctcaatctaatccttgacttgcctcattaaaggggtaaggattagaccatgctattttctggacctcctgtcttattgaacatatttgtatcattgacaggtacatcttaccttgagcccgggaaataaatgaaagagatggtcctttcagtttgcccttgccgggtcttatatttgtattatcagtctggattgttgggcactttgtttcagcccagattggttgttttctatggcagttctgttctttcaagcccattctagctggcatgcaacttagccgctaggcaatcatgtatcatctgcttcattgcaaagctcaggtatcagacacacctgggtttgaatccttgccctgttatttacaaatagtatgatttttagctgagttaatctctaagcctagtttcctcatcagtaaacttagtatgtagtagtacccacttcatcatatcataagattcagcaaataatcctcctaaagctttcacatatggtgaaatagacattggatattattttatcattagctttgaattcgttaatgtattatttctaattacctagcttggcttattcaccaacagtcaagtccttatgcttacatattctcatttctctttgtagcctgtgttctctctatttttgtctctgtctccttcatttcagcttaaatggataagtgtttggtgttgccatttacatctgttttgcttaggtaccttcctcctaggtaccttcttcctaggtacctgaattc

SEQ ID NO: 201494 - DNA, 1000 bp, Homo Sapiens
ggggatggggaagagggggcttcacttttgccgtcagtcatagtgaagccatggacattttaatacctatcatgttgcccctctggagaccaagggaatgacagagatgagtattatagacctgtaattagaaataaggcaattttatcctttttttcttcaataattttagggaaattgtgggaaagagaaggtactgtttctaagactctacttacttcaagggatccgaaactatcacagtggaaatgatgtagaggcttatgagtatcttaacaaggtaagaaaagtaaagttgtaaccaattttcacctccttttaaaaaacattcccagaagttaaggattttaacttagtagtttgtgacttgtgagaaacatgcctgtgctttctccgtgcacaggagatgttgaaccagaaacatatttgtatatgttagagtacagccagatgctgtaatgagacttcaaaaagacagtgactttaattggatagaagtttatggctcactcatcttgccgtctagaggtgagccaggccggagcagtgagcagcccgccagcctcagcgaggcgtcctaggttgctcctgtcagtgcctcttccagccagcagagggggcaagagagagtccagagcaggccactggagagatgaccccgcagctgcacccagcgctgtggctgcatgccattgacttcgacttcactacctggctacacccagctgcaagggagggtgagaaatgccacgtgcacagctgaaattcgggggcttttgttgcaaaaacaaagtggttaccagtcacttctgcaacacccagcctcttacctcgtgttgtgctgtggctaagttatgtgagtagaggtagtgttggtctgtttccatttgtacttgttaataacaggcctagtttagagattttatccaaaatctgatgccttttaattcacattggatacaatctaatttcttttaggctttcactttgtattaagctt

SEQ ID NO: 201495 - DNA, 1000 bp, Homo Sapiens
aatagtctctcaggagattgtactttggactaagtggaaggataaagcttcaacaatataatacccttcaacagcttaagggtattatatttgatcattagagattttaaaaaacatatgagcagtcccatttaagcttataagaatcttaccttaggccaggcgtggtggctcactcctgtaatcccagcactttaggaggctgccggtggatcacctgaggtcaggagttcgagatcagcctggccaacatggtgaaaccccgtatctactaataatacaaaaattagccaggcgaggccgggcgcagtggctcacacctgtaatcccagcactttgggaggccgaggtgggcggatcacctgaggtcaggagttcgagaccagcctgaccaacatggagaaaccccatttctactaaaaatacaaaattagctgggcatggtggcacatgcctgtaatcccagctactagggaggctgaggcaggagaatcgcttgaacctgggaggtggaggttgcggtgggccgagatcgtgccattgcactccagcctgggtgacaagagtgaaactccatctccaaaaaaaataaaataaatcaaaataaaaataaagaatcttaccttagttttttcatccacaactctgagtccatctgctgagacccacagaactgctttaactgctttctttccagtcttttaagagaaaccaaaaaggggagggggagatacacatatataatattaaaaaaatgtcatcttccacagaaaacactgactctgccttccaaaagtcacaagtacagatggagtccaagttcaggagtggtgcccaaacccagatactcaaaccaaactgcagaaacattcaggaaaaaacaagccaaagccattattttagaaacacaacgcaaaacaataagataaaattaagtaaaagggaagtaacagatggaataaaaaccaagatatcacattccataaagggcaaagaattc

SEQ ID NO: 201496 - DNA, 1000 bp, Homo Sapiens
tcattttaagactgaacggacaggttgagcatgaactacaatggatccaaaggaaacttgctagagtgaggttaaatgtccctgcactaaaatgcaaacaaggctcttgttctcagccttttgatttttctaactgctttttcagagatttctctcatttaattctcacaacaagcctagaaggtggctactgttatgaccttaattttacagaggaaatggcatcttcaagcacttccacacctgggctgtggccaagcggggctctacacccacagcccatgctcatcacctctgcaacctgcagcctccgctatactgttctgcttctgtgtacatttcaaatcaaatttgcagaagagcacaaagaatctgaacagtcattttagcaaagctaaaatgtcacatgcatatgatgaactaggtgcatacagacatggagggagccaaaatcagtctcatttgttgtttttctttctttctttctttctttcctttttacaaccccaaaaagcaggaagagtccttctcttttggtgcatcatgtaatgcatgttgtaattagttatttatgtatctaagtccttcatttagaaaacctgtgtatacttacgtcccaggagccgtcacctgtgccttgtatcattttatccttaattggagtttcggtggcttgtcatttagtttctttcacgtcacaaaagaggagtgtcttaggaagagtggagagactgagctcacacacaggcaagtagaaaatcttcaagtgttctggcaacacttggacactcccaacactccgcagtgaaaaagccaatatttgccaaatttctaagctgtgcttatcagtcaaactgtttttttcaccccccgctccccccgcccccaccctttatccatcttttctttccttaacaaggttaccaccaatagctgtttatggtactagtgggatgctaacagtacacgtttaaaatgtaggccaacagattttgaagct

SEQ ID NO: 201497 - DNA, 1000 bp, Homo Sapiens
tctgcatgtttctctccctgtggcactgcctctgtgtctctctctccccttcttcatctccgtgttctgtgtgtttctctgtcccactgtctctgtctgtctgcctgtttgtcgggagtgctctgtctcagggcctggtgaggtgagcaagcctgggtgaggtgcccgggggcgtggcatgtagggaggtgcttcctctttggtgctgaccctgcacttgcttaaatgtgtgccttgggcaccccacctgctttcccctgctccaggcccggcttttctctccatccccctttccctctctttgcctgtttctttgtctccctgaccccgtcttggagctgagtggttgtttctctcttggtacgtggtctctggtctctgctcaccctaaacttcacagcccgatcttcctgcctccctgtgcctgggggtgaagttggttgcccggccctgcatgacccctcagtccagcactcaggatctccctgtccaatttaaaattccaggagagtgagtacagctcggctcagccattcatgcctcgtccagtcagctgtggcaggggcttgagagcaggctgtctgaggaggggtctgggtgaggcggggctgctctgcacgagggccctcttggtcctgagtccccaggtctctccatccaatgtgaagtgtggcacagcagcacccctcactgccaggacccggatggccttgcccttgggccttcctgggaaactgcaggaacacagagccaacactaagtttgagaacagggaaaagcatgctcccctcccaccctcagcccgcatctcatggttctttaaatgtattgagcgtcaagctgcctcctcttcaaacatcctggttcttccagctgtatctgcggaaacaaatcattatcacccagtttggggttctggtttcagatgtcagagccatgtgtggtacaaatactctctgccgtctttctcccacacatgggcaaatgctttagagaattc

SEQ ID NO: 201498 - DNA, 1000 bp, Homo Sapiens
tggagttttactcttgttgcccaggctggagtgcaatggcatgatctcagctcactgcaacctccgcctcccgggtccaagcaattctcctgcctcagcctctgagtagctgggattacacgtgcacaccaccacacccagaaaatttttgtatttttagtagagacgggggtttcaccatgttggccaggctggtcttgaactcctaatctcaggtgatccacccgccttggcctccaaaagtgctaggattataggcatgagccacagtgcccagccaagagttatatttttatatactaacgataaacattctgaaaatgaaagtaagaaaacaatccaattagcaatagcatcaaacataataaaataggaaaaaattaacaaaagagtgcaagatttgtgtactggaaagtataaaacattgttgaaaaattaaaggggatctaggctgggcgtggtcgctcacgcctgtaatcccagcactttggggggccgaggtgggcagataacgaggtcaagagatcaagaccatcctggcttacacggtgaaaccctgtctctactaaaaatacaaaaaaaattagccagacgtggtggcaggtgcccatagtctcagctacttgggaggctgaggcagaagaatggcgtgaacctgggaggcaaagcttgcagtgaaccgagactgagccactgcactccagctgcgcgacagagcgagactccatctcaaaaaaaaaaaagaaagaaagaaaaagaaagaaagaaaaattaaaggagatctaaataatggaaaaacatcccatgttcagtgattggaagacttaatattgtaagatggcaatactacccaaattgatctacagattcagtgaaatctgtatctaaaccaacccgccttttttgtagacattgctgatcctaaaatttatacagaaatgtgggacccagaatagccaaaagaatcttgattaaaaaaaagaataaagttagagaattc

SEQ ID NO: 201499 - DNA, 1000 bp, Homo Sapiens
agcctagccaacatggtgaaaccctgtctctactaaaaatacaaaaattagctgggcatggtggggggcacctgtaatcacagctactttcaggagacagaggcaggagaatcgcttgaactcagaaggcggaggttgcagtgagccgagatcgcgccattgtactccagcctgggcaacaagagtgaaactccgtctcaaaaaaaaaagaaaaaagaaaaagaaaaactggctcctggggggcctcctgaacatgggagaaaggcggctcaacagcctctgtgccccatagccatgtgagtaaatctcagcagagaaatagtaataatgacagtcccttatattcctcagccaggaatacctttatttatttatttatttatttttatttttgagacagggtctcaatctatcacccaggttggagtgcagtggtgcaatctcagctcactgcaacctccacctcccagactcaagcaatcctctcaccttagcctcccgaggagctaatttttaaaattttttgtagagatggtctcactatattgcccagtctagtctcacactcctggtctcaatcgaccctcctgcctcagactcccaaagtgctgggattacaggtgtgacttaccatttactcagcctgccagggatactttcaaagcactatcatgattattatcttaccagatcctcactctggggcggggatagggaagacaggaattaaaaaacaaatgcaaaaaaaaaatgtcctccaggctgggagtcaactgaagccagaaagccagggcaagaacattttgtaggttttgtattttgccagatttcctccctgttcccagaggttcacctcagagcagcagagccttgctcaatctctgcccatccaggaagaaactgaggcaaccctggcaggacccagagtggaaacacagctgacgcctccatcatggccccctgtaacagtgcaacactcacaaacaaaggaagggaattc

SEQ ID NO: 201500 - DNA, 1000 bp, Homo Sapiens
gaaagccatggacagaaaaaaaaataaaattcttttccatcattctattttcaaagaggtcttggcgttttcctacatcttttgtttagaggggaaaaaaaggtttcatttgctgccatttcagaaaggttatgctatcctgttttttccaagcagttgtgagtcaggaactgcctgggcagtgtgcatcaactttgtggccgaaccattacagctgtcatatccttggctgatcgtctctcccagggactactgccctccacttagtgtctgagggtaagcctagaagggtgctgctattgggtctatggaagcttatctatcaaaggagcaaacatccagaaaagtgtttataaagcaaatgtattgcctctgtttagagatttgcccagctgttccagttttaaacattaaaaaataaactcagttgccatggcaaaaatagaatgcacagcttacttataattttccatgcagtatagcataaggatttttgacttgaaacaaccaaagaactcctccttaacgagacagttcaaattcctgaattagtatttcttgactatcaacttaaagaatggacttcctagtacaatgttgcacttatttttttttctgaaataattctgcctgcatgtatgtgttgtgttttagcttctccccttaccccaccccaaagatcttttcttcctaatggttaatgtctcaactcggttactgtttactatcagatggtttttcattagtgaatttagacctctttgagaaagcttgtatataaaaagttaacagatatattttatggaaaaacccatcttattttcaaatatatttaactgctgttatattttattagaggaaggttgtaaatattttctaggagttctattgtaaagaaaagtatttttgaaaaaaattaatgtaataaaaaggaaaacatttttaaaaaaaaaaaaaaaaaaaaaaaaaaaaaaaaaaaaaaaaaaaaaaaaaaaaaaaa

SEQ ID NO: 201501 - DNA, 1000 bp, Homo Sapiens
tgttttggcaacagtgcttttcagtgtttggggttagaacaagccacatctggccattttatgttatccctctaatctctagttcttaaatttcagatttaactgaaaatagaaagtttcataaatggtaatttttaaatgttagaaaaaaatcaaagcacacatttacataccttttccataaaaaagtgtgtgtgaaaccatctgcaactccactggttaacttacacatgcgacagtttgtgtttggaaaacttcacccaccctctttatttcaagaaaccaaagacggagagaagttcagtgaattaaccaaggtgaaatgacagagtcagaattgaactgaatttctgactgaaaaactagttctcgctccattataccatgttctaatgagctaatgagtcaacagttccctggaatacctgttttcttctttaaaaagagaaagagctgtgatactgagagctacctattggcataaaagaatatgaaggacatacaggtaaaatgaggtagactggatcaatgtgggtcagctacataagcccccatagccaaggagggaacatgtatgtaaaattctcaggcttatgagaatcacaactgtatgtctataggacatcctaatgcaataatgggaaaatgtgataactgaattttatctacatgtatagaaaacatattttgggccgggcatggtggctcaagcttgtaatcccagcactttgggaggccgaggctggcggatcacaaggtcaggaaatcgagaccatcctggctaacacggtgaaaccctgtctctactaaaaatacaaaaaattagccgggcgtagtggtgggcgcctgtagtcccagctactcgggaggctgaggcaggagaatggcgtgaacccggcaggcggagcttgcagtgagccgagattgcgccactgcactccagcctggatgacagagccagactccatctcaaaaaaaaaaaaaaaaaaaaaaaaaaaaa

SEQ ID NO: 201502 - DNA, 1000 bp, Homo Sapiens
aacagcattcttcatcttcaggtaggcagggcaggttcactgggggttggggtagagctcagcactgtgacacaggcagtacttccgtagaatttcatttatgtgactgtacctaccccacagggtgatataaggattaattcctatttggtaatttactgtgtgtaaaatgccttgagccccttggaggaaagtgctatataaatgtaaaataattattataataataataacctcgactatttaactgatcagtgaattagccagaagatttaggctgccaagggacaaggctgaaaccattataagtagaaacactttacatcatcatatctcaaactgttatcatgaaaaagggaaacaaagggtgaaaattaagataaatccatgttctcaactgatttaaatgacagaggatcactagtaatgattcatgaaagccaggaaatgcaaaaatgacagctgcattgtaattctaactcagccacatgtcctgaggttttgtacactttggtcttttatttgtagggaaaatatctcatcagtgcaacatctaaaatttagcattatgaaggcacttgactatgcttttgcttagttgaaatacgttcataatgtatcccctatttgtaggtaatgatttttctacctaaaaagcattgacattattctatgaagttccaggtaaattttgaatcggttgcttacaatctgcctccccacatacacaccctaagaatacactctaacaaaacaatggtgtatttctagatctaaatttaggaaaccaaaatatatagaagataccttttcttcccaggaagaaaatgctttggtatataaactcacatgagctcaaccgtcttcagctcttacattatttgttttatttatttattagattcatgaagattcttctaccaaaagctcaaggggctgaacccagaactttcatatattgaatgtgaatcacttcttaaaccacagaaaaaaaaaaaaa

SEQ ID NO: 201503 - DNA, 1000 bp, Homo Sapiens
aagtttaaaagctgtcggagaaaaaagggaacaatgatgagaatacatgactagaaaaaaatgcaatcaagaagacagtcttaaatatctttgaattgctaaagtaaaaatactgccaaactaaaattctatatccagtgaaaatattcttcaaaacgagtgaaatagtcgtttttggatatgtgaaagttgagaaaatatgctgtcagaagacctgcactgcaaaaagtggaaattcttcacattgaaggtacatgatacctgcatatatctacatgaaagaaagaaaaatgccagaaatggtaaataaaaattatgtattttctcatttcttaaattattcaaaatccaattgactgttgagaatgtgtttaaccaaaaacaatttaaaacaaaaagtaaaaaattgtatgatttaggacatgtagagtaaaatatacgataattgtagcactgtatagaaagacaaatagaagtatactttattttttttccccagagagggtatcactctgtctcctaggctggattgcagtggtgtaatcttggctcactgcagcctcaccccagtctcaagcgatcctcctgcctcagcctcccaagtagctgggaccacagggaggtgccaccacacacagctgattttttgtagagatggagttttgccatattgcccagggtgatcttaagctgagctcaagtgatctgcctgccttagcctcccaaagtgctgggattacaggcatgagccactgtgcgtggcagaagtatacttttatcaggtgtatacattatacaattagtggtgtgttattaactttagataagaatgcatatccttatagtaactactaaaaacaagtaaaaggtacagctgtaaagccaacagaagagatgaaatggaatactaaaaaataattcaaagaaggcagaaaaagagaaacagatgggacaaaataagtgagaaaataaccatgatcatatactccaacccaaccgt

SEQ ID NO: 201504 - DNA, 1000 bp, Homo Sapiens
cggaaaacatcatttctttggctgtgactttcttggagcaggcagtggtgagcaaggagtgtgtccccgtggaccagttcatggagcacctgcttcccagcctcctgagcctcgcatcagatcctgtgcccaacgtgagggttctgctagccaaggccctaaggcagatgctgttggaaaaggcgtattttagaaatgctggtaaccctcatcttgaagtcattgaagagaccatcttagcattgcagtcagaccgggaccaagatgtttccttttttgcagccctagaaccaaagcggcggaatatcatagacactgctgtactagaaaaacagaattaactacttccgtgatgagttgcaatctgattatttcatgcttggcacatatggcttaccataacttgaaggggaactgattgtattataccagctgggggagattttggaacctttcatactgtgcactcagtgattgacgccttttccatctgtaccccgaagggactgaacctgatgggggctttttctggatggctaggccatcctgatcaagcctgatcagtaagtctgtggaaagattgcagaccaggtggctaactgggcactggagcctctgaaccatcaggctgtctgccagcaagttcttttctccatggcagactgtatgatctgaagtccccccaaccctctccaagtaaagtagtttattagaagctcttaagtctttaatagacctgcatatttccttcccttatgatttcctataaaatatagtttatggtgttatatttttaactgaaatactgtacatatgtaaataactcttgacaggaagaaaatatattaatgtagtatttgccccctatcagtgagctgaacaaatacatcatttaaatctatgctgcactttgagttgctacaaatatggttcgatttgtttatttttgaaaaatgtgataaagaaatctaaagaatgaaaaaaaaaaaaaaaaaaaaaa

SEQ ID NO: 201505 - DNA, 1000 bp, Homo Sapiens
aaagaaatctaagaatttaacacactctatacaaaacaacacaacgaaataatatttttctgaaaatgatgtaattggcagcctgattttacccagaggaaaattataaattaactcacagaagcagtgtggtagggtgggtaaaatttaaaaagacataaaaagcattgaatatagcaaaccacagacccaaagtcattaagttcatgacttccctactaccttcaaatctcatcttatgccactctagtctttttttttttttttttttttttttgatggagtctccctctgttgcccaggctggagtgcagtggcacgatctcggctcactgcaacctctgcctcctgggttcacgccattttcctgcctcagcctcccaagtagctaagattacaggcgcccaccaccacacccagctatttttttttaatttttagcagagacagggtttcaccaccttggccatactgatcttgaactcctgacctcgtgatccaccgcctcggccacccaaagtgctgggattacaggcgtgagacaccatgcctggcccaccctagtctatctttaatgagttttctgtatatttcaagtgtgcctacctgcatgcgtgtttgtatgaagactaagggaactagaaatgcaccaggcaatctttttctctattctgcatccttgatcagttctagattaaaagagaagaaatgattgctattgaaaatccttctgaaaaacaagaattctcaattttcttactgtcctttgagtactttctctcttttatagcttccacattattttatctttcattttaaagacacattaaaatattttccccttaaaagtagtctatatagagacagactgtacctttagatgaatgttttcaattcacataaattttcaggataatatttaataacttactacttcattgagatagtgtcagatggtttaagttgtcaatttgttttcaacttttatcagggacaagct

SEQ ID NO: 201506 - DNA, 1000 bp, Homo Sapiens
gatattatttgaacttggaatttcttacattcgcaattcaactggtgagagaggagagttaagctgtggctgggtgtttcttaagcttttcgatgccagtggagttcctattccagcaaaaacatacgaactcttcttgaatggcggcactccttacgaaaaaggtgttgaagtggacccttcagtgtccagaagagcacagggcagtgttttccgtcagatgataagtgtgcgcaggcagcctcaacttctggtgaaacttcggtctctgaacaggaggtccagggccatgctcagtctgctgccagaaaccctggtggggagtatgtgctctgctcacttactgatattttaccgacaaattcttggagatgtgctcctgagagacaggacaaacctgcaaagtgccgatttaatcagtcatcccgtgctggccaccttccctctgctcctggagcagcccgacgtgatggatgctctcaggagttcctggtctgagaaagaaagtacactaaagcgagcagagaagagagacaaagagctcctaaaggctgagttcctcctggtctaccatgactgcgtgctccctcttctgcactcgacactgctgcccccctttaggtgggccgaggaagagacagaggctgcaagatggaaagccattgctgacttcctcaagcagagccgggagaacgagggttccctgaaggctctgctgtcaccagatggagttcacaaaccatttgacctttcggagcagacctttgacttcttgggtgaaataagaaagaactcaggctaatggcgaccatgctccgattcccactggacccagggagcttccaggaagacttgcctcaaacaactgagccaaagacagactggttagaacgtagtcatatgcttttgtgtgcaaataatattttcaaagaactaataataatttgattgagtgtaaaacaataaaataaattttataaggaaaaaaaaaaaaaaaaaa

SEQ ID NO: 201507 - DNA, 1000 bp, Homo Sapiens
gctgcaatatatatgtaaggattagggaaagacataggaggtaatatctacaaggacagagttgggattctgtagttcaaagaagtctattggagatttgttcaactcagatgtaggaaacaaaggaagataacaactgaatttgggggacaaagactcagccaagagaaaactatagttgtcctctctacaagacaataggcagcatcttaaattatgaaaaattttacacagatatttttctaaattatttttacaattttctgtatttttaaaatgatcatgtttttgactactaaagaacctatgggacttttggtgtatggttagtattttggaagtgtctagtcgaggtgctagaataaagggatataaaatttgcaaagctggacaaataaaagtcattggaggcaagtagagatgggaaaaaattcagaacagcagaatgaatcattctacttccatcatgctattactgaataatttaatttgcttgcattgaattctgtgcttcttcctgccctttaccccgaatcttcaggaaggagctcattgccaagttagatcaggcagaaaaggagaaggtggatgctgctgagctggttcgggaattcgaggctctgacggaggagaatcggacgttgaggttggcccagtctcaatgtgtggaacaactggagaaacttcgaatacagtatcagaagaggcagggctcgtcctaactttaaatttttcagtgtgagcatacgaggctgatgactgccctgtgctggccaaaagatttttattttaaatgaatagtgagtcagatctattgcttctctgtattacccacatgacaactgtctataatgagtttactgcttgccagcttctagcttgagagaagggatattttaaatgagatcattaacgtgaaactattactagtatatgtttttggagatcagaattcttttccaaagatatatgtttttttcttttttaggaagatatgatc
